United States Patent Application Publication US 2005/0153317 A1 - sequence listing, part 6

SEQ ID NO: 23170 - DNA, 599 bp, Chicken  19866894236187_1
  misc_feature (1)..(126): n is any nucleotide
nnnnnnnnnnnnnnnnnnnnnnnnnnnnnnnnnnnnnnnnnnnnnnnnnnnnnnnnnnnnnnnnnnnnnnnnnnnnnnnnnnnnnnnnnnnnnnnnnnnnnnnnnnnnnnnnnnnnnnnnnnnnnnctgaacttgtgaactgcacaagtatgcctgaataaactctgctttggttcatgttaattgaaactccacatggactttgcagaatttccacatgcatccaagtcgcctgtgaagtatcacttcccagcagatttttctttctttacctacagctgtctctgctcagaacagagmgaaaggagaaactgtgctttctggatgatttttaacataatgtcatagaagtcaactgtgttatattgagaacacttttgtatcatatagaaactccagtgcaattgatcttctgtcagagacatctcacactgtgtttctccgctaagattttggtgtgagatagccaggtcttagtggacaggtctatgctctgggaattgctagaacatgtcatacactgaaggttatattttaggagaatttaaatccaggcttttttagaaatgtctaatagcttctcaagttgaacaggtctt

SEQ ID NO: 23171 - DNA, 600 bp, Chicken  19866894236189_1
aatacctaaacaattcatgaatacctccagggttggtggctccaccacctccccaggcagcctattccagcgcctgaccacttcctcagagaagcttttcctaacgaacaatctgaatctcccagcacaaattgaggccacatttctatgacaaataatgacattcaaattttattctatattgtggttccaagtgacaaaatgaggtagcctttcacattcatttcagcatttacattgtgacttagtccaaatatatgcacattatatgctgacatttttaagctgtaaatgacatayatgtgccaaattttgtaagaaaattatgaagcacattggttgtaagtgttagcagcatctacaagttactaagtgcatccaatatcagcaacatgctggtgtgctctgcagttttctgtttcaaaggaygctgctggttgcaaattaaagaagaaagtgaacagtaatcttcaactttggtattttctaatgatcataaaactgagtaactgcagctttcctgctggctacggacatggtcagatctgacacttccagcaacaggtgtttttgctctgcagatctagggcacatgcaccg

SEQ ID NO: 23172 - DNA, 600 bp, Chicken  19866894236189_2
aattgaggccacatttctatgacaaataatgacattcaaattttattctatattgtggttccaagtgacaaaatgaggtagcctttcacattcatttcagcatttacattgtgacttagtccaaatatatgcacattatatgctgacatttttaagctgtaaatgacatayatgtgccaaattttgtaagaaaattatgaagcacattggttgtaagtgttagcagcatctacaagttactaagtgcatccaatatcagcaacatgctggtgtgctctgcagttttctgtttcaaaggaygctgctggttgcaaattaaagaagaaagtgaacagtaatcttcaactttggtattttctaatgatcataaaactgagtaactgcagctttcctgctggctacggacatggtcagatctgacacttccagcaacaggtgtttttgctctgcagatctagggcacatgcaccgaccttcttcttcatctttgtctccacacctcctgcttttattaccttgggaccagattcatacagaaattatgattcacagaggtatcatttaacaagagaaacaaccagtgtgtctgtgaagtcaaca

SEQ ID NO: 23173 - DNA, 600 bp, Chicken  19866894236191_1
aaatcacaaggatttattgcagagaattaaaggagagaagccaaacactgtcagtaaacttagaggtaacttgtgtaagtcttggaagtcaaccaggaactttatgcaatggacttcctcctgatacacatcacacctagagctgcagttttatggagtggagtaagggcaaagccacagcacactgaatttattgtcttctctatagagaaacacagacccatccttcccaagtcacataacctctaagtgctggacatttcttctgctctagctgatacagcagctaccaaagtgctragaaagcaccaaagcaggatgccattggaaagaatgagtggcaattttttcatcttgttttgggttttattctctttgacaaaaggtagcagctgaagctatgaagaacatccatttcattagcagaatacttttggggaaaaaaaaaggcattaaaaaaaagaggctgtatgtgtcaaaaaatgattcaggcaatcaggtcatattaacctgagtgatcccagtcattactgggaatattgaagtggcatgcattgtctttttcatcccttttgcaatcattccttccagtttgttttg

SEQ ID NO: 23174 - DNA, 600 bp, Chicken  19866894236193_1
tgaatcggaagggactttcaaagatcatttagttctaacccccccctcctataggcagagacacctccccactagaccatgtttctcagagctccatccagcctggccttgaatgcttccagggagggggtattcacaaccttgtggggcaccttgttccagtttctcactaccctcacagtaaaggatttcttcctaatatttagtctaaatctaccctcttccagtttaaagccatttccccttgtcctgtcactacatatccttataaaagttcccaccccatctttcctgtaggcmctcttcaggtactggaaggccactataaggttcccccagagctttctcttccctaggctgaagagccccagctctcccagcctgttctcataggggaggtgctccagccctctgaccatctttatggtccccctctgtacccactccaaaagctcagtgtccttcttctattgaaggccccagaactggatgcagtactccaggtgaattctcatgtgagcagggtagagtggcaggatcatctcccttgatctgctggtcacacttcttgatgccaactggaataatttattgtcccat

SEQ ID NO: 23175 - DNA, 600 bp, Chicken  19866894236194_1
atttcaaaaggtcaccatgctgtggttaaacataccttgactatgtgcatgtctacaccatacatttccagccacttagctttgtttaagtagttagtttcagcctgtgctggtgtttgccccctgaaatacattttttgccgttaggttgatgcctgaagaagcacagaaagaaaaaactggcatatgaggaaagaggagaagaaagcatgagaggttgtgcaaaacctaagcactgctgactctccttcactttcaccaacatgaaggccacttctgaaagttttaacttgacatcaytgcagccaaaattgctgcatttcaagattctgcaacctcatcgttttactcagacctatgaaaagcatcatttttcatattacatccttttacaaaatatgayagaaacgcattaggattacatttttctataagaacaagaaaaagcatcagcagtatcttcttaatacgctcacttcatagaaaamtgagtgcaaacacttggatggcgtgcactggaaaaacctgtacctgcattccttccacttctcgaagatggccagctccatctcctcggtctgagtaggcacaaatctgaac

SEQ ID NO: 23176 - DNA, 573 bp, Chicken  19866894236194_2
cctgtgctggtgtttgccccctgaaatacattttttgccgttaggttgatgcctgaagaagcacagaaagaaaaaactggcatatgaggaaagaggagaagaaagcatgagaggttgtgcaaaacctaagcactgctgactctccttcactttcaccaacatgaaggccacttctgaaagttttaacttgacatcaytgcagccaaaattgctgcatttcaagattctgcaacctcatcgttttactcagacctatgaaaagcatcatttttcatattacatccttttacaaaatatgayagaaacgcattaggattacatttttctataagaacaagaaaaagcatcagcagtatcttcttaatacgctcacttcatagaaaamtgagtgcaaacacttggatggcgtgcactggaaaaacctgtacctgcattccttccacttctcgaagatggccagctccatctcctcggtctgagtaggcacaaatctgaactcagataccagctcagggacatgctctgcaggatcgtagtctccaagttcagctgtaacagaacagcattatcaaa

SEQ ID NO: 23177 - DNA, 488 bp, Chicken  19866894236194_3
gaggaaagaggagaagaaagcatgagaggttgtgcaaaacctaagcactgctgactctccttcactttcaccaacatgaaggccacttctgaaagttttaacttgacatcaytgcagccaaaattgctgcatttcaagattctgcaacctcatcgttttactcagacctatgaaaagcatcatttttcatattacatccttttacaaaatatgayagaaacgcattaggattacatttttctataagaacaagaaaaagcatcagcagtatcttcttaatacgctcacttcatagaaaamtgagtgcaaacacttggatggcgtgcactggaaaaacctgtacctgcattccttccacttctcgaagatggccagctccatctcctcggtctgagtaggcacaaatctgaactcagataccagctcagggacatgctctgcaggatcgtagtctccaagttcagctgtaacagaacagcattatcaaa

SEQ ID NO: 23178 - DNA, 600 bp, Chicken  19866894236199_1
agactcagtccagtgcagtagatattattacacatctgctgtagtagcagagacctgagcggagtgctcagtcagtcttacacagcctttatatataacattagtgtgtatgcatctgatgtatcaaggatgcacagggaccatgtgtatttactgagcagatgcacagtatgcagatcttttacacaaagtgaatagatataataagtaatatctgcatatagcacatgtatgactggtgtgagatatcctgtaagcatagattatgtgcatgtgtatcctgaggtaaaaggctgaagwtaacagtttcacgtttcttttaccctgtcaacagcatctctaggtcaaaacagagacctgtgataaatgcaagctattgagaccaccacacaataagtgtctttgcttccctcctactctatgactatgtcaaagctacagaagtaagaatttagaagtttggggctgttgctggggatttattgagctttcagagaccttaagcaaaaaatatggtaatgcaatgaccttgtgctcattaggaagtgaaatcaggtgcagtgtaactggaacagaactcataaattctcttagatgaga

SEQ ID NO: 23179 - DNA, 600 bp, Chicken  19866894236206_1
catacactaaggcaccactgcagtgacttacaggaggaatagctcctgttccatgttcagttgtggggactggcagcttcagatctcctgccattcagacctaaaatccaagttatgctttgataggaaatacaggaaaatttgggcctaagctttgctttagatgcagttccttgtggcataattactactattaccttcttgaatgctttcaaaattaatgatttttaatacattagccagtcaagctggaagattagtgttgcagatgtattgggaggctaaatgctgccctgttgmgtgtttgatttgggctgaggttaaactgrttatggctaaatggctttaaaatggcagtgggtttgggcagatctgaattccatgtggtggcatattgcctgtctgcatccckaagagtctacatggaaswtcttcctccgcagtgaatatgaagtaattcaggctagtgtacttatcagtggaaagccgcctagcagttagcagtggaaagatgctttcagaagtgggctcactgagagcaatggctgtgaattcaaacactttcttattctgcaagaatacctttgcactgtgtttgaa

SEQ ID NO: 23180 - DNA, 600 bp, Chicken  19866894236206_2
acaggaggaatagctcctgttccatgttcagttgtggggactggcagcttcagatctcctgccattcagacctaaaatccaagttatgctttgataggaaatacaggaaaatttgggcctaagctttgctttagatgcagttccttgtggcataattactactattaccttcttgaatgctttcaaaattaatgatttttaatacattagccagtcaagctggaagattagtgttgcagatgtattgggaggctaaatgctgccctgttgmgtgtttgatttgggctgaggttaaactgrttatggctaaatggctttaaaatggcagtgggtttgggcagatctgaattccatgtggtggcatattgcctgtctgcatccckaagagtctacatggaaswtcttcctccgcagtgaatatgaagtaattcaggctagtgtacttatcagtggaaagccgcctagcagttagcagtggaaagatgctttcagaagtgggctcactgagagcaatggctgtgaattcaaacactttcttattctgcaagaatacctttgcactgtgtttgaagtactgctttatgctggtggtggcatgta

SEQ ID NO: 23181 - DNA, 600 bp, Chicken  19866894236206_3
ttatgctttgataggaaatacaggaaaatttgggcctaagctttgctttagatgcagttccttgtggcataattactactattaccttcttgaatgctttcaaaattaatgatttttaatacattagccagtcaagctggaagattagtgttgcagatgtattgggaggctaaatgctgccctgttgmgtgtttgatttgggctgaggttaaactgrttatggctaaatggctttaaaatggcagtgggtttgggcagatctgaattccatgtggtggcatattgcctgtctgcatccckaagagtctacatggaaswtcttcctccgcagtgaatatgaagtaattcaggctagtgtacttatcagtggaaagccgcctagcagttagcagtggaaagatgctttcagaagtgggctcactgagagcaatggctgtgaattcaaacactttcttattctgcaagaatacctttgcactgtgtttgaagtactgctttatgctggtggtggcatgtatgacaaaagtcttcttgactttttttggtgcttaggctcctgcttggttgcttttgaaagtgaaatgtaaggtcacagttcac

SEQ ID NO: 23182 - DNA, 600 bp, Chicken  19866894236206_4
atacaggaaaatttgggcctaagctttgctttagatgcagttccttgtggcataattactactattaccttcttgaatgctttcaaaattaatgatttttaatacattagccagtcaagctggaagattagtgttgcagatgtattgggaggctaaatgctgccctgttgmgtgtttgatttgggctgaggttaaactgrttatggctaaatggctttaaaatggcagtgggtttgggcagatctgaattccatgtggtggcatattgcctgtctgcatccckaagagtctacatggaaswtcttcctccgcagtgaatatgaagtaattcaggctagtgtacttatcagtggaaagccgcctagcagttagcagtggaaagatgctttcagaagtgggctcactgagagcaatggctgtgaattcaaacactttcttattctgcaagaatacctttgcactgtgtttgaagtactgctttatgctggtggtggcatgtatgacaaaagtcttcttgactttttttggtgcttaggctcctgcttggttgcttttgaaagtgaaatgtaaggtcacagttcacattggtctttctgataa

SEQ ID NO: 23183 - DNA, 600 bp, Chicken  19866894236206_5
tacaggaaaatttgggcctaagctttgctttagatgcagttccttgtggcataattactactattaccttcttgaatgctttcaaaattaatgatttttaatacattagccagtcaagctggaagattagtgttgcagatgtattgggaggctaaatgctgccctgttgmgtgtttgatttgggctgaggttaaactgrttatggctaaatggctttaaaatggcagtgggtttgggcagatctgaattccatgtggtggcatattgcctgtctgcatccckaagagtctacatggaaswtcttcctccgcagtgaatatgaagtaattcaggctagtgtacttatcagtggaaagccgcctagcagttagcagtggaaagatgctttcagaagtgggctcactgagagcaatggctgtgaattcaaacactttcttattctgcaagaatacctttgcactgtgtttgaagtactgctttatgctggtggtggcatgtatgacaaaagtcttcttgactttttttggtgcttaggctcctgcttggttgcttttgaaagtgaaatgtaaggtcacagttcacattggtctttctgataat

SEQ ID NO: 23184 - DNA, 599 bp, Chicken  19866894236208_1
  misc_feature (1)..(184): n is any nucleotide
nnnnnnnnnnnnnnnnnnnnnnnnnnnnnnnnnnnnnnnnnnnnnnnnnnnnnnnnnnnnnnnnnnnnnnnnnnnnnnnnnnnnnnnnnnnnnnnnnnnnnnnnnnnnnnnnnnnnnnnnnnnnnnnnnnnnnnnnnnnnnnnnnnnnnnnnnnnnnnnnnnnnnnnnnnnnnnnnnnnnnnnntccaaagtctatgtcctgtctgaagctttgcaagacacaaagagacatctaatggtttcttaatacactgcaagcaagcccagtgcaaaattgaagtcatgataatttctttcaarcctctatttgccaggtacctacatgtttgctacataaacctacaggtttgttacctgtagaagcatagagtcatggattcatttgagctggaagggaccctcaaagatcatagaatcatagaatcaccaaagttggaaaagacctccaagactatccagtccaaccatccacctaccaccagtattttcccactaaaccatgcacttcagtacaacatctaaacatttcttgaactcatcaagtttaatcatctaggtcaactcccctgcaatgaagaaggacacctacagctagattg

SEQ ID NO: 23185 - DNA, 599 bp, Chicken  19866894236212_1
  misc_feature (1)..(50): n is any nucleotide
nnnnnnnnnnnnnnnnnnnnnnnnnnnnnnnnnnnnnnnnnnnnnnnnnncccagcagtgactggacagactgcatgcaactgtggctgactgtaagggttaggcagcctgattccaggcagatctgtgaatggaaaagctcccaggtgttgcaaacacaaaaccaaggcgttgcagccttagtaaacatttgaccaataaaaactgcaaaatccaatcagagggaaagacttcatttatggcagtcgcggctgccgacctgacgatggggatgaaatcaatacacacacaaatacagamaatgtgttagaaaagactgaagtagagcaagacttactgttgaagaaaatcttttcatcctttgaatgaacttcctgaacctgttgtcattattactgtaaccaatttcaaacagactgggtatgcttataccaatgctgaagctagactgcgcagcttctgccttcaggacactgctttcataattggagtaggagtcatattcagtcattgtaaattcatacttgcctttggtctaaacagaaagcaaaaacaatacattttattttctgtgcagtgaatgtacacctgaagcacgg

SEQ ID NO: 23186 - DNA, 600 bp, Chicken  19866894236213_1
tttttcttcccatacttcataataatgcagatccttcacagatgtattcaaaagtacaaccaggcattgcaaggctttgattaataaataaataaatacataaaaattatatatatatatattgttttcttagttttgagaaaaattatattgcaagagtcaatctgttctgatttccttgcagaagtaagaaatgctgtgtttgaaatttggtccaaggtcacatgcagcacagccaagtctcacagcctgaaaggtcataaggaaggcagtgaatgcagcctgttcaacagagacctygagacttctggttatcattcctgcctgaactaaggctttgacatcytttttgattcagatcccaatgactacaccacaagtaaaaggaagcaaagccctctgggagttggctctactctctttagctgatatttctaactctttgcaatttttctttgcactaacagggacacatagggtaaaggttgaaaactgcaatactaagtggcaatactaagtggaaagtacacaataaaacatgaagccattgtgaggtagagaatctgctttagttttatagttacgaaagctaaaatccag

SEQ ID NO: 23187 - DNA, 600 bp, Chicken  19866894236213_2
ttcaaaagtacaaccaggcattgcaaggctttgattaataaataaataaatacataaaaattatatatatatatattgttttcttagttttgagaaaaattatattgcaagagtcaatctgttctgatttccttgcagaagtaagaaatgctgtgtttgaaatttggtccaaggtcacatgcagcacagccaagtctcacagcctgaaaggtcataaggaaggcagtgaatgcagcctgttcaacagagacctygagacttctggttatcattcctgcctgaactaaggctttgacatcytttttgattcagatcccaatgactacaccacaagtaaaaggaagcaaagccctctgggagttggctctactctctttagctgatatttctaactctttgcaatttttctttgcactaacagggacacatagggtaaaggttgaaaactgcaatactaagtggcaatactaagtggaaagtacacaataaaacatgaagccattgtgaggtagagaatctgctttagttttatagttacgaaagctaaaatccagatgaaaattcttgacatcatgtttcatgagaaatgtttcaaagaga

SEQ ID NO: 23188 - DNA, 600 bp, Chicken  19866894236232_1
aaggcaggccacttccccagaagagactgtattaaaaagaaaagtaagcctgaaaatagttttaattggcatgttggttaatttgaccaggatccattatcttaggcactaaaatacagagctctcccagccctgaaaattttacagtctaagattaagatgtgatgtaataggtctatagatagatagagtaaacaaatgctgttgagagacaacaatgtggcccctggtgacccagccttttgtgaaggcttggaaggaacagagaaggaaagtaaaatgtagaagagggttacaaarttaatctgaagattggaagaagtattttacaatgagagataaaaaactctcattacatttcattacatagaatacatgtgaggtggtctagttagagtaaatacattaactgagtgaaaatgctggatgcttaaaggggtttttgatcaggtgggggtaacggctaacaacagcaccagaatcaacagctttaaattgaaagataatttcagctgaaaataggtatattcttttagtgatgccagtgattaggtggtgagttatggagcaggtgcttttccagtgaatgagggtttgagt

SEQ ID NO: 23189 - DNA, 600 bp, Chicken  19866894236235_1
tgtgagcagttttgtgcagcttttctgccagctcccttctcatgcagcaaatgtgattcctccttacaaatcaaattccttcattctttatgcaggaaataataacaatttgcatccctaggaacttcctacaggttcctaggatcaaagcctactactgcatttaagtgacagagtaagtagggaattaaccaaacatatagtttagaagaatatgagaagcctgctaatgaaggtaagttcataaacgacaatgttctttgttatattccatgcttgaaaagcaggagaacgaagccytgtactgtgctttcttccatgctgygcatcacactggaagggacagaaggaatgtgaaagcagctgcctttgattcagcatcaataaatggtcccacagagtttctgctgtctgggcaactgatcagttcacatccagatgcacgctgctccagctccccttgctcaccttcagtgtgcactgaataaacaattacttccttccactctatagcccttttgcttctgtttgatctgtctttggtgcaggctgctttgtgatggtgattggttttctttcaccgctccaggtaatcagaat

SEQ ID NO: 23190 - DNA, 600 bp, Chicken  19866894236235_2
tgccagctcccttctcatgcagcaaatgtgattcctccttacaaatcaaattccttcattctttatgcaggaaataataacaatttgcatccctaggaacttcctacaggttcctaggatcaaagcctactactgcatttaagtgacagagtaagtagggaattaaccaaacatatagtttagaagaatatgagaagcctgctaatgaaggtaagttcataaacgacaatgttctttgttatattccatgcttgaaaagcaggagaacgaagccytgtactgtgctttcttccatgctgygcatcacactggaagggacagaaggaatgtgaaagcagctgcctttgattcagcatcaataaatggtcccacagagtttctgctgtctgggcaactgatcagttcacatccagatgcacgctgctccagctccccttgctcaccttcagtgtgcactgaataaacaattacttccttccactctatagcccttttgcttctgtttgatctgtctttggtgcaggctgctttgtgatggtgattggttttctttcaccgctccaggtaatcagaatctagaactgtacacacacagctgag

SEQ ID NO: 23191 - DNA, 600 bp, Chicken  19866894236235_3
acagaaggaatgtgaaagcagctgcctttgattcagcatcaataaatggtcccacagagtttctgctgtctgggcaactgatcagttcacatccagatgcacgctgctccagctccccttgctcaccttcagtgtgcactgaataaacaattacttccttccactctatagcccttttgcttctgtttgatctgtctttggtgcaggctgctttgtgatggtgattggttttctttcaccgctccaggtaatcagaatctagaactgtacacacacagctgagaatgacttggagctgcktgtgtagctgcctaacttaccatatagctcagccagacagagaatgaggcattttggagtgattttgggaatcattatggaggtaccagtccttgaacatgtcacattaccttttgtactctgtcagcattcatgtcattctaggtgtgctggtagatcgttgtggagtatgttttgattcccaaacacaggttcttctcatgtattatgccatcaaaactgagtttttaccatctcctacttttcaacctggatcacaagtaagtgttacttcacaggatcaagccaaagttatccaga

SEQ ID NO: 23192 - DNA, 599 bp, Chicken  19866894236246_1
  misc_feature (1)..(54): n is any nucleotide
nnnnnnnnnnnnnnnnnnnnnnnnnnnnnnnnnnnnnnnnnnnnnnnnnnnnnnaggaggtcttccaccagcaacctgttccagtacctcacccactcttactgtaaaaatcttcttccttttatccaatctaaatttctccttttttagtttgaaaccatttctctcttgtcctgtcacaatagaccttgctaaagagtctgtccccttctttcttacagcacccctctagatactaaaaggttgctagccttccctattactggtcttttcccttgtctctcaattgtgctgctaacwacagacagtatgttcatttagcacaccatggagatgtgtccctttgttcagtttacaaattcttcatcaagaatgtgtttgttatttggatttattaaacaggagcacatttgagctctggattstttgccagcagtttgtaataagccaagaaagagcaacaacatataatcaaatccattatgactacattaagattacagcagagaaaggaaattaaacaaaatattgcacaagtacagctaagaacagtgaagatatctgaacaatgtcataaacacttattactacttacataa

SEQ ID NO: 23193 - DNA, 600 bp, Chicken  19866894236246_2
ccaatctaaatttctccttttttagtttgaaaccatttctctcttgtcctgtcacaatagaccttgctaaagagtctgtccccttctttcttacagcacccctctagatactaaaaggttgctagccttccctattactggtcttttcccttgtctctcaattgtgctgctaacwacagacagtatgttcatttagcacaccatggagatgtgtccctttgttcagtttacaaattcttcatcaagaatgtgtttgttatttggatttattaaacaggagcacatttgagctctggattstttgccagcagtttgtaataagccaagaaagagcaacaacatataatcaaatccattatgactacattaagattacagcagagaaaggaaattaaacaaaatattgcacaagtacagctaagaacagtgaagatatctgaacaatgtcataaacacttattactacttacataaggaccwcttgtctgtttactctcaagcctgagactgacttccattttaaggctgccctcagataaggtcatcctctgttaatacrgaatcatatcaaatataaacttatttgtttttcagcagctc

SEQ ID NO: 23194 - DNA, 600 bp, Chicken  19866894236246_3
cagtatgttcatttagcacaccatggagatgtgtccctttgttcagtttacaaattcttcatcaagaatgtgtttgttatttggatttattaaacaggagcacatttgagctctggattstttgccagcagtttgtaataagccaagaaagagcaacaacatataatcaaatccattatgactacattaagattacagcagagaaaggaaattaaacaaaatattgcacaagtacagctaagaacagtgaagatatctgaacaatgtcataaacacttattactacttacataaggaccwcttgtctgtttactctcaagcctgagactgacttccattttaaggctgccctcagataaggtcatcctctgttaatacrgaatcatatcaaatataaacttatttgtttttcagcagctctcagcagaactgaaaccatttctaatgtggcctaactcttctttcagtcctgacagtggacaaacatcagaaagaaaaatgcaagagagatgataaaattgtagaggaatctatcaaccttaggaraagcaggtattttttctttaaatgaagagttactatagataaatttataattta

SEQ ID NO: 23195 - DNA, 600 bp, Chicken  19866894236246_4
tttggatttattaaacaggagcacatttgagctctggattstttgccagcagtttgtaataagccaagaaagagcaacaacatataatcaaatccattatgactacattaagattacagcagagaaaggaaattaaacaaaatattgcacaagtacagctaagaacagtgaagatatctgaacaatgtcataaacacttattactacttacataaggaccwcttgtctgtttactctcaagcctgagactgacttccattttaaggctgccctcagataaggtcatcctctgttaatacrgaatcatatcaaatataaacttatttgtttttcagcagctctcagcagaactgaaaccatttctaatgtggcctaactcttctttcagtcctgacagtggacaaacatcagaaagaaaaatgcaagagagatgataaaattgtagaggaatctatcaaccttaggaraagcaggtattttttctttaaatgaagagttactatagataaatttataatttaaagtcattactgcaaacacataatggagaactagcatttaaaaaacactcacaaagagactctagaaggagaaaacagc

SEQ ID NO: 23196 - DNA, 600 bp, Chicken  19866894236246_5
gtgaagatatctgaacaatgtcataaacacttattactacttacataaggaccwcttgtctgtttactctcaagcctgagactgacttccattttaaggctgccctcagataaggtcatcctctgttaatacrgaatcatatcaaatataaacttatttgtttttcagcagctctcagcagaactgaaaccatttctaatgtggcctaactcttctttcagtcctgacagtggacaaacatcagaaagaaaaatgcaagagagatgataaaattgtagaggaatctatcaaccttaggaraagcaggtattttttctttaaatgaagagttactatagataaatttataatttaaagtcattactgcaaacacataatggagaactagcatttaaaaaacactcacaaagagactctagaaggagaaaacagctaataaatcaggtacagtcagttccagacagaaaattagcctttcttccttatgtagggagggaacagggcagaagtagtaaatgaatgcagatgaacccctaatagggaggagaggtactgtgctccacagaaggcaaatgggactaggcatgtcagtcatatctc

SEQ ID NO: 23197 - DNA, 600 bp, Chicken  19866894236253_1
tctagtgttatttgatattcacatatcacctttcatcagagaatatacaatggtgctttatggattggatgaacatttcagatggaaatagaacaggaaccttgggaaaagcatattctcaagcagaaaactgcagacgtaccagtagacaaggtccattcccaaatcacctatcccaaatgaggatttagctctggttatttaactgtctcccaattagcctgcatccataattaaactctccgctatgaaatcgtattctacaaggccctttacaccttcaaaaggaaaactaagacyatcagaaagagctagaactctttcagttacagcaagacctacagcaccaagcaaatgtgattcttttgctttcaatcaarctggaaggaattcccttttaagtctgatgtgagtaatttctgcagaagtccaacaggaggaaacccctggacaacaagcatgggctgagtactgcattcctactgaatccaccccattttccttcyaagtgtctgattcaccagctaacagtcattcacttgtttttaaatcttttaattaattagaaatcacacagctattcagtcaacatgggcatgc

SEQ ID NO: 23198 - DNA, 600 bp, Chicken  19866894236253_2
gatggaaatagaacaggaaccttgggaaaagcatattctcaagcagaaaactgcagacgtaccagtagacaaggtccattcccaaatcacctatcccaaatgaggatttagctctggttatttaactgtctcccaattagcctgcatccataattaaactctccgctatgaaatcgtattctacaaggccctttacaccttcaaaaggaaaactaagacyatcagaaagagctagaactctttcagttacagcaagacctacagcaccaagcaaatgtgattcttttgctttcaatcaarctggaaggaattcccttttaagtctgatgtgagtaatttctgcagaagtccaacaggaggaaacccctggacaacaagcatgggctgagtactgcattcctactgaatccaccccattttccttcyaagtgtctgattcaccagctaacagtcattcacttgtttttaaatcttttaattaattagaaatcacacagctattcagtcaacatgggcatgctctgtccataaarcatcagctatcttgyttcacctcaagctgtaattaaaaatcacattcactattaggaactcatgaaa

SEQ ID NO: 23199 - DNA, 600 bp, Chicken  19866894236253_3
tgtctcccaattagcctgcatccataattaaactctccgctatgaaatcgtattctacaaggccctttacaccttcaaaaggaaaactaagacyatcagaaagagctagaactctttcagttacagcaagacctacagcaccaagcaaatgtgattcttttgctttcaatcaarctggaaggaattcccttttaagtctgatgtgagtaatttctgcagaagtccaacaggaggaaacccctggacaacaagcatgggctgagtactgcattcctactgaatccaccccattttccttcyaagtgtctgattcaccagctaacagtcattcacttgtttttaaatcttttaattaattagaaatcacacagctattcagtcaacatgggcatgctctgtccataaarcatcagctatcttgyttcacctcaagctgtaattaaaaatcacattcactattaggaactcatgaaatcaaaaatctgaattttgtttttaatttatttccttgttaacaattccacagagatgacagaaatgaaagcaaattcatctccacatttcaccacattccaaatcaatgatgcagtgccctgtgta

SEQ ID NO: 23200 - DNA, 600 bp, Chicken  19866894236253_4
agaactctttcagttacagcaagacctacagcaccaagcaaatgtgattcttttgctttcaatcaarctggaaggaattcccttttaagtctgatgtgagtaatttctgcagaagtccaacaggaggaaacccctggacaacaagcatgggctgagtactgcattcctactgaatccaccccattttccttcyaagtgtctgattcaccagctaacagtcattcacttgtttttaaatcttttaattaattagaaatcacacagctattcagtcaacatgggcatgctctgtccataaarcatcagctatcttgyttcacctcaagctgtaattaaaaatcacattcactattaggaactcatgaaatcaaaaatctgaattttgtttttaatttatttccttgttaacaattccacagagatgacagaaatgaaagcaaattcatctccacatttcaccacattccaaatcaatgatgcagtgccctgtgtaagtgggtgaattcctattctgtttaagtgaataatgttggcaatgtgcacagaggctgcaagtacagaccaaatctcacagatgcactgtgtgtaaagtgagactgc

SEQ ID NO: 23201 - DNA, 600 bp, Chicken  19866894236253_5
acagcaagacctacagcaccaagcaaatgtgattcttttgctttcaatcaarctggaaggaattcccttttaagtctgatgtgagtaatttctgcagaagtccaacaggaggaaacccctggacaacaagcatgggctgagtactgcattcctactgaatccaccccattttccttcyaagtgtctgattcaccagctaacagtcattcacttgtttttaaatcttttaattaattagaaatcacacagctattcagtcaacatgggcatgctctgtccataaarcatcagctatcttgyttcacctcaagctgtaattaaaaatcacattcactattaggaactcatgaaatcaaaaatctgaattttgtttttaatttatttccttgttaacaattccacagagatgacagaaatgaaagcaaattcatctccacatttcaccacattccaaatcaatgatgcagtgccctgtgtaagtgggtgaattcctattctgtttaagtgaataatgttggcaatgtgcacagaggctgcaagtacagaccaaatctcacagatgcactgtgtgtaaagtgagactgccacccaccttctctc

SEQ ID NO: 23202 - DNA, 600 bp, Chicken  19866894236257_1
caccctcctaaagataagcagtcctggtctttaacaattctgtattttggtatcctactttgatccctacagttccacagttcccttttggtgtgttgtaacaaatgctgcatcctctgttccaggaacagctacacaatcagtttattatgcaccgtgtgtctggcactgttctttatgctgctccacatgcttgcaattcccagtcaacctttttcaatctttttttttttttctttctttcttttgtgtagctgaacatggagccaaaatcttcaccacgcaatactgaaagagccrtatctttatttcattgaaactaatgatttcgaaaccttcaggcgttgtgactacttgacttcttttcgsacaacgtttcttactttgtacataggtccactgttgtgtagtaccaatattattcctggcatttaaataacagagtgatgggaactttcagaagggtaaaacgatgacagatctggtggtacgctaagtgatactgcatatactcagtactatgccatgtaataaaactgacctgttttactgacaggaaagaatggctacacacttatacttttggggcagtatttgttt

SEQ ID NO: 23203 - DNA, 600 bp, Chicken  19866894236257_2
cagttccacagttcccttttggtgtgttgtaacaaatgctgcatcctctgttccaggaacagctacacaatcagtttattatgcaccgtgtgtctggcactgttctttatgctgctccacatgcttgcaattcccagtcaacctttttcaatctttttttttttttctttctttcttttgtgtagctgaacatggagccaaaatcttcaccacgcaatactgaaagagccrtatctttatttcattgaaactaatgatttcgaaaccttcaggcgttgtgactacttgacttcttttcgsacaacgtttcttactttgtacataggtccactgttgtgtagtaccaatattattcctggcatttaaataacagagtgatgggaactttcagaagggtaaaacgatgacagatctggtggtacgctaagtgatactgcatatactcagtactatgccatgtaataaaactgacctgttttactgacaggaaagaatggctacacacttatacttttggggcagtatttgtttctctgtatcttccatgatagattgatacctgccagctgtcagggtgtgttgctggaaatgtctcatttc

SEQ ID NO: 23204 - DNA, 600 bp, Chicken  19866894236261_1
ctccctgtgcactgcacgatgttatgaagtggaataccaataaccaaaaattgtaaaactgtgacataatgcatgctcaatcgcttgttgggtctgtttgttgatctatggtaacacccattttcaaagaccaaagtcttgtttcaaggacagaagtcgctggctcagctcctagtcttactctgatcagttagaatgactcaggtttgctgtcctgcaggactacagtgcggctgcaggtgggtaagaggaggtagtgcctggtggttctgaagctcccagtgcagctgcattttccakgaggcaccgtaactgtgcagcatgtggtgtccagtttttctgcacattcacaagtatgtctgatatgctatgaaagtaatggatttatggtgcatacywcaratattttaagtgtatgtgaacacatatttgtgtctgggaaatcctgcgcagaaatgtggaagtgctgatgtgaagtctctgcttaggcacagaggaaatgaagaagacaaatctagagctctctatgtacatggataatttgggggagttgttgtaggattataacagaaacattttgtagattcagggaatatatct

SEQ ID NO: 23205 - DNA, 600 bp, Chicken  19866894236261_2
tgttgatctatggtaacacccattttcaaagaccaaagtcttgtttcaaggacagaagtcgctggctcagctcctagtcttactctgatcagttagaatgactcaggtttgctgtcctgcaggactacagtgcggctgcaggtgggtaagaggaggtagtgcctggtggttctgaagctcccagtgcagctgcattttccakgaggcaccgtaactgtgcagcatgtggtgtccagtttttctgcacattcacaagtatgtctgatatgctatgaaagtaatggatttatggtgcatacywcaratattttaagtgtatgtgaacacatatttgtgtctgggaaatcctgcgcagaaatgtggaagtgctgatgtgaagtctctgcttaggcacagaggaaatgaagaagacaaatctagagctctctatgtacatggataatttgggggagttgttgtaggattataacagaaacattttgtagattcagggaatatatcttaaccacaatggagtgtctcagtttcttgtggtagtgttggtgcaaagaatggtaaaactgtcatgagaaatttcagagctttaaaaggcactttaaa

SEQ ID NO: 23206 - DNA, 600 bp, Chicken  19866894236261_3
gttgatctatggtaacacccattttcaaagaccaaagtcttgtttcaaggacagaagtcgctggctcagctcctagtcttactctgatcagttagaatgactcaggtttgctgtcctgcaggactacagtgcggctgcaggtgggtaagaggaggtagtgcctggtggttctgaagctcccagtgcagctgcattttccakgaggcaccgtaactgtgcagcatgtggtgtccagtttttctgcacattcacaagtatgtctgatatgctatgaaagtaatggatttatggtgcatacywcaratattttaagtgtatgtgaacacatatttgtgtctgggaaatcctgcgcagaaatgtggaagtgctgatgtgaagtctctgcttaggcacagaggaaatgaagaagacaaatctagagctctctatgtacatggataatttgggggagttgttgtaggattataacagaaacattttgtagattcagggaatatatcttaaccacaatggagtgtctcagtttcttgtggtagtgttggtgcaaagaatggtaaaactgtcatgagaaatttcagagctttaaaaggcactttaaat

SEQ ID NO: 23207 - DNA, 600 bp, Chicken  19866894236261_4
gatctatggtaacacccattttcaaagaccaaagtcttgtttcaaggacagaagtcgctggctcagctcctagtcttactctgatcagttagaatgactcaggtttgctgtcctgcaggactacagtgcggctgcaggtgggtaagaggaggtagtgcctggtggttctgaagctcccagtgcagctgcattttccakgaggcaccgtaactgtgcagcatgtggtgtccagtttttctgcacattcacaagtatgtctgatatgctatgaaagtaatggatttatggtgcatacywcaratattttaagtgtatgtgaacacatatttgtgtctgggaaatcctgcgcagaaatgtggaagtgctgatgtgaagtctctgcttaggcacagaggaaatgaagaagacaaatctagagctctctatgtacatggataatttgggggagttgttgtaggattataacagaaacattttgtagattcagggaatatatcttaaccacaatggagtgtctcagtttcttgtggtagtgttggtgcaaagaatggtaaaactgtcatgagaaatttcagagctttaaaaggcactttaaataat

SEQ ID NO: 23208 - DNA, 600 bp, Chicken  19866894236263_1
tattctaagtttactaacaaaatataaacatgccaataaggcatctgggaagagtctgaatgatgctggtaaatatctagacccatgaacccagtcaagacaaccacacaggacacaggagataaagcagacaagaaattaatctaaagaatgggtagaaaaacactgctgcaaacaaatctactttacacaagaccacacttgaccatttcttgcaaacaagggagaaatatggagaagatgctgagcagataaaatctaacataagcttggcaagggtctaaggtacttattcatatrcaggtttgggcttcacacacgtaataaatatatacaagaggagtactcctatgagtactgcaataatgaaaacaagttaatgyacacaaaattccaagaaaacagaatttgaagcatycagaggtccaatttgagaatacaactgttactgctttcaatgccagaagaagaagcacgatagagctgagtctcacagcagtttctgttgctgtgattagctttaaaaatggtagaaggaatcacataagggggagaaaacrtgctgggaaacacaagcttttgatctatcctagccaatta

SEQ ID NO: 23209 - DNA, 600 bp, Chicken  19866894236263_2
catgaacccagtcaagacaaccacacaggacacaggagataaagcagacaagaaattaatctaaagaatgggtagaaaaacactgctgcaaacaaatctactttacacaagaccacacttgaccatttcttgcaaacaagggagaaatatggagaagatgctgagcagataaaatctaacataagcttggcaagggtctaaggtacttattcatatrcaggtttgggcttcacacacgtaataaatatatacaagaggagtactcctatgagtactgcaataatgaaaacaagttaatgyacacaaaattccaagaaaacagaatttgaagcatycagaggtccaatttgagaatacaactgttactgctttcaatgccagaagaagaagcacgatagagctgagtctcacagcagtttctgttgctgtgattagctttaaaaatggtagaaggaatcacataagggggagaaaacrtgctgggaaacacaagcttttgatctatcctagccaattatcttgttttattacaatttttctgtgtgtttttctcattacaattatcagaaaatactaaaagcaataaagaaataaattctg

SEQ ID NO: 23210 - DNA, 575 bp, Chicken  19866894236263_3
gagataaagcagacaagaaattaatctaaagaatgggtagaaaaacactgctgcaaacaaatctactttacacaagaccacacttgaccatttcttgcaaacaagggagaaatatggagaagatgctgagcagataaaatctaacataagcttggcaagggtctaaggtacttattcatatrcaggtttgggcttcacacacgtaataaatatatacaagaggagtactcctatgagtactgcaataatgaaaacaagttaatgyacacaaaattccaagaaaacagaatttgaagcatycagaggtccaatttgagaatacaactgttactgctttcaatgccagaagaagaagcacgatagagctgagtctcacagcagtttctgttgctgtgattagctttaaaaatggtagaaggaatcacataagggggagaaaacrtgctgggaaacacaagcttttgatctatcctagccaattatcttgttttattacaatttttctgtgtgtttttctcattacaattatcagaaaatactaaaagcaataaagaaataaattctgaagtttaagt

SEQ ID NO: 23211 - DNA, 433 bp, Chicken  19866894236263_4
aacataagcttggcaagggtctaaggtacttattcatatrcaggtttgggcttcacacacgtaataaatatatacaagaggagtactcctatgagtactgcaataatgaaaacaagttaatgyacacaaaattccaagaaaacagaatttgaagcatycagaggtccaatttgagaatacaactgttactgctttcaatgccagaagaagaagcacgatagagctgagtctcacagcagtttctgttgctgtgattagctttaaaaatggtagaaggaatcacataagggggagaaaacrtgctgggaaacacaagcttttgatctatcctagccaattatcttgttttattacaatttttctgtgtgtttttctcattacaattatcagaaaatactaaaagcaataaagaaataaattctgaagtttaagt

SEQ ID NO: 23212 - DNA, 600 bp, Chicken  19866894236264_1
ctgctcagtccctcatcctgcctgtgatatcttggtgtttcccttctcctgggtcacaaaaaaatgcaaacatagtctgcccgtgctgaggagctatgagaagggggaagggaaattgagctgatgtttgtcatggccaggtggtatatcttgattattgttagccccaggcttttaatgttacaacaaaaaacaggtcagtcttgggtgtgagttctttcagcttttcaaggtccattgccgactaaggcaagtgtaagtaaccagtattgcctcctctacctctagcttatgggctgrggcccgtggagccacccagttgcacaatctttaagrtacaaaggtagccagttctgcagaccttaatgaaaagcacctttttattatttatttacttatttatgaacatttaaccactgaatccatctctgtgttatttttgcatgtattaatgtggatagcccaagtactggaaatcagcaggtgctctagttcatactgcagtggctgattaaaattaagcaaaggattgttcagatgcattgcttcatctttgtcttatgaacattattttcttagaacaggcccttgtctttgttt

SEQ ID NO: 23213 - DNA, 600 bp, Chicken  19866894236264_2
gtttcccttctcctgggtcacaaaaaaatgcaaacatagtctgcccgtgctgaggagctatgagaagggggaagggaaattgagctgatgtttgtcatggccaggtggtatatcttgattattgttagccccaggcttttaatgttacaacaaaaaacaggtcagtcttgggtgtgagttctttcagcttttcaaggtccattgccgactaaggcaagtgtaagtaaccagtattgcctcctctacctctagcttatgggctgrggcccgtggagccacccagttgcacaatctttaagrtacaaaggtagccagttctgcagaccttaatgaaaagcacctttttattatttatttacttatttatgaacatttaaccactgaatccatctctgtgttatttttgcatgtattaatgtggatagcccaagtactggaaatcagcaggtgctctagttcatactgcagtggctgattaaaattaagcaaaggattgttcagatgcattgcttcatctttgtcttatgaacattattttcttagaacaggcccttgtctttgtttgccttaccttatcaaattactgcagtgttgctaaaa

SEQ ID NO: 23214 - DNA, 600 bp, Chicken  19866894236272_1
tatctcaggtctgattttcatttaagcacttaatcatgttggatagctatctctttggttttcattaaaactatgacttatcattattttttctggatttcccttccaacattacgattccaatgtcaaagcttgatccaacaggatatagcagatcagaattgcgcacaacttggaagatgccgtaaaaaagaggatgtgctcagttctgtgactttggctccttgtcatgatcacactctccaactctcctccctcctcctctaacaaaaaaacctgtatagctgtgtattataataraatcactagaaatggaaaacccttcatgtgcaagccagctggctagttttgaagaggtttttttttcagacattacttttccccatcctctgttcctaacacasgtctcagaaaaattcttctaagtcctcatattttgtttagataagcaggactctgtattcttcctccacaatagccttacttaaaccttcaagacttaatgtgaccaaaatgccttgaatatgtttccagctggggcattagcacttcaaacttagttcatgtggccaaagaccagtgatgctgagagaagagcct

SEQ ID NO: 23215 - DNA, 600 bp, Chicken  19866894236272_2
tccaacattacgattccaatgtcaaagcttgatccaacaggatatagcagatcagaattgcgcacaacttggaagatgccgtaaaaaagaggatgtgctcagttctgtgactttggctccttgtcatgatcacactctccaactctcctccctcctcctctaacaaaaaaacctgtatagctgtgtattataataraatcactagaaatggaaaacccttcatgtgcaagccagctggctagttttgaagaggtttttttttcagacattacttttccccatcctctgttcctaacacasgtctcagaaaaattcttctaagtcctcatattttgtttagataagcaggactctgtattcttcctccacaatagccttacttaaaccttcaagacttaatgtgaccaaaatgccttgaatatgtttccagctggggcattagcacttcaaacttagttcatgtggccaaagaccagtgatgctgagagaagagccttgctatgactctgagcacaggtgggtttctgtttctgtttccactctagctgggtgtcccccacagtgtgattgggcttttccctttgttcatgtaaggcagaa

SEQ ID NO: 23216 - DNA, 600 bp, Chicken  19866894236277_1
tgccttgattctggcatcactgctttggagtcccactcacatgttacttataaatcaactgctttcctcattccatttgcacagtctgtccttctttgtctaggaagaaggacagagctttcaggtagtctctgcttcacccccttggctttttttgctttagtggcttctccttatccatcctatttgtttatactgaaacttgctttctgactcgtgacatcattaaattaacaccccatatttttcctggctgagcttttcccttggatttgtcttcagctcatcatacgcagaaaygcatgtccttccaaacctcgtaacaatgtctggatcatcttacctgctcattctgtgacctggcttgtcattgcacaactggtggaaattacattgcttgtttttcttcctccatgtaactactgaagtatgctgtttccaaagcagctggcagaaactctgtcatatcctctggcttccttaaatcctgtggtgatccctgtggtaatcagcttgtttatgctttctttgttaatgcattgctgacaggtctgtgaaaactcagagttgcctattttgctaatgtttttgcagccttgt

SEQ ID NO: 23217 - DNA, 599 bp, Chicken  19866894236280_1
  misc_feature (1)..(117): n is any nucleotide
nnnnnnnnnnnnnnnnnnnnnnnnnnnnnnnnnnnnnnnnnnnnnnnnnnnnnnnnnnnnnnnnnnnnnnnnnnnnnnnnnnnnnnnnnnnnnnnnnnnnnnnnnnnnnnnnnnnnntgtgctgttttaaagacatgttaaaaaaaacgacaacaaaaccagaaagacctcttcaaaatccattaaatagaaagattgaatttccaaactcctaatgagggaaggaaaactgcattggacaataaaaaaatacattgggttaattcccaaatagctttgctatgaaacagccctttttcygtggtgtgttttagctgttaaggatagtttaccactttcctcctgtagaggagaagaatgctggtggggaytgagagatttcctttggataactccttttctgaagtgagaattatgtgactcatgcttttaggaccccagaatcttttggctggtaaccgggattatgtttctgggaagtggcctgatatggcggcgtttgctttccttcctcgggcggcacctggaaccttcattacctcctcatgtatgtatggttacctaggatttctgcttcagactctgcgtgtacaattcat

SEQ ID NO: 23218 - DNA, 599 bp, Chicken  19866894236280_2
  misc_feature (1)..(46): n is any nucleotide
nnnnnnnnnnnnnnnnnnnnnnnnnnnnnnnnnnnnnnnnnnnnnntgtgctgttttaaagacatgttaaaaaaaacgacaacaaaaccagaaagacctcttcaaaatccattaaatagaaagattgaatttccaaactcctaatgagggaaggaaaactgcattggacaataaaaaaatacattgggttaattcccaaatagctttgctatgaaacagccctttttcygtggtgtgttttagctgttaaggatagtttaccactttcctcctgtagaggagaagaatgctggtggggaytgagagatttcctttggataactccttttctgaagtgagaattatgtgactcatgcttttaggaccccagaatcttttggctggtaaccgggattatgtttctgggaagtggcctgatatggcggcgtttgctttccttcctcgggcggcacctggaaccttcattacctcctcatgtatgtatggttacctaggatttctgcttcagactctgcgtgtacaattcatctttaaaggaggaaacatrcagttgtagaggggtggatcgtagagcttgtgaggagttaagctaggtcttt

SEQ ID NO: 23219 - DNA, 600 bp, Chicken  19866894236280_3
taaggatagtttaccactttcctcctgtagaggagaagaatgctggtggggaytgagagatttcctttggataactccttttctgaagtgagaattatgtgactcatgcttttaggaccccagaatcttttggctggtaaccgggattatgtttctgggaagtggcctgatatggcggcgtttgctttccttcctcgggcggcacctggaaccttcattacctcctcatgtatgtatggttacctaggatttctgcttcagactctgcgtgtacaattcatctttaaaggaggaaacatrcagttgtagaggggtggatcgtagagcttgtgaggagttaagctaggtctttcttccttgacaaggttctccctggctggagtgaatgaggtgggaagcccaatactggcaaagatacatctgagcagtaagatattgcaggcttctgagagatgcgttatttacttctgtgtaggagcccaagggaagctgaggattatgggagaagcagccataacctgccttctcagctgctgcagcagtctcttcttagtggggaaacatatgggatgtggctctcctcctcccacccgcatgcta

SEQ ID NO: 23220 - DNA, 600 bp, Chicken  19866894236281_1
ttaaatagttccctgaagacaagtttaagagacagcagagttctatttctaaacaattcaactacccagggcaaggggtcatagggaaaatacccaaaacagtacctgagtcttgatggtcctgaacattgtgaaaagctacttttcaacaaacagaaagatgctggttgtcaaaacgatatcttttctctgaaaatagcttatgaaaagaaaagcctcccacagaaggctgaagtcttagcaacagcaagaaaaaaaaaaatcaagttttctaatttatgtcatcgttcaaggaaaaawatattaatgtatgtacaaaatatacaacttatttatataattaaactaaaagtcaaagaactcacatgctattctcctcttcttctccccacaaaggaaaggtgtgtagagaaaaatggagagtgagccccattggacagatgctagtcttgttttctattcttttttattggcaagaagtctggaagacattctgataccaccagcagtgtgggtcaggaacctataaagaacacaataaatcacattatctagtctggcattctactatcagaatccaagaagtaaaataaagactta

SEQ ID NO: 23221 - DNA, 540 bp, Chicken  19866894236283_1
aaatgtttagcttccaatttccctcccagatgaggacacggagtactatttccacccttgtcctgtttccacataatcacatcccagtatgcagcacgtgaggctttccatagctactggcagcaatgttaacctgcacctctgtgctgaaaggaatgcttaagagaaattatccctaccttcctaaatatgttttgcccttgaaaaagacataacacaaaccaaaaagccttcctgggctttggagcaatgaactggagaaagttcaggtgacatactaacatgctagagatcactaawgtgagttctcacccctccactctttacctaattgaggtgctgcaccaatgcccacctggaaaagcagcaaacagttcctcctgtggcyccctcctcccatgattacttaccctacgccgacccaaagaaaattctgccctttcactgcagcaacttaggacaaggggatatggtttcaagggaaatggttttaaactggggggagtttaggacagggggaggtttaggctggatattagg

SEQ ID NO: 23222 - DNA, 452 bp, Chicken  19866894236283_2
atgcagcacgtgaggctttccatagctactggcagcaatgttaacctgcacctctgtgctgaaaggaatgcttaagagaaattatccctaccttcctaaatatgttttgcccttgaaaaagacataacacaaaccaaaaagccttcctgggctttggagcaatgaactggagaaagttcaggtgacatactaacatgctagagatcactaawgtgagttctcacccctccactctttacctaattgaggtgctgcaccaatgcccacctggaaaagcagcaaacagttcctcctgtggcyccctcctcccatgattacttaccctacgccgacccaaagaaaattctgccctttcactgcagcaacttaggacaaggggatatggtttcaagggaaatggttttaaactggggggagtttaggacagggggaggtttaggctggatattagg

SEQ ID NO: 23223 - DNA, 600 bp, Chicken  19866894236289_1
accagctgtggtctgggatggctggaaaaacaccgacgggagaaaaccgcatcaggaaacactgattcacagaattcaattcatcgagcactgacattttgcaaggatctgttattaggctcagcacagcagagagagaatagaagacctccagcaatttgcaagctgtagttctgaaatgagaaatgctgagctagttttggagcaaaaaaaaaaaaaagagagagagagagaattatactcaaaatacctccagttgcagtctaaccaggagagatgcagaggtaggatgtgagcagraactcagacccaagtcattaaacagtgaagggactgagacagaactgtcttacacaatagatcaacatttggataaacatacttatgacagttattaataaacagaagtctgggaaaactgctagagatctttctgctgcaaaagctgttctgtgactgcttgggaaagcattgcctctattatagaccacagaaggccaaaatagcttcatgctgtcagtggcaaaagtggtgaatgaggacaatttattctctcccatcatgaattcaggaggcgagcagaagaaaagaagattgaga

SEQ ID NO: 23224 - DNA, 600 bp, Chicken  19866894236294_1
tccttataatccactcatccctctcagtttattagtgataaaatgtggagctgaaatgttgttctctgcctgaagccgaatcttttcagtctcatcattagcagtttgcctgtatttattacacggagaggtatctgcagttccaagcagaacttgggacataggaatatatgcctcagtaagaaccatctccatgtgtggtgtggacttgtgaactgagaccttgtgacggttatattgagtgcagactaaaagcacattgtgctcttccttattcattttgcactcttttattgttgyccttgaaaccacaggcagcactgttatccaagtgagatgtgttgcagttacagcctgctgttctgggtagggcccttgggaaagcttttaccacttcataatttaaatctatgtttgtgcctctttaattggaaaattgtatggaacagacatttgtgtatgtgtgtttgtactgtttaaaggctactttggcttttagttactgaagaaaatactttatgggagaactatatttcagcgccctcaagctccatgttctcatagtgtttgtgtgtggtttgcattataggaactacttag

SEQ ID NO: 23225 - DNA, 600 bp, Chicken  19866894236295_1
cttcccatagcagccagtctttccattatttgtattaaagggaactagaggtacattgtcatggaaggtaaatgcttaaatgaattacatttagaaagaaaaaagtaaaacagaagtccaacaggcatattcataatgatctgtccctttctttcacatgtttaaaagaaaacaaaaatagtactgtcagcaatttttatcaccttgaacaacaatcaggatcgctcaaggtaagcaaccaatggcaagtgggcaggtgggaagagaaaacagacaagcttccactaacatccctcttaycctcctagtagcagaacaaacaccaagtctctttcccatgttctccctccaactttcttctgcccatggaagcagcaacatctggttttgccaaagtttctgacacaccctcgatgtctaagcactcagccaaggttttagggatggactgggaacaagccatgtcaatgttgactcaagtaacttctttgtggacagtaaatcagtgatgagtaaagaaaacaagggactttcagaaactaataaagtgccacgataaatcttaggaactgttttcaagtaacacatttcattttatgt

SEQ ID NO: 23226 - DNA, 599 bp, Chicken  19866894236305_1
  misc_feature (1)..(40): n is any nucleotide
nnnnnnnnnnnnnnnnnnnnnnnnnnnnnnnnnnnnnnnncactgcacattaaatggaagggttactctgaagcatttgatatgtctgtaagaaatttatttcttcactgtgcttttacatttgatctgcaatgaaagtggtgagaacactatcagttgaagtactaagatatggagaagaaatgttttacattaattttccattcaaatatgcacaaagaagaaaaagttaggaaaaagatcaagcagatgtaataacaggctataaatggattaaattgggaaaatctcagttttcargaactaaatcttaaggtacagcatagagcagtggcagagaaatgacagcaagagacatcattctgacatgtacatatccacacagcttaagtaatattgtgaagtaaatcccttttgtaaaatactttaaaaatgcctatcatgacaatgacatttaagagacagagagctcttcaacagaaaaagacagagaatgataaagtacaacgatgagacagaaggcggaataggagtgagaagaggacgtagagaataaaatgaagttttgggaggattggggaaataagaagacaaaaatg

SEQ ID NO: 23227 - DNA, 599 bp, Chicken  19866894236307_1
  misc_feature (1)..(68): n is any nucleotide
nnnnnnnnnnnnnnnnnnnnnnnnnnnnnnnnnnnnnnnnnnnnnnnnnnnnnnnnnnnnnnnnnnnnctaatttgccctgaaaattaaggtaaattgaatcaaggcgcttttaattctgattcagagtaaccacatgagagtttaatgtcatttaattaatccactgtggattgacacttctgtttaatttggattaccttttggagaagttcagtacaccaaaattctgatgatggatttgggccagaattttcagaaaacaatctttcacttcaaaaataaaacctgggacgtgggwtttaattagagcctcgtggctgaaagctattctcatttgatttccttctgtaatttgcaaaatattaagcttgattacttaaaacaatagtgatcgtttcatagacattttcattggataagcactttcttcctaaatattatgtttaaaaattgaaatacaattgacattataatcatagaattacagaactgtttgggttggaagggaccttaaagcccacccagttccaaccccttgctgtggamagggctgtcccccaccagctctggctgcacagggccccaccccaggtggcc

SEQ ID NO: 23228 - DNA, 564 bp, Chicken  19866894236307_2
gaattttcagaaaacaatctttcacttcaaaaataaaacctgggacgtgggwtttaattagagcctcgtggctgaaagctattctcatttgatttccttctgtaatttgcaaaatattaagcttgattacttaaaacaatagtgatcgtttcatagacattttcattggataagcactttcttcctaaatattatgtttaaaaattgaaatacaattgacattataatcatagaattacagaactgtttgggttggaagggaccttaaagcccacccagttccaaccccttgctgtggamagggctgtcccccaccagctctggctgcacagggccccaccccaggtggccttaaacatccagggatggggcacccacarcttctttgggtagctatgccagcacctcactgcgctatcagtgaaaaattaatccatttgttactgatatcagcaataacctatgccattaacagagctaggtaagattaaacagttttttcctctctccttttcttgattgttcatctttttgtctcatcatctttaaccatgttattggggg

SEQ ID NO: 23229 - DNA, 484 bp, Chicken  19866894236307_3
attctcatttgatttccttctgtaatttgcaaaatattaagcttgattacttaaaacaatagtgatcgtttcatagacattttcattggataagcactttcttcctaaatattatgtttaaaaattgaaatacaattgacattataatcatagaattacagaactgtttgggttggaagggaccttaaagcccacccagttccaaccccttgctgtggamagggctgtcccccaccagctctggctgcacagggccccaccccaggtggccttaaacatccagggatggggcacccacarcttctttgggtagctatgccagcacctcactgcgctatcagtgaaaaattaatccatttgttactgatatcagcaataacctatgccattaacagagctaggtaagattaaacagttttttcctctctccttttcttgattgttcatctttttgtctcatcatctttaaccatgttattggggg

SEQ ID NO: 23230 - DNA, 600 bp, Chicken  19866894236309_1
aagataactactctcagaagcaatccctgtgttgaataggaaaaaaaagaaatagctctgctttgcatcaggatgccagttcgaagcatttgaagcttctggtggagagaggctgcagatagaaaagcagggaagcatgaaggttcacgtgcagtgaaaaaactgtgtcaatttctttttctttatggacaaaataagatgggaacaaacatctgaattttactgggcaacctaaccttccaaactaggttttttaaaacaaacctttgactagtcacagggcatctataccagcaattyattatggcattcagctgtgtcctcagggcatgttggacatagtagagctgggtgtgtcagcagaggagatgcccacatgccatgatactgcctctggctctggtcacgcttgggagctgactctcagcctgggtcccacagcaccttgctgtgcctctggcctggctgagattcccatggtttctctctcctcagcaaacaagggaagagactttctctccttggttaaagtcacttcttccatagagctgaagtgctgtcttcagctctcaccatcatgctctgatggtgactacatac

SEQ ID NO: 23231 - DNA, 599 bp, Chicken  19866894236311_1
  misc_feature (1)..(21): n is any nucleotide
nnnnnnnnnnnnnnnnnnnnnttgatgtagtggattttgatgagtctgggtttttgcaaatccaagagcagctacttcaggggggttggcgtgtgcaccttgggagactgaacagcttgaggagtgaactaacatggaaccttttctgatctccttaagtgatcagaattcaattccaacatcgtagaatacaatggagctcgttcccttctgttctttccacatgcaaagctcaaagaggggagatttaggttagatacaaggaaaaaatattttacagtgagggtggtgaggcactgraacaggtygcccagtgatgcggttgatgccccatccctggcgactttcacggtgaggctggattaggccctgggcaacctgatctagccgtggtgtccctgttcattgcaggggggttggactagatcaccctcagaggtcccttccaactctaaggattctgtgattctataaattgatgtactttgatgcatggaagctggaccacctggccttgacagctgcaatgtgcaggaggttgttatgaggacccaggtgctgcgttgcatcagacttgaggtttctcagggccttctgga

SEQ ID NO: 23232 - DNA, 599 bp, Chicken  19866894236311_2
  misc_feature (1)..(13): n is any nucleotide
nnnnnnnnnnnnnttgatgtagtggattttgatgagtctgggtttttgcaaatccaagagcagctacttcaggggggttggcgtgtgcaccttgggagactgaacagcttgaggagtgaactaacatggaaccttttctgatctccttaagtgatcagaattcaattccaacatcgtagaatacaatggagctcgttcccttctgttctttccacatgcaaagctcaaagaggggagatttaggttagatacaaggaaaaaatattttacagtgagggtggtgaggcactgraacaggtygcccagtgatgcggttgatgccccatccctggcgactttcacggtgaggctggattaggccctgggcaacctgatctagccgtggtgtccctgttcattgcaggggggttggactagatcaccctcagaggtcccttccaactctaaggattctgtgattctataaattgatgtactttgatgcatggaagctggaccacctggccttgacagctgcaatgtgcaggaggttgttatgaggacccaggtgctgcgttgcatcagacttgaggtttctcagggccttctggaatctgcca

SEQ ID NO: 23233 - DNA, 600 bp, Chicken  19866894236318_1
ctaatcagactgcattcttctaatctttgcttaaccttgacacttcttttcttcagccagaactacctgtgaaatgcaatctatgcaccaacttatcactaaaatgaacaggaaaacgttcaacaacgttcacagccattaggtgaggactttaaatataaaggttgtaaattttattctgttacatatttataaatgaaaaggaaatgccctacattttaatcaagcactgacacaattgtcaatattgcacctctaagcaattgctaatgtcatttttgtagggatactaaagactcrtttatcagcaytcattattaacattcagcacagaattgcagagaagtaaaagcaacgttacttggctgagagtgacaaattgaattcctgacgagagacaactgtaagcacagtgcactgccaggtaaagatgttcacactaacttataataagtggtacctagattaatgtggtgttcagctgaaagagtgacaataactacaatctctacctaacagagcatcactctgtatagatgtatttcaagaaacagtttctgttctgctgagaccaaggtgttgagcaaatgatttttgttc

SEQ ID NO: 23234 - DNA, 600 bp, Chicken  19866894236318_2
gcattcttctaatctttgcttaaccttgacacttcttttcttcagccagaactacctgtgaaatgcaatctatgcaccaacttatcactaaaatgaacaggaaaacgttcaacaacgttcacagccattaggtgaggactttaaatataaaggttgtaaattttattctgttacatatttataaatgaaaaggaaatgccctacattttaatcaagcactgacacaattgtcaatattgcacctctaagcaattgctaatgtcatttttgtagggatactaaagactcrtttatcagcaytcattattaacattcagcacagaattgcagagaagtaaaagcaacgttacttggctgagagtgacaaattgaattcctgacgagagacaactgtaagcacagtgcactgccaggtaaagatgttcacactaacttataataagtggtacctagattaatgtggtgttcagctgaaagagtgacaataactacaatctctacctaacagagcatcactctgtatagatgtatttcaagaaacagtttctgttctgctgagaccaaggtgttgagcaaatgatttttgttcatttgattcag

SEQ ID NO: 23235 - DNA, 491 bp, Chicken  19866894236326_1
ctcgtaatcaaaaccaaacaaaatgcagacactgaaaagcactcagacatggttggcaagttctgattccacagaaaagatgcagttggtctcctaaaatattttcccagcaccaagtctgctctgcaagtgtggaaaacccatcttaacacagtaagaatcacaggatcctcaaactaaccacagatcatcagtatcatctcgtagaatcacagaatggattgggttggaagggaccccaaggatcatcaagttccaaacccctgccacaggcagggctgccaacctcaagatctgatrctagaccaggctgcccaggggcccatccaaccctgtctggaacacctccagggacaggccatccacagcctctgtgcgcagcctgttccagcacctcaccaatggtatgcaccaatggaaggacactgtgctctcaagagcagctcctgtgacctcaaaatactaccagatattcagataacagaggaagt

SEQ ID NO: 23236 - DNA, 600 bp, Chicken  19866894236330_1
gaacttgattacatgacttttgaacttatcatttctaagcacttatagtaatgtttgatagctattgttttacaaatttgtttgtaattaacacaggatagatcttcctgaatctaaattaaatgcttatcagagacatctatgctaaagttgcttcaaacctaagaatttttacttagtgttaaatacatgcattgataagctagtgattgtagctatatttttacacatcagtttaaggagctaggctcaagagagtaaaatagcaaaatgaattagttagaagaactaacatattcyacctactactgagtccaacagaatttccaagatctgtctttcttgtatgtccttaagcctcagaggaatttctagtaacgatgtcagaatgttatccaataccttattttaacatggactagccttgaaaccccagtcctagtctcaatgattaagatttttataatttagcctatgcttccaagcaggtgcaccctgcaaagcaaagcaggaaatagcatatgcaatgctatacttgtgatatgtaattagtatttgtagtgtagaatctatcctttcctatcttgttgctttcagaag

SEQ ID NO: 23237 - DNA, 528 bp, Chicken  19866894236330_2
aatctatcctttcctatcttgttgctttcagaagattaggaaaacagcatgagaactactaatgatttcattattctttcaaaattgaagccctacactgtatccataatatgcatctgcttacatatctcctacttgttagtttttacaccactgtcagacaagggacatctgcagtacattacagtgtattgttgcatctttggatactacattgttacagttagaaagactagcacagtagaaaggcaacacaggagcagaagtgactaacaggaaaggaatactcacctgtctccrtggatctaggctcatgagaaaaaatccacaaaggaaggatctccagaaaaagatcctgccctggtggcagtcagcccttaaatggtgtctaagagaggtgcagccaggctccaccccttccaatcactcagatgaattgccttcactggtactcccagggctgactgggccttttccccaggtgatcaataagtgggtcaagccatgactcaatagttcccacatata

SEQ ID NO: 23238 - DNA, 600 bp, Chicken  19866894236334_1
ttcctccagtatttctttatcttcttgccttctcaggattatattaatgatcttcacttggctcccttttcaatctgttcagaaacccataaattcagaattgataggaaagcccagatgtttctccataggtgagggctgaaggaatgccatagctttcataccatcgcataggcagacatttggaagattaggggctgctgaatgcatcgccgcggatcagcacaaagttatttgcagttgtttctataatcgtgttgctcagggagaaaattcacagtatgtcttgctgcctgccckcctcctgagcacgcaccctgccacctgtgtgcagggctggggtagtgttaatgccctgtgcctgctagaagccatataaattaattgacttgctaaacacctgctctctctgtttgtttgtttttcccttccttccttcctttccttctttcttttttcttttctttttttttgtttttagcttacatttctgtaaccaaaatgagttttcttcttacctcctatccttctttctccttttctcattccttctcttcccttctttctttttttcttcaataatctcatgtagaatcaagt

SEQ ID NO: 23239 - DNA, 600 bp, Chicken  19866894236345_1
tctttcccctctgctcagcacaggtgaggccacacctggagtccagttctagggagtaaagtacaagactgacatgtacatactgcatagaatccagtgagaagtcacaagaaggtttaagggactgttgcatttctcctgtgaggtgtggctgagatagctgaactgttcagcctggaggagcctagaggaatgttatcagtgtttaatacccaaagggagggtgtgaaaaggatggagccagactcctttcagttgttcccagtggaacagaggcagtgggcacaatctgaaacacaygagtctctgtctcagcattagaaaacacttagtgtgcagrtgacagcactggcacaggttgcccagagtgattgtggaatttccctctttggagatcttcaaaagcctggtcttcaaaaacatgatcctgggcaaactgctctgggtggctgtgcttgaacagagagcttggaccacatgatctccagaagttcaatccaccttcaaccattctgtgattctgtgaagctcaattaaggtattatgatagacaattttttaaaatttatttatttttccaaaatctcaagtaagttgttc

SEQ ID NO: 23240 - DNA, 600 bp, Chicken  19866894236345_2
gtccagttctagggagtaaagtacaagactgacatgtacatactgcatagaatccagtgagaagtcacaagaaggtttaagggactgttgcatttctcctgtgaggtgtggctgagatagctgaactgttcagcctggaggagcctagaggaatgttatcagtgtttaatacccaaagggagggtgtgaaaaggatggagccagactcctttcagttgttcccagtggaacagaggcagtgggcacaatctgaaacacaygagtctctgtctcagcattagaaaacacttagtgtgcagrtgacagcactggcacaggttgcccagagtgattgtggaatttccctctttggagatcttcaaaagcctggtcttcaaaaacatgatcctgggcaaactgctctgggtggctgtgcttgaacagagagcttggaccacatgatctccagaagttcaatccaccttcaaccattctgtgattctgtgaagctcaattaaggtattatgatagacaattttttaaaatttatttatttttccaaaatctcaagtaagttgttctcacctgctcacactccttttcccttagctttcattcact

SEQ ID NO: 23241 - DNA, 600 bp, Chicken  19866894236346_1
gacttctctccatttctggagctgtagacattctccagactctgaacacgtggtgtttgtcctgctctggaaaccttcagacatgggcataagttaaatctatggttcctccaggttttgttgaatctggagatacaagacagtgtttaccactgctcccattattacttcactaattcctacctctgtgtgatttttttggcatcatactgagttgtgaatcctgtgactagtatacaagacaatgctttccacttttgacctttgctttccaacccttaattctacagcctaacagcsttcataataacagtttcctgtaggttatttccatgttcagtttaacactttcatttacgtttaatccttctgatcttattttgtttctttcttcccttttcctgttacaagtgttgcatcattttgtgatcaggagatgatctgatgaagccatcatcaaaccagcctggggttctagacttgtacctttgctatggaaagcaacagactactgaacaggctgctgaagggattaatgctcatttatgagatcagtctcaggcagagcttgtaacaggatgcttttttaacctgctgcta

SEQ ID NO: 23242 - DNA, 600 bp, Chicken  19866894236356_1
attgatgaagactcttaatctcttcgctccaaacaggcaaaaaaagtagctgaaagactttatgtacaaactgagagctctgcagaactgtttatcaggttctgtcatgggttcgtaagaattattaatgaatgaaaatgtgatttttaagccttttctttaaggtcatacgttgaaaatgtgccctggctccgtgttgccgtgcagcattatttacatacaagaacgctgacagaatagtcagtagtggtccgtgccgttgtccacttgagctgtttgttatagctaaacaatgcagasttataataattatgtgatatatagagagtatttaaaatgaatgtgtacacttttcctgaaaagcagcacaactctttccttgttcactactctattattttaacagtagttcatagtacgtatattctaatgtatgcttgatgaaaaagctcagcaggagcagcgaacctggaagaaacacctactaggtttgttttcataagaggactgttttagctaaataagtgagaatacaggctgaggttaacacaaaagaagcagctgaggaaaactcagaaggctggagcaggaaaggtaaag

SEQ ID NO: 23243 - DNA, 600 bp, Chicken  19866894236357_1
gcacaggcagcaatttcactcactctgttacaaaccctatagcaacaaagttgactcccacatacccttttttaaggcgatttatgacagaagcaatgtgaaggaacagatgagcattcctgcacctagcttcaactgctatctaatgatcacagtcactattcccctgttttaataccaaacatcatgttccaaacggagtgcttccctgcaagccgcaggcaggccatgtgggactaaatgggacttccagtgtgatgaatatagcagcgtcttaagtgattaggacacctgttgacrttaatatagaagcatgcatgaaaacaagtgtgccacgctgaaatatatgtacacaaatattaagaggattagagaaattgctaaaatggatagtgtggcgtttaacgccaacatgtctggaatccaggcaggatggaaataacacacactgagctgctcccttgttttcctctttagtggctcatctggggtgtgaacgctgtacaaggggatcatttgcttgcatttaagatttctgcttaaagtatgtctttgtttggaatcggcctccgattcataaccaccttcctttagtagctg

SEQ ID NO: 23244 - DNA, 600 bp, Chicken  19866894236357_2
ggatcatttgcttgcatttaagatttctgcttaaagtatgtctttgtttggaatcggcctccgattcataaccaccttcctttagtagctggcacctctgccatgcaagctgcaagaaaaagtaattaaatttaatagaagccaccctggctttgaagctgccctggattaagagccacaaggagaagcaattaaactgcagcagccaagggttcgatctgaagttatatggtgactttttttctttggaggaaattttctctgtaagtggatttggattgtcaaacccaattggattcraaagcgcagaaacttcctttggtgggaaattttgtcctgaagcaaaaggaaaaaataatgagaggcgaaatggggatcggttgtgaggatccaggatatttgtagcccttttccatacgttccattgaagagttcagcagagtgctgaagggaaagggaagcgtgcaaggacagctgtgtgcctgtttgtttgcaggcaggtcggcttatgagcagcctagcacagagattcattaggggaagggattccttctcaccaaacagggtgagaagtgtggcttaaagctgatggggattctt

SEQ ID NO: 23245 - DNA, 600 bp, Chicken  19866894236363_1
aaagcatgccagaattctctagcactgttcattggcatggggcagagcaggcagataaaagctgcagactaaaacaagttacttggaaagaaacaaccgcagtgatgaacagaataacaaaactagcagcactaacgtaatttatattttttgaggaagacatctaatagtgtaagaaaaaaaaaacaacacccttaaaatatggtccaaatatcatcaagcgggtgtcatttcctgaagtgggtatactagtggtcctacaagatggaaacaacaccctcctgcttttgcaaagcctcwtcttacaactacattttagatgtacatgttaaatttactgattttgtagatataatttgcactcattacttgtacaragcgctgctttgctgaaggtttacagttggctgtttggtctactgctatcagacataacacaagagctgttctcttcagattaagcacattttgcatgaaaatactccagctgataaaggaaacagaactgtaatcaagagctgcagtggaaatactacacaactcagaggagaaaaagaagygggaagaagcgtaggtcttcatccttttgttttataaaaa

SEQ ID NO: 23246 - DNA, 600 bp, Chicken  19866894236363_2
gttacttggaaagaaacaaccgcagtgatgaacagaataacaaaactagcagcactaacgtaatttatattttttgaggaagacatctaatagtgtaagaaaaaaaaaacaacacccttaaaatatggtccaaatatcatcaagcgggtgtcatttcctgaagtgggtatactagtggtcctacaagatggaaacaacaccctcctgcttttgcaaagcctcwtcttacaactacattttagatgtacatgttaaatttactgattttgtagatataatttgcactcattacttgtacaragcgctgctttgctgaaggtttacagttggctgtttggtctactgctatcagacataacacaagagctgttctcttcagattaagcacattttgcatgaaaatactccagctgataaaggaaacagaactgtaatcaagagctgcagtggaaatactacacaactcagaggagaaaaagaagygggaagaagcgtaggtcttcatccttttgttttataaaaaagcaaagcaatagtttcatttaccattgcaactttcatttataagtcactactttacaacatattatttaaagaaaa

SEQ ID NO: 23247 - DNA, 600 bp, Chicken  19866894236363_3
caagatggaaacaacaccctcctgcttttgcaaagcctcwtcttacaactacattttagatgtacatgttaaatttactgattttgtagatataatttgcactcattacttgtacaragcgctgctttgctgaaggtttacagttggctgtttggtctactgctatcagacataacacaagagctgttctcttcagattaagcacattttgcatgaaaatactccagctgataaaggaaacagaactgtaatcaagagctgcagtggaaatactacacaactcagaggagaaaaagaagygggaagaagcgtaggtcttcatccttttgttttataaaaaagcaaagcaatagtttcatttaccattgcaactttcatttataagtcactactttacaacatattatttaaagaaaatagacgccttgagaaattttcagtcaaaagacataagcattttctaagaaatcttcattttgtgaacaygtgtttgcggtaacctgtcatacttggcctaccgttgatttggataacggttatatatttcacagtctgcaacaacttctgcgttctgttgccctatgctcatggaaactccca

SEQ ID NO: 23248 - DNA, 576 bp, Chicken  19866894236363_4
ttctcttcagattaagcacattttgcatgaaaatactccagctgataaaggaaacagaactgtaatcaagagctgcagtggaaatactacacaactcagaggagaaaaagaagygggaagaagcgtaggtcttcatccttttgttttataaaaaagcaaagcaatagtttcatttaccattgcaactttcatttataagtcactactttacaacatattatttaaagaaaatagacgccttgagaaattttcagtcaaaagacataagcattttctaagaaatcttcattttgtgaacaygtgtttgcggtaacctgtcatacttggcctaccgttgatttggataacggttatatatttcacagtctgcaacaacttctgcgttctgttgccctatgctcatggaaactcccaactatattcccaaactacctctactgaaaggaatgccaagtctcaggctttagttttcactcagtaaactcataatgaggccacaaaaggaagttcagcccaaacaagactgcactgaaatgcaagcccctccttcattaggggagtgaggccaaacaagca

SEQ ID NO: 23249 - DNA, 599 bp, Chicken  19866894236370_1
  misc_feature (1)..(146): n is any nucleotide
nnnnnnnnnnnnnnnnnnnnnnnnnnnnnnnnnnnnnnnnnnnnnnnnnnnnnnnnnnnnnnnnnnnnnnnnnnnnnnnnnnnnnnnnnnnnnnnnnnnnnnnnnnnnnnnnnnnnnnnnnnnnnnnnnnnnnnnnnnnnnnnnnntcagtgttctgaaataaattgaaatgtttgatcttgctttgttaattgtttgtaatgagatttttgtagacatcgaatatccacagagagcacgttatgcaaagctgaggcccagtgtaatgctcgcatctctggtggctgtgtctgcccttgytgtgtgcatgtacagaagtgtcattagggtcatgtgatgcgattcagaaaatgttatcctgtttttcattctttcttacaaatctagagaatgaaaaatacctgactatatgtttgctctgggtatcccagtctgtggttgtgagtttgggctctctgaacagtcacataggaggtgactgagggatgattttaagtggcacatgtgaaatctgtctatatagcataatgaaatattgttacttctgctgcaggtggtatcaaaatatcagttgtccrtgctctgacctcatcatgcag

SEQ ID NO: 23250 - DNA, 600 bp, Chicken  19866894236370_2
tggtggctgtgtctgcccttgytgtgtgcatgtacagaagtgtcattagggtcatgtgatgcgattcagaaaatgttatcctgtttttcattctttcttacaaatctagagaatgaaaaatacctgactatatgtttgctctgggtatcccagtctgtggttgtgagtttgggctctctgaacagtcacataggaggtgactgagggatgattttaagtggcacatgtgaaatctgtctatatagcataatgaaatattgttacttctgctgcaggtggtatcaaaatatcagttgtccrtgctctgacctcatcatgcagcagtggcggtcagtggtgctgcgggtggttccctaccagcgtcttcyatcactctggttgttggggcccttcatagttctgctcatctggaatgcttggtggtatccacaggtcattgcttctactgaaaagggcagaagggttttctcaaaatcctctgtgagcaagcaccccctggaagcgcttacacatcctcttgttatttgagctctctggtattacccaccaggcagaacaccgttctcctcacgactgtgccaatggagtgagcaccgttta

SEQ ID NO: 23251 - DNA, 600 bp, Chicken  19866894236370_3
gaaaatgttatcctgtttttcattctttcttacaaatctagagaatgaaaaatacctgactatatgtttgctctgggtatcccagtctgtggttgtgagtttgggctctctgaacagtcacataggaggtgactgagggatgattttaagtggcacatgtgaaatctgtctatatagcataatgaaatattgttacttctgctgcaggtggtatcaaaatatcagttgtccrtgctctgacctcatcatgcagcagtggcggtcagtggtgctgcgggtggttccctaccagcgtcttcyatcactctggttgttggggcccttcatagttctgctcatctggaatgcttggtggtatccacaggtcattgcttctactgaaaagggcagaagggttttctcaaaatcctctgtgagcaagcaccccctggaagcgcttacacatcctcttgttatttgagctctctggtattacccaccaggcagaacaccgttctcctcacgactgtgccaatggagtgagcaccgtttattaacaagcctgatgtcagaagtgttaattcctcctgatttccctgcaagctggcagcrctgactcag

SEQ ID NO: 23252 - DNA, 600 bp, Chicken  19866894236370_4
gcgtcttcyatcactctggttgttggggcccttcatagttctgctcatctggaatgcttggtggtatccacaggtcattgcttctactgaaaagggcagaagggttttctcaaaatcctctgtgagcaagcaccccctggaagcgcttacacatcctcttgttatttgagctctctggtattacccaccaggcagaacaccgttctcctcacgactgtgccaatggagtgagcaccgtttattaacaagcctgatgtcagaagtgttaattcctcctgatttccctgcaagctggcagcrctgactcagcagttttacagtcagaatgtggaagagcactgctgagggctgctttggaaaaggggcccagcaggagctgctgactgcatgtatgaggacatcctgcagcctcttggggtggttgaagggaagtgagcgctaggcagtcagctggaggtgcatgtaggctgcagctagctcccactgtggccctgaggaatgctcgttttccagttgctgctgttgtcacagttgtctttcacatgagaatgaatcttgtattttctgcctgctccgtacctcaggaagaagctgctgctt

SEQ ID NO: 23253 - DNA, 599 bp, Chicken  19866894236371_1
  misc_feature (1)..(126): n is any nucleotide
nnnnnnnnnnnnnnnnnnnnnnnnnnnnnnnnnnnnnnnnnnnnnnnnnnnnnnnnnnnnnnnnnnnnnnnnnnnnnnnnnnnnnnnnnnnnnnnnnnnnnnnnnnnnnnnnnnnnnnnnnnnnnnagaaaaaggtatgtgtactataggatttttgagggatgtctgttttaggggtcatctggcaaccaatctgtactgtgaccaagggcaatcacaaacttcccctgtcttacatttatcacccacgtctctgtgggagatacctagggaaaaacaaattgttgtcaagtaaacatrtgagtatttwatcacagaatctgttgctgttctcaaagagcaagtttaggcctttctgcagtgctgagcatgtattcattgcaaaaattgtaattgagtaattttgtcaaccttttggagctactcttctgttctcttgcaaggaagctgcttttggcttcacttatatattagggaccgagatactgaatcacacacgcgtaatataaaatacaatgttgtgtgtattccataaaactctaggcatgccctttattcaaactggtttaagatttaaagaaatcctaaaaggagagcgt

SEQ ID NO: 23254 - DNA, 599 bp, Chicken  19866894236371_2
  misc_feature (1)..(116): n is any nucleotide
nnnnnnnnnnnnnnnnnnnnnnnnnnnnnnnnnnnnnnnnnnnnnnnnnnnnnnnnnnnnnnnnnnnnnnnnnnnnnnnnnnnnnnnnnnnnnnnnnnnnnnnnnnnnnnnnnnnnagaaaaaggtatgtgtactataggatttttgagggatgtctgttttaggggtcatctggcaaccaatctgtactgtgaccaagggcaatcacaaacttcccctgtcttacatttatcacccacgtctctgtgggagatacctagggaaaaacaaattgttgtcaagtaaacatrtgagtatttwatcacagaatctgttgctgttctcaaagagcaagtttaggcctttctgcagtgctgagcatgtattcattgcaaaaattgtaattgagtaattttgtcaaccttttggagctactcttctgttctcttgcaaggaagctgcttttggcttcacttatatattagggaccgagatactgaatcacacacgcgtaatataaaatacaatgttgtgtgtattccataaaactctaggcatgccctttattcaaactggtttaagatttaaagaaatcctaaaaggagagcgtgtgaaaacaa

SEQ ID NO: 23255 - DNA, 600 bp, Chicken  19866894236375_1
acagctcatggggctctcagtgatgaataaggatttcagttgctctccagatacctgaagtgtttctaagattacccaggagctgctggggaagtgagaggagatgaagcaaatcagtgtgctgccatggcaaggagacagcagagcctctcatgtaatatttagtgtgttgtgtctaatggtaatgaagcattgcagcgaggcatccccaagccctacgccaaggctgcattgctatgtggaaggttcaggctgaggaaaaacacactgcgtgccttttagcaacctaatggtcagagytacagcagatgtgtgtatttactgtgggtcaggacgctgcctgaggctctgaagacactcctgcaccccacaacagccctgagcatcaccccagggacacccagcatcacccacaccagtcgcaccctatctgcacaccagcagcaaacctcagccctgccgaaatatgtaacgtttcagacaggctcttaccaaatatagaatcatatgctggaaaaaagagactgagatttaaagctcactggaaactcaagggggaatggccccattaatcaatgagaaagactggaagagacgtgt

SEQ ID NO: 23256 - DNA, 600 bp, Chicken  19866894236377_1
tcccattttatttccatgttccgtaagcaggtgccagcttcgggccattggctcccagtggcccaggaggagcttcatcctcagctcgtcacgtccctcccacgggcagcagccagcagcacaatgtgacacaccgccgtgctcagctccagctttgctgccgggtgaggagctgacaggcttctcttctctgctcctgccaaaaaggagctctctgcgtgggcgtcccggcggtccagcactaggataagctattctgagcaaaaaaaagatgggggggaaaaagcaaatgaagccctraatggcacgccagcgaggtatttacagttggagcgatgtcaggactgaattccctgaaatgcaatcacagcacatgtgggatttgcatgtttcattaagaaacagtaatgacgcagcttcaaaggcagcctaatagcggaaactcttccaccacatattctaacccagacacctccgccctcaaaacgaaggtgcagcacagcacagcacctcggcgcctcacttccacctgagctaaatcgtcctggcgaagccatgcagctgctgccaaggtcagacttatggggcattgggggctgc

SEQ ID NO: 23257 - DNA, 599 bp, Chicken  19866894236378_1
  misc_feature (1)..(34): n is any nucleotide
nnnnnnnnnnnnnnnnnnnnnnnnnnnnnnnnnnctgccacgtctgccaccagcccctggtggacctcatctacttccagcaggatgagaggatctactgcggccggcaccacgccgagctcttccgaccgcgctgtgcctcctgtgatcaggtgggcaccgggcgaggagatgctttgggctccgttgtgctgtcgttatgtgctcctgtgctctactggcagctgcaaacgcgtcaggatgggccagaggaactcccttcccacaccccagagatccccacgcccaccccaaagcacraaaaaagcatgttctgggyggtgtattctgtggctgggtgcttacgggacggtttgtttgttcccttccagctgatcttcttggaagagtgcatcgaggcagagggccggcgctggcacccggagcacttctgctgcctggagtgcgacgcgccgctgtgcgggcagcgctacgtgatgcggagcggccggccctgctgccgcagctgcttygacagcctctttgccgagccgtgccaggcctgcggggagcccatcggtacggccgtgctgccggagggacgggtgggcggctgtggg

SEQ ID NO: 23258 - DNA, 599 bp, Chicken  19866894236378_2
  misc_feature (1)..(15): n is any nucleotide
nnnnnnnnnnnnnnnctgccacgtctgccaccagcccctggtggacctcatctacttccagcaggatgagaggatctactgcggccggcaccacgccgagctcttccgaccgcgctgtgcctcctgtgatcaggtgggcaccgggcgaggagatgctttgggctccgttgtgctgtcgttatgtgctcctgtgctctactggcagctgcaaacgcgtcaggatgggccagaggaactcccttcccacaccccagagatccccacgcccaccccaaagcacaaaaaaagcatgttctgggyggtgtattctgtggctgggtgcttacgggacggtttgtttgttcccttccagctgatcttcttggaagagtgcatcgaggcagagggccggcgctggcacccggagcacttctgctgcctggagtgcgacgcgccgctgtgcgggcagcgctacgtgatgcggagcggccggccctgctgccgcagctgcttygacagcctctttgccgagccgtgccaggcctgcggggagcccatcggtacggccgtgctgccggagggacgggtgggcggctgtgggagacccccgtgccctcacc

SEQ ID NO: 23259 - DNA, 600 bp, Chicken  19866894236378_3
ctctactggcagctgcaaacgcgtcaggatgggccagaggaactcccttcccacaccccagagatccccacgcccaccccaaagcacaaaaaaagcatgttctgggyggtgtattctgtggctgggtgcttacgggacggtttgtttgttcccttccagctgatcttcttggaagagtgcatcgaggcagagggccggcgctggcacccggagcacttctgctgcctggagtgcgacgcgccgctgtgcgggcagcgctacgtgatgcggagcggccggccctgctgccgcagctgcttygacagcctctttgccgagccgtgccaggcctgcggggagcccatcggtacggccgtgctgccggagggacgggtgggcggctgtgggagacccccgtgccctcacctgcgatcccctcgtaggtgtcgacagcgaagaggccacacaccagggtctgcactggcacacccgcgccgcctgcttctgctgcagtctgtgccgaaagccgctgcgtgggcagcccctcaccgcccgctgcgggcggctcttctgctccgagagctgcagtctgggctgggatgtgtcctctgctgcctccac

SEQ ID NO: 23260 - DNA, 600 bp, Chicken  19866894236381_1
agccttactgtttctgtagagcacaggcaacactcaacttcataacaaaagaaaccagagagagcgctatcagctcagcaagacaaagatctgtacctcctgctctcctttaagagaagccatactggagtaggtactcaaacagcaatccacacatggaagaatttcatgaatcgcagtcagatgaaataaaagagggacagatgcattaggccaatgataatatgcttaatacagcttctctctgtacaactgttaggtttaaatatgattttcagtaacaattgcaatggtaacagwgccaaatgcttctgaggacatcaatccttttgtaccccacaaagcaaggcgcagctaaacatcctgaccatgcrctgctggtggaccttgaactgcttcagcatgaaacaaagctatcgatgctaaagcttagggaatgtgctaaaaatacatgatgatgtttgaaggctcatgtccacaatcattcagcacttcccttctatctcagctgaggaggaaaggctgaaaaacaaagcagaaacaggaaactcctacagcacagctcttctggaaagtactgaaaacattttctttacattt

SEQ ID NO: 23261 - DNA, 600 bp, Chicken  19866894236381_2
tcagcaagacaaagatctgtacctcctgctctcctttaagagaagccatactggagtaggtactcaaacagcaatccacacatggaagaatttcatgaatcgcagtcagatgaaataaaagagggacagatgcattaggccaatgataatatgcttaatacagcttctctctgtacaactgttaggtttaaatatgattttcagtaacaattgcaatggtaacagwgccaaatgcttctgaggacatcaatccttttgtaccccacaaagcaaggcgcagctaaacatcctgaccatgcrctgctggtggaccttgaactgcttcagcatgaaacaaagctatcgatgctaaagcttagggaatgtgctaaaaatacatgatgatgtttgaaggctcatgtccacaatcattcagcacttcccttctatctcagctgaggaggaaaggctgaaaaacaaagcagaaacaggaaactcctacagcacagctcttctggaaagtactgaaaacattttctttacatttacctacgtcaaaaggatcgagccaagcaaaacatggataaataaaggttgttgggttggttttccctcccccca

SEQ ID NO: 23262 - DNA, 600 bp, Chicken  19866894236386_1
ctgaatggttgtccttcaaacattaggccactgattttaaaagagggaagtataaactattataatataatcagtattgagatctaagtaataaaactctccagccagtcttttctatatattctgtctattaaaataagaactggaataaagctgtttgcgttgtgttatgggtatgtatgtaaattgtttagacagaactgaaagatatttcatagctgatatcagcaacatcagagttaagacaggttgtcaactccagagctgatgatgaaagcctgaggtatgatcctgtgccgrtggaatgctgtaaatgggagctttgttactgccattagtggacactttactcggcctttactcttttattaaatagtttatttgggtagagtttggttcgtgggatattttgagtttcgtttgcagttctgtacattttccttgcaagagatgtactctgctttgtgtgatggcttccgtatggagctttctaataaatcaaacataacaagacacttcttatttcctctggaaaactggtaaatacaggcctctggaacagtctaattttaaatgtagaaaaaggagaccaaaggccca

SEQ ID NO: 23263 - DNA, 600 bp, Chicken  19866894236388_1
tactggaggacattagcggaacagtcttttgtatgtgaagaaaaatggtagacagatttgataaattattggtcatggagaatttgaacagcccatctcctccattctccaaatgcaataaattttataagatcagagtgtatgtcaaatggagttcataaagtggaaaatgacactatttactttcatcaaataaaatgccgccaaaatttatggctctgcacctccaaaatctgtcagaatgctactgctattttgtgtaacactttagcaacccaaactaatggagctataaaccarcttaggctagcagaaggtctaaaaaacaaaaatcctaaattcataacttaaagtaacactcaaagtttttgtctgcttagatgagaggaaattgtacaaatttttataattagcagagatkggaattattttctcatataagctgaaaaacctgacccaaattgggtcctgaaccactgattgctgacaccactgctgtaacattgagttcaaatgtaactctgtgctcttgaattacaattttctcttgagctgtcatgccttcatgtaacactgcacatctcaagaatgtgaacctga

SEQ ID NO: 23264 - DNA, 600 bp, Chicken  19866894236388_2
attttataagatcagagtgtatgtcaaatggagttcataaagtggaaaatgacactatttactttcatcaaataaaatgccgccaaaatttatggctctgcacctccaaaatctgtcagaatgctactgctattttgtgtaacactttagcaacccaaactaatggagctataaaccarcttaggctagcagaaggtctaaaaaacaaaaatcctaaattcataacttaaagtaacactcaaagtttttgtctgcttagatgagaggaaattgtacaaatttttataattagcagagatkggaattattttctcatataagctgaaaaacctgacccaaattgggtcctgaaccactgattgctgacaccactgctgtaacattgagttcaaatgtaactctgtgctcttgaattacaattttctcttgagctgtcatgccttcatgtaacactgcacatctcaagaatgtgaacctgaggtacctattcagcagcaggctatgcagcccttctggaagaaacagtacaccaaagcagataaaagaaatgtcctcagtgatttgttggtttttacattataagtagccaaaggcaaaagt

SEQ ID NO: 23265 - DNA, 545 bp, Chicken  19866894236394_1
aaatgatgattggcaaagtggcattgagggggtaacgaggatatgatgcagagcagaagaagggataaggagggggtaatatcccatcttcttgcttcctcctctcctgtctcctttctttgctttacactccgctctcccaagctttcgttctcctctctcagttctctccctccccatgtctgggctttgcagcctctccctggggccctcggctccgccagcccttcctgcagctgatttatcacccttgccagctcacttggaggaaatcagcgctgttttcggctcctccaagaygcagccacagcctctgggagccgtgggcacagcagtggggtacccagaggtgttaaaaggggcacggtgctcaytgggttcaytctcagcaccacagtcaagcgcagcagtttgtgcctgtaatctctcctgtgcttagaggtgagttttgtggcctctgggcttggtgcatcctctctgccactgactgctgctgaagatttagcaaatcctttaatctctctctccttcctcagtttctccag

SEQ ID NO: 23266 - DNA, 471 bp, Chicken  19866894236394_2
ggtaatatcccatcttcttgcttcctcctctcctgtctcctttctttgctttacactccgctctcccaagctttcgttctcctctctcagttctctccctccccatgtctgggctttgcagcctctccctggggccctcggctccgccagcccttcctgcagctgatttatcacccttgccagctcacttggaggaaatcagcgctgttttcggctcctccaagaygcagccacagcctctgggagccgtgggcacagcagtggggtacccagaggtgttaaaaggggcacggtgctcaytgggttcaytctcagcaccacagtcaagcgcagcagtttgtgcctgtaatctctcctgtgcttagaggtgagttttgtggcctctgggcttggtgcatcctctctgccactgactgctgctgaagatttagcaaatcctttaatctctctctccttcctcagtttctccag

SEQ ID NO: 23267 - DNA, 462 bp, Chicken  19866894236394_3
ccatcttcttgcttcctcctctcctgtctcctttctttgctttacactccgctctcccaagctttcgttctcctctctcagttctctccctccccatgtctgggctttgcagcctctccctggggccctcggctccgccagcccttcctgcagctgatttatcacccttgccagctcacttggaggaaatcagcgctgttttcggctcctccaagaygcagccacagcctctgggagccgtgggcacagcagtggggtacccagaggtgttaaaaggggcacggtgctcaytgggttcaytctcagcaccacagtcaagcgcagcagtttgtgcctgtaatctctcctgtgcttagaggtgagttttgtggcctctgggcttggtgcatcctctctgccactgactgctgctgaagatttagcaaatcctttaatctctctctccttcctcagtttctccag

SEQ ID NO: 23268 - DNA, 599 bp, Chicken  19866894236403_1
  misc_feature (1)..(163): n is any nucleotide
nnnnnnnnnnnnnnnnnnnnnnnnnnnnnnnnnnnnnnnnnnnnnnnnnnnnnnnnnnnnnnnnnnnnnnnnnnnnnnnnnnnnnnnnnnnnnnnnnnnnnnnnnnnnnnnnnnnnnnnnnnnnnnnnnnnnnnnnnnnnnnnnnnnnnnnnnnnnnnnnnnntgcatggctgcctcttcggctcgtcctgtacacccccctgtccttccctctgttgttgcctgccagtggcattgccttggtgctcttgggtccctatgagacgtggtgaaaagcccacagaagagggaaggtatgargtatcctgttctgtgtttattttgcaaaatggttctccatgtctttcatctgaaaagcaccttaatgtgtctcagacaaccccagcctattatgcacagagtgtggaactctgttaatgtccaacttgggcattggtacagtgagacctgggatctcctagcagatcaggattgtagtgggtataaacccggagtttctgtcatgccttgcctgcatgtatctttgtcctcgtatatgtgtttgacttctttctcattgaacaagtcttgccattggtgtcaccagctttggggtggcc

SEQ ID NO: 23269 - DNA, 600 bp, Chicken  19866894236403_2
cttagtctgagctctccagcatggttctccaggacgtttagaacagacacagcttgcattagtatgacaatggcatatagtgcctgtggatttgtaaaatgtaaaccctaaaaccattagaagtttagtgccattagaccatcccatgcctcccttgggtggcgatggacttcaggtttctctgcatgctgagctcagcccctcaggtttcaccaaaatccagctttagtgagcattcactcttaatctgaagcagtgataagcctgccatgtctcataggggtatgttcactgccttcyagcataaagatgtgggcatggcatctacctagaagttgcctggcttcagcttgtagccactagttattttcctgctttcctccatcagatttaagatctacgtagcgtgctacatcttctgggtaggtgctcactatatctatattacacttaaatttcttcttggaatcttaaggagattcagtctttgaatctaggactgcaaaatgttttcttgagccctagaagacctccagggctcacacctccatgtcaccaggtacaggaggaaaatcactgcttttggctccctcctgcaca

SEQ ID NO: 23270 - DNA, 600 bp, Chicken  19866894236406_1
tgctttctgttactgtttctgaagtgctgcctgctggagaaggctgaagagggaccaagttctgccccattctgaataatgctgagaagcagagctgacaggacatacacaaaagcacagagataggcatctttgtctgcacctcctggaagaagaggaagaatctcaacttggagcagcagtttggataagcaggagcaaaaggtaccatatacgggggtagcaactgatggaatggttaattcaacttaactcttctttggctattgggagtatggctgaggacagcaaaaaaaaaamcccaccaccgagttaattgcatctgaacttcaaaatgatcctcctcgtctttaacattttcattaacgtcttcatacacaacagattttacactgaagcttcaactgcaaaaacatatgctgctgtcagctgagctctccattcacggatattcatgcagtatcatttattagttgacacaactcactaacttagaaaatctcctatttctgtggcctgcaaacacctcgcacgcatctctcacacactgcatgtcagagccrtctgcacagggaggtccccagggatgcgaggggagct

SEQ ID NO: 23271 - DNA, 600 bp, Chicken  19866894236406_2
ctattgggagtatggctgaggacagcaaaaaaaaaamcccaccaccgagttaattgcatctgaacttcaaaatgatcctcctcgtctttaacattttcattaacgtcttcatacacaacagattttacactgaagcttcaactgcaaaaacatatgctgctgtcagctgagctctccattcacggatattcatgcagtatcatttattagttgacacaactcactaacttagaaaatctcctatttctgtggcctgcaaacacctcgcacgcatctctcacacactgcatgtcagagccrtctgcacagggaggtccccagggatgcgaggggagctggtggggggacagcttgagatgacaaaaagcactgcatgagctcaagctgccattcgctgaatgggccccatggaaaaagtaggggtgcagtcgggtaacggaagcggtcacaatgtggagtcacaagggaatgaaatgaaatggcaccaccaatattgattccatcctcgttttacttcagagtacttggcagctgttttttgttgttgtttttatgttaagtggctgatcagtcacagtactgaataaaatttcctcctct

SEQ ID NO: 23272 - DNA, 516 bp, Chicken  19866894236406_3
cccgaggaggactggcacagagctgtcagcaccgcagcacacgtcaacatcccttgggctgaaggtcgggatgcagaagtggatctgaaaggcaggcagcagtcttctgagaaccatttggaggacgacttcagagcaggtcgaacatgttggaacagctccattgtacctacagcatggctctgtgggcaggcacggtgtgccgggatgcagagcagcactcgctgtgcagacagcagccccacatgcactctccctgctgctccctatgctggaacagactcagagcagctcagcagrgccctgctcccctaagggctgctcatcatcctctcctcgtgcagaagccccagagatgggcctcccctggctcgaattagccttcgagaatacctcctgaatctcagcagcacagacccagagcgatctccacgtttgctgccagcagggattattttcagtgcatcacactggcaggaaatgtggatttattcctttcctcaaccactggaagca

SEQ ID NO: 23273 - DNA, 600 bp, Chicken  19866894236409_1
agagcaaacattctagcaaccccaagcattattctgttaagtcattctactggacttcaaaccttgtgggtgggattttcccaagtgaaaaatatggcaatgccacaagtctgagtccctactatttcttggaattttagtaacagccataaaatttgctgttggcacctgaatctttagaagcactaaacaaattaaacaataaaaccttagtcctgcaggttttctccccatatgatacttattaatgtggatgtggtgaagaatttcatgagtgaattccagaattttatacagaartgtctaaaatcaggtttctagatacacatttaaatactcattttctaattttgttcagcttctgaaaactgcatacaccagagcttttgaaaaaataaaactgtaggttttttttttttctgtaggtgtttaatctgaattgtggcctgcagtaggaccatttttctgcagttttctaagttgatcctagttctttggagctaaaatatcacaggacagatagttaagatgatttaaatgatgcacatatggttaagatgtcctctcttcagtcatatttggaaacttggcctcagactg

SEQ ID NO: 23274 - DNA, 599 bp, Chicken  19866894236416_1
  misc_feature (1)..(153): n is any nucleotide
nnnnnnnnnnnnnnnnnnnnnnnnnnnnnnnnnnnnnnnnnnnnnnnnnnnnnnnnnnnnnnnnnnnnnnnnnnnnnnnnnnnnnnnnnnnnnnnnnnnnnnnnnnnnnnnnnnnnnnnnnnnnnnnnnnnnnnnnnnnnnnnnnnnnnnnnnaccacggtcaccccagcagcccccaaacaccctcaagcctcagctcagccctctctgctctgcctgtgcaccagaagccgaaagcagtgcatggaaggagccagtggtcaaagtctctggacttgctcaccaacgacaagccactcrttccagctcagtgagccgggcagtttgcactctcgtgttttacacgtggctaatttaccgaaattgagttaattggcttggatgcacacatgctgagctttcatctcaagggtactgtgatggagggatgtaattagcagaacattaacccgtggctgactgttgatctcccaccggatttagctggtctcttaccactgatgcctagtgctggctctgcaaagacacagatttcattccacctcttcacatttttccactttttttccctgctaggccccgaccccaccccatctcag

SEQ ID NO: 23275 - DNA, 600 bp, Chicken  19866894236421_1
gaattctggaggagagtccacaagtaagtcataagaaagtgttgaattatctgacacacagatatgtgatgactgtaaaataatgtcagaaggagagattaatgaagcagatggttgtgttatgaattaattgaatgtcaggatacagtctggagcagtggggaagatgtactcagagagctgtgccaaatgcagtttacaaatgtctcaatcagtcggtctctgtggagagcaaagggctgagctgacttaagagcatctgatggctgctttgtaaattgtgcacgtcagatccagagwggctggggagtgggtggtgtcggtatgagacgctgtactgcattcaaagcagacgtagctgttggtggcatgctggcagagaggacgtgcactgacatccatcaggaggggcaataatgtggtaaagtcagtttgggaagaatgggtatttgaacctctgaaaagcttgctgtaatactctgacagagtcaaagtactttgcaaatctgggtccctgtgytactgctaggttgtcactagatcactttgtgtacccaacacgttttgttttatgtgactgttcagtatatatgcccttgg

SEQ ID NO: 23276 - DNA, 592 bp, Chicken  19866894236421_2
ctctgtggagagcaaagggctgagctgacttaagagcatctgatggctgctttgtaaattgtgcacgtcagatccagagwggctggggagtgggtggtgtcggtatgagacgctgtactgcattcaaagcagacgtagctgttggtggcatgctggcagagaggacgtgcactgacatccatcaggaggggcaataatgtggtaaagtcagtttgggaagaatgggtatttgaacctctgaaaagcttgctgtaatactctgacagagtcaaagtactttgcaaatctgggtccctgtgytactgctaggttgtcactagatcactttgtgtacccaacacgttttgttttatgtgactgttcagtatatatgcccttggttcatgccatggtactgatgggacaaccttgggctggtgtggccttttttcttagttcctycccagcccaaacgcacctcaaaaaagtgtgggatgtgtgtatgtcttagtccattgctttttatttatcaaatgtaaaacctgggaggcagcaaacacaccaagcattccaaatggggcattgtcttaccccatgtagagtatttgatagc

SEQ ID NO: 23277 - DNA, 451 bp, Chicken  19866894236421_3
ttggtggcatgctggcagagaggacgtgcactgacatccatcaggaggggcaataatgtggtaaagtcagtttgggaagaatgggtatttgaacctctgaaaagcttgctgtaatactctgacagagtcaaagtactttgcaaatctgggtccctgtgytactgctaggttgtcactagatcactttgtgtacccaacacgttttgttttatgtgactgttcagtatatatgcccttggttcatgccatggtactgatgggacaaccttgggctggtgtggccttttttcttagttcctycccagcccaaacgcacctcaaaaaagtgtgggatgtgtgtatgtcttagtccattgctttttatttatcaaatgtaaaacctgggaggcagcaaacacaccaagcattccaaatggggcattgtcttaccccatgtagagtatttgatagc

SEQ ID NO: 23278 - DNA, 600 bp, Chicken  19866894236427_1
tcaagatgagcccaaaagaagaagacatggaacagagcttactcaccaccatctgtctaagcaacttaacgtattgtgtgtgggggagcagggggaaggtggcaagacgtgcacaccctgccattaaaggagtgacagatggtgatgaaagtgccataaaaccataagcactgacagctcactgccacaaccaaagcagctgctgaggtatcatgttgtgaacagtccctgcgttgggtcacccccctggcagagcctatcacagaaactgtcatctctcatgaatgctaccctgtcctrycacaaactcatctcattggccacttcctttggccacaggctttcctggtgaaagttgggtggagtagggggactacaagcgtcttatggtaggagaggaagaaactcacttatacattggcccagacaaccttaggcataaaaacagggagagagccacaaagtccctgtcaggacaggcaggacattggtgcaaccaggcagtcactacacatttcttctaacttttccacactgtacagtttaacttcatgcgtaggtcttctacctgcaagcaaggccaagtagttcttccggaga

SEQ ID NO: 23279 - DNA, 600 bp, Chicken  19866894236427_2
caagatgagcccaaaagaagaagacatggaacagagcttactcaccaccatctgtctaagcaacttaacgtattgtgtgtgggggagcagggggaaggtggcaagacgtgcacaccctgccattaaaggagtgacagatggtgatgaaagtgccataaaaccataagcactgacagctcactgccacaaccaaagcagctgctgaggtatcatgttgtgaacagtccctgcgttgggtcacccccctggcagagcctatcacagaaactgtcatctctcatgaatgctaccctgtcctrycacaaactcatctcattggccacttcctttggccacaggctttcctggtgaaagttgggtggagtagggggactacaagcgtcttatggtaggagaggaagaaactcacttatacattggcccagacaaccttaggcataaaaacagggagagagccacaaagtccctgtcaggacaggcaggacattggtgcaaccaggcagtcactacacatttcttctaacttttccacactgtacagtttaacttcatgcgtaggtcttctacctgcaagcaaggccaagtagttcttccggagag

SEQ ID NO: 23280 - DNA, 600 bp, Chicken  19866894236431_1
tggcagcagaggggcagtgacagaatggcgtctgacatggaagtgcggatgaagcaaagcagtgtaattgaattcctccatgagcaacaaatggcacccactgacattcagcaatgtctgctgaatgctgttggagtggatgtgagcacagcgacccggtgagtggtgcatctcagcagtggtgacagcaatcgcgggtcaccgcctctggtgcagatttttacaagcgtggtatacaaactcttgatcatcactggcaaaaacccatagctaatggtggtgcctatgtagtaaaatagygttctgtagctgagaattttctatatcaaatactattattgtgctcttgccatttgttgtagttttcattgagataaacagcaggaattactttcggaacaacctacatagcattgcaaaacacaactgtagctagagtatttccattgcacattgcttaaatgggcaacatgaggataaaacaatttggagagttgtctcttgcctttaatgcaccattttcactccaggagtgcacaaatcccaaatagcttcatcagaatgatttggcataaacatgacattataactaagtgcacc

SEQ ID NO: 23281 - DNA, 592 bp, Chicken  19866894236431_2
ccactggtgctttatttacaaaattacagaacagtttatgtagtgcagaaccctacacaagttttttgcacacaaaaaaaagaatcataatgtttattggcagagaattcattttcaaacctcatttcagactctcactatccaacttttatgttattactgagaagactaaaagatgatttacattttcttcccctgggggtatgacactgatagagtaagtgacttcttcagagagtactgaagtcagaatggatgaaagacaaaggaaagtactatgcctacacacccagactttgygaagaataaagctcaaacgttcagattccaagactaagtatgtatgtcatgaggtcttgtgcctatgtgtatcccacctatcattctcaggtgctcactccctatcacaatagaagcygtgtaagcactttacaacctttayggcgcccaacttcacctctctgccaactctcttattcaggccagtgaaggaaggacgagttaggacaaacagaaaacagcaacaacacaaaaaattgagtagaaagctgcgcagggagaatgttaagaagaaataggagaaaattaaaga

SEQ ID NO: 23282 - DNA, 474 bp, Chicken  19866894236431_3
acctcatttcagactctcactatccaacttttatgttattactgagaagactaaaagatgatttacattttcttcccctgggggtatgacactgatagagtaagtgacttcttcagagagtactgaagtcagaatggatgaaagacaaaggaaagtactatgcctacacacccagactttgygaagaataaagctcaaacgttcagattccaagactaagtatgtatgtcatgaggtcttgtgcctatgtgtatcccacctatcattctcaggtgctcactccctatcacaatagaagcygtgtaagcactttacaacctttayggcgcccaacttcacctctctgccaactctcttattcaggccagtgaaggaaggacgagttaggacaaacagaaaacagcaacaacacaaaaaattgagtagaaagctgcgcagggagaatgttaagaagaaataggagaaaattaaaga

SEQ ID NO: 23283 - DNA, 450 bp, Chicken  19866894236431_4
caacttttatgttattactgagaagactaaaagatgatttacattttcttcccctgggggtatgacactgatagagtaagtgacttcttcagagagtactgaagtcagaatggatgaaagacaaaggaaagtactatgcctacacacccagactttgygaagaataaagctcaaacgttcagattccaagactaagtatgtatgtcatgaggtcttgtgcctatgtgtatcccacctatcattctcaggtgctcactccctatcacaatagaagcygtgtaagcactttacaacctttayggcgcccaacttcacctctctgccaactctcttattcaggccagtgaaggaaggacgagttaggacaaacagaaaacagcaacaacacaaaaaattgagtagaaagctgcgcagggagaatgttaagaagaaataggagaaaattaaaga

SEQ ID NO: 23284 - DNA, 600 bp, Chicken  19866894236432_1
taggccacacattgtatttcagaactttgggccttcactgcggttgtatccttcatgtgagcaatgccattgaaagaatgggatgacctataggagcacattgttcctatgggcttggaaagctgagctctgaagaaatcacttgaccttggaaaatgagattttgtcttcctccccccccctcctccctgaaatatatgtagtatttactcagatattatatatagttcaacccaaaagatttgggacctcattcctgaatccttggttacgtttcagatggattctgagaaatgtagrgctaaaactaatttattcaccttctggcttattgatattggtggtactgtcagatcttgattaattaaacagtgattatgtagctatgtcagtccagagttaacgtcagacctgatctccccatcctttttagttttccatgtttgctgcagtaggtaaatctgatgacagagagcaattgtccccacaaacatctgcatattgcagtgcagctctatcaaatatttccttcggcactggtgaagtgaggatggaaggactgttttctgatgtatgttggacaagaaaacttaatctgtg

SEQ ID NO: 23285 - DNA, 600 bp, Chicken  19866894236433_1
ttgactgtgttactttctttccatatttacgtgcgggtttctttctttctttgttttccttcttttgcttctttggcattaattcttcatcactgccactgattgcatattcctcattgccatgcttgagaattcttttgtttgtggggattctcttttgtttgcagaaattcaggaacttttgcttgctttgcttcagagcctggatattggcatagaaagtgactccctccttttcttgcctggcctatcctgtcacaaagttgctttccagacttgtgccatgctttgagtgctccygtttttactttggagacagggtgctcaattcctactgccttgcactgcagacgtgttcagaacactgcctccgtgcccatttgctggctaattgccgtttcaaggcaaatgtgcacaggcccagcccaagcaggctcaaaatacacctccttaaggctacccaaggcaatttggtacaatttcacctaagtgaatttgaacaatttcattagttttgtacactcgagtgatcttcaatagagctgtgtgaaaggtctcagcagacataaacatagcagatcaggggctatgtgcagcttc

SEQ ID NO: 23286 - DNA, 600 bp, Chicken  19866894236434_1
gagaggtagacgtggtgcatatgctttaaaaacagataagtatttagtttccttggagatgattgctgtgattttcccccacctgaagccggttgtctgtctgcccttccagatgtgaggtgtccccaaggatttctgatgctgcccccagtggggatggcagtggaaagtgtgttggggacagtggggaatgtgcagggtggacatgttggggaccgcatgtaacatcccatgtgggacacctcaatgcagccatgtgtgctgcagttgggatctcatggggacacccagcaagggcaygcacaggcagcctttttgggccagtgtgtgacagctgacagctgtcagcctgtgtgggacaccgcagtaacggttgtatgtaccactccaygtgtgtcatcccatcctgggccccatggtgccacggcatggggaagagaattgtgagatgaggaggtgacatcatgccactgtgtctccaaggggaagtgagagtggatctccagacactccttgccctcactgcagtctcactgtccccaagctgctcctgcctcatggcaccaatggcagtggccctcatccttggtgagtgacaat

SEQ ID NO: 23287 - DNA, 600 bp, Chicken  19866894236434_2
gttgtctgtctgcccttccagatgtgaggtgtccccaaggatttctgatgctgcccccagtggggatggcagtggaaagtgtgttggggacagtggggaatgtgcagggtggacatgttggggaccgcatgtaacatcccatgtgggacacctcaatgcagccatgtgtgctgcagttgggatctcatggggacacccagcaagggcaygcacaggcagcctttttgggccagtgtgtgacagctgacagctgtcagcctgtgtgggacaccgcagtaacggttgtatgtaccactccaygtgtgtcatcccatcctgggccccatggtgccacggcatggggaagagaattgtgagatgaggaggtgacatcatgccactgtgtctccaaggggaagtgagagtggatctccagacactccttgccctcactgcagtctcactgtccccaagctgctcctgcctcatggcaccaatggcagtggccctcatccttggtgagtgacaatgggtacgtggtgccacggggggttggtggccctgtgtgggacaaggaccgtgtcccttgcaagttggtggcttggtggctgcgatcagggc

SEQ ID NO: 23288 - DNA, 600 bp, Chicken  19866894236435_1
cacttacctctggccaacccccagcctttcagcagttcacagtcagaagattgtcttcttgtccctgggttttatttaaccaattcagattatttatttttgaagacatgactgaagttctgcaccacgcactgcaataactctcccaaacgattgtgaaacttatttctaactgcaatcaacggccttcagaaatgatctaccactgccttttaaattctttcttcatttacctcggcagtgccgctgtagttccctgaaccacggctgttagcactctctgcatgtcatttgctgggygtgagctatgtggcaggcagctttattgctgctgcagtttctgcacaaatgtgtagccccttcttccctctgtcagcatgcataaccgtgtgctctgagcccatatttattatctcccttacagtgacgcttacactttgtggcaggtggaatgcgagggctggggttttctatggagaatacagtttatttttgcttctggttgcgttcagtcttggaggaagactggttcagacagagctcctccgagggaggcttccagcacaggcagggcagggagctgttgcacacctcgctgcc

SEQ ID NO: 23289 - DNA, 600 bp, Chicken  19866894236436_1
ccacgctctgcatcccccatgccagtctgctccaacacaagtctcagcagcaggcaagttactagaactgatgtagaaggaaaagcatacagataaatgaaaaatgcatgtgataccaccaaagtaggtcacactagacttaaatcgtagccttctgctgatgagatctgctgtagtgtcctcttctgagagctgcggattgactgcaactagatctcattcattaaacatctgaagtaacatcacaggccgaatttctggcttcaccagcaagtcagctggaagtgaatgttgttctcrgtagcagaaagtttaaataggtttggaaagcattggggtgaatttgtgarcaaaaaatggcaggagacctgtcaataggatgtggtagctctgtgggcaggtgctgctgtaagctgtgccggctgctgcacatcagctgtgccagcactgtgggcactgcagacctgtggtctgacctgttctgtcttttttttcctgttcctgtggtragcagwggggtgacggrgctggggatgggggtgggctgcagtgagaggtgcctgacattggcttttcagtagatggctttcaaaatgaatc

SEQ ID NO: 23290 - DNA, 600 bp, Chicken  19866894236436_2
caggcaagttactagaactgatgtagaaggaaaagcatacagataaatgaaaaatgcatgtgataccaccaaagtaggtcacactagacttaaatcgtagccttctgctgatgagatctgctgtagtgtcctcttctgagagctgcggattgactgcaactagatctcattcattaaacatctgaagtaacatcacaggccgaatttctggcttcaccagcaagtcagctggaagtgaatgttgttctcrgtagcagaaagtttaaataggtttggaaagcattggggtgaatttgtgarcaaaaaatggcaggagacctgtcaataggatgtggtagctctgtgggcaggtgctgctgtaagctgtgccggctgctgcacatcagctgtgccagcactgtgggcactgcagacctgtggtctgacctgttctgtcttttttttcctgttcctgtggtragcagwggggtgacggrgctggggatgggggtgggctgcagtgagaggtgcctgacattggcttttcagtagatggctttcaaaatgaatctggtttaacaccttccggaatcatgatggaagtgtgaccatttctcagat

SEQ ID NO: 23291 - DNA, 514 bp, Chicken  19866894236436_3
ctagatctcattcattaaacatctgaagtaacatcacaggccgaatttctggcttcaccagcaagtcagctggaagtgaatgttgttctcrgtagcagaaagtttaaataggtttggaaagcattggggtgaatttgtgarcaaaaaatggcaggagacctgtcaataggatgtggtagctctgtgggcaggtgctgctgtaagctgtgccggctgctgcacatcagctgtgccagcactgtgggcactgcagacctgtggtctgacctgttctgtcttttttttcctgttcctgtggtragcagwggggtgacggrgctggggatgggggtgggctgcagtgagaggtgcctgacattggcttttcagtagatggctttcaaaatgaatctggtttaacaccttccggaatcatgatggaagtgtgaccatttctcagatacatacaggaggcagaagcagtaaatattgcccatctggggaaagagcagggtgtttcacagcaagctggaga

SEQ ID NO: 23292 - DNA, 508 bp, Chicken  19866894236436_4
ctcattcattaaacatctgaagtaacatcacaggccgaatttctggcttcaccagcaagtcagctggaagtgaatgttgttctcrgtagcagaaagtttaaataggtttggaaagcattggggtgaatttgtgarcaaaaaatggcaggagacctgtcaataggatgtggtagctctgtgggcaggtgctgctgtaagctgtgccggctgctgcacatcagctgtgccagcactgtgggcactgcagacctgtggtctgacctgttctgtcttttttttcctgttcctgtggtragcagwggggtgacggrgctggggatgggggtgggctgcagtgagaggtgcctgacattggcttttcagtagatggctttcaaaatgaatctggtttaacaccttccggaatcatgatggaagtgtgaccatttctcagatacatacaggaggcagaagcagtaaatattgcccatctggggaaagagcagggtgtttcacagcaagctggaga

SEQ ID NO: 23293 - DNA, 497 bp, Chicken  19866894236436_5
aacatctgaagtaacatcacaggccgaatttctggcttcaccagcaagtcagctggaagtgaatgttgttctcrgtagcagaaagtttaaataggtttggaaagcattggggtgaatttgtgarcaaaaaatggcaggagacctgtcaataggatgtggtagctctgtgggcaggtgctgctgtaagctgtgccggctgctgcacatcagctgtgccagcactgtgggcactgcagacctgtggtctgacctgttctgtcttttttttcctgttcctgtggtragcagwggggtgacggrgctggggatgggggtgggctgcagtgagaggtgcctgacattggcttttcagtagatggctttcaaaatgaatctggtttaacaccttccggaatcatgatggaagtgtgaccatttctcagatacatacaggaggcagaagcagtaaatattgcccatctggggaaagagcagggtgtttcacagcaagctggaga

SEQ ID NO: 23294 - DNA, 542 bp, Chicken  19866894236440_1
tagtttactagaaagtatgcctgagagaggaggagaaagaagggcatttcctttctaagtttaggaataaacctttccaaaaggggatgctttatagccctgtgttgctttatttttcttatcagttttgacctccagcaattaagaattatctagtgtgttgaaaaaaggtcactacctcatcattgtcaatacaatatagcctgaaaagaggacttgccttgtcacaaaatacctagctgcactcaaggactggcagagctgccttgagataaaagcaaaatggaacaaaaccaccckctctttgatctggtcacagctcagaatatgaggaatgtacgtgacgtgaaaagcagtggataggcccaggtgacacatccacctacttggaaatcagatggaagcttttgatgttcttgcatgttagttataccacaaaagcattctaaatttaaaataatatgaaagaagatataaatgatctgaagaataaagcatgcagtgaacttttgactcagatgtgcaacaagttacagagccca

SEQ ID NO: 23295 - DNA, 600 bp, Chicken  19866894236446_1
gtgtccttgcaaataagttgcacagaggcttgcaaattcctgtctgtttgttgtctgttctttgtaaactctcaccacataaggctttggtatcaacggctgatgcacaacttgaacttagaaactttggacttactgcacaggcttaatgggctaattaatattaacctcaggctgcttagagttataattaattgcacgtgcaatgtatgacacgcaggggagtctctcttcctattacacgaaatggtgaagatcggatgagatgtttatgctgtgaatatagaggactaaaactcycagtagcagcagctggaagttgtcagcaacaacattaatcacctggtaaagtctcttgggatttggagctcacctgtctgccaaattttaaattgatgatgaggtgctcagaagccttggcaatgggcaacctactgtgcaagcaactagagaattgaaatgaatggtgagtcaaagattctcaataaaaatgaaacataatggatcaaatcaaatttaacatccaaatacttcctgcaaactggagcaaacgaagcatgacacagaaacaggaatgactttgtcagatgtgggacttat

SEQ ID NO: 23296 - DNA, 600 bp, Chicken  19866894236450_1
tggggtaaatatattaaactgattatatacatggaaagtttggtgaaaacttgactgagacgagagtctgtaaaaaatacactacttcctaatcatttaatttatagtagaaatacaatttgttgtttgggctaatgagagattttgcagaattgtacagttttgggggtggggtgtttgcatttctcatacactttctgtctcttgagtaccaacaaagctctgcctagcacagtaagtgtgatacagacatgaggtggcagtgtgtttcagaggaaaagtattagggttaaacacttsaagtttactataactttgaagtgattaatgccatatgtcgtttcattcaaaagttgagtacctagctgcatgcatttattctgttgaaaagttatcatcaagcatctstgtcaatttccaaactgatttcaaagatgatcccagtgttttaaggtgcattacacactgagatgtgctactgagtcattccagagcagaggtgcttttacagtcttgctacaaaggtgttaattagctgctgaaataccagagatgacatctgcataacaacgaagtatctgcatttccaagaaagcgaaa

SEQ ID NO: 23297 - DNA, 600 bp, Chicken  19866894236450_2
agaaatacaatttgttgtttgggctaatgagagattttgcagaattgtacagttttgggggtggggtgtttgcatttctcatacactttctgtctcttgagtaccaacaaagctctgcctagcacagtaagtgtgatacagacatgaggtggcagtgtgtttcagaggaaaagtattagggttaaacacttsaagtttactataactttgaagtgattaatgccatatgtcgtttcattcaaaagttgagtacctagctgcatgcatttattctgttgaaaagttatcatcaagcatctstgtcaatttccaaactgatttcaaagatgatcccagtgttttaaggtgcattacacactgagatgtgctactgagtcattccagagcagaggtgcttttacagtcttgctacaaaggtgttaattagctgctgaaataccagagatgacatctgcataacaacgaagtatctgcatttccaagaaagcgaaacaatgcttatttaaatagtctcctacacatagagctatttaaatagattatgtgaaagagcagtaaacctgcactgatcctccagaaaactttaaagaggaacttgat

SEQ ID NO: 23298 - DNA, 600 bp, Chicken  19866894236450_3
tcccagtgttttaaggtgcattacacactgagatgtgctactgagtcattccagagcagaggtgcttttacagtcttgctacaaaggtgttaattagctgctgaaataccagagatgacatctgcataacaacgaagtatctgcatttccaagaaagcgaaacaatgcttatttaaatagtctcctacacatagagctatttaaatagattatgtgaaagagcagtaaacctgcactgatcctccagaaaactttaaagaggaacttgattaaaagaatgcttcaccaaaaagagaaagraggtatttcatgaaaactagcgttccccaatggagacaacttggtctaaggtttgcctaaagattctgctgcatggtgagatggctatctaacaagtcagctgtatgtgagaggagagagacaaayattytgatttagtcctggtgggttacaggtagcttttcccttaatccttattatgctttctaaatgtttgtaaaggctgttagaatttctgttttctgaaagcttagtctgattttaaggtaacaggaaatgaacttgaaatctctcaccaaaagatggagcaatggaagatac

SEQ ID NO: 23299 - DNA, 600 bp, Chicken  19866894236450_4
taacaacgaagtatctgcatttccaagaaagcgaaacaatgcttatttaaatagtctcctacacatagagctatttaaatagattatgtgaaagagcagtaaacctgcactgatcctccagaaaactttaaagaggaacttgattaaaagaatgcttcaccaaaaagagaaagraggtatttcatgaaaactagcgttccccaatggagacaacttggtctaaggtttgcctaaagattctgctgcatggtgagatggctatctaacaagtcagctgtatgtgagaggagagagacaaayattytgatttagtcctggtgggttacaggtagcttttcccttaatccttattatgctttctaaatgtttgtaaaggctgttagaatttctgttttctgaaagcttagtctgattttaaggtaacaggaaatgaacttgaaatctctcaccaaaagatggagcaatggaagatactgaaaacgtagttgaagtctccactattcattcttgagtgtctgcatggtgactgacagattktatcctgttttcactggcataggccaaacaggaagcttgcaacaacatagtgaaagaatggyg

SEQ ID NO: 23300 - DNA, 600 bp, Chicken  19866894236450_5
aacgaagtatctgcatttccaagaaagcgaaacaatgcttatttaaatagtctcctacacatagagctatttaaatagattatgtgaaagagcagtaaacctgcactgatcctccagaaaactttaaagaggaacttgattaaaagaatgcttcaccaaaaagagaaagraggtatttcatgaaaactagcgttccccaatggagacaacttggtctaaggtttgcctaaagattctgctgcatggtgagatggctatctaacaagtcagctgtatgtgagaggagagagacaaayattytgatttagtcctggtgggttacaggtagcttttcccttaatccttattatgctttctaaatgtttgtaaaggctgttagaatttctgttttctgaaagcttagtctgattttaaggtaacaggaaatgaacttgaaatctctcaccaaaagatggagcaatggaagatactgaaaacgtagttgaagtctccactattcattcttgagtgtctgcatggtgactgacagattktatcctgttttcactggcataggccaaacaggaagcttgcaacaacatagtgaaagaatggygaaac

SEQ ID NO: 23301 - DNA, 600 bp, Chicken  19866894236450_6
ttctgctgcatggtgagatggctatctaacaagtcagctgtatgtgagaggagagagacaaayattytgatttagtcctggtgggttacaggtagcttttcccttaatccttattatgctttctaaatgtttgtaaaggctgttagaatttctgttttctgaaagcttagtctgattttaaggtaacaggaaatgaacttgaaatctctcaccaaaagatggagcaatggaagatactgaaaacgtagttgaagtctccactattcattcttgagtgtctgcatggtgactgacagattktatcctgttttcactggcataggccaaacaggaagcttgcaacaacatagtgaaagaatggygaaacattttaacagaatgataggaatccagaagtgtgtctattgtacagtgagatatggaggtgcaaattttaactccaggatcttccagggagcttgtcagacacgtttcaaagaatatgcaaaagaaatttcctagttacgtatttcctagaaccagactctttctgaattatttcaaaagaattcagttatagaactcataaattgtagctgtagtaactatatattagtaact

SEQ ID NO: 23302 - DNA, 600 bp, Chicken  19866894236450_7
yattytgatttagtcctggtgggttacaggtagcttttcccttaatccttattatgctttctaaatgtttgtaaaggctgttagaatttctgttttctgaaagcttagtctgattttaaggtaacaggaaatgaacttgaaatctctcaccaaaagatggagcaatggaagatactgaaaacgtagttgaagtctccactattcattcttgagtgtctgcatggtgactgacagattktatcctgttttcactggcataggccaaacaggaagcttgcaacaacatagtgaaagaatggygaaacattttaacagaatgataggaatccagaagtgtgtctattgtacagtgagatatggaggtgcaaattttaactccaggatcttccagggagcttgtcagacacgtttcaaagaatatgcaaaagaaatttcctagttacgtatttcctagaaccagactctttctgaattatttcaaaagaattcagttatagaactcataaattgtagctgtagtaactatatattagtaactatattgatttccctgaactgtgtctgggctaattttgctacagatctgtgaagggtatagaa

SEQ ID NO: 23303 - DNA, 456 bp, Chicken  19866894236452_1
acgtcgactggctctgtttggaccaagtgcttccatgtgtcagtgtggggtgagtgcctggatcccctctccatcctcctttcccatcccctctaacctccttgtccctgcagagcccgtgggcagcccacgcctggagacacttgtgctacaggaggagcagggacggtgccgcctccagctgtcctgcactgtgcccggggccaccgctgtgtcctacagctggtcccaggacagtgatccactgggcaaccagagtgtgctggtggtgtccgataatggccagcctgggctctatgrcccagaaaggtgatttgttcccagctccaccaaagctgggtttgggtctgcattgctgcagactgggtgctttcaatcttcccgcaatgacggcacaggagcagactttgctcgcccagaagaatgaataaaccagtggatttgcgttcgtttgca

SEQ ID NO: 23304 - DNA, 600 bp, Chicken  19866894236454_1
gacacattttgtccactcgtaattagctcctggatttcctcatttatttttgtggtgatcagaagtgtccagtgtagagctaataagacagctgaaatcaagaccaggtccctttacacgctccacctgctcattaatcaaggactctgcagttaatgagtactttccgggtaatatttaatctcagagtagcaatagttacacttaatgcaaaagaactgtttttccacgatttgttactgaagtcgttcccatggcacacgagcaaccttgtcacgtgctggtcccagacactcactsctgtcatgctgacccacgtttggaagattcctgaagagccatgatgctttcagcgttggttccagtgctttaggctgcacmcarcttagtgctggstggatatgtgtatgcacggatgtggctggtgaagttgctcagcaatgctttgaggtttgaaggcctgtctaggtagggggagagttgagaggagtcaacaaaggcgtgaaggctgtgtgtatcattgaagtgcatcattaatcacctgtgagaatacttccgttcttttggctgaacctacccatgtgcagatgcttaatccat

SEQ ID NO: 23305 - DNA, 600 bp, Chicken  19866894236454_2
aataagacagctgaaatcaagaccaggtccctttacacgctccacctgctcattaatcaaggactctgcagttaatgagtactttccgggtaatatttaatctcagagtagcaatagttacacttaatgcaaaagaactgtttttccacgatttgttactgaagtcgttcccatggcacacgagcaaccttgtcacgtgctggtcccagacactcactsctgtcatgctgacccacgtttggaagattcctgaagagccatgatgctttcagcgttggttccagtgctttaggctgcacmcarcttagtgctggstggatatgtgtatgcacggatgtggctggtgaagttgctcagcaatgctttgaggtttgaaggcctgtctaggtagggggagagttgagaggagtcaacaaaggcgtgaaggctgtgtgtatcattgaagtgcatcattaatcacctgtgagaatacttccgttcttttggctgaacctacccatgtgcagatgcttaatccatttaattgattcaccttaaaaattctcgtgcctcttttgaagacaagcayttggtactcagttttaatgtacccagaattaa

SEQ ID NO: 23306 - DNA, 600 bp, Chicken  19866894236454_3
aagacagctgaaatcaagaccaggtccctttacacgctccacctgctcattaatcaaggactctgcagttaatgagtactttccgggtaatatttaatctcagagtagcaatagttacacttaatgcaaaagaactgtttttccacgatttgttactgaagtcgttcccatggcacacgagcaaccttgtcacgtgctggtcccagacactcactsctgtcatgctgacccacgtttggaagattcctgaagagccatgatgctttcagcgttggttccagtgctttaggctgcacmcarcttagtgctggstggatatgtgtatgcacggatgtggctggtgaagttgctcagcaatgctttgaggtttgaaggcctgtctaggtagggggagagttgagaggagtcaacaaaggcgtgaaggctgtgtgtatcattgaagtgcatcattaatcacctgtgagaatacttccgttcttttggctgaacctacccatgtgcagatgcttaatccatttaattgattcaccttaaaaattctcgtgcctcttttgaagacaagcayttggtactcagttttaatgtacccagaattaatgt

SEQ ID NO: 23307 - DNA, 600 bp, Chicken  19866894236454_4
atcaagaccaggtccctttacacgctccacctgctcattaatcaaggactctgcagttaatgagtactttccgggtaatatttaatctcagagtagcaatagttacacttaatgcaaaagaactgtttttccacgatttgttactgaagtcgttcccatggcacacgagcaaccttgtcacgtgctggtcccagacactcactsctgtcatgctgacccacgtttggaagattcctgaagagccatgatgctttcagcgttggttccagtgctttaggctgcacmcarcttagtgctggstggatatgtgtatgcacggatgtggctggtgaagttgctcagcaatgctttgaggtttgaaggcctgtctaggtagggggagagttgagaggagtcaacaaaggcgtgaaggctgtgtgtatcattgaagtgcatcattaatcacctgtgagaatacttccgttcttttggctgaacctacccatgtgcagatgcttaatccatttaattgattcaccttaaaaattctcgtgcctcttttgaagacaagcayttggtactcagttttaatgtacccagaattaatgtaaccggtgacct

SEQ ID NO: 23308 - DNA, 600 bp, Chicken  19866894236454_5
tcagcgttggttccagtgctttaggctgcacmcarcttagtgctggstggatatgtgtatgcacggatgtggctggtgaagttgctcagcaatgctttgaggtttgaaggcctgtctaggtagggggagagttgagaggagtcaacaaaggcgtgaaggctgtgtgtatcattgaagtgcatcattaatcacctgtgagaatacttccgttcttttggctgaacctacccatgtgcagatgcttaatccatttaattgattcaccttaaaaattctcgtgcctcttttgaagacaagcayttggtactcagttttaatgtacccagaattaatgtaaccggtgacctcgagttccacacacctaatagcttgggaaagagggctcaaagggtttggagcactgtgaaagcacccatttgaagctttaaggtaggtgaagcactttgatttgtgagagaaagaaaaatggaaccctacgtgcagagctggggcagcaggcagacagttgagcagagccagaacattgctaaggagagctgccggccctgggagtggggcaggaggcagtgcctgctgggaacggcgagctgcgagggccct

SEQ ID NO: 23309 - DNA, 599 bp, Chicken  19866894236459_1
  misc_feature (1)..(184): n is any nucleotide
nnnnnnnnnnnnnnnnnnnnnnnnnnnnnnnnnnnnnnnnnnnnnnnnnnnnnnnnnnnnnnnnnnnnnnnnnnnnnnnnnnnnnnnnnnnnnnnnnnnnnnnnnnnnnnnnnnnnnnnnnnnnnnnnnnnnnnnnnnnnnnnnnnnnnnnnnnnnnnnnnnnnnnnnnnnnnnnnnnnnnnnntttgcaaatagagtgatgtgtgatttgcctgaagtttgaactaatccttctgcactgttctgagaaagaataataaacgttatgataagatgtgcaaaggaatgaacctgtgagaycctagcctaaagatctgcatgggatctcatacatttacgctaaccatcatcactgacggactccagaggagaaaaatattgtattacctacaaagcacatggtttacaaattgcttcttactatctgtatacaaagaagtgaagcagagcattcatcttgtaaaattcaaagtttaaagccaaggaaaacaaccaaggtaagagctgatcagcaaagtcaaacgctcctttacttagcaaacaagactctcacaagtcagtactgagtgttagatacggatttggctgaacagagatca

SEQ ID NO: 23310 - DNA, 600 bp, Chicken  19866894236459_2
gaaaacaaccaaggtaagagctgatcagcaaagtcaaacgctcctttacttagcaaacaagactctcacaagtcagtactgagtgttagatacggatttggctgaacagagatcagttgatgagtatgggcttgaatcacgtcaacatcacaggcagtatgtgttggtaaggaatttgggtaattgccatatttttgtactctggtaccctaagaatgcagcaggtccacacaattttagttaacttaaggccttgtgtgaccaacagttgcttctcatgaagaacacagtagaaattcragtgtactctgcccaaaagcctcctggaagccatggtttcttggcayattcctaccttaaagcagggagccagcaggggtgacagtggaggtgcatcaaagagttattcagctccaggcaaaatcagaataggtctcttcaaatgtagactctgaaggcaaaattgcagaagatacaactggtaaataccaaatggttagacctgacaaacatacactgaagaatatttagaaacagaaccgtaatttcattactgacagcattctaatatataagactctacttctcctcccagcgttt

SEQ ID NO: 23311 - DNA, 600 bp, Chicken  19866894236459_3
acttagcaaacaagactctcacaagtcagtactgagtgttagatacggatttggctgaacagagatcagttgatgagtatgggcttgaatcacgtcaacatcacaggcagtatgtgttggtaaggaatttgggtaattgccatatttttgtactctggtaccctaagaatgcagcaggtccacacaattttagttaacttaaggccttgtgtgaccaacagttgcttctcatgaagaacacagtagaaattcragtgtactctgcccaaaagcctcctggaagccatggtttcttggcayattcctaccttaaagcagggagccagcaggggtgacagtggaggtgcatcaaagagttattcagctccaggcaaaatcagaataggtctcttcaaatgtagactctgaaggcaaaattgcagaagatacaactggtaaataccaaatggttagacctgacaaacatacactgaagaatatttagaaacagaaccgtaatttcattactgacagcattctaatatataagactctacttctcctcccagcgtttagccctgggacacatggctggattctccaggtccaaccctcttccag

SEQ ID NO: 23312 - DNA, 600 bp, Chicken  19866894236459_4
gtgtaagacatagaacagctaaggaaaagaagtgacaacaaacaagctgtgcagtcaaggaaagggtaaaatcttggtcctaccaaaatcagcaggatgtttgccagaaagctgtagacagcttgctttatccaggatttttaattagtgattaaatgattcaatggcaagttggctgttttaagaaggaaagaaacacagaacagctccagcatgcctctccctgcccaccccttgggaggtacaggtcatacacagcttttttttatagaagacttgacaggtagttcattgaacctyagttgaaatctacagtttcccaggccccgcctccttccccagtttggggatgaagataggaaacacctgctaatgacaccagagacagcaaacagcaaaagccatgcgtcagcagaaagcctaaaagcctggcttccctaatacagattgagttcatctaatggtgattagcatatatggaataaataggatggtgcattcttttcatcggcacaaatctgaacgtctgtgaatgttctggagtgccaaataaataaggcatctccctgctgaagaggcaagtctctttgttacgagccc

SEQ ID NO: 23313 - DNA, 551 bp, Chicken  19866894236459_5
ggcttccctaatacagattgagttcatctaatggtgattagcatatatggaataaataggatggtgcattcttttcatcggcacaaatctgaacgtctgtgaatgttctggagtgccaaataaataaggcatctccctgctgaagaggcaagtctctttgttacgagccccacaacccaaatgatctattcataccacacatatcccttattttgcattatttttctgctttttgcagtctccttctgcttttcccacttccgaagtacatgggtttctatggaaacaaaacacgtcatyggaatggccagaacttggtgccatccctaagtgcagagcgaaaatgcaatttgaataagtgttttgcaatttacaatatgagctcagaaaggcagtgggcgattatcctgtgcacgtgtgtgtacatgtgtccgcgtgggcgcctgcctgtgcacgcacgcactgccttgttccgcaccatctacacacatgcaacgccaccggctccacggggcagcacgcagcagaaggctgtgcagaatctgtcccat

SEQ ID NO: 23314 - DNA, 600 bp, Chicken  19866894236463_1
caccaacagtcataggcaatttcacagagagtagctacactcactgacctgcctatcctggtaaaaatgacttacagtaagtatgattctcgtatagatctctcatgaccttaagcagtgcataggaaaagctgatccataaggtatattaaggtatttggtgcaatttttggtgtggtgtatcgcatcgatggataaaactgttctactttaaagaaccatggaagcaaaattgcacttatttatatgaggagaaggaaaaaacctttgagaatacgatgtcctgtctttgtgtttcgrgttgggttgrttttgtttgtttttaaaccttgtaggatttttaaagtaatgtattaggtcagtaaaacgtgtgaatgtggagaggggaaaacaacccgacaaaataactgaaaatataaaagacatttaactatgagctgtgcacagatgtatttgatagcttttataaaaagacttttaataaaaaattaaaacaaacttttggtcatggtttgtcaggtgttggtggccagcgttgtagatatcggtcgttgcatggtgttgtctcttgacttctgccgtgataacctgatgtctggg

SEQ ID NO: 23315 - DNA, 600 bp, Chicken  19866894236463_2
cataggcaatttcacagagagtagctacactcactgacctgcctatcctggtaaaaatgacttacagtaagtatgattctcgtatagatctctcatgaccttaagcagtgcataggaaaagctgatccataaggtatattaaggtatttggtgcaatttttggtgtggtgtatcgcatcgatggataaaactgttctactttaaagaaccatggaagcaaaattgcacttatttatatgaggagaaggaaaaaacctttgagaatacgatgtcctgtctttgtgtttcgrgttgggttgrttttgtttgtttttaaaccttgtaggatttttaaagtaatgtattaggtcagtaaaacgtgtgaatgtggagaggggaaaacaacccgacaaaataactgaaaatataaaagacatttaactatgagctgtgcacagatgtatttgatagcttttataaaaagacttttaataaaaaattaaaacaaacttttggtcatggtttgtcaggtgttggtggccagcgttgtagatatcggtcgttgcatggtgttgtctcttgacttctgccgtgataacctgatgtctggggatccaagct

SEQ ID NO: 23316 - DNA, 600 bp, Chicken  19866894236476_1
agtatttatgaaggggggaaggtaagtaaactggtttttaaatgactacacatttcttctagaaaaaaccttgagatttgtaaaagaaatgttgaaaagatgaatggaagacatcttcctggaaagctcacgagcagaattttgactagatagccaagttttgttgttatgttcatcctctaaagcatatctagaatttccagtcaaaatggctttggatgtactctccttgctaccttaccactgggaaggtaaaagaaaaagaaaaaaaaaaagcttcttatgatggaggctcagaasccatgagacaattttgccttcccaaaacacgctcagcaagtagcaacacatcaccagctcaaacccaagaacaagagaggcctgtgacaggagaaataaaagcactgagaatagaattgtccaagaattaagtttgctcctgtaaccagcaatttcccactctaaagtgtactggcacagcctcaccttgaatactgtgcagtttttggtaacaaagtacaaaaaaagacataaaagtgttagaaaatatccaaaggaggactacaaagatagccctagaggtcaagacatacaatgagc

SEQ ID NO: 23317 - DNA, 600 bp, Chicken  19866894236478_1
gtgtgtgtgtgtgtgtgttaaaattatcaggaaagtaataaaagtagacaagtaaactgataaactatctgacagcctcagatttcagaaaagcagaaactgctgtaggtgtgaacaaagagcccaaattcgcaccaatcacactcagtactttatttaaatttgcctgttgattccttttatcttggacttctcttctgtgcacagccccatccatgaggcttgtagcatttattcctttgcctccccttcattctatgtacctttctcagtatgaatgcttaggaaatcttaagagaygtactcttgaaaattgccccagtgttcyttagcgggtgccttttagtgatgccatttataatatggattttggtcccacaggtctcagatgggcctgtgctgcctgggagcagaccttgggcactctggtgtgcaatgctccgtgagtactaatggacaagctttgtgctgagtctactctataaatggaaatgaaggcttcagtctggaggactgcaaagcagacatttctgccaacaataaaagtgctctgatggtaaaagctataggaatgaaattgatagcttatcacaggagaaa

SEQ ID NO: 23318 - DNA, 600 bp, Chicken  19866894236478_2
aggaaagtaataaaagtagacaagtaaactgataaactatctgacagcctcagatttcagaaaagcagaaactgctgtaggtgtgaacaaagagcccaaattcgcaccaatcacactcagtactttatttaaatttgcctgttgattccttttatcttggacttctcttctgtgcacagccccatccatgaggcttgtagcatttattcctttgcctccccttcattctatgtacctttctcagtatgaatgcttaggaaatcttaagagaygtactcttgaaaattgccccagtgttcyttagcgggtgccttttagtgatgccatttataatatggattttggtcccacaggtctcagatgggcctgtgctgcctgggagcagaccttgggcactctggtgtgcaatgctccgtgagtactaatggacaagctttgtgctgagtctactctataaatggaaatgaaggcttcagtctggaggactgcaaagcagacatttctgccaacaataaaagtgctctgatggtaaaagctataggaatgaaattgatagcttatcacaggagaaaatatacccttgatttatgagcccagcca

SEQ ID NO: 23319 - DNA, 599 bp, Chicken  19866894236484_1
  misc_feature (1)..(99): n is any nucleotide
nnnnnnnnnnnnnnnnnnnnnnnnnnnnnnnnnnnnnnnnnnnnnnnnnnnnnnnnnnnnnnnnnnnnnnnnnnnnnnnnnnnnnnnnnnnnnnnnnnnaagctaattataggtccaaatgggggataaaaaaagtcacaagcaattcttcagcagaaaactgaactcagtttttgcaggtccataccagtggtatatattaatttcaaactgaaaagtaactctggattctaataatacttctgtttcaatataggttaaagaaaataagaaaaaaaaaacggtgctattcaaaatagmgagcrgtaggttcagtgaaagttcttttgaatgttttcttctcatcctttctctatagtatcaaaatacaccaggaaatatttcttcttattctgtcaaaatacagattagaatttcaagtcaactcctggaaagtagtttactaatgaaaagtggcattattatataacttttacttccaccactcactgtcctgcttccatctatggcagaggcttaacgtggtgcttcccaagccaagtgctcttcacaatacctgagaaaccagagcagcagcactatgatgcagctggycatgc

SEQ ID NO: 23320 - DNA, 599 bp, Chicken  19866894236484_2
  misc_feature (1)..(94): n is any nucleotide
nnnnnnnnnnnnnnnnnnnnnnnnnnnnnnnnnnnnnnnnnnnnnnnnnnnnnnnnnnnnnnnnnnnnnnnnnnnnnnnnnnnnnnnnnnnnnnaagctaattataggtccaaatgggggataaaaaaagtcacaagcaattcttcagcagaaaactgaactcagtttttgcaggtccataccagtggtatatattaatttcaaactgaaaagtaactctggattctaataatacttctgtttcaatataggttaaagaaaataagaaaaaaaaaacggtgctattcaaaatagmgagcrgtaggttcagtgaaagttcttttgaatgttttcttctcatcctttctctatagtatcaaaatacaccaggaaatatttcttcttattctgtcaaaatacagattagaatttcaagtcaactcctggaaagtagtttactaatgaaaagtggcattattatataacttttacttccaccactcactgtcctgcttccatctatggcagaggcttaacgtggtgcttcccaagccaagtgctcttcacaatacctgagaaaccagagcagcagcactatgatgcagctggycatgcttggt

SEQ ID NO: 23321 - DNA, 600 bp, Chicken  19866894236484_3
aatagmgagcrgtaggttcagtgaaagttcttttgaatgttttcttctcatcctttctctatagtatcaaaatacaccaggaaatatttcttcttattctgtcaaaatacagattagaatttcaagtcaactcctggaaagtagtttactaatgaaaagtggcattattatataacttttacttccaccactcactgtcctgcttccatctatggcagaggcttaacgtggtgcttcccaagccaagtgctcttcacaatacctgagaaaccagagcagcagcactatgatgcagctggycatgcttggtgtttacctggagacaaggagtggctcagccaatgctgggtagatgactggaatggtctcagacrcttcctttgggaggtgatttactggcactggatccrccaggatttctatgtatcctgctgtactgtggtcagtctgtggtatatatgcccagctcgggaaaaggaacagtgactccagccactccagttcaaaatgcagcagctaaggcaaaagacagtgagaaaaagctcaaggtgaatgaagttaccttttctcagcattacttacaaagttaatttactaatt

SEQ ID NO: 23322 - DNA, 600 bp, Chicken  19866894236484_4
caccaggaaatatttcttcttattctgtcaaaatacagattagaatttcaagtcaactcctggaaagtagtttactaatgaaaagtggcattattatataacttttacttccaccactcactgtcctgcttccatctatggcagaggcttaacgtggtgcttcccaagccaagtgctcttcacaatacctgagaaaccagagcagcagcactatgatgcagctggycatgcttggtgtttacctggagacaaggagtggctcagccaatgctgggtagatgactggaatggtctcagacrcttcctttgggaggtgatttactggcactggatccrccaggatttctatgtatcctgctgtactgtggtcagtctgtggtatatatgcccagctcgggaaaaggaacagtgactccagccactccagttcaaaatgcagcagctaaggcaaaagacagtgagaaaaagctcaaggtgaatgaagttaccttttctcagcattacttacaaagttaatttactaatttgcccttgcacaaacatcacaaattcttattctacttttgggcttcattattaaatgagagcaatgtcttctgc

SEQ ID NO: 23323 - DNA, 585 bp, Chicken  19866894236484_5
agattagaatttcaagtcaactcctggaaagtagtttactaatgaaaagtggcattattatataacttttacttccaccactcactgtcctgcttccatctatggcagaggcttaacgtggtgcttcccaagccaagtgctcttcacaatacctgagaaaccagagcagcagcactatgatgcagctggycatgcttggtgtttacctggagacaaggagtggctcagccaatgctgggtagatgactggaatggtctcagacrcttcctttgggaggtgatttactggcactggatccrccaggatttctatgtatcctgctgtactgtggtcagtctgtggtatatatgcccagctcgggaaaaggaacagtgactccagccactccagttcaaaatgcagcagctaaggcaaaagacagtgagaaaaagctcaaggtgaatgaagttaccttttctcagcattacttacaaagttaatttactaatttgcccttgcacaaacatcacaaattcttattctacttttgggcttcattattaaatgagagcaatgtcttctgcccacttctctgtcttgcacgg

SEQ ID NO: 23324 - DNA, 600 bp, Chicken  19866894236489_1
ctgaacagtgtgtttgcacattgctcattaatgtcgatacaggtgtttaatttgggcaaataaccattgttttctctcaaaaaatgctgactaattttgttgttttgtctcatgatataccctggggacttgatgcagttttgctcaggagtatttataataggacagaaaatcctgatgtaactctgtacactgcctgtttgttggcagtgggatttccaacacagaaagccatgatgcacagaagaaatctgactgtgcatctgactcttaatgaaagatgacttcctgggttagcaraggttacttagctaaaggccrtcactatctccttaaagctgtgacaacagaaaaagccaccatgtgtttcccsatgtattttgtatctgggtaaggctacctgttttcaaaatctcccttcatttcttcaagtgcttctatagctaatattcaaccaaattggttatcaattgtacctgtgtgggaaaaaagacacagtactatgtagcaataactaagctacagctccaaaagctatgggaccatgggagcatgcccaccagtgctgagattttactagccaagatggagctgctgctc

SEQ ID NO: 23325 - DNA, 600 bp, Chicken  19866894236489_2
tgctcattaatgtcgatacaggtgtttaatttgggcaaataaccattgttttctctcaaaaaatgctgactaattttgttgttttgtctcatgatataccctggggacttgatgcagttttgctcaggagtatttataataggacagaaaatcctgatgtaactctgtacactgcctgtttgttggcagtgggatttccaacacagaaagccatgatgcacagaagaaatctgactgtgcatctgactcttaatgaaagatgacttcctgggttagcaraggttacttagctaaaggccrtcactatctccttaaagctgtgacaacagaaaaagccaccatgtgtttcccsatgtattttgtatctgggtaaggctacctgttttcaaaatctcccttcatttcttcaagtgcttctatagctaatattcaaccaaattggttatcaattgtacctgtgtgggaaaaaagacacagtactatgtagcaataactaagctacagctccaaaagctatgggaccatgggagcatgcccaccagtgctgagattttactagccaagatggagctgctgctcttgcaaagctacgcaaaccca

SEQ ID NO: 23326 - DNA, 582 bp, Chicken  19866894236489_3
ctctcaaaaaatgctgactaattttgttgttttgtctcatgatataccctggggacttgatgcagttttgctcaggagtatttataataggacagaaaatcctgatgtaactctgtacactgcctgtttgttggcagtgggatttccaacacagaaagccatgatgcacagaagaaatctgactgtgcatctgactcttaatgaaagatgacttcctgggttagcaraggttacttagctaaaggccrtcactatctccttaaagctgtgacaacagaaaaagccaccatgtgtttcccsatgtattttgtatctgggtaaggctacctgttttcaaaatctcccttcatttcttcaagtgcttctatagctaatattcaaccaaattggttatcaattgtacctgtgtgggaaaaaagacacagtactatgtagcaataactaagctacagctccaaaagctatgggaccatgggagcatgcccaccagtgctgagattttactagccaagatggagctgctgctcttgcaaagctacgcaaacccacccagcctggtgtctctgcacacccctacactta

SEQ ID NO: 23327 - DNA, 600 bp, Chicken  19866894236497_1
atgacttcagataatacaacgtgcaacgtgcgccatatgcttatgtaggtcttgccttgggccataatctagattatggaatcctcttcacgacaagtagggctgcagggagaaagaaattacagaagtgaggagggatagacgtgggtcatgtgaattcataccctctataaaaggcagttatgtaaggagttcatacctgagctcaaatgggctgattaacattcctgaaacgaaactcatcaattcttcacattaaatgaggccaaaactgatggcacatacccactctttgacacrttaaatgccctgaagtggagttcaaatggatcattgcagcttcacaaagttctctctgaagaactgccaaaggagcaaatttgtgcgaaataccacttcatcattcctatggtagcagcaacgtgcaatcacacaaatggcagtggaggaatgcagctgaagtagttcctttgacctactgcaacacatcaagaaagctcttcagcctggctgcaggattgcaggcaggtaagcatcacagtaatttaatgtctccatctgcagaccacgttgtatggccttctaagatcttcaataatt

SEQ ID NO: 23328 - DNA, 600 bp, Chicken  19866894236500_1
tcatgatagagcagtgttctaatggaagagaccaatgggagtaaacaggggcacaatggacagatgttggtaggaaatggatttgttcagatgtcactaggtcatcatggtgctcagttacaaatggggaaatttccatcagattcttccccctggcagtcacatagtaaggatacagtggagggaacctgcactcatgtccttccagttacctgacttcttggaactgtctgtatgggcaagctgtatctgtagcaccgccaggagcctctgctgctacttccaggataagggaaaggrgagacaactcacactcaccttggtagaatcatctgctcagcagagtgaacactccactgctggtctcaaaatccacacccatttctagagggcacgctagaacatggggccattagcagtacatctcctacacagcaaaagaaaagtgactgttcccttccacctccattgtttgttctgctttcccttttcctggtaactcctttccacccaccagctgtgtgacagagcaagcagtcccctgagcagtcaggccaaggtccacagtgcaggcagatatgtaataggcaccaagtaggg

SEQ ID NO: 23329 - DNA, 600 bp, Chicken  19866894236508_1
tcttagcggtcacaacctgggtaaggaccttgacttttctaatacttttagtccatagtgaatgtggcaaggatgaagagaaaataagtttttaattccaagttgtctttgctgtaaataactgatataaataactctgttctgcctgaagctgtctgaagacattaggacagcctccgtactagaatgtttattggaggcagctacagtcaaatcctactcctctctctcacttttccctcttctttcaaaccacagtacatatatcactgaagaccttttagagctgtcactaggttrtgtcagccaaagcccactgcacatcacatgctgaatcagcagcctccacacagcgctgcccgtgtctggcaccagtgcccaagggcagctacacacttctagattctccatagcctgaaaagcaccttactaatactgaaasttttgctttygagcaraattattccttcaggcccctcccattcctcagaccctttycaattgtkcctttattccactgaaaataaagccctgaacactgagatatttctgcatccctgctgcagttgcaagcccctgcaatatgatccttctcagcac

SEQ ID NO: 23330 - DNA, 600 bp, Chicken  19866894236508_2
tgcctgaagctgtctgaagacattaggacagcctccgtactagaatgtttattggaggcagctacagtcaaatcctactcctctctctcacttttccctcttctttcaaaccacagtacatatatcactgaagaccttttagagctgtcactaggttrtgtcagccaaagcccactgcacatcacatgctgaatcagcagcctccacacagcgctgcccgtgtctggcaccagtgcccaagggcagctacacacttctagattctccatagcctgaaaagcaccttactaatactgaaasttttgctttygagcaraattattccttcaggcccctcccattcctcagaccctttycaattgtkcctttattccactgaaaataaagccctgaacactgagatatttctgcatccctgctgcagttgcaagcccctgcaatatgatccttctcagcacatttccctgagactccctagcatgtataagcatgccaaaatatgaggcagtgagggtacaaataaaagtagaagctgaatttgtgcatttcagtcaagcatgttgtgatttagattataaatttaagccattccattaaatt

SEQ ID NO: 23331 - DNA, 600 bp, Chicken  19866894236508_3
tgtctgaagacattaggacagcctccgtactagaatgtttattggaggcagctacagtcaaatcctactcctctctctcacttttccctcttctttcaaaccacagtacatatatcactgaagaccttttagagctgtcactaggttrtgtcagccaaagcccactgcacatcacatgctgaatcagcagcctccacacagcgctgcccgtgtctggcaccagtgcccaagggcagctacacacttctagattctccatagcctgaaaagcaccttactaatactgaaasttttgctttygagcaraattattccttcaggcccctcccattcctcagaccctttycaattgtkcctttattccactgaaaataaagccctgaacactgagatatttctgcatccctgctgcagttgcaagcccctgcaatatgatccttctcagcacatttccctgagactccctagcatgtataagcatgccaaaatatgaggcagtgagggtacaaataaaagtagaagctgaatttgtgcatttcagtcaagcatgttgtgatttagattataaatttaagccattccattaaattatcattccag

SEQ ID NO: 23332 - DNA, 600 bp, Chicken  19866894236508_4
aagacattaggacagcctccgtactagaatgtttattggaggcagctacagtcaaatcctactcctctctctcacttttccctcttctttcaaaccacagtacatatatcactgaagaccttttagagctgtcactaggttrtgtcagccaaagcccactgcacatcacatgctgaatcagcagcctccacacagcgctgcccgtgtctggcaccagtgcccaagggcagctacacacttctagattctccatagcctgaaaagcaccttactaatactgaaasttttgctttygagcaraattattccttcaggcccctcccattcctcagaccctttycaattgtkcctttattccactgaaaataaagccctgaacactgagatatttctgcatccctgctgcagttgcaagcccctgcaatatgatccttctcagcacatttccctgagactccctagcatgtataagcatgccaaaatatgaggcagtgagggtacaaataaaagtagaagctgaatttgtgcatttcagtcaagcatgttgtgatttagattataaatttaagccattccattaaattatcattccaggagcct

SEQ ID NO: 23333 - DNA, 600 bp, Chicken  19866894236508_5
ggcagctacagtcaaatcctactcctctctctcacttttccctcttctttcaaaccacagtacatatatcactgaagaccttttagagctgtcactaggttrtgtcagccaaagcccactgcacatcacatgctgaatcagcagcctccacacagcgctgcccgtgtctggcaccagtgcccaagggcagctacacacttctagattctccatagcctgaaaagcaccttactaatactgaaasttttgctttygagcaraattattccttcaggcccctcccattcctcagaccctttycaattgtkcctttattccactgaaaataaagccctgaacactgagatatttctgcatccctgctgcagttgcaagcccctgcaatatgatccttctcagcacatttccctgagactccctagcatgtataagcatgccaaaatatgaggcagtgagggtacaaataaaagtagaagctgaatttgtgcatttcagtcaagcatgttgtgatttagattataaatttaagccattccattaaattatcattccaggagcctgtatttccagtttgtattttttaatttcctattcactgct

SEQ ID NO: 23334 - DNA, 600 bp, Chicken  19866894236508_6
cagtcaaatcctactcctctctctcacttttccctcttctttcaaaccacagtacatatatcactgaagaccttttagagctgtcactaggttrtgtcagccaaagcccactgcacatcacatgctgaatcagcagcctccacacagcgctgcccgtgtctggcaccagtgcccaagggcagctacacacttctagattctccatagcctgaaaagcaccttactaatactgaaasttttgctttygagcaraattattccttcaggcccctcccattcctcagaccctttycaattgtkcctttattccactgaaaataaagccctgaacactgagatatttctgcatccctgctgcagttgcaagcccctgcaatatgatccttctcagcacatttccctgagactccctagcatgtataagcatgccaaaatatgaggcagtgagggtacaaataaaagtagaagctgaatttgtgcatttcagtcaagcatgttgtgatttagattataaatttaagccattccattaaattatcattccaggagcctgtatttccagtttgtattttttaatttcctattcactgcttgctttcc

SEQ ID NO: 23335 - DNA, 599 bp, Chicken  19866894236510_1
  misc_feature (1)..(168): n is any nucleotide
nnnnnnnnnnnnnnnnnnnnnnnnnnnnnnnnnnnnnnnnnnnnnnnnnnnnnnnnnnnnnnnnnnnnnnnnnnnnnnnnnnnnnnnnnnnnnnnnnnnnnnnnnnnnnnnnnnnnnnnnnnnnnnnnnnnnnnnnnnnnnnnnnnnnnnnnnnnnnnnnnnnnnnnnccccccccccccacgtgtcggggctgcacagtgcaggcgctgctgggagggcttgaatggcctctgtgcagtgcctttcccattttagaaggatagaaaaggagaaaagtaatttgtctgccagccagttarttgctttaacctgggcagcagtgaggcacgttatctggtgcgatcccacatgcaaatgcttttcagatgatctgtatttctttctggattttctatggatctgtgtgcatttttggccatgttccrggtgcatggtttatgtgtctgtgtgctcctgcccttccagaaatgtgaggcagtcaaagggagctcagccctttcccactgatatagtgccctgttttatagcttctcactttgccgctgctgtcgtgtgtcactttggatcccctgccctgcagtcctgcactcacctgctc

SEQ ID NO: 23336 - DNA, 599 bp, Chicken  19866894236510_2
  misc_feature (1)..(42): n is any nucleotide
nnnnnnnnnnnnnnnnnnnnnnnnnnnnnnnnnnnnnnnnnnccccccccccccacgtgtcggggctgcacagtgcaggcgctgctgggagggcttgaatggcctctgtgcagtgcctttcccattttagaaggatagaaaaggagaaaagtaatttgtctgccagccagttarttgctttaacctgggcagcagtgaggcacgttatctggtgcgatcccacatgcaaatgcttttcagatgatctgtatttctttctggattttctatggatctgtgtgcatttttggccatgttccrggtgcatggtttatgtgtctgtgtgctcctgcccttccagaaatgtgaggcagtcaaagggagctcagccctttcccactgatatagtgccctgttttatagcttctcactttgccgctgctgtcgtgtgtcactttggatcccctgccctgcagtcctgcactcacctgctcctcactgcacagctcaggggcagattggcccggtccctcatcctacacctatggtggatttgtcctgagatcctgctgctggcctaggagacagctgagcgagtgctctcagggctggatgcctaa

SEQ ID NO: 23337 - DNA, 600 bp, Chicken  19866894236510_3
gttttatagcttctcactttgccgctgctgtcgtgtgtcactttggatcccctgccctgcagtcctgcactcacctgctcctcactgcacagctcaggggcagattggcccggtccctcatcctacacctatggtggatttgtcctgagatcctgctgctggcctaggagacagctgagcgagtgctctcagggctggatgcctaaaattagacctgacatctgtgttttggtttgcaggcaggcttggaagaaaacgtctcctggctgcttcactgcggggggagcatgaggcaggagygaagcaggcacagcaccgctctgtgcagcggggccaggagagccgtgcctcgcagtgctgcagtgtgcacagcggctgtgtgggtggatgctgctcccacggtgccagaagaggctctggttggagccgtgttctgctggggctgtgctgagagctgtgttttccaggaaatgcctgcagccctgagatgagacaggcactgtactgcacagcatgcatccctggatgcagtgtgctaccagcagcacaagattccctcattcttatgaggccactgcacccaagagtcgctgctgagca

SEQ ID NO: 23338 - DNA, 600 bp, Chicken  19866894236510_4
aaatgcctgcagccctgagatgagacaggcactgtactgcacagcatgcatccctggatgcagtgtgctaccagcagcacaagattccctcattcttatgaggccactgcacccaagagtcgctgctgagcatgcctacagggtcctttctagcgctgcaagtgttcaacacaggcctgagcactccaaggtgcaggatagtggaggggtcctcagatatctgcagcaacgtgtgtgctgtagtgtggttcaggggcacagagcacagctggtggcaagctgctagtgtgggtacagagsgacgtgactctgggtgctgtgctggcagctgagtgcgaggttgagggtgccaagaaggctgcagaaacacgaagccttcattataacttgcacgcttgctctttgagatgactcagagcatggtctgctgtgaggacatggggagattgtgccgttgcgtaagttgtgaggtcttatccagaaaacaagtggtttgccagtggagtgaatttttgcagatgcagcttacaccaccctccagacaaaatatcccaaaccccctctctgccccagcaactgtatctgtgcaggggtttggtc

SEQ ID NO: 23339 - DNA, 600 bp, Chicken  19866894236514_1
aaatgagtttcttgttttagggtacaaactttagtataagttgtttttaatagcaattgcagaattaagctatagcattctatgtgtcttttatgtttaagatcaaatattgaccgcattttcatggtacattacatttcaagaaaagtcagctaatgtaaacaggtgaattcttctaattagaaatcagtgaaacgcacattagcagaaaagttcacgttgtttcacaggttatacttatctctattggtatataagcatagagatggtcagaattaagcagattcatgaagagaaaarttagtagtcttacacaagttaatgaacctatgaaaccactataatttaaagaatactggatattatattttctttatcattgattatcacagttacttagagatgttattcataattgtctgtgaagacatttttttttgttgcycatttcatgaagagaattaaattataaaatgtatcttattgttttctttattattttgattttaatacagcttaatgttttggactaactggaatgagcagctcccaagcatcatgagatctactctctcaggcaaaaatgcacaggttatcatt

SEQ ID NO: 23340 - DNA, 600 bp, Chicken  19866894236514_2
aagtcagctaatgtaaacaggtgaattcttctaattagaaatcagtgaaacgcacattagcagaaaagttcacgttgtttcacaggttatacttatctctattggtatataagcatagagatggtcagaattaagcagattcatgaagagaaaarttagtagtcttacacaagttaatgaacctatgaaaccactataatttaaagaatactggatattatattttctttatcattgattatcacagttacttagagatgttattcataattgtctgtgaagacatttttttttgttgcycatttcatgaagagaattaaattataaaatgtatcttattgttttctttattattttgattttaatacagcttaatgttttggactaactggaatgagcagctcccaagcatcatgagatctactctctcaggcaaaaatgcacaggttatcattagcacagatattctgacaccaaatggacttaccattgatcatagggcggagaaactttacttttcagatggtagcttgggaaaaattgagagatgtgaatatgatggatcacaaagatacgtaagttaaacaaaacatatgtact

SEQ ID NO: 23341 - DNA, 600 bp, Chicken  19866894236517_1
aggattttagtacagttggtagtaagaaattaatacagtgataactgaagggtaaatttatgttccttgagttgtttatttttgagtggctggagtggaggttcactgaatagtttcattatgtcatatttgttcagaaaattattttggattatatttgtgtaattttctgtaattattcagcattttaaaagaaaagataacactaggaacagactcctgtgtttgtatattcctggtctgttaaaatgggaatgacctttgttccattgggaactaggaatattccatgatgtcaargaccgtgagttcaaatcttgtttgaactgcgatgtgtgttaacagtctgaacctgcctgttcagaattggtgtacatagtaccactctgggattggcatgcctgcacttaataccttgctttgctccagaccttcacatatattttgagtgaatcagataagataccagttcttttacctcagagagatctagaaagggatattctgaaagtatttgtataagataagagcttaggaagcctctggcatctgtttcacatttttcatacttgttcaggcaatattgtcacatataagttt

SEQ ID NO: 23342 - DNA, 600 bp, Chicken  19866894236520_1
agttgcccaaggccccatccaacctagcctcgaaaacttccagggatagggcatccgcaccttctctgggcaagctgttccgccctcataatgaacaatttcctcctaacagctaacctaaatctacctttttttcagtttaaaactgttcccccttgttctgtcactactctccctgaagaagagttactcctcatctgttctgtagaccttctttaaatactgaaaatatgtgtctgcttagagtatatgatgtatgactgtcagatttttatttctgtctagagtctcaaattaacktttttgcagtttcgaaaaaatktggaagatgatgtcccagaattgttaagagtattttgttcaggtgttcagacgcttctttctctggtatcctgttacaggttgcaccttccttattttgaaggcatttcttatctatgagatatgagtcagagactttgattagatgttaactgtcttaagaaaagctttttagatgggaaaaaatggatgtagaatatccattgtccactgcaaatacttattttataaagagaaagattcttttctcgtatgaccattcctaaggaacaaattgaa

SEQ ID NO: 23343 - DNA, 600 bp, Chicken  19866894236520_2
cctagcctcgaaaacttccagggatagggcatccgcaccttctctgggcaagctgttccgccctcataatgaacaatttcctcctaacagctaacctaaatctacctttttttcagtttaaaactgttcccccttgttctgtcactactctccctgaagaagagttactcctcatctgttctgtagaccttctttaaatactgaaaatatgtgtctgcttagagtatatgatgtatgactgtcagatttttatttctgtctagagtctcaaattaacktttttgcagtttcgaaaaaatktggaagatgatgtcccagaattgttaagagtattttgttcaggtgttcagacgcttctttctctggtatcctgttacaggttgcaccttccttattttgaaggcatttcttatctatgagatatgagtcagagactttgattagatgttaactgtcttaagaaaagctttttagatgggaaaaaatggatgtagaatatccattgtccactgcaaatacttattttataaagagaaagattcttttctcgtatgaccattcctaaggaacaaattgaaataatctgttagtagaaaaata

SEQ ID NO: 23344 - DNA, 600 bp, Chicken  19866894236520_3
taaagagaaagattcttttctcgtatgaccattcctaaggaacaaattgaaataatctgttagtagaaaaatattcaagttaggcaataaatagtgagtcttcaaattaatcagtttttaagtttagctgttttaagtaaccagatgcatttattgttttaccaccctgaatgataagttcccgtcaatgattagcgactattattttcaacgatgcatagtataatcagggaatctgctaatgttaaaaatattcaaggtcattttcatatgtatttccaagagacctcttatcgcaarttttctttttattcacataggctctaatatacttgtaaaatactgcaccattttgcttccatctgatctaccacagcagtttcaattaaactttaagttaggaattacagctacaccgtgtcaaataaaaaattaatattatatcaggactctaaattaagctcattttactgtttgtgatgtcagaaatcagagttaggtactcattctttgagctaagtgaggattgaacttgtgtttatatgcataatatgtgtataaaccagagagctatggtcaagctctaaaaataaaaaatca

SEQ ID NO: 23345 - DNA, 600 bp, Chicken  19866894236521_1
gaaacatgttaatggttgtgtattatcaggcaataatgtcttcattaatgcatggctgtaatgtctataataactttgtcactaggaggaaggaatgcttagggaggagggaatgctttttagtaccaactgtccaaagtcattaactgcataaaatgggatacttgatggtgaagctatgtcatagatctttaaaggccagactcaaatcccttgagttcacactacaaactctgccagatcaatttccacagttccagctcttggccactcttctgagtgtctaattgtactttaaaygtgcttggagtgaaaatttttctatttgtttgcctacatagtagatgcttactaagatggagctttgttactcaatttctrtagattttttttttctctagctgtaggaacttgctttataaataaaagtcaaaktttgctatttatagtcaagttcttttatctaatacttaaactgagcaagtttccattttaagtaccattttggttgcagtgtgaaaaatatctattagctccttatgaactcatacttactgaacgtttcactgaaggtgtgatacactgaaggaatagtttaag

SEQ ID NO: 23346 - DNA, 600 bp, Chicken  19866894236521_2
ctaggaggaaggaatgcttagggaggagggaatgctttttagtaccaactgtccaaagtcattaactgcataaaatgggatacttgatggtgaagctatgtcatagatctttaaaggccagactcaaatcccttgagttcacactacaaactctgccagatcaatttccacagttccagctcttggccactcttctgagtgtctaattgtactttaaaygtgcttggagtgaaaatttttctatttgtttgcctacatagtagatgcttactaagatggagctttgttactcaatttctrtagattttttttttctctagctgtaggaacttgctttataaataaaagtcaaaktttgctatttatagtcaagttcttttatctaatacttaaactgagcaagtttccattttaagtaccattttggttgcagtgtgaaaaatatctattagctccttatgaactcatacttactgaacgtttcactgaaggtgtgatacactgaaggaatagtttaaggtgaaagagacaaatacttttttattcagtctgtagtctytgtgccctaactaaggaaatagatattgaaatatttaatta

SEQ ID NO: 23347 - DNA, 600 bp, Chicken  19866894236521_3
aggaaggaatgcttagggaggagggaatgctttttagtaccaactgtccaaagtcattaactgcataaaatgggatacttgatggtgaagctatgtcatagatctttaaaggccagactcaaatcccttgagttcacactacaaactctgccagatcaatttccacagttccagctcttggccactcttctgagtgtctaattgtactttaaaygtgcttggagtgaaaatttttctatttgtttgcctacatagtagatgcttactaagatggagctttgttactcaatttctrtagartttttttttctctagctgtaggaacttgctttataaataaaagtcaaaktttgctatttatagtcaagttcttttatctaatacttaaactgagcaagtttccattttaagtaccattttggttgcagtgtgaaaaatatctattagctccttatgaactcatacttactgaacgtttcactgaaggtgtgatacactgaaggaatagtttaaggtgaaagagacaaatacttttttattcagtctgtagtctytgtgccctaactaaggaaatagatattgaaatatttaattattttt

SEQ ID NO: 23348 - DNA, 600 bp, Chicken  19866894236521_4; identical to SEQ ID NO: 23347

SEQ ID NO: 23349 - DNA, 600 bp, Chicken  19866894236521_5
aaagtcattaactgcataaaatgggatacttgatggtgaagctatgtcatagatctttaaaggccagactcaaatcccttgagttcacactacaaactctgccagatcaatttccacagttccagctcttggccactcttctgagtgtctaattgtactttaaaygtgcttggagtgaaaatttttctatttgtttgcctacatagtagatgcttactaagatggagctttgttactcaatttctrtagattttttttttctctagctgtaggaacttgctttataaataaaagtcaaaktttgctatttatagtcaagttcttttatctaatacttaaactgagcaagtttccattttaagtaccattttggttgcagtgtgaaaaatatctattagctccttatgaactcatacttactgaacgtttcactgaaggtgtgatacactgaaggaatagtttaaggtgaaagagacaaatacttttttattcagtctgtagtctytgtgccctaactaaggaaatagatattgaaatatttaattatttttatctcttcctgaacacttattccccaacctgatgaaaacccaactgaag

SEQ ID NO: 23350 - DNA, 510 bp, Chicken  19866894236521_6
gtagatgcttactaagatggagctttgttactcaatttctrtagattttttttttctctagctgtaggaacttgctttataaataaaagtcaaaktttgctatttatagtcaagttcttttatctaatacttaaactgagcaagtttccattttaagtaccattttggttgcagtgtgaaaaatatctattagctccttatgaactcatacttactgaacgtttcactgaaggtgtgatacactgaaggaatagtttaaggtgaaagagacaaatacttttttattcagtctgtagtctytgtgccctaactaaggaaatagatattgaaatatttaattatttttatctcttcctgaacacttattccccaacctgatgaaaacccaactgaaggcctagaagctaaggacaaaaatagaagtttgctaggaaacagagtcaggtgtgatgttttattatgtattttttctagtagtaatatctgtctggctcatgctaatgcggaaaa

SEQ ID NO: 23351 - DNA, 600 bp, Chicken  19866894236523_1
gggtaacatcaagctttatgaacctattgctaacacatatataattttgataggaacatagcaacaggaacatacgcaacagaatattggtctgtttactcagactcaaaaattttcaaaatggtcaggcatgatttatagatcttcaaagccagagcagttttattaatatctaatatgaatcatagaatcatagaatcgctaagattggaaaagacccaaaggatcatccagtccaaccgacttacactgcatcatcaaagaacttcacatgttgatttacatgtaccactaatgaartgtttagaccagaaattttagaatagcgtcagaaattaatggcataaagaatagtgtagtttcacaaattacaatatgcttcactcatatacgatacaaacttaaaggatggttgaaaaaaagttctatagctcttaagaaaatattttactctctttaattaatwaaacttaaagtgtcatcaaaattttgaagcattatatttttagtttttttaaataatcctaaatggtaaaataggcattaatcgttataaatccaggatgggtctgtctctcyccataactgaaaaggaaacct

SEQ ID NO: 23352 - DNA, 600 bp, Chicken  19866894236523_2
taatatctaatatgaatcatagaatcatagaatcgctaagattggaaaagacccaaaggatcatccagtccaaccgacttacactgcatcatcaaagaacttcacatgttgatttacatgtaccactaatgaartgtttagaccagaaattttagaatagcgtcagaaattaatggcataaagaatagtgtagtttcacaaattacaatatgcttcactcatatacgatacaaacttaaaggatggttgaaaaaaagttctatagctcttaagaaaatattttactctctttaattaatwaaacttaaagtgtcatcaaaattttgaagcattatatttttagtttttttaaataatcctaaatggtaaaataggcattaatcgttataaatccaggatgggtctgtctctcyccataactgaaaaggaaacctatcaagtttacagaggacactcgcagattagtcttcactgtaatactaccattaaatgaaatcaacagaaaacttctaagttcttcaatatttacatgctatgaaggtaattctacattttgccaggtgagacttaataactaaaacaaaaactagtcacatgaag

SEQ ID NO: 23353 - DNA, 561 bp, Chicken  19866894236523_3
ttacatgtaccactaatgaartgtttagaccagaaattttagaatagcgtcagaaattaatggcataaagaatagtgtagtttcacaaattacaatatgcttcactcatatacgatacaaacttaaaggatggttgaaaaaaagttctatagctcttaagaaaatattttactctctttaattaatwaaacttaaagtgtcatcaaaattttgaagcattatatttttagtttttttaaataatcctaaatggtaaaataggcattaatcgttataaatccaggatgggtctgtctctcyccataactgaaaaggaaacctatcaagtttacagaggacactcgcagattagtcttcactgtaatactaccattaaatgaaatcaacagaaaacttctaagttcttcaatatttacatgctatgaaggtaattctacattttgccaggtgagacttaataactaaaacaaaaactagtcacatgaagttatattaagcagtaagttaagctaaccttttgactgcggtgaaatgtattaggaatgatacataacatttctg

SEQ ID NO: 23354 - DNA, 600 bp, Chicken  19866894236526_1
gaagaggatcagcaccaagtctgacccttgggggacaccacttgtgaccagcctccacccagacatagaaccattgatcacaaccctttggctgtgaccagccaaccagttcttaatccatcaaacagtccatctttcaaatccatacctctccaatttagagagaagaagtgagggaagtgagtagaaggaaggtcttaatatatgatactagagtgttctctgacattttatgacctgagcattcgttactggagggtaaattgatgcagagagggctgaagatagaaccatagaatrttttagattgkaaaagacccttaagatcaattccaaccatyaaccaaccattatayaaccatcaagtccacccctaaactgtgtccttaagcaccacctccacattctcttgaatacctgcagggacggtgactccaccacttctctgggsagctcattccaatacctaaccacccttgctataaatgaattcttcctcgtatcttcctagtaccttcttgatacctaaacctcccctggtgcaacttgatatctgcagtagttctatggtagcgctgagaacagacactgtgaagaaaa

SEQ ID NO: 23355 - DNA, 600 bp, Chicken  19866894236526_2
gcaccaagtctgacccttgggggacaccacttgtgaccagcctccacccagacatagaaccattgatcacaaccctttggctgtgaccagccaaccagttcttaatccatcaaacagtccatctttcaaatccatacctctccaatttagagagaagaagtgagggaagtgagtagaaggaaggtcttaatatatgatactagagtgttctctgacattttatgacctgagcattcgttactggagggtaaattgatgcagagagggctgaagatagaaccatagaatrttttagattgkaaaagacccttaagatcaattccaaccatyaaccaaccattatayaaccatcaagtccacccctaaactgtgtccttaagcaccacctccacattctcttgaatacctgcagggacggtgactccaccacttctctgggsagctcattccaatacctaaccacccttgctataaatgaattcttcctcgtatcttcctagtaccttcttgatacctaaacctcccctggtgcaacttgatatctgcagtagttctatggtagcgctgagaacagacactgtgaagaaaatcctacagcaa

SEQ ID NO: 23356 - DNA, 600 bp, Chicken  19866894236526_3
ttgtgaccagcctccacccagacatagaaccattgatcacaaccctttggctgtgaccagccaaccagttcttaatccatcaaacagtccatctttcaaatccatacctctccaatttagagagaagaagtgagggaagtgagtagaaggaaggtcttaatatatgatactagagtgttctctgacattttatgacctgagcattcgttactggagggtaaattgatgcagagagggctgaagatagaaccatagaatrttttagattgkaaaagacccttaagatcaattccaaccatyaaccaaccattatayaaccatcaagtccacccctaaactgtgtccttaagcaccacctccacattctcttgaatacctgcagggacggtgactccaccacttctctgggsagctcattccaatacctaaccacccttgctataaatgaattcttcctcgtatcttcctagtaccttcttgatacctaaacctcccctggtgcaacttgatatctgcagtagttctatggtagcgctgagaacagacactgtgaagaaaatcctacagcaaaagatctctgcctgttttttccgatcattg

SEQ ID NO: 23357 - DNA, 600 bp, Chicken  19866894236526_4
acccagacatagaaccattgatcacaaccctttggctgtgaccagccaaccagttcttaatccatcaaacagtccatctttcaaatccatacctctccaatttagagagaagaagtgagggaagtgagtagaaggaaggtcttaatatatgatactagagtgttctctgacattttatgacctgagcattcgttactggagggtaaattgatgcagagagggctgaagatagaaccatagaatrttttagattgkaaaagacccttaagatcaattccaaccatyaaccaaccattatayaaccatcaagtccacccctaaactgtgtccttaagcaccacctccacattctcttgaatacctgcagggacggtgactccaccacttctctgggsagctcattccaatacctaaccacccttgctataaatgaattcttcctcgtatcttcctagtaccttcttgatacctaaacctcccctggtgcaacttgatatctgcagtagttctatggtagcgctgagaacagacactgtgaagaaaatcctacagcaaaagatctctgcctgttttttccgatcattggactaagttccataa

SEQ ID NO: 23358 - DNA, 600 bp, Chicken  19866894236526_5
tccaatttagagagaagaagtgagggaagtgagtagaaggaaggtcttaatatatgatactagagtgttctctgacattttatgacctgagcattcgttactggagggtaaattgatgcagagagggctgaagatagaaccatagaatrttttagattgkaaaagacccttaagatcaattccaaccatyaaccaaccattatayaaccatcaagtccacccctaaactgtgtccttaagcaccacctccacattctcttgaatacctgcagggacggtgactccaccacttctctgggsagctcattccaatacctaaccacccttgctataaatgaattcttcctcgtatcttcctagtaccttcttgatacctaaacctcccctggtgcaacttgatatctgcagtagttctatggtagcgctgagaacagacactgtgaagaaaatcctacagcaaaagatctctgcctgttttttccgatcattggactaagttccataatttagatcccataagctaggctgaactactggtgttatttttttttctgtctgtttttgcagtaacagacgcttgctagtggtcagaagctgcag

SEQ ID NO: 23359 - DNA, 600 bp, Chicken  19866894236530_1
acctatttgttataaaatagttgaagattaagtattcacttctagccgtcttgtctaggcttcatattaactcaaattcatataccagttcctatcctgggtttctttaaggtagatttacatgatctaatgaagaaagcacaaaattcatcttgttttaagtttttaaggttatgtttataatcagcatgaaataagaaatagtaattgtgacaactatgaagaagaaatacagcctgattcacttctgtcacaaagatatagttgattacttttgtggtaatttatatctacaaaaayaaacaaataagtaaatataaaagcctaaggagccaacagttttactgtgatagcattttgcagagggctaagtgattgcacatatgcaaaagaacaaggaagccctgcaattttctctatgcgtggttctcctggcatatgctctcttccacatattcattattgaccatcagcatcatcaagatggttgaattttactgacctgatgtggaaattcataggttcttctgacaataaatgtagggaaaaatagaaaagaaaaaacaaacttgaaaagctgctgttaatcgttctacttca

SEQ ID NO: 23360 - DNA, 600 bp, Chicken  19866894236532_1
aggattacaaaaactgtgacgtgggagaaagaatattgagatttttaatgaagaaacagccccaaaatctttcaataagttgtgatatatcttttagctttctcagaatagcagtgagcacaattaagttataagaaagtcattcatctaaacctgaaaagtctaaacaggaatgattctcccagatgagtttagaaatcttctcttccacccccacaactctgttgattcttttgtggttcttttatgaatactttctaaaagtccattttaaagtagtctttttttttttttttaatwgtactcttaaaagagtgggaaaaaaaagccaaaaggaatacttccaggaaaacataataaaaacatctgtcatacctcaacagatattgagcaagatggcaaaggaaggtacacatcctttaaattaatgagtggctgaatttaattattaagatgcagaattactaaagtgggatatctctgctttaaacaacatctttcctaggctgcastatttagctcatgcagcagttttgaaatttgcaccttccttctacatcccagggaaagactctcttgcaagcaattaacctccaagga

SEQ ID NO: 23361 - DNA, 600 bp, Chicken  19866894236532_2
cccacaactctgttgattcttttgtggttcttttatgaatactttctaaaagtccattttaaagtagtctttttttttttttttaatwgtactcttaaaagagtgggaaaaaaaagccaaaaggaatacttccaggaaaacataataaaaacatctgtcatacctcaacagatattgagcaagatggcaaaggaaggtacacatcctttaaattaatgagtggctgaatttaattattaagatgcagaattactaaagtgggatatctctgctttaaacaacatctttcctaggctgcastatttagctcatgcagcagttttgaaatttgcaccttccttctacatcccagggaaagactctcttgcaagcaattaacctccaaggaatctctgcacactgacaggtcccacagggggaattaaaccgagtcatatatctactgaagttaagggcaactccccctctgacttcaatgggagcaggatcaagatctcaatttgtatggtttagaaatgaggaaagaatagtatggctgtgtaagcaaacctgaactaaataatttttgtccattttatatgtaaagtgggtgggaaatta

SEQ ID NO: 23362 - DNA, 600 bp, Chicken  19866894236533_1
aaatgaagggctacagaatggtaagagacaggtacagggagtgtaggtgtggtaccaaatccctacctcactgtttcaatacctgcgcttagtgcctggattgccttacattcagctctgtaacagccccacaacatatcagagcttcctgcgaaggttttcactcttcatatccaataagacatttagattaatgcatgcaaaatgttgccctaggatttgatagtgaaaagagccaaaacccaaatcttctttttttccccagaaatagtcatccatcattaaaattattagagagcwaatggctgaaatgtatcattacaaaatagaagtatttcctttgattgtttaaaaatctcttatttaatttgattcatacatatttttttcccttttacagtttagaacactgcatcttaccatatgtgaaatgtttcttcgaggtgtcaaagtgacttgtcatgggtttggaatgagaactaaattaaatgtccatactttaacatacttatataaataacgagatattccagtataaaccattcatttggcagtcatttctacatcagcaactacaaagtgctatagatttcctgccta

SEQ ID NO: 23363 - DNA, 599 bp, Chicken  19866894236539_1
  misc_feature (1)..(284): n is any nucleotide
nnnnnnnnnnnnnnnnnnnnnnnnnnnnnnnnnnnnnnnnnnnnnnnnnnnnnnnnnnnnnnnnnnnnnnnnnnnnnnnnnnnnnnnnnnnnnnnnnnnnnnnnnnnnnnnnnnnnnnnnnnnnnnnnnnnnnnnnnnnnnnnnnnnnnnnnnnnnnnnnnnnnnnnnnnnnnnnnnnnnnnnnnnnnnnnnnnnnnnnnnnnnnnnnnnnnnnnnnnnnnnnnnnnnnnnnnnnnnnnnnnnnnnnnnnnnnnnnnnnnnnnnnnnnnnnnnnnnnnnnnnnncttttctttcccagaraattgctcctactgtgcagatgaaatgcaccaaaatgcaaacgagcagaatatggagctgagtgatgttgaatgcaagtttctccgctgccagatgtgaagagaacaagtggtctgaaaactgtaatttggattttgttttttgttgttgttgttttttgttttttaataatttggtacttctgagcgatttgatgatttaatgagcacagatggatgtgggatgtatttctaagagacaagtgtttaatgtatctgctcagattattctaggactaagcattatccttcctagtgcat

SEQ ID NO: 23364 - DNA, 600 bp, Chicken  19866894236539_2
tgtttaatgtatctgctcagattattctaggactaagcattatccttcctagtgcatgaaggtaattaatatttcccattatggcacgaaaaaacccgtatgatcagttaaggaacgcggatacaccaatgatatggaagttaattcatgaatcaattagagaatcttgcctgctgtgtataattagggttacttcaattatagcttattttcagatttaagactcgagaaccaaaatgcttaaaacgggaggaagttccttaccaccatatactgcaattgaaagtatgtgcacagttrtagcagtctaaatctattctctcctcattccagcaaggctgagygtgtccctctggttctattctgtttcactgcagctgcttaaaattgtcattagttgaatgtttcactgtcaggacccccctgaggtgaaatgagaaatgtgcacggtatgggaccagccctggcatattaaacagcgtgtccggactcctttacatcagagcctggaaagcagcacctcaacagccagctccaaggcgccagggaacgctcttcctggtttctttccatgrctrtgtttaactaaaggtgcagcat

SEQ ID NO: 23365 - DNA, 600 bp, Chicken  19866894236539_3
cttcctagtgcatgaaggtaattaatatttcccattatggcacgaaaaaacccgtatgatcagttaaggaacgcggatacaccaatgatatggaagttaattcatgaatcaattagagaatcttgcctgctgtgtataattagggttacttcaattatagcttattttcagatttaagactcgagaaccaaaatgcttaaaacgggaggaagttccttaccaccatatactgcaattgaaagtatgtgcacagttrtagcagtctaaatctattctctcctcattccagcaaggctgagygtgtccctctggttctattctgtttcactgcagctgcttaaaattgtcattagttgaatgtttcactgtcaggacccccctgaggtgaaatgagaaatgtgcacggtatgggaccagccctggcatattaaacagcgtgtccggactcctttacatcagagcctggaaagcagcacctcaacagccagctccaaggcgccagggaacgctcttcctggtttctttccatgrctrtgtttaactaaaggtgcagcattccactgatgtagttacaccggtgctaaatctggtttatattga

SEQ ID NO: 23366 - DNA, 600 bp, Chicken  19866894236539_4
gaagttccttaccaccatatactgcaattgaaagtatgtgcacagttrtagcagtctaaatctattctctcctcattccagcaaggctgagygtgtccctctggttctattctgtttcactgcagctgcttaaaattgtcattagttgaatgtttcactgtcaggacccccctgaggtgaaatgagaaatgtgcacggtatgggaccagccctggcatattaaacagcgtgtccggactcctttacatcagagcctggaaagcagcacctcaacagccagctccaaggcgccagggaacyctcttcctggtttctttccatgrctrtgtttaactaaaggtgcagcattccactgatgtagttacaccggtgctaaatctggtttatattgatttagcttttcttatagcgttaatctaaagtgatgtggaccaaattaagtgtgcctaaatagggattggtttttcactcttttcactaaattggtttttcatggattttaaagacaagagactactgtgatagtctgctctcactgccttcattacaatgctgaaggacctgtctgcatttatttctgcttccagtgtagtagctgtg

SEQ ID NO: 23367 - DNA, 600 bp, Chicken  19866894236539_5
gcaattgaaagtatgtgcacagttrtagcagtctaaatctattctctcctcattccagcaaggctgagygtgtccctctggttctattctgtttcactgcagctgcttaaaattgtcattagttgaatgtttcactgtcaggacccccctgaggtgaaatgagaaatgtgcacggtatgggaccagccctggcatattaaacagcgtgtccggactcctttacatcagagcctggaaagcagcacctcaacagccagctccaaggcgccagggaacgctcttcctggtttctttccatgrctrtgtttaactaaaggtgcagcattccactgatgtagttacaccggtgctaaatctggtttatattgatttagcttttcttatagcgttaatctaaagtgatgtggaccaaattaagtgtgcctaaatagggattggtttttcactcttttcactaaattggtttttcatggattttaaagacaagagactactgtgatagtctgctctcactgccttcattacaatgctgaaggacctgtctgcatttatttctgcttccagtgtagtagctgtgctcaaagtacagcacagaactcc

SEQ ID NO: 23368 - DNA, 600 bp, Chicken  19866894236539_6
attgaaagtatgtgcacagttrtagcagtctaaatctattctctcctcattccagcaaggctgagygtgtccctctggttctattctgtttcactgcagctgcttaaaattgtcattagttgaatgtttcactgtcaggacccccctgaggtgaaatgagaaatgtgcacggtatgggaccagccctggcatattaaacagcgtgtccggactcctttacatcagagcctggaaagcagcacctcaacagccagctccaaggcgccagggaacgctcttcctggtttctttccatgrctrtgtttaactaaaggtgcagcattccactgatgtagttacaccggtgctaaatctggtttatattgatttagcttttcttatagcgttaatctaaagtgatgtggaccaaattaagtgtgcctaaatagggattggtttttcactcttttcactaaattggtttttcatggattttaaagacaagagactactgtgatagtctgctctcactgccttcattacaatgctgaaggacctgtctgcatttatttctgcttccagtgtagtagctgtgctcaaagtacagcacagaactcccaa

SEQ ID NO: 23369 - DNA, 600 bp, Chicken  19866894236541_1
gtttttaattctcgagttgttttttttcacttttcgttttcccttccccatcgttcccttggaccccagaggaccctgcaagcttctttggcagcagtgaggccaaagcagtgagccatcctgatgctcagcccctgccccaggccagcctgctcccatggccacgtggcgagcgctgtgcagccacatcccacctctcccctgcagctgtcccttcctcctcccctttgctccagggccagcgctgtgctggatggagcctatctgcatcattctgttttatagcacaactggggctcyctgcgtgcaagagcaacctcaagattccagcaagactgacacctggatttggggtgtcttggctacactccaccatggaagtgatgctgtgaagtgggcatggaggggatgggttgatgagctgatgggttgattggacttgatgatcttagaggccttttccatccttgctsattggtaaggccagctgcagggagctacaggcagcgaccaggagcactcatggctcaggattttgtttgctcccyacctcacacttcacctcctttccagtctcccacctccttgggcaagaaggga

SEQ ID NO: 23370 - DNA, 600 bp, Chicken  19866894236541_2
cgctgtgcagccacatcccacctctcccctgcagctgtcccttcctcctcccctttgctccagggccagcgctgtgctggatggagcctatctgcatcattctgttttatagcacaactggggctcyctgcgtgcaagagcaacctcaagattccagcaagactgacacctggatttggggtgtcttggctacactccaccatggaagtgatgctgtgaagtgggcatggaggggatgggttgatgagctgatgggttgattggacttgatgatcttagaggccttttccatccttgctsattggtaaggccagctgcagggagctacaggcagcgaccaggagcactcatggctcaggattttgtttgctcccyacctcacacttcacctcctttccagtctcccacctccttgggcaagaagggacttcttcccatttcttacttcttgtcccacagcatccctragaataaggagccattttcctgccctccctccacaaatatatggcctcattaggaccacgacacgcttcctggcaccccgaaccaagcccagccttcgcttcccagatggatctttaattgaatatggtggct

SEQ ID NO: 23371 - DNA, 600 bp, Chicken  19866894236541_3
gctggatggagcctatctgcatcattctgttttatagcacaactggggctcyctgcgtgcaagagcaacctcaagattccagcaagactgacacctggatttggggtgtcttggctacactccaccatggaagtgatgctgtgaagtgggcatggaggggatgggttgatgagctgatgggttgattggacttgatgatcttagaggccttttccatccttgctsattggtaaggccagctgcagggagctacaggcagcgaccaggagcactcatggctcaggattttgtttgctcccyacctcacacttcacctcctttccagtctcccacctccttgggcaagaagggacttcttcccatttcttacttcttgtcccacagcatccctragaataaggagccattttcctgccctccctccacaaatatatggcctcattaggaccacgacacgcttcctggcaccccgaaccaagcccagccttcgcttcccagatggatctttaattgaatatggtggctgttattaagcagtgcatggttcagaaagaggggaggggggaggaaagggaaaggagaggaaaagcaaatgatgag

SEQ ID NO: 23372 - DNA, 600 bp, Chicken  19866894236541_4
acctggatttggggtgtcttggctacactccaccatggaagtgatgctgtgaagtgggcatggaggggatgggttgatgagctgatgggttgattggacttgatgatcttagaggccttttccatccttgctsattggtaaggccagctgcagggagctacaggcagcgaccaggagcactcatggctcaggattttgtttgctcccyacctcacacttcacctcctttccagtctcccacctccttgggcaagaagggacttcttcccatttcttacttcttgtcccacagcatccctragaataaggagccattttcctgccctccctccacaaatatatggcctcattaggaccacgacacgcttcctggcaccccgaaccaagcccagccttcgcttcccagatggatctttaattgaatatggtggctgttattaagcagtgcatggttcagaaagaggggaggggggaggaaagggaaaggagaggaaaagcaaatgatgagctgtggaggaaggaagaaggggctgcctccgtgttgccaattawcacaaaatagccagtggaggctgtgaaagaaacacagcatctcaggag

SEQ ID NO: 23373 - DNA, 600 bp, Chicken  19866894236541_5
agaagggacttcttcccatttcttacttcttgtcccacagcatccctragaataaggagccattttcctgccctccctccacaaatatatggcctcattaggaccacgacacgcttcctggcaccccgaaccaagcccagccttcgcttcccagatggatctttaattgaatatggtggctgttattaagcagtgcatggttcagaaagaggggaggggggaggaaagggaaaggagaggaaaagcaaatgatgagctgtggaggaaggaagaaggggctgcctccgtgttgccaattawcacaaaatagccagtggaggctgtgaaagaaacacagcatctcaggaggtcaagtgagaggacagcagaagcagttctgcgttcattccatgtcaacctcacaggcctgaagcacgtggaggagcacgttggccactcagtaacttccagagccagacagggaacctcatcaagcaytgggacagccacaggcagaacggcaacgcagtgctgcacgcagtgaggctggaagagagcagtggaaccagcactgtgatcgaaggaaaaaggctactgctctgcagcactgccccaataatc

SEQ ID NO: 23374 - DNA, 600 bp, Chicken  19866894236541_6
ggctgttattaagcagtgcatggttcagaaagaggggaggggggaggaaagggaaaggagaggaaaagcaaatgatgagctgtggaggaaggaagaaggggctgcctccgtgttgccaattawcacaaaatagccagtggaggctgtgaaagaaacacagcatctcaggaggtcaagtgagaggacagcagaagcagttctgcgttcattccatgtcaacctcacaggcctgaagcacgtggaggagcacgttggccactcagtaacttccagagccagacagggaacctcatcaagcaytgggacagccacaggcagaacggcaacgcagtgctgcacgcagtgaggctggaagagagcagtggaaccagcactgtgatcgaaggaaaaaggctactgctctgcagcactgccccaataatcctcagagcttcttccctcagtgcttacagtctgggtatcaagctatggtatcaagctcagcagatgcctctggttatatgagacaagattttaagccctctgttttccagacaggcggcataacaccacggctacttaacacaccctgcaaagcaggctaaggaggactcagagggt

SEQ ID NO: 23375 - DNA, 600 bp, Chicken  19866894236548_1
ctttccttgacaacaaccagtcccaggtacattaaagaaggaaacaaatcagctactgatagtaagaggtttaaagcctcaagcaagagatgtaatgatcccttctgagaaaggcagtgtgatgatttgggatggtaattatatctgtataaaatgtccatctctggggctgaaccctatagacagcagaagaaaagtgtctgtgtgtatgccacacctgaattctctctctctgtagttccttttcgtagtacctcttgcccatttcctgcagaatttaggcccatgttaattcttacrtaatttaaattggaagcaagttaacagaagcatctttgggctgcaatagctgtttactgcctgctttgcatccatattcttttgggaatgagtttccagcaaatctcttatctaagcagttgctggatatgcagataccaatctactcctgtgatacgatgggaacaggcttgagtgtgatgtgctttaacttgtgcggtatttaaaagattaaaggcagttccttgccccaaattagatttcttctgcgatgatttgcagttgtaattatttagtgaatatattgtggaaatgtaatgg

SEQ ID NO: 23376 - DNA, 600 bp, Chicken  19866894236548_2
tgctttgcatccatattcttttgggaatgagtttccagcaaatctcttatctaagcagttgctggatatgcagataccaatctactcctgtgatacgatgggaacaggcttgagtgtgatgtgctttaacttgtgcggtatttaaaagattaaaggcagttccttgccccaaattagatttcttctgcgatgatttgcagttgtaattatttagtgaatatattgtggaaatgtaatggaggaagtgacacagattcttgtcaaggtatttctgggatggtgatggtgcaaaatgctcamtcaagcatgaattctgggttttgcttaggaatgracttttccaacagtggactaytctgggttacaaagggcatcattgtccttggggactggaggcagcattaaacaggaagaaagcaaggagggatggctgtggtttgtttttctagagaaacatagagctattccacacttaataaatccattacaatgagtggttacttacaaaaggaaattttacagttgcaaaatgatgtgctcaacacgccacacatgccagaaattcagcattgcagagcccagtcttcataaagctctttg

SEQ ID NO: 23377 - DNA, 600 bp, Chicken  19866894236548_3
ccagcaaatctcttatctaagcagttgctggatatgcagataccaatctactcctgtgatacgatgggaacaggcttgagtgtgatgtgctttaacttgtgcggtatttaaaagattaaaggcagttccttgccccaaattagatttcttctgcgatgatttgcagttgtaattatttagtgaatatattgtggaaatgtaatggaggaagtgacacagattcttgtcaaggtatttctgggatggtgatggtgcaaaatgctcamtcaagcatgaattctgggttttgcttaggaatgracttttccaacagtggactaytctgggttacaaagggcatcattgtccttggggactggaggcagcattaaacaggaagaaagcaaggagggatggctgtggtttgtttttctagagaaacatagagctattccacacttaataaatccattacaatgagtggttacttacaaaaggaaattttacagttgcaaaatgatgtgctcaacacgccacacatgccagaaattcagcattgcagagcccagtcttcataaagctctttggttgttcaagtctgtggtattttcacgctcaaag

SEQ ID NO: 23378 - DNA, 600 bp, Chicken  19866894236548_4
cagttgctggatatgcagataccaatctactcctgtgatacgatgggaacaggcttgagtgtgatgtgctttaacttgtgcggtatttaaaagattaaaggcagttccttgccccaaattagatttcttctgcgatgatttgcagttgtaattatttagtgaatatattgtggaaatgtaatggaggaagtgacacagattcttgtcaaggtatttctgggatggtgatggtgcaaaatgctcamtcaagcatgaattctgggttttgcttaggaatgracttttccaacagtggactaytctgggttacaaagggcatcattgtccttggggactggaggcagcattaaacaggaagaaagcaaggagggatggctgtggtttgtttttctagagaaacatagagctattccacacttaataaatccattacaatgagtggttacttacaaaaggaaattttacagttgcaaaatgatgtgctcaacacgccacacatgccagaaattcagcattgcagagcccagtcttcataaagctctttggttgttcaagtctgtggtattttcacgctcaaagctagtacctagtagacactat

SEQ ID NO: 23379 - DNA, 600 bp, Chicken  19866894236549_1
atttcagagcgagatcaaggggagctttcagctacacctgaagatggctcgaagcagcagagcagagagaaacatttgtacctgcatagactagtttttaaattccagtaacctctatgcccagtaactaggcaataaaacaaaacaaaacaaaacaaaaaagaagtgatagctggtgtaattctgcttcctttggtttattcctactgttctattcttgtagctagcctgttgactttggcctaatctgaggtgagagctgggatggagctgagatgaaagaaagcccagctacagctktgtgctccagaattcaggggtgtttcctcacagccaagtgaggacgatggtggatcactgttgtggcttacatgttgacttgygttccctggtttgagatgtctgaaaccagaccatttcccataaggatgctctgacttagcatcacagtcttgtgacagcacagatcctcaaccagtcttgaagcagctgctgtctcaggaagtggcttcagctctcctcaaaatcttctctcctcagtgaacttgagagtgaggaacaagatcttgagaccccatttttaatttgctgggaaacgta

SEQ ID NO: 23380 - DNA, 600 bp, Chicken  19866894236549_2
gcatagactagtttttaaattccagtaacctctatgcccagtaactaggcaataaaacaaaacaaaacaaaacaaaaaagaagtgatagctggtgtaattctgcttcctttggtttattcctactgttctattcttgtagctagcctgttgactttggcctaatctgaggtgagagctgggatggagctgagatgaaagaaagcccagctacagctktgtgctccagaattcaggggtgtttcctcacagccaagtgaggacgatggtggatcactgttgtggcttacatgttgacttgygttccctggtttgagatgtctgaaaccagaccatttcccataaggatgctctgacttagcatcacagtcttgtgacagcacagatcctcaaccagtcttgaagcagctgctgtctcaggaagtggcttcagctctcctcaaaatcttctctcctcagtgaacttgagagtgaggaacaagatcttgagaccccatttttaatttgctgggaaacgtagtcaagtatacatctccctattagcctcccagctactcggtatgttggagatctttattttttacccagaaatcatagaatca

SEQ ID NO: 23381 - DNA, 600 bp, Chicken  19866894236550_1
taacagatgacaaattaaaaacaaagaaaaaaagttgcaaaatattttcatcctctcaagcagatggactgctaacgcttccaaaatcccaacgccatctttcactctcttaaataaaaagtcttccttcctagcacgtagtactggaaactgaactactgccaaggagcactgaatgcacagagtccagtttcagcacggcgtatttgttattctggccagttcccacggacaaccattcacaggtgcacaaactctccccacccacatcaacccattgtttcaggaggcaccgctgcratatgaaaacaagcaggggtggttcagctgtatggtaagatcctgcgtgagcagccaaaaccctacagacaaatggtatgcttgctccttgacatcagtcaatagtgtactacacccaaggtaacctaacaggaaaggaaaataagtaaaaaataaaggatagttttacaacgaatagtccaagctaccactttgcaagacgttgcaagctgctccaatggaagcaatccagcctggatgcagctctgggcagcctggtcttggtggttggcaaccctgcacgtagcaggggggttgaaa

SEQ ID NO: 23382 - DNA, 600 bp, Chicken  19866894236560_1
cccagtatatgagatgctggacctagtctgatcaataagctgataattagatacctctgaaactgggcagagaccaagcagagtccatgagattgagtttatggcttaagctagcggtgtgcctttatcatttgagtaaagtaattttgaggattctagtgtcagctttctgttttaagaaactttgatccttaaccattctgtgtgcttttttcatttgtttgttttaaattaagagctgtaataaagtgccattctaaccctgatatttcatatatctacctgtacacacacacacarctctatatcagctatgtcagctaattgtggtatgttcaaacgtgtcatcacagggctgaatcctgatgtkctatggctggctatgctcttgaacattttgacaactcagataagtttcattatcatagcaaaaataaaaatttacctttcatttacaatcaaaacattgttcaagtgtatacagaaatataaagtaagaattgtaatttgttcaactggtagaagttagtaagcaggcatgcagaatgaaaatggtagattttgttttatgaagcctcaggagaaacatcatatttttgc

SEQ ID NO: 23383 - DNA, 600 bp, Chicken  19866894236560_2
agaccaagcagagtccatgagattgagtttatggcttaagctagcggtgtgcctttatcatttgagtaaagtaattttgaggattctagtgtcagctttctgttttaagaaactttgatccttaaccattctgtgtgcttttttcatttgtttgttttaaattaagagctgtaataaagtgccattctaaccctgatatttcatatatctacctgtacacacacacacarctctatatcagctatgtcagctaattgtggtatgttcaaacgtgtcatcacagggctgaatcctgatgtkctatggctggctatgctcttgaacattttgacaactcagataagtttcattatcatagcaaaaataaaaatttacctttcatttacaatcaaaacattgttcaagtgtatacagaaatataaagtaagaattgtaatttgttcaactggtagaagttagtaagcaggcatgcagaatgaaaatggtagattttgttttatgaagcctcaggagaaacatcatatttttgcagtattttgttattttttaggctctagcaaaatactcagttgagatagctttactttttttttcagtcac

SEQ ID NO: 23384 - DNA, 600 bp, Chicken  19866894236564_1
gttaggtacatagcttgctattggatgcttgctattgtgaaggcattctgatgatttgtagtacttttgttggattaaacagtaacatgctgtatgttcccaaggtacactgaggaaagggatgatgtcctctggtagtactgtcaagctacctgcatatgagtttgcatggctgctgtttccatttcagtacactgtgtagtcagagatttggaggaaactgaggtacagtgctattctaggattttagctagggctgcctgtgtgctgaccttatagccaggtgaggagctgtctacyggtgtggggtaaacctctcatactgtatgaatgagaaatacattgcccagttctgtagaaaaaattactgttccaatttttcagctgggtaaactttgtgaggggaagttaatgatttcttcaagtcctttggaaaaatcagtatctgaatgctaaaatcccatgactgatagtactgtagtcatcaagattatggatctgaatatttttgcatccaaaagttgtgctggtggctcaccatcagacctagcccagtggggcagagctggcagctcctgctggggtttactgctgcttgtg

SEQ ID NO: 23385 - DNA, 600 bp, Chicken  19866894236565_1
cttctcgggtttgggccttcccctctcggcatgttttctgattaggcagagctgctgagctgataacagcacttgtgggaagctgtaaagaatggggcaaaggtgctgaggacttaaactggaaaataccacgaagcttttctacagtcctcgtgcaggagagaaacaggggatgggaaagggccatctgctgctgcccggctgtactccaagcactgcctttggcacatttttcctctaagaggttgatgctcagctttgagaaaccttttttcttccttcctttttactttttttttycagaatatttttagaatkgttttaaaatattttctttatgttttccccacagagttcttacagagttttgcaatattaataaagaaataacctaaacgtaccycttaaacaacttataacgcacagaccaaacacgaggtggggacctcgarcacagagccgtcctgcggctgcggggggagctgcctggctcccataatgggatgtccaagtgggatgaaggtgtgtgaggaaaggcacgctgcctgaccrtgcacctggggctgctggcaccccagtgggccgtgggagtgacaggta

SEQ ID NO: 23386 - DNA, 600 bp, Chicken  19866894236565_2
tcccctctcggcatgttttctgattaggcagagctgctgagctgataacagcacttgtgggaagctgtaaagaatggggcaaaggtgctgaggacttaaactggaaaataccacgaagcttttctacagtcctcgtgcaggagagaaacaggggatgggaaagggccatctgctgctgcccggctgtactccaagcactgcctttggcacatttttcctctaagaggttgatgctcagctttgagaaaccttttttcttccttcctttttactttttttttycagaatatttttagaatkgttttaaaatattttctttatgttttccccacagagttcttacagagttttgcaatattaataaagaaataacctaaacgtaccycttaaacaacttataacgcacagaccaaacacgaggtggggacctcgarcacagagccgtcctgcggctgcggggggagctgcctggctcccataatgggatgtccaagtgggatgaaggtgtgtgaggaaaggcacgctgcctgaccrtgcacctggggctgctggcaccccagtgggccgtgggagtgacaggtaaggctctctgctcagcag

SEQ ID NO: 23387 - DNA, 600 bp, Chicken  19866894236565_3
tgctgaggacttaaactggaaaataccacgaagcttttctacagtcctcgtgcaggagagaaacaggggatgggaaagggccatctgctgctgcccggctgtactccaagcactgcctttggcacatttttcctctaagaggttgatgctcagctttgagaaaccttttttcttccttcctttttactttttttttycagaatatttttagaatkgttttaaaatattttctttatgttttccccacagagttcttacagagttttgcaatattaataaagaaataacctaaacgtaccycttaaacaacttataacgcacagaccaaacacgaggtggggacctcgarcacagagccgtcctgcggctgcggggggagctgcctggctcccataatgggatgtccaagtgggatgaaggtgtgtgaggaaaggcacgctgcctgaccrtgcacctggggctgctggcaccccagtgggccgtgggagtgacaggtaaggctctctgctcagcaggcagctgagaagcttggcgcatgcagcctaaagctatcacttggtctattattcattatactgatgctccacgggacaacttggt

SEQ ID NO: 23388 - DNA, 600 bp, Chicken  19866894236565_4
gtgcaggagagaaacaggggatgggaaagggccatctgctgctgcccggctgtactccaagcactgcctttggcacatttttcctctaagaggttgatgctcagctttgagaaaccttttttcttccttcctttttactttttttttycagaatatttttagaatkgttttaaaatattttctttatgttttccccacagagttcttacagagttttgcaatattaataaagaaataacctaaacgtaccycttaaacaacttataacgcacagaccaaacacgaggtggggacctcgarcacagagccgtcctgcggctgcggggggagctgcctggctcccataatgggatgtccaagtgggatgaaggtgtgtgaggaaaggcacgctgcctgaccrtgcacctggggctgctggcaccccagtgggccgtgggagtgacaggtaaggctctctgctcagcaggcagctgagaagcttggcgcatgcagcctaaagctatcacttggtctattattcattatactgatgctccacgggacaacttggtgaaatctaagctaaaagtaatgaccttccacaaacagccatctgcttta

SEQ ID NO: 23389 - DNA, 600 bp, Chicken  19866894236565_5
tcagctttgagaaaccttttttcttccttcctttttactttttttttycagaatatttttagaatkgttttaaaatattttctttatgttttccccacagagttcttacagagttttgcaatattaataaagaaataacctaaacgtaccycttaaacaacttataacgcacagaccaaacacgaggtggggacctcgarcacagagccgtcctgcggctgcggggggagctgcctggctcccataatgggatgtccaagtgggatgaaggtgtgtgaggaaaggcacgctgcctgaccrtgcacctggggctgctggcaccccagtgggccgtgggagtgacaggtaaggctctctgctcagcaggcagctgagaagcttggcgcatgcagcctaaagctatcacttggtctattattcattatactgatgctccacgggacaacttggtgaaatctaagctaaaagtaatgaccttccacaaacagccatctgctttagttcagctgaggtgcctgaggcagctgctgtctttgtgggcaagggaacccacttctaggtcagccctgctttgccagcacggatctgcccagccaaata

SEQ ID NO: 23390 - DNA, 600 bp, Chicken  19866894236565_6
tgtcacatcacctttgatattttcttttagagatattcctctggcatacctctaaatcagagcatctgtaaggttagcaaaagagcagcagtaataaaagcaaagcaaagcagaagcagaaataaaaatacattctcatgcaggtatactatgtatgattgctacccaattataagaactggaaaaatcagcaactcctgttgagctgctgaaggactggaacactgctttcaggtggtggggcggcaatgggttccaattaactgttctgtaattactcttgcaggctgtatttgcacrgtatattactcagtacccgggactctgagtcccagataacaggaaaaaaaataaaacaaatccaaccccacaagtcttgctcatcgaggcaataaaccagatagttaatttataggtctagtgttttcctgactgacatatgaacagacggtcttgttttcacagcagttctgggccatatatttattacagtatgttagaaggctgagctactctatctcacaactcactgttagtgacagtgccaaactaattactgttactgttttagagattaatgccttcaaatgtgcagatttt

SEQ ID NO: 23391 - DNA, 600 bp, Chicken  19866894236568_1
agagaattcttgcctgtgctcagcctatttctttccctgacattacccagctttgggacatttgtctctcagatacaggcagactccaggtttatctcgtcttgtagacagccaggaacttctcaggcctttttcactagagtggccctctcactgcctaacatttgctatgataacctaatgagggaataaaaaagaaacaggagggtctcaagcaaagtaaaggtgtgatattatctatgtgtagaaatacctgagggaaagaagtcaaaaagatggaaccagacccttctcagaggyrcacactgacagaacaagaactgatgagcacaaattgaaattaaaaagttccatttaaatctaagaacaatctttttcactrtaagaacagtcaaatgttggaacaggtgcccagagaggttctagatttggggacctctctggaggtccaacatcagctaccttgtacaactctctgatcctgggacaaaaatgagtagaagtagatgcaggtacaggaagggatagatgatatctagaaagagaataaatgagaacatacattgggcccacatgaacctaatgaggttcaacaaggcc

SEQ ID NO: 23392 - DNA, 600 bp, Chicken  19866894236568_2
gagaattcttgcctgtgctcagcctatttctttccctgacattacccagctttgggacatttgtctctcagatacaggcagactccaggtttatctcgtcttgtagacagccaggaacttctcaggcctttttcactagagtggccctctcactgcctaacatttgctatgataacctaatgagggaataaaaaagaaacaggagggtctcaagcaaagtaaaggtgtgatattatctatgtgtagaaatacctgagggaaagaagtcaaaaagatggaaccagacccttctcagaggyrcacactgacagaacaagaactgatgagcacaaattgaaattaaaaagttccatttaaatctaagaacaatctttttcactrtaagaacagtcaaatgttggaacaggtgcccagagaggttctagatttggggacctctctggaggtccaacatcagctaccttgtacaactctctgatcctgggacaaaaatgagtagaagtagatgcaggtacaggaagggatagatgatatctagaaagagaataaatgagaacatacattgggcccacatgaacctaatgaggttcaacaaggcca

SEQ ID NO: 23393 - DNA, 600 bp, Chicken  19866894236568_3
actccaggtttatctcgtcttgtagacagccaggaacttctcaggcctttttcactagagtggccctctcactgcctaacatttgctatgataacctaatgagggaataaaaaagaaacaggagggtctcaagcaaagtaaaggtgtgatattatctatgtgtagaaatacctgagggaaagaagtcaaaaagatggaaccagacccttctcagaggyrcacactgacagaacaagaactgatgagcacaaattgaaattaaaaagttccatttaaatctaagaacaatctttttcactrtaagaacagtcaaatgttggaacaggtgcccagagaggttctagatttggggacctctctggaggtccaacatcagctaccttgtacaactctctgatcctgggacaaaaatgagtagaagtagatgcaggtacaggaagggatagatgatatctagaaagagaataaatgagaacatacattgggcccacatgaacctaatgaggttcaacaaggccaagtgcaaggtgttgctcttggattgaggcaatcccaggtgcatgtagagactgggagaactcattgagagcagccctgggg

SEQ ID NO: 23394 - DNA, 600 bp, Chicken  19866894236570_1
ctgctgctgaactgaggaacagaaaataaaacacaatttaaaaagtctaagaaacaaagagaaatagaaaggaaactcaatggatgatgcaaagaattagcctttttcaccctgcacttcttgaaaaacattcaataaagacagaaggtgatttctcttgaatttttgaggtgatcgttcccttttttttttttttttttttttttttttgtctcctggcactcctggtttgtctggagcactgaagcttgacgcagaaaccacctgtagacagctgctacctttgctgctattcacgcrgttcaaatttcctgttattcattatcttttctcttcccatgctcagccttccatgcagtcctcccccttgatgtttttttaacaacaagccaacctctttcctcttttaatttcctcctttaccaagagtcaacctgcaggattacaggggaaagcttgagaagaaataagagaaaacacaaccacagtgcctatttatagaaagggaataaggagtgaatgattcagctgatgactgctgagttactccttcttgccttcctaagtaggcatgcagcataatgattcatgagcttatgg

SEQ ID NO: 23395 - DNA, 600 bp, Chicken  19866894236584_1
gatgccatacaggttgctgagaaagtaatgcctcctatttatttccatggaaaatacctgcatgattctataaatctgtgattgtataatcccaaagtatttgactttaaaatgcctcagagttcacactgtaactgaaatttcccacactagataaaatgaagtacaattgaaatgctaccacgcaaagccaataaaagtaggtgcttttatcctttttttcctcaaagaaactgagtgcagcactttcttttctaataaaagatggttattgctttggttctccctttttctaaaacmgtatagcggcgacagcatccagcaaagtgaactgctgaatgagctcaaggccaatatcttgcattatcagtagaaacatgaaaccttccatagatcctttatcaggccctaggtatacgaactagttagtgcccatgtcccccaaggcaaaactttatcttgcaagttcaaagcacaaacaacacaattatttcacctaactcaagccaacctaacactgccaaacccaacataaacacaatggattttatgtctccaagcaaatgaatgctaggagaggcactgcaactgcatttcatg

SEQ ID NO: 23396 - DNA, 600 bp, Chicken  19866894236584_2
aacaacacaattatttcacctaactcaagccaacctaacactgccaaacccaacataaacacaatggattttatgtctccaagcaaatgaatgctaggagaggcactgcaactgcatttcatgtaggtatgtttcccctacgacctaaaatgttgtccagattgttgggccaagttgtgtgcagattctacaaggggtaagttcagcccggtttagtggagacagatttgtcccacatactttcgtagtccttctggaagatatagcctgattcaccctgaactggcatttaccacaaaraaatcttctgcttgcggagaaacacacacaatgctggtagccatgatctgcctgtaagcagcctggcttccaggaactgcagattctgcaggacagtgcccagtatttatgcacagaagtgtttcagcagacacttctcacaccattttctgcaatcatgcctgagtcatgacctggtacaaactgcaacaggggtgagaggttacatcaaactccatggctcactgggttcttggctcctctgccaactagcactggcagttatctgtggcagcagacaccagccaactgttcatcccc

SEQ ID NO: 23397 - DNA, 600 bp, Chicken  19866894236585_1
aagtcagacttggacagattgacaggacaggactgagatctggtgtagctctgagttattctcatgatcctcaagagtcagaagttgaaattacatcgcacttaatggcgatagtttctatacactaaaactgacatgaactgttatcagataacttcagaacgctgctgcaagaaaagtgccccgttaattatttataataatagatgggaaacagggtcatcttgacatcaggatgttgttgcctcttctctgcatgttttcataggtacttgccagcactgttgaaataagactctyaatgatagtatgtagccattgagattttaattgacatcctctttaattasatgtttgtttcagaaatcgagctgtgccttttatgtcttggatctcacccytagggctgcacagagatgtgctgctgttgcatcctctcaatgtcttctaccattcagtttgagaggggtttggtattgatactggaagtcagtgctggcagatgtgttctgtgtctttggatcaggaggtgggtaccttccaaccttgggtaatggcaagtggtcagactgaaagcctaaaaacagaatmaagacactt

SEQ ID NO: 23398 - DNA, 600 bp, Chicken  19866894236585_2
ctgagttattctcatgatcctcaagagtcagaagttgaaattacatcgcacttaatggcgatagtttctatacactaaaactgacatgaactgttatcagataacttcagaacgctgctgcaagaaaagtgccccgttaattatttataataatagatgggaaacagggtcatcttgacatcaggatgttgttgcctcttctctgcatgttttcataggtacttgccagcactgttgaaataagactctyaatgatagtatgtagccattgagattttaattgacatcctctttaattasatgtttgtttcagaaatcgagctgtgccttttatgtcttggatctcacccytagggctgcacagagatgtgctgctgttgcatcctctcaatgtcttctaccattcagtttgagaggggtttggtattgatactggaagtcagtgctggcagatgtgttctgtgtctttggatcaggaggtgggtaccttccaaccttgggtaatggcaagtggtcagactgaaagcctaaaaacagaatmaagacacttaaatgttaacagcaaaagtgtgctaaaggagcagccttcatgttcacata

SEQ ID NO: 23399 - DNA, 600 bp, Chicken  19866894236585_3
ttaatggcgatagtttctatacactaaaactgacatgaactgttatcagataacttcagaacgctgctgcaagaaaagtgccccgttaattatttataataatagatgggaaacagggtcatcttgacatcaggatgttgttgcctcttctctgcatgttttcataggtacttgccagcactgttgaaataagactctyaatgatagtatgtagccattgagattttaattgacatcctctttaattasatgtttgtttcagaaatcgagctgtgccttttatgtcttggatctcacccytagggctgcacagagatgtgctgctgttgcatcctctcaatgtcttctaccattcagtttgagaggggtttggtattgatactggaagtcagtgctggcagatgtgttctgtgtctttggatcaggaggtgggtaccttccaaccttgggtaatggcaagtggtcagactgaaagcctaaaaacagaatmaagacacttaaatgttaacagcaaaagtgtgctaaaggagcagccttcatgttcacatatttataatgggcattttgaaacgtagaagcattttcattcttttcctgctt

SEQ ID NO: 23400 - DNA, 554 bp, Chicken  19866894236585_4
aagactctyaatgatagtatgtagccattgagattttaattgacatcctctttaattasatgtttgtttcagaaatcgagctgtgccttttatgtcttggatctcacccytagggctgcacagagatgtgctgctgttgcatcctctcaatgtcttctaccattcagtttgagaggggtttggtattgatactggaagtcagtgctggcagatgtgttctgtgtctttggatcaggaggtgggtaccttccaaccttgggtaatggcaagtggtcagactgaaagcctaaaaacagaatmaagacacttaaatgttaacagcaaaagtgtgctaaaggagcagccttcatgttcacatatttataatgggcattttgaaacgtagaagcattttcattcttttcctgcttagttcactttctgtttaatcaattatgtgtattaaataggcatggtccttaattttagacaccgtggcatgcattgttggatgagttctaaaaagtctgtgtgacatcacttaatggtggttttctttatgcttcttcagttga

SEQ ID NO: 23401 - DNA, 600 bp, Chicken  19866894236587_1
agagctgctaccaagtccagagggagatgcaagctgcttcctgagcttcctttcaagttgtgactgtactttcccccatttatgagaacagttgtttgcgatatactgcggtctccagtaggattttgaaaagtgcagaagtgacagcaggactttggtttccaagtataaactagtaaaacccagagtaagttaatttccctatgaaaaaaatccataaatactcagttactgcagcccagctttcagatgttgctgccagtgtgggagaatccaaacccgtctgtttattgccaaacrcagggccggatccacagaacatgaaggctgtgaggttgatctctacagcttcccattttctaatcttacttcaaacctattgtctcacagctcaacttcttttctgtcatttttcagaggaacagaaaaaatctgagaaatcttccagtcttctgcagggctcacagacctgtaacttgcaaaacccattagaaggcagctttttagtaaccaaatggtgtcacttagaactgcacagcagccagacagwgcactgtaaattacagtcctattgctataagggacagtggggaggtgtgg

SEQ ID NO: 23402 - DNA, 600 bp, Chicken  19866894236587_2
tgttgctgccagtgtgggagaatccaaacccgtctgtttattgccaaacrcagggccggatccacagaacatgaaggctgtgaggttgatctctacagcttcccattttctaatcttacttcaaacctattgtctcacagctcaacttcttttctgtcatttttcagaggaacagaaaaaatctgagaaatcttccagtcttctgcagggctcacagacctgtaacttgcaaaacccattagaaggcagctttttagtaaccaaatggtgtcacttagaactgcacagcagccagacagwgcactgtaaattacagtcctattgctataagggacagtggggaggtgtgggcaggctgtttgtacaggtgaggagataagggagagtgagaatttaatcttaatgttttttacagaatattatttcctataatagcaaaactggtgtatggttgtatgtgacttgttaagactgtagaaggtggttaacatttatgtgtagaaaaaaataaaggctgaattcaaacttattttttcattatacaaacagtaaaaaagcatgtaaaatgtgattaacacttttagttaaaattgttcataa

SEQ ID NO: 23403 - DNA, 600 bp, Chicken  19866894236587_3
aacacttttagttaaaattgttcataacgtatagtagttcaggagcagtgttcttctcaatattaacttgaaaaatcatctacttttaaggcttgagcaatgaatggcatcagggaaactggtggggtagtgctgtcagagaaaagagcaaaggcctgcttggaattgggaagggattcacacacctgaaccccacaagtgtcagatgatggaaagcacaaatagctttaagcacctgcacctgtttctatccctaagtatatttgtaacataaccaaaaatgaaaaaagaaaaggaggrgaggtaaatctttctgaagtcctcgaatagctcctctcccaactttcaggtcctcaaatgaatacatcataatgaaatcacagtaaaaacaaaggtctaatttatttttttttaaggcagcttactgaaagtatccataaaattctttcagaagtgaacatttcccatttgtatttccaccaatttgagcaggggcagtgaagctagctagctgagcaatagctactagaaaaatcaaatccacggaatgaaatgcagttaacacaatatttcacatatgttaatgcttacggttccatc

SEQ ID NO: 23404 - DNA, 599 bp, Chicken  19866894236588_1
  misc_feature (1)..(256): n is any nucleotide
nnnnnnnnnnnnnnnnnnnnnnnnnnnnnnnnnnnnnnnnnnnnnnnnnnnnnnnnnnnnnnnnnnnnnnnnnnnnnnnnnnnnnnnnnnnnnnnnnnnnnnnnnnnnnnnnnnnnnnnnnnnnnnnnnnnnnnnnnnnnnnnnnnnnnnnnnnnnnnnnnnnnnnnnnnnnnnnnnnnnnnnnnnnnnnnnnnnnnnnnnnnnnnnnnnnnnnnnnnnnnnnnnnnnnnnnnnnnnnnnnnnnnnnnnnnnnnnnacacttaagacaaagagccctcctctccttcccccgctacttcyattcttcctccagtaccacctgggactgacctcccagcagagaaactctccttgttctcacatctgctgtatcttctgcaccttataccaaaacccaaatcaagctaacagacctgagacatcaaatcagagccctgagataacagcactggaaaccagccacaaaacctctcttttctctctcaatggcccctgcaaagctcctgcaaggcgacagaggcttctgatggcacctcagcacttctatcccagtcactttcagtggccatcctaagtgatctgagcagacttcaccaaac

SEQ ID NO: 23405 - DNA, 565 bp, Chicken  19866894236589_1
aaaaaactgccagaactcagcaggaagctgagtgtcaagggaacttcaagccataatagctcagataatccttcttccctgccgaaagggagctctcgggatacaagccatacagcgtctttgccctcttctggcaactcagctgcagctgccagcaggaacgtcataagtcgttaccatctcgacagcagcgtgtcgtcacagcacgcctacaaaaagaaaagctcaaggagttccaaatcctccagcaaaggtggttacctcagtgatggtgactctcctgaacttttaaccaaatcmggtaaacacggacatgaaaccaagtgtgggaaaggaaaagagagccttccaagtaacagtggtaaaactgagatagatatcgatgctttcaggcactacaacttttctgatcaacccaagtgttcccagtacatctctggacttatgagcattcacttttatggtgctgaggacttgaaaccaccgagaatagactcaaaagatgtcttttgtgcaatacaggttgactcggtaaacaaagcaagaacagccctgcttacatgta

SEQ ID NO: 23406 - DNA, 600 bp, Chicken  19866894236590_1
ctagttgtgttgtatggagctttatcaacttcacccattaagcagagggggcaaaaagcatcattccgcagtgctgagctctgcagaaattcatcactgctccagttccagctgcagctatctcctgtgtaactcaagcttctcctccaataggaaacatcccctagtagctctcgcacaggccccagtggaagctgcttttttaacatgcagcttcaaagcatgagaagaacgaaaaccacggggactgatggaggagctcaggcatgctggcttgctgcagagaacagcctggcttgygctgggcccctaaagactccgtgtggtgggaaagcactgyggggccaggccactgcttggaaaatgtctgactgaacgtgtcccccttatgtatggtcatgcacggcatgtattggccctaacctgcccttcagctgaacatgctgcacgtactctgtcgctgagaaattagctatccgcatcactttgatcagcaaaaaaaaatcagcccgtaacagaacagtcagtaatggagacagatgctaattagagtacactgcttacagtgctgatatgatgtccctggctggatcatcagag

SEQ ID NO: 23407 - DNA, 600 bp, Chicken  19866894236590_2
agcagagggggcaaaaagcatcattccgcagtgctgagctctgcagaaattcatcactgctccagttccagctgcagctatctcctgtgtaactcaagcttctcctccaataggaaacatcccctagtagctctcgcacaggccccagtggaagctgcttttttaacatgcagcttcaaagcatgagaagaacgaaaaccacggggactgatggaggagctcaggcatgctggcttgctgcagagaacagcctggcttgygctgggcccctaaagactccgtgtggtgggaaagcactgyggggccaggccactgcttggaaaatgtctgactgaacgtgtcccccttatgtatggtcatgcacggcatgtattggccctaacctgcccttcagctgaacatgctgcacgtactctgtcgctgagaaattagctatccgcatcactttgatcagcaaaaaaaaatcagcccgtaacagaacagtcagtaatggagacagatgctaattagagtacactgcttacagtgctgatatgatgtccctggctggatcatcagagggtcccaacatgatgtctgaaatggcccagctagtcctta

SEQ ID NO: 23408 - DNA, 600 bp, Chicken  19866894236590_3
gctggagctgcctctgcagcctctctgcttgccgctgctcctccagctgcttgcgcttatactcctacccagaggaaagcacagtgacatgggtgcacggtgccctgcgagcacgcagatgcaggacagcaaaccgcaggtttatcttttgggtagaaagttgggcccaagcatctgaaaagccgttttcttgcaaagccctttaaatctaaagactctggagtgtgggctgtaaagcatcccagaggaaagacagttcagaggacacagccaacaaatccagagctttaaaccctgcaytggactttgcatttagtggatcactctgcctccattttctacatgggaacagagagtggtagtgccgtgtcaccagaaaagccctgcacaacccgctgatggctccaacacctacacaaagcctgtgcaactctcagccacacagcagcctgaccaggagcctgggcaacctcctccagcagggtcaggtgctgctcatggcccacccaagtcccttggtggctgctgtgctccccagggaaggtgggaggcacctcagggattgcagcctttgacatcctacagctatgagtgccctga

SEQ ID NO: 23409 - DNA, 600 bp, Chicken  19866894236590_4
ttagtggatcactctgcctccattttctacatgggaacagagagtggtagtgccgtgtcaccagaaaagccctgcacaacccgctgatggctccaacacctacacaaagcctgtgcaactctcagccacacagcagcctgaccaggagcctgggcaacctcctccagcagggtcaggtgctgctcatggcccacccaagtcccttggtggctgctgtgctccccagggaaggtgggaggcacctcagggattgcagcctttgacatcctacagctatgagtgccctgaggcacacggaawgttggtctgcagaggcacattggtgccaagcagctgggggaggcttccaatctgcgttggaaacatgaggtcagcatggacatccctctgccagtctcaaacacaagccaattagataaaataacttgctcacagggcttataaattaccattgattttgcccagatttttctggaccaggagaacaaaggatcaatgcaacgaggtgccaaacaccattagttcataaaaaccccagccaaagctgagtctgtggagcactctgtaggactaatttattgttggtgtcaatggcagcac

SEQ ID NO: 23410 - DNA, 600 bp, Chicken  19866894236598_1
ttacctattaaactgtctttacttgaatccatgacttctcacctttctgattctcttccacatcccattgaggggaagtgagtgagtagctgcgcagcacttagctgcctgtcagggttaaaccacagtcttcctgtggttaagctgaaaggtacagatagtccagtagctgcaaaatggctaaatcctacatagtaagagaaatggaaacatatgatatcttagaacaggctcaccctcttctgaagatgctgcacttgcagcaagttgggaataaggtaaaaactttctcttagcctkcatttgctcctttgaaagacctgagacagaagtggtaaatgtaycccttagtattctcagctaagtaagataaaatcggaagaagcaatcgatgaaaataagtaaggaataaaacagcaataaaatttcagaaggtaaaagacatcttgaaaatatagcatatctttcatttttagctatgtatgcagttcatttgtattcttgatatactttttgtcttggtttgattctatgccttttgctagtatgacacagacaggtgcgtcaagcttgtgtttatcataagatctctgttccaca

SEQ ID NO: 23411 - DNA, 600 bp, Chicken  19866894236598_2
ttctgattctcttccacatcccattgaggggaagtgagtgagtagctgcgcagcacttagctgcctgtcagggttaaaccacagtcttcctgtggttaagctgaaaggtacagatagtccagtagctgcaaaatggctaaatcctacatagtaagagaaatggaaacatatgatatcttagaacaggctcaccctcttctgaagatgctgcacttgcagcaagttgggaataaggtaaaaactttctcttagcctkcatttgctcctttgaaagacctgagacagaagtggtaaatgtaycccttagtattctcagctaagtaagataaaatcggaagaagcaatcgatgaaaataagtaaggaataaaacagcaataaaatttcagaaggtaaaagacatcttgaaaatatagcatatctttcatttttagctatgtatgcagttcatttgtattcttgatatactttttgtcttggtttgattctatgccttttgctagtatgacacagacaggtgcgtcaagcttgtgtttatcataagatctctgttccacagacgttttaagctcagtgcccatgagctggcagtggaagaagtg

SEQ ID NO: 23412 - DNA, 599 bp, Chicken  19866894236601_1
  misc_feature (1)..(8): n is any nucleotide
nnnnnnnntgagcacagagagtacccttgtatgatctcccctgcagtttggtttccattcagcaatgctaagctgttgtctccttgtcaaagcggagctctggggtactttcagctaaggatgatgctaaggaagctctgaaataattgcctccagctcagctcagtgaggtttattagctgagctggaacacatgaggttacacacctgtttgattttttccattccaaatttccacgtgtgatgtatgacagtaatgtcagaatagtacgtcactgactttaaaacatcctgcgtgtrtttttgaaggaataactgcacagcctggcagatgaattggcttccgactkggaagtccagtgcttctggcacagcccgtgtgcaacatagatgtacccaaggttgtagagcttcttctctttccaatcagacatagccagaaggtctaatcctatgatttrtgtaacgtgattggatgcaattttacaacaaaagcttgaaaatcagattggaaggtctrtttctgtacgcttcaaacaagattttttttcttccagctcaaygaaaggcttgtgagccagcttggttacctttagtct

SEQ ID NO: 23413 - DNA, 600 bp, Chicken  19866894236601_2
gtttccattcagcaatgctaagctgttgtctccttgtcaaagcggagctctggggtactttcagctaaggatgatgctaaggaagctctgaaataattgcctccagctcagctcagtgaggtttattagctgagctggaacacatgaggttacacacctgtttgattttttccattccaaatttccacgtgtgatgtatgacagtaatgtcagaatagtacgtcactgactttaaaacatcctgcgtgtrtttttgaaggaataactgcacagcctggcagatgaattggcttccgactkggaagtccagtgcttctggcacagcccgtgtgcaacatagatgtacccaaggttgtagagcttcttctctttccaatcagacatagccagaaggtctaatcctatgatttrtgtaacgtgattggatgcaattttacaacaaaagcttgaaaatcagattggaaggtctrtttctgtacgcttcaaacaagattttttttcttccagctcaaygaaaggcttgtgagccagcttggttacctttagtctgggtttgagactggaaccagggttttgcatgatcatgggctttttaaccag

SEQ ID NO: 23414 - DNA, 600 bp, Chicken  19866894236601_3
ctcagtgaggtttattagctgagctggaacacatgaggttacacacctgtttgattttttccattccaaatttccacgtgtgatgtatgacagtaatgtcagaatagtacgtcactgactttaaaacatcctgcgtgtrtttttgaaggaataactgcacagcctggcagatgaattggcttccgactkggaagtccagtgcttctggcacagcccgtgtgcaacatagatgtacccaaggttgtagagcttcttctctttccaatcagacatagccagaaggtctaatcctatgatttrtgtaacgtgattggatgcaattttacaacaaaagcttgaaaatcagattggaaggtctrtttctgtacgcttcaaacaagattttttttcttccagctcaaygaaaggcttgtgagccagcttggttacctttagtctgggtttgagactggaaccagggttttgcatgatcatgggctttttaaccagtatttcctgttctaactcattctctggttttgagaactactatggtgggtttttttttttttttggccttcttgtatctgtttccttaaattatttcagattattctcttg

SEQ ID NO: 23415 - DNA, 594 bp, Chicken  19866894236601_4
tccattccaaatttccacgtgtgatgtatgacagtaatgtcagaatagtacgtcactgactttaaaacatcctgcgtgtrtttttgaaggaataactgcacagcctggcagatgaattggcttccgactkggaagtccagtgcttctggcacagcccgtgtgcaacatagatgtacccaaggttgtagagcttcttctctttccaatcagacatagccagaaggtctaatcctatgatttrtgtaacgtgattggatgcaattttacaacaaaagcttgaaaatcagattggaaggtctrtttctgtacgcttcaaacaagattttttttcttccagctcaaygaaaggcttgtgagccagcttggttacctttagtctgggtttgagactggaaccagggttttgcatgatcatgggctttttaaccagtatttcctgttctaactcattctctggttttgagaactactatggtgggtttttttttttttttggccttcttgtatctgtttccttaaattatttcagattattctcttgcagtggaaagaggtgtcctgaattttatgtattaatttataggatatctccca

SEQ ID NO: 23416 - DNA, 551 bp, Chicken  19866894236601_5
aatagtacgtcactgactttaaaacatcctgcgtgtrtttttgaaggaataactgcacagcctggcagatgaattggcttccgactkggaagtccagtgcttctggcacagcccgtgtgcaacatagatgtacccaaggttgtagagcttcttctctttccaatcagacatagccagaaggtctaatcctatgatttrtgtaacgtgattggatgcaattttacaacaaaagcttgaaaatcagattggaaggtctrtttctgtacgcttcaaacaagattttttttcttccagctcaaygaaaggcttgtgagccagcttggttacctttagtctgggtttgagactggaaccagggttttgcatgatcatgggctttttaaccagtatttcctgttctaactcattctctggttttgagaactactatggtgggtttttttttttttttggccttcttgtatctgtttccttaaattatttcagattattctcttgcagtggaaagaggtgtcctgaattttatgtattaatttataggatatctccca

SEQ ID NO: 23417 - DNA, 600 bp, Chicken  19866894236603_1
aggaggactggcagaggaagatgagaatctccgctttaattgcgtgatgcatgagctgatgcttcatttacacagacaacatgagattttaacttctgacagaaaacagagccaggtaacaccagaactgctggtaagaccattggattcgtgctcatgcaaaaatgagggacacgagatgaatgactggccttccaccacctacagaaaacccaaagagggacaaacacgacgtggtcaagaaagatgtaggaaggtgcagaaaaaaaacctggtagcaaccagtcccaaaaccattgsaaaacaggtctaagaacatggttacctgtggcagaagcaagatgaccaaggaaacttctgcttcttggctctcatactggggtgtaaacttcttttattttttttcttggctttggacattactgtacattgcagactgacaggtgtagattcaagaaaagcataagcaaaacccttcctgctctgagataaagcacattttttttgatttgaacatcactacagtcaagctgtgaatcaccacctcaaatgattcatcagaaatatcatctgcaaatggctattacaagatcatctgtc

SEQ ID NO: 23418 - DNA, 599 bp, Chicken  19866894236607_1
  misc_feature (1)..(141): n is any nucleotide
nnnnnnnnnnnnnnnnnnnnnnnnnnnnnnnnnnnnnnnnnnnnnnnnnnnnnnnnnnnnnnnnnnnnnnnnnnnnnnnnnnnnnnnnnnnnnnnnnnnnnnnnnnnnnnnnnnnnnnnnnnnnnnnnnnnnnnnnnnnnnttataaaattaatgaaatagtcaaggtagaaataaataatgactcgaagtaaggttcttgggatgtcaaatcataaagaagagtcctcctaatcagtgctttccttagaagacttgcagcagtcattttgcaggactggatggggctaagctcagcatkttgctaaacagaggtggctaaacattgctactgcctcatactgcrctcaagttgctactgtgacaacagaaaagcctctcattgctcccagcccacaccaccacactcaaactgaactgagccaaatttgagcggagtgcatgctgttcttcacaaacatttagtcacagttccctcgaaggcctgcttctcaagttgtaaaattaacacgtaaagacttttcatatagtaatgggcaatatgcctcccttatctaagtgtgcaggtaaatacccagcttcacaagcactgactgggaa

SEQ ID NO: 23419 - DNA, 599 bp, Chicken  19866894236607_2
  misc_feature (1)..(96): n is any nucleotide
nnnnnnnnnnnnnnnnnnnnnnnnnnnnnnnnnnnnnnnnnnnnnnnnnnnnnnnnnnnnnnnnnnnnnnnnnnnnnnnnnnnnnnnnnnnnnnnnttataaaattaatgaaatagtcaaggtagaaataaataatgactcgaagtaaggttcttgggatgtcaaatcataaagaagagtcctcctaatcagtgctttccttagaagacttgcagcagtcattttgcaggactggatggggctaagctcagcatkttgctaaacagaggtggctaaacattgctactgcctcatactgcrctcaagttgctactgtgacaacagaaaagcctctcattgctcccagcccacaccaccacactcaaactgaactgagccaaatttgagcggagtgcatgctgttcttcacaaacatttagtcacagttccctcgaaggcctgcttctcaagttgtaaaattaacacgtaaagacttttcatatagtaatgggcaatatgcctcccttatctaagtgtgcaggtaaatacccagcttcacaagcactgactgggaaatgttaaccacccacatcttcagatgctagtgaacaattcacttg

SEQ ID NO: 23420 - DNA, 600 bp, Chicken  19866894236607_3
agttgtaaaattaacacgtaaagacttttcatatagtaatgggcaatatgcctcccttatctaagtgtgcaggtaaatacccagcttcacaagcactgactgggaaatgttaaccacccacatcttcagatgctagtgaacaattcacttggatcttcattgcagcatactatagatgatcctgtatttattaatgcataattaaatgtaaataaagaggagatcaaagtacagctcagaactgagtgccacaagctgttttttcatactgcattagcatctgcagacctcaaccaaggragaggctgggctgtatcatgctgtgccaatgtgcatacctgctgatacagcaacccaggtgtgcccaggacagtcccaccatttagatgggcagggtagatgcagaattgaactacttaccttaaaggccatgctgcaggttagcagcagagccaagatcctgagccctgagcagtatgatgtctggaatcagcaagtccttagtggaaacagctgaagggctggtgataacatctctgtatcacctattgcaaggctgtgtcccagagcaatggggttaatttctgggaatgtcaaatg

SEQ ID NO: 23421 - DNA, 599 bp, Chicken  19866894236609_1
  misc_feature (1)..(189): n is any nucleotide
nnnnnnnnnnnnnnnnnnnnnnnnnnnnnnnnnnnnnnnnnnnnnnnnnnnnnnnnnnnnnnnnnnnnnnnnnnnnnnnnnnnnnnnnnnnnnnnnnnnnnnnnnnnnnnnnnnnnnnnnnnnnnnnnnnnnnnnnnnnnnnnnnnnnnnnnnnnnnnnnnnnnnnnnnnnnnnnnnnnnnnnnnnnnnattgcctacagcactgtgagctcccgtgacagtctgcttttacaccccagcttcatcttcagtccctgagagctgctggtgcatcactggtgagagccactgagtcacttrtgctggagtggggccagtgctgtgagttaggatttatcgtgtctgagcacatcatgctttactctcttctgttggagtctgtcattcagaaatggctcctggttgtaaaagaagtaattccctttaccagttttcttggaaactgccattattcccagaactgctgaggggctgtactgaaaggaatgtaggatcagcagagcacargctgaggtctccttgcgttgcartgagtggaaggagcatagggtgagtaggaaagtcccttttggcaccctggcctgcagcagaaccttcca

SEQ ID NO: 23422 - DNA, 600 bp, Chicken  19866894236609_2
agctcccgtgacagtctgcttttacaccccagcttcatcttcagtccctgagagctgctggtgcatcactggtgagagccactgagtcacttrtgctggagtggggccagtgctgtgagttaggatttatcgtgtctgagcacatcatgctttactctcttctgttggagtctgtcattcagaaatggctcctggttgtaaaagaagtaattccctttaccagttttcttggaaactgccattattcccagaactgctgaggggctgtactgaaaggaatgtaggatcagcagagcacargctgaggtctccttgcgttgcartgagtggaaggagcatagggtgagtaggaaagtcccttttggcaccctggcctgcagcagaaccttccaygcatgacgtgctgggtgctaagccctgtgtgctggaggagttttttgtaaatcctagagttatctcagaactgagctctataactttgcagccgatttcagctgtgaagtatgagcaggaacagggcagtgtgtgtgatacccttctgctctgstggctgagtcatggctcagcgtgtttgctttaagtcatcatgagtgagctggt

SEQ ID NO: 23423 - DNA, 600 bp, Chicken  19866894236609_3
acaccccagcttcatcttcagtccctgagagctgctggtgcatcactggtgagagccactgagtcacttrtgctggagtggggccagtgctgtgagttaggatttatcgtgtctgagcacatcatgctttactctcttctgttggagtctgtcattcagaaatggctcctggttgtaaaagaagtaattccctttaccagttttcttggaaactgccattattcccagaactgctgaggggctgtactgaaaggaatgtaggatcagcagagcacargctgaggtctccttgcgttgcartgagtggaaggagcatagggtgagtaggaaagtcccttttggcaccctggcctgcagcagaaccttccaygcatgacgtgctgggtgctaagccctgtgtgctggaggagttttttgtaaatcctagagttatctcagaactgagctctataactttgcagccgatttcagctgtgaagtatgagcaggaacagggcagtgtgtgtgatacccttctgctctgstggctgagtcatggctcagcgtgtttgctttaagtcatcatgagtgagctggtggaagggctctgattgctgcctt

SEQ ID NO: 23424 - DNA, 600 bp, Chicken  19866894236609_4
tgctggagtggggccagtgctgtgagttaggatttatcgtgtctgagcacatcatgctttactctcttctgttggagtctgtcattcagaaatggctcctggttgtaaaagaagtaattccctttaccagttttcttggaaactgccattattcccagaactgctgaggggctgtactgaaaggaatgtaggatcagcagagcacargctgaggtctccttgcgttgcartgagtggaaggagcatagggtgagtaggaaagtcccttttggcaccctggcctgcagcagaaccttccaygcatgacgtgctgggtgctaagccctgtgtgctggaggagttttttgtaaatcctagagttatctcagaactgagctctataactttgcagccgatttcagctgtgaagtatgagcaggaacagggcagtgtgtgtgatacccttctgctctgstggctgagtcatggctcagcgtgtttgctttaagtcatcatgagtgagctggtggaagggctctgattgctgccttggccgtgggcaggagtgctggggaagaaatcttcaccatcacactaaggagcccagagagcagcagggtg

SEQ ID NO: 23425 - DNA, 600 bp, Chicken  19866894236609_5
ccagaactgctgaggggctgtactgaaaggaatgtaggatcagcagagcacargctgaggtctccttgcgttgcartgagtggaaggagcatagggtgagtaggaaagtcccttttggcaccctggcctgcagcagaaccttccaygcatgacgtgctgggtgctaagccctgtgtgctggaggagttttttgtaaatcctagagttatctcagaactgagctctataactttgcagccgatttcagctgtgaagtatgagcaggaacagggcagtgtgtgtgatacccttctgctctgstggctgagtcatggctcagcgtgtttgctttaagtcatcatgagtgagctggtggaagggctctgattgctgccttggccgtgggcaggagtgctggggaagaaatcttcaccatcacactaaggagcccagagagcagcagggtgagatggggtttgaaatgggccattctagatcctttctggatgctgctggggtggaattgatcctgcttcctctgactttgcatgcttaacagtgagggacgtcagcaggagggctgctcgcttacctgcacaactggaaagataactcctctct

SEQ ID NO: 23426 - DNA, 599 bp, Chicken  19866894236611_1
  misc_feature (1)..(66): n is any nucleotide
nnnnnnnnnnnnnnnnnnnnnnnnnnnnnnnnnnnnnnnnnnnnnnnnnnnnnnnnnnnnnnnnnncaggttctttttgccaaaagaatccaatgagaaaagttaccaaaacacaggaagaaaacagctttatttccagtaggaaaaagtgagatacattaaaaacaaaaagcaaaatctggacgcagtgagtaaatgcaagtcctggtcacctggctccccagaagctgcaatgttttgtaacagagttcattacacattatgggcacttcaggatataatctgcgcattcctaatgaktgaaagtccatttcagtgttggcatgttttcacttcaatggttctttctaaatctgtattgcttttgcttcttcattctttcattyctgtcaattccctctttgatatttgtatgtattggtactttggccagacattaaataatccactgctgtattttttgttgttttgttttggttgttatgctctatttttctgtgtgagtttttaactgctaaggtgacattttcaatatggtaaatagtaagtaattcactacattcttccctttcttggattttctttccaaatttttactc

SEQ ID NO: 23427 - DNA, 600 bp, Chicken  19866894236611_2
aatccaatgagaaaagttaccaaaacacaggaagaaaacagctttatttccagtaggaaaaagtgagatacattaaaaacaaaaagcaaaatctggacgcagtgagtaaatgcaagtcctggtcacctggctccccagaagctgcaatgttttgtaacagagttcattacacattatgggcacttcaggatataatctgcgcattcctaatgaktgaaagtccatttcagtgttggcatgttttcacttcaatggttctttctaaatctgtattgcttttgcttcttcattctttcattyctgtcaattccctctttgatatttgtatgtattggtactttggccagacattaaataatccactgctgtattttttgttgttttgttttggttgttatgctctatttttctgtgtgagtttttaactgctaaggtgacattttcaatatggtaaatagtaagtaattcactacattcttccctttcttggattttctttccaaatttttactcagtcaaatgtgggtttcaagacattgccttaaatttctgaaatccctctaaayatatggacaagaaaacttctgtgtgaattcattt

SEQ ID NO: 23428 - DNA, 600 bp, Chicken  19866894236611_3
tctgtattgcttttgcttcttcattctttcattyctgtcaattccctctttgatatttgtatgtattggtactttggccagacattaaataatccactgctgtattttttgttgttttgttttggttgttatgctctatttttctgtgtgagtttttaactgctaaggtgacattttcaatatggtaaatagtaagtaattcactacattcttccctttcttggattttctttccaaatttttactcagtcaaatgtgggtttcaagacattgccttaaatttctgaaatccctctaaayatatggacaagaaaacttctgtgtgaattcatttaatttttgaatggatttartaaaagtattaaacttgaggtgaggtttctatgtgtgcccagtttcttggacaggtttgtgtatctcagcataaagctcttactactctattgtaccagcaaatgtattctttatgtccagaagttaatttgatcaattactgtaccagagaaattaggtcagatatatcaccccaaagtaagattactcttcaaatgtgctctgttcccaaaaataaaatactgttttaggtgaagaaggagcacc

SEQ ID NO: 23429 - DNA, 600 bp, Chicken  19866894236611_4
tatttgtatgtattggtactttggccagacattaaataatccactgctgtattttttgttgttttgttttggttgttatgctctatttttctgtgtgagtttttaactgctaaggtgacattttcaatatggtaaatagtaagtaattcactacattcttccctttcttggattttctttccaaatttttactcagtcaaatgtgggtttcaagacattgccttaaatttctgaaatccctctaaayatatggacaagaaaacttctgtgtgaattcatttaatttttgaatggatttartaaaagtattaaacttgaggtgaggtttctatgtgtgcccagtttcttggacaggtttgtgtatctcagcataaagctcttactactctattgtaccagcaaatgtattctttatgtccagaagttaatttgatcaattactgtaccagagaaattaggtcagatatatcaccccaaagtaagattactcttcaaatgtgctctgttcccaaaaataaaatactgttttaggtgaagaaggagcacctggtagaatccattgagtaaaaacggtagaaaaaatgatatcatggcataaga

SEQ ID NO: 23430 - DNA, 600 bp, Chicken  19866894236616_1
ttgcaatttgtccttttgtttttctgtttcttccaatgtgttggcaatttcagtattgacagtctctctgctgctcaattctttctgcaaaccaaaagtaatttagaagttacttgagagaactacaacctactcaagtaccactttgctattctatgttggaactattctgcattcgttactgccaacaagatttaaaagcccttcacacctgacaaaaaggtaatctatttttagacagacccaagcactgtgcttcaggaaaggatcacacatttgtaatgcttctcagaagcattwctactgagtacaaaagactatttacagctctatgtacattagaacctgaacgtaatgtgattccaagaactgaaaacataacacacttaaccagtaactttttctcaaattaggctctgtatttaaccaatatcactgactaattaaacccttacctttagtttgttcagaacagattcttgcttttttaaagaactctcatactcttctctgcttccattaagattttcattttccttttccagctggctctgtaaaataaagactgcctaagtactaagtacaagtgtttcaatgctt

SEQ ID NO: 23431 - DNA, 600 bp, Chicken  19866894236622_1
tcagtctcacttccaaagtttctggctttagaggtttaagtcagacctttaatgttacttgtactttaatgcaagtaaccacacacacacacgcacataaaaataatggtaaggttaacagatgaacccagaccaactacaaagctggaattcactcatacagatttgctaccattcatggatgatttaagctgtgactgtgtggtttcgtgacatcagccagagtgagtttgtgctctgactccaatgtggggccctgtccctctgcctcaaacaaggctgcagtaacgttcctacacrgcctacattcccttgcccgcagaaatgcagctctcagcccacatgccgacacagcagctcagttatcagtgcgatcattgcctgttcgtgttcatatttcaggtttgactgggcctccccaagctaaatcaggggggaaagcaaggtttacctcctcctcttctctttcattatcagacattaacacctgcagtacacgtattctagccctctgccttcaaatcctagctcgctagagcagggccaactctaccagcccatgctaacaagctcccaaaaccctctctctgtctgcaagct

SEQ ID NO: 23432 - DNA, 600 bp, Chicken  19866894236623_1
aaggaattagagaagttgttgcttttatatactcacatctgacaaatgaaagaaatgtgtcatgtttatgtctgttatgttaatagaaaaagggttataatgagattcttctgatcattgcaatctgtcctgctttcacataaaagaaattatgccaaacatgtaatgaatatatttgagtgggtgcttagtcactttgaaccaaattatctgtcctgttttgcaaatacaagttatgatgaagagaaattttcttttctaatattttctccagcacagaaaaaaagaaggctcccactraagtttagagcagttcttcttagacaaagaacaaggaattaaactgtataagaaccaattcaggttcatgatatctgttttaagaaccatgatcaaaaccttattcatttctatacagattatcagtcaggtttttttaattttaaatcttaaactccaagagattccctagagactagaaattaacatacatcatagaatatagaacatgtgtaaaatgtttatttttattaattttaattaaaaataattttctatattttaaatatgttgctttcctattatagcaggcaacaaaca

SEQ ID NO: 23433 - DNA, 600 bp, Chicken  19866894236624_1
tcatcaaaagaaagactgcgagcaagagcaaacctcatggctgaaaaactgttcatgtctcttgatatattacaagccacatgccagggtgattaaatttacaattacttttcaaaagcccagaagatacgtaaatgcatttttaaacaggttctgtataatgcaagtggattcctggccaaaaatagagatactctgccagctgatattgtgctgcttctgcgatcatctgagaacaatctgatacgacagttggtaacacatcctcttacaaaaacaggtattgctattgtggtaatyttcctactctccttctctagccttcatgctgaccacagctggatttcatatgrycatttattgatgacattatacactttgtggcttaactttccaaccctagaatctatacagaatggagcccctgccatctcaagcttcaggggagggactggtctggtcaagtgcgaaggaagtggtagaggcttctttcagggtcccctcttcaggttaggggctcgggacagggagtggagtacatctcttgagttgaggactgaacaaaatggatcaggtaagtcactggccttttttgggcag

SEQ ID NO: 23434 - DNA, 600 bp, Chicken  19866894236624_2
catgtctcttgatatattacaagccacatgccagggtgattaaatttacaattacttttcaaaagcccagaagatacgtaaatgcatttttaaacaggttctgtataatgcaagtggattcctggccaaaaatagagatactctgccagctgatattgtgctgcttctgcgatcatctgagaacaatctgatacgacagttggtaacacatcctcttacaaaaacaggtattgctattgtggtaatyttcctactctccttctctagccttcatgctgaccacagctggatttcatatgrycatttattgatgacattatacactttgtggcttaactttccaaccctagaatctatacagaatggagcccctgccatctcaagcttcaggggagggactggtctggtcaagtgcgaaggaagtggtagaggcttctttcagggtcccctcttcaggttaggggctcgggacagggagtggagtacatctcttgagttgaggactgaacaaaatggatcaggtaagtcactggccttttttgggcagggcatatgtaagttgtctgttttgtctcagtgcaactttttctctaaagtagt

SEQ ID NO: 23435 - DNA, 600 bp, Chicken  19866894236624_3
atgtctcttgatatattacaagccacatgccagggtgattaaatttacaattacttttcaaaagcccagaagatacgtaaatgcatttttaaacaggttctgtataatgcaagtggattcctggccaaaaatagagatactctgccagctgatattgtgctgcttctgcgatcatctgagaacaatctgatacgacagttggtaacacatcctcttacaaaaacaggtattgctattgtggtaatyttcctactctccttctctagccttcatgctgaccacagctggatttcatatgrycatttattgatgacattatacactttgtggcttaactttccaaccctagaatctatacagaatggagcccctgccatctcaagcttcaggggagggactggtctggtcaagtgcgaaggaagtggtagaggcttctttcagggtcccctcttcaggttaggggctcgggacagggagtggagtacatctcttgagttgaggactgaacaaaatggatcaggtaagtcactggccttttttgggcagggcatatgtaagttgtctgttttgtctcagtgcaactttttctctaaagtagta

SEQ ID NO: 23436 - DNA, 600 bp, Chicken  19866894236624_4
gacattatacactttgtggcttaactttccaaccctagaatctatacagaatggagcccctgccatctcaagcttcaggggagggactggtctggtcaagtgcgaaggaagtggtagaggcttctttcagggtcccctcttcaggttaggggctcgggacagggagtggagtacatctcttgagttgaggactgaacaaaatggatcaggtaagtcactggccttttttgggcagggcatatgtaagttgtctgttttgtctcagtgcaactttttctctaaagtagtagagaacccagrtgggttcctaacctctgctgcaaagaaagaggagacgctgtttccccagtcttagtccattatagtagttaactgtcgaggtcctaagagcgaactcttcatcggagagtttacaagaggttgaaggaatgtaactggctctacagaaattacttctaagtaaagttgcaccttagttgaagcatgtcctttgtacagtgtcttacttgtctttttttgtgacaggtaagtcttcttatccttacaatcagaaaatctaggtggcaagcctcatttgtgtcttgtctttaggttttacca

SEQ ID NO: 23437 - DNA, 600 bp, Chicken  19866894236624_5
gaggtcctaagagcgaactcttcatcggagagtttacaagaggttgaaggaatgtaactggctctacagaaattacttctaagtaaagttgcaccttagttgaagcatgtcctttgtacagtgtcttacttgtctttttttgtgacaggtaagtcttcttatccttacaatcagaaaatctaggtggcaagcctcatttgtgtcttgtctttaggttttaccatgaagttagtgggtagctgctgttatgtgtactatagacaggcaggggttacttgttattgtgttgtatttttctcwgtgwsagggcactgatgctgtacaataagtattttacaaaagtactttcttgtaccactacataggagaacaggaaagctaaattgaaaaagcctaatggaaatttctccaaaatgttatcataacttacagaagctaaggttttggcaaagttcctgttactcacgaaggaagctttgctggtggaatgcaaaatttagtcttgtaagtctattttaggtcagtattgctgggaaagcacagagcacattgtcctctgaacattttagctataatttctgtagagccaaggtcagggcc

SEQ ID NO: 23438 - DNA, 600 bp, Chicken  19866894236624_6
tcctaagagcgaactcttcatcggagagtttacaagaggttgaaggaatgtaactggctctacagaaattacttctaagtaaagttgcaccttagttgaagcatgtcctttgtacagtgtcttacttgtctttttttgtgacaggtaagtcttcttatccttacaatcagaaaatctaggtggcaagcctcatttgtgtcttgtctttaggttttaccatgaagttagtgggtagctgctgttatgtgtactatagacaggcaggggttacttgttattgtgttgtatttttctcwgtgwsagggcactgatgctgtacaataagtattttacaaaagtactttcttgtaccactacataggagaacaggaaagctaaattgaaaaagcctaatggaaatttctccaaaatgttatcataacttacagaagctaaggttttggcaaagttcctgttactcacgaaggaagctttgctggtggaatgcaaaatttagtcttgtaagtctattttaggtcagtattgctgggaaagcacagagcacattgtcctctgaacattttagctataatttctgtagagccaaggtcagggcccaaa

SEQ ID NO: 23439 - DNA, 600 bp, Chicken  19866894236624_7
cctaagagcgaactcttcatcggagagtttacaagaggttgaaggaatgtaactggctctacagaaattacttctaagtaaagttgcaccttagttgaagcatgtcctttgtacagtgtcttacttgtctttttttgtgacaggtaagtcttcttatccttacaatcagaaaatctaggtggcaagcctcatttgtgtcttgtctttaggttttaccatgaagttagtgggtagctgctgttatgtgtactatagacaggcaggggttacttgttattgtgttgtatttttctcwgtgwsagggcactgatgctgtacaataagtattttacaaaagtactttcttgtaccactacataggagaacaggaaagctaaattgaaaaagcctaatggaaatttctccaaaatgttatcataacttacagaagctaaggttttggcaaagttcctgttactcacgaaggaagctttgctggtggaatgcaaaatttagtcttgtaagtctattttaggtcagtattgctgggaaagcacagagcacattgtcctctgaacattttagctataatttctgtagagccaaggtcagggcccaaat

SEQ ID NO: 23440 - DNA, 600 bp, Chicken  19866894236626_1
aattattgaaggcaaagtattaaaatctgttgtgcgcaaggatgttttccctgcccttgaaatggaatgtctttgtgatctgacatagttaacatctgttttagttaagagtgttacagaccctgtatttattttccacacagttagctctaaccagatgctagaattattgaatgggattattgaatatagaatagaatcactgaatgaatagaattattgaatgggaagaagcaaaactgctgggatattttaatctatttgcagtgcagagttcagacaactggaggagaagcttaytgaagtgttactctttagccctgcagtgagactgaagttcatggttctcccgccgtgcagatcactaaattccaaacaggatttaataagtaagctagagcagtgttactgatggattattcttggggatttaagcatgaataaagacatcaattcagatggatcaggacatctttctgggtgcagtagatttcaagggttttacctaaatagcaaagttttcttcttgccacgatggtttgcggctggcctttctctaagaacttggtttggatacttctgcatttctgttctcacttt

SEQ ID NO: 23441 - DNA, 600 bp, Chicken  19866894236626_2
caattcagatggatcaggacatctttctgggtgcagtagatttcaagggttttacctaaatagcaaagttttcttcttgccacgatggtttgcggctggcctttctctaagaacttggtttggatacttctgcatttctgttctcacttttgtttcccttgtcactcactgtctgcacttcaacagtaggtaccacatgattatatcaaaatcacagtcaccttgcctctgtgtgacaaattctcttcatctattgtccttttttgcaccagttgtcaggcttttgcacattcaaagccrtgtgaggccctgccctctgaaaaggcccctgcatggtctccacagcctattgttttttgtcctttaatatccttaatacattaagctgccagttacaaagggaagattaggctttaagttggccctgctattgttgcctgtattacaatatggcacacagctccccaggccctcaggttaacttcatggctccatagggatggccactgcacccaaagattctgcttagcagtagcaaaggcagaagaggcttttgccccactctgcagatgggaacctcagacattaagaccaagctcc

SEQ ID NO: 23442 - DNA, 599 bp, Chicken  19866894236628_1
  misc_feature (1)..(100): n is any nucleotide
nnnnnnnnnnnnnnnnnnnnnnnnnnnnnnnnnnnnnnnnnnnnnnnnnnnnnnnnnnnnnnnnnnnnnnnnnnnnnnnnnnnnnnnnnnnnnnnnnnnnagtaacagattctgtgggtttcacctaaacagcaaagttctcctctattgctatgccttcatttatcttcccaagatttctccctgccaggaggatctttcagcttactgaactggcatttgagatgtgaagtctcagaaagctcttctcgccaatttccatgaaacagtgaaagggcaaacacaagcacaaagaacatwggccaggaacagtaagctctgagactttagttgcatacttttctacaactaccagaaaacttaattgtctttgtaatttgcatgtttgcgtagccccgggagaatacttaaagtatattacatgaatatcataaagatgtccagtaatcagaaaagaaaactgaatttaattcagctgagacaattcaacagagatttcatcctttaactgagatttcacccattaacctccggtactctctgattaaaaactaaaaacatgcatcgtactaaaggttgagtggacatcccttgccaaa

SEQ ID NO: 23443 - DNA, 600 bp, Chicken  19866894236629_1
cagttggtactgagctggaaatagaatgtaaattcctgctgtctgaaaaaagaaaaggcctgaggggctgctgtgaaatgaagctgctccctggaggcatgtgagtgctgctgcacggctcaggatcatccgaggctcacagacccgaggtgtccgtctcatcagcacccactcacaatgccaaggaacgtgtgttagtcataaaagcaaagggatccaattagctccagccaggccgtgcagaaagagcaccttttgcaagaagagctttgcatacaaagaaaaccactggaagcaacyaggctcagggggaagttcagcttctaaatggcattagcaagtcaggatgctgaacacacgctcaaggtcctccaaggacagcataaagagcttgccctccatatcctcccacctcaactgccaccatttctcctctgcacgctgaaggtggaagagaagccacgcacagatgtctttctgctgaaacccctccagtccaccagtagcacactgcagagcaatgatttacatcatttagtggtcagtctacatgagttgctctattgcagactagcagagagaagcacccatggtaaacag

SEQ ID NO: 23444 - DNA, 600 bp, Chicken  19866894236629_2
aaatggcattagcaagtcaggatgctgaacacacgctcaaggtcctccaaggacagcataaagagcttgccctccatatcctcccacctcaactgccaccatttctcctctgcacgctgaaggtggaagagaagccacgcacagatgtctttctgctgaaacccctccagtccaccagtagcacactgcagagcaatgatttacatcatttagtggtcagtctacatgagttgctctattgcagactagcagagagaagcacccatggtaaacaggctggagtggatcatgctctctgcrctcacagcaggygtttgtctctsaggctgagctctcctgcagctcttcctcctgccaggtcctgcactaaggtccaaaccctcacagaccaacctcagcctgggatcagtgtgcaccgtgcctaccaaccctgctcacttcaaaggtggatttcaccctgcatttctgccagcctgcaaggcaaggaaaggcctgggaggtcacgcagccaccgctgtaatttcaggcaggatcaaacagaaaagcaacagctgggctgagtgagcacgtccacgtttaattacaaatggttttggttaa

SEQ ID NO: 23445 - DNA, 600 bp, Chicken  19866894236629_3
caagtcaggatgctgaacacacgctcaaggtcctccaaggacagcataaagagcttgccctccatatcctcccacctcaactgccaccatttctcctctgcacgctgaaggtggaagagaagccacgcacagatgtctttctgctgaaacccctccagtccaccagtagcacactgcagagcaatgatttacatcatttagtggtcagtctacatgagttgctctattgcagactagcagagagaagcacccatggtaaacaggctggagtggatcatgctctctgcrctcacagcaggygtttgtctctsaggctgagctctcctgcagctcttcctcctgccaggtcctgcactaaggtccaaaccctcacagaccaacctcagcctgggatcagtgtgcaccgtgcctaccaaccctgctcacttcaaaggtggatttcaccctgcatttctgccagcctgcaaggcaaggaaaggcctgggaggtcacgcagccaccgctgtaatttcaggcaggatcaaacagaaaagcaacagctgggctgagtgagcacgtccacgtttaattacaaatggttttggttaataagcgaacaca

SEQ ID NO: 23446 - DNA, 600 bp, Chicken  19866894236629_4
gctgaacacacgctcaaggtcctccaaggacagcataaagagcttgccctccatatcctcccacctcaactgccaccatttctcctctgcacgctgaaggtggaagagaagccacgcacagatgtctttctgctgaaacccctccagtccaccagtagcacactgcagagcaatgatttacatcatttagtggtcagtctacatgagttgctctattgcagactagcagagagaagcacccatggtaaacaggctggagtggatcatgctctctgcrctcacagcaggygtttgtctctsaggctgagctctcctgcagctcttcctcctgccaggtcctgcactaaggtccaaaccctcacagaccaacctcagcctgggatcagtgtgcaccgtgcctaccaaccctgctcacttcaaaggtggatttcaccctgcatttctgccagcctgcaaggcaaggaaaggcctgggaggtcacgcagccaccgctgtaatttcaggcaggatcaaacagaaaagcaacagctgggctgagtgagcacgtccacgtttaattacaaatggttttggttaataagcgaacacaagaacaaagca

SEQ ID NO: 23447 - DNA, 600 bp, Chicken  19866894236629_5
tgagcacgtccacgtttaattacaaatggttttggttaataagcgaacacaagaacaaagcaagtgtgaaacctcccttttttgccatggctcctgttcaggctgtgtagaaatagctgccttgagggggatctcaaataaaatccaccagctacattttttctttcatcttgcacattttcataactgctgcagaaacaccactctgtgcgataccaccgtgctctgacaagtggcaaggactgcacagagggacatgagcctctatatcacagaacagaaccattcactttggaaggracccttaaaggccatctggtccaactcccctgcratgaacagggacacccacagctccatcaggtgctcagagccccgtccggccagactttgggcgtctccgaggacaagacatccagagggcaaccctcatgacttctagcatacacctccgacagtatcactagcaggcttatgcaacctaacagtactacagaaacaccactggaacaaagcagtagccccaggacaccctaccaaagcgataccagctgctgatgtaccactgccagctgtgcatatgacgtcccaggagctggg

SEQ ID NO: 23448 - DNA, 600 bp, Chicken  19866894236629_6
gttaataagcgaacacaagaacaaagcaagtgtgaaacctcccttttttgccatggctcctgttcaggctgtgtagaaatagctgccttgagggggatctcaaataaaatccaccagctacattttttctttcatcttgcacattttcataactgctgcagaaacaccactctgtgcgataccaccgtgctctgacaagtggcaaggactgcacagagggacatgagcctctatatcacagaacagaaccattcactttggaaggracccttaaaggccatctggtccaactcccctgcratgaacagggacacccacagctccatcaggtgctcagagccccgtccggccagactttgggcgtctccgaggacaagacatccagagggcaaccctcatgacttctagcatacacctccgacagtatcactagcaggcttatgcaacctaacagtactacagaaacaccactggaacaaagcagtagccccaggacaccctaccaaagcgataccagctgctgatgtaccactgccagctgtgcatatgacgtcccaggagctgggtgccatgggaggacacgatgggaatcatgaagaa

SEQ ID NO: 23449 - DNA, 600 bp, Chicken  19866894236631_1
gatggtttttgattgtaggataaagccctgagtaacctgctctgatcttatgtctgaccctaatttgaatacaaggttggcctagaaaatctcctgagcacccttccaacctgaattatcccatgaccctgactttcacgtaccctcaagcattttctgcctaataaatgtcatgtgtaacagcaaacacagaaaaccacagcctccagaggtttaacaacacagcacacagtaaaaaatgctttgtgcagaggagatgtgtggcttgtaagaacccattacaaaagctcaagagagaamcttatatctgtaatttcatgttctcattcytcatcttcctgcaatttctgcaatgggttattctcactggatccttgcacctactcgttctgtccagttcagccagagatgcttcagactgaccttttgccaggaccctaggaaccttcctttttcctccctaccccgctaagtgcaaagcctggctctgccagcaggaggtgggttatctcactgcgcaccgcttctgggaaagccagtgtcataaaagtaatcatcaatacccaaagctgctaatataaacaggtgctccactgtgga

SEQ ID NO: 23450 - DNA, 600 bp, Chicken  19866894236631_2
agtaacctgctctgatcttatgtctgaccctaatttgaatacaaggttggcctagaaaatctcctgagcacccttccaacctgaattatcccatgaccctgactttcacgtaccctcaagcattttctgcctaataaatgtcatgtgtaacagcaaacacagaaaaccacagcctccagaggtttaacaacacagcacacagtaaaaaatgctttgtgcagaggagatgtgtggcttgtaagaacccattacaaaagctcaagagagaamcttatatctgtaatttcatgttctcattcytcatcttcctgcaatttctgcaatgggttattctcactggatccttgcacctactcgttctgtccagttcagccagagatgcttcagactgaccttttgccaggaccctaggaaccttcctttttcctccctaccccgctaagtgcaaagcctggctctgccagcaggaggtgggttatctcactgcgcaccgcttctgggaaagccagtgtcataaaagtaatcatcaatacccaaagctgctaatataaacaggtgctccactgtggaggatgacatgaaaacccgcctgagcccaat

SEQ ID NO: 23451 - DNA, 600 bp, Chicken  19866894236631_3
gcggctttctcacagaaggatccccgatacgtggtttaacggggatgaaaggcttcagactcagctgtttgctgccttcagaccgccctgtcatttctcctcctccaggctcagaggctgctgcctactgaccattttccgttcacagccaccgctcgcagccacccttttgtctgctgagacctactccagccacacctccaacccaacagctgtgcccacaaactgaagggctcgttggtttcatattgctctgctcagtgttaaacctgcaacacagaactcagatactgctcgttyctcagttctttctgcaagaaaagggcaatacagtaagatggactgtatgtgggctcaaagaccgcacccagccagttagcacatttatgtacatgctattagaaacactgcttccaaagtgaagcaaatttactccctgcactagcagacctgatatccataatcactgggagctactgtcactccgatttacataaagccaatttgttttgtcagttcggctctacaaagtacggttcagcagcacacttggaggagcaaacaccaatgctaaatactattgctgttttgatgctgttt

SEQ ID NO: 23452 - DNA, 600 bp, Chicken  19866894236631_4
tcctttcagatacagacaatttaaacacattgtactgaattcctctgaaactctttcacgtagtaagcatggttagtatttaagtcttcacatcttcaccccacatactgtagcacaggtgggactggactctgaggcccagactctcgggacacttaggggagcttatccttaaggtgctaccatttaaaacctaggctcctgaaatcaggggagcaagacaccaaagtgcttctgtgaaacgagcttaattccaacattaagggttgtaaagcacaaatactcatctctcctacaaayrtgagggggtttaactttctgtgaagttttggggttggggttcaaatgtattcactagcagttcatctccctgctatactcaaacataagcgttactgttgaattcagtaggaaaagtgagggagttaggatgcgtttctgacaccttttactgatttgcagtgagtttttctctgccccggtcttaaaagacccaaccractgcagtgcctgactgctctccagagagagygcttaagggccgttctgcagtttgatgcttgggtcatagaccagagcttctttgttakctcaccagct

SEQ ID NO: 23453 - DNA, 600 bp, Chicken  19866894236631_5
cctttcagatacagacaatttaaacacattgtactgaattcctctgaaactctttcacgtagtaagcatggttagtatttaagtcttcacatcttcaccccacatactgtagcacaggtgggactggactctgaggcccagactctcgggacacttaggggagcttatccttaaggtgctaccatttaaaacctaggctcctgaaatcaggggagcaagacaccaaagtgcttctgtgaaacgagcttaattccaacattaagggttgtaaagcacaaatactcatctctcctacaaayrtgagggggtttaactttctgtgaagttttggggttggggttcaaatgtattcactagcagttcatctccctgctatactcaaacataagcgttactgttgaattcagtaggaaaagtgagggagttaggatgcgtttctgacaccttttactgatttgcagtgagtttttctctgccccggtcttaaaagacccaaccractgcagtgcctgactgctctccagagagagygcttaagggccgttctgcagtttgatgcttgggtcatagaccagagcttctttgttakctcaccagcta

SEQ ID NO: 23454 - DNA, 600 bp, Chicken  19866894236631_6
cctgaaatcaggggagcaagacaccaaagtgcttctgtgaaacgagcttaattccaacattaagggttgtaaagcacaaatactcatctctcctacaaayrtgagggggtttaactttctgtgaagttttggggttggggttcaaatgtattcactagcagttcatctccctgctatactcaaacataagcgttactgttgaattcagtaggaaaagtgagggagttaggatgcgtttctgacaccttttactgatttgcagtgagtttttctctgccccggtcttaaaagacccaaccractgcagtgcctgactgctctccagagagagygcttaagggccgttctgcagtttgatgcttgggtcatagaccagagcttctttgttakctcaccagctagatgtttcccaaatacaaagcagaaaractgcttcaaaaacaaatcccaagctcaccctgtttctctttattcttgtggacaggaaaatgccatgggttaacaaaaaactaaaattaacgttctgtactgtacgctcctggtttatatcacagacataccgaaatgcacagccaacatcattttttatttctctgggaa

SEQ ID NO: 23455 - DNA, 600 bp, Chicken  19866894236631_7
ttctgtgaaacgagcttaattccaacattaagggttgtaaagcacaaatactcatctctcctacaaayrtgagggggtttaactttctgtgaagttttggggttggggttcaaatgtattcactagcagttcatctccctgctatactcaaacataagcgttactgttgaattcagtaggaaaagtgagggagttaggatgcgtttctgacaccttttactgatttgcagtgagtttttctctgccccggtcttaaaagacccaaccractgcagtgcctgactgctctccagagagagygcttaagggccgttctgcagtttgatgcttgggtcatagaccagagcttctttgttakctcaccagctagatgtttcccaaatacaaagcagaaaractgcttcaaaaacaaatcccaagctcaccctgtttctctttattcttgtggacaggaaaatgccatgggttaacaaaaaactaaaattaacgttctgtactgtacgctcctggtttatatcacagacataccgaaatgcacagccaacatcattttttatttctctgggaaatgctttcacagcatcgccctgggtccccagt

SEQ ID NO: 23456 - DNA, 600 bp, Chicken  19866894236631_8
tcctacaaayrtgagggggtttaactttctgtgaagttttggggttggggttcaaatgtattcactagcagttcatctccctgctatactcaaacataagcgttactgttgaattcagtaggaaaagtgagggagttaggatgcgtttctgacaccttttactgatttgcagtgagtttttctctgccccggtcttaaaagacccaaccractgcagtgcctgactgctctccagagagagygcttaagggccgttctgcagtttgatgcttgggtcatagaccagagcttctttgttakctcaccagctagatgtttcccaaatacaaagcagaaaractgcttcaaaaacaaatcccaagctcaccctgtttctctttattcttgtggacaggaaaatgccatgggttaacaaaaaactaaaattaacgttctgtactgtacgctcctggtttatatcacagacataccgaaatgcacagccaacatcattttttatttctctgggaaatgctttcacagcatcgccctgggtccccagtacggaattgtttcctggacaaatacgttttactcttacagatctgtaagtgtcacgca

SEQ ID NO: 23457 - DNA, 600 bp, Chicken  19866894236631_9
ttggggttggggttcaaatgtattcactagcagttcatctccctgctatactcaaacataagcgttactgttgaattcagtaggaaaagtgagggagttaggatgcgtttctgacaccttttactgatttgcagtgagtttttctctgccccggtcttaaaagacccaaccractgcagtgcctgactgctctccagagagagygcttaagggccgttctgcagtttgatgcttgggtcatagaccagagcttctttgttakctcaccagctagatgtttcccaaatacaaagcagaaaractgcttcaaaaacaaatcccaagctcaccctgtttctctttattcttgtggacaggaaaatgccatgggttaacaaaaaactaaaattaacgttctgtactgtacgctcctggtttatatcacagacataccgaaatgcacagccaacatcattttttatttctctgggaaatgctttcacagcatcgccctgggtccccagtacggaattgtttcctggacaaatacgttttactcttacagatctgtaagtgtcacgcaaacacatgaaaaacaaatcaactgcatgcatttgatgg

SEQ ID NO: 23458 - DNA, 599 bp, Chicken  19866894236633_1
  misc_feature (1)..(101): n is any nucleotide
nnnnnnnnnnnnnnnnnnnnnnnnnnnnnnnnnnnnnnnnnnnnnnnnnnnnnnnnnnnnnnnnnnnnnnnnnnnnnnnnnnnnnnnnnnnnnnnnnnnnntatgtgtgtagccgtttgcgttgtgtctcctagggcaagactggagcctgaaggctaccttgttgtctgaaggcagccttgttgtctgcagtaaatagtggtcagctgagcttgagaatacaacataccaaattgctcccttatctatttttcaagcctttgcaagacgtagcacagtgatgctgagtaaacaattacyatttggagcacaaatctaagaaktattttttttacagatgcactcaaactgttgaaatacaggtatattcaggagacaaacagaattgtcatttaaaatatatatcagtatcatgaacgtctccatgccataatccagattattacattaaaagagtcattgccttcactacatgtatgatctgcatgtaacaaacagtggccaagaggtagctgtggactaagggtcggattaacttctttacatgaagaattccagcagtaggtattgcttttctcatattttggggatttgagtgt

SEQ ID NO: 23459 - DNA, 599 bp, Chicken  19866894236633_2
  misc_feature (1)..(78): n is any nucleotide
nnnnnnnnnnnnnnnnnnnnnnnnnnnnnnnnnnnnnnnnnnnnnnnnnnnnnnnnnnnnnnnnnnnnnnnnnnnnnntatgtgtgtagccgtttgcgttgtgtctcctagggcaagactggagcctgaaggctaccttgttgtctgaaggcagccttgttgtctgcagtaaatagtggtcagctgagcttgagaatacaacataccaaattgctcccttatctatttttcaagcctttgcaagacgtagcacagtgatgctgagtaaacaattacyatttggagcacaaatctaagaaktattttttttacagatgcactcaaactgttgaaatacaggtatattcaggagacaaacagaattgtcatttaaaatatatatcagtatcatgaacgtctccatgccataatccagattattacattaaaagagtcattgccttcactacatgtatgatctgcatgtaacaaacagtggccaagaggtagctgtggactaagggtcggattaacttctttacatgaagaattccagcagtaggtattgcttttctcatattttggggatttgagtgtattttgggactgacttgagtgtg

SEQ ID NO: 23460 - DNA, 600 bp, Chicken  19866894236636_1
agctcagagggttgtcatcatcagtacagagtctggctggaggcctgtagctagtggtgttccccagttgtcagtgctaagtccttatatcttgttcaatatcttcatcagtgatctggatgaagggacaaagttcactctcagcaagtttgctgggaggagtggctgacacaccagaaggctgtgctgccattcactgagatgtggacagactggaatgttgggcagggtggaacctgatgaggtttaacaagagcaagtgtagagtcctgcatctgaggacgaataaccacatgcatyagtacaggttaggggatgacctgctggagaggaattctgtggagaaggacctggggatcctggtgaacaacagattggcaatgaaccagctgtgtttccttgtggccaaagaggccattggcattctgtgattcattaaaaagaggatggccagcaggtcgagggaggtgatcctcctccactctgccctgttgaggctacatttagaataccacgtccagctctggtctccccagtacaaagaagacagagatctccgaggagtccactgaagggtcacaaagatgataaagggcctga

SEQ ID NO: 23461 - DNA, 599 bp, Chicken  19866894236650_1
  misc_feature (1)..(228): n is any nucleotide
nnnnnnnnnnnnnnnnnnnnnnnnnnnnnnnnnnnnnnnnnnnnnnnnnnnnnnnnnnnnnnnnnnnnnnnnnnnnnnnnnnnnnnnnnnnnnnnnnnnnnnnnnnnnnnnnnnnnnnnnnnnnnnnnnnnnnnnnnnnnnnnnnnnnnnnnnnnnnnnnnnnnnnnnnnnnnnnnnnnnnnnnnnnnnnnnnnnnnnnnnnnnnnnnnnnnnnnnnnnnnnnnnnnnatctgttcatttgctaactgaaaataacaagttaagatgaacaacaaacactgctaagaagcaagcaacagyattaggctggggaggaaaaacagcgacagcagagtagcttgcagcacgcagacatgtgcccgcttgcatgccaaaataaacagctctgctacttcctaaagacatctgcactcccaaacacacccaggctcaatagcagcatggcacagagagcagtgctggggagcacagacctcgcacacaacagcactgctgtgctatgcctccttcccctgtctttacgccaccacctcaggcttgaagagaatggcattattttcctgcgcggcgttcctttgtaaaatggggagaaatgattt

SEQ ID NO: 23462 - DNA, 600 bp, Chicken  19866894236652_1
gagatacttccttgctatgcctcaaattagaaactgggaatcgccttcagctctaccagctgagtgagggcacctcatggcactacaaactgctggcagcacatccacagccttaagggcaccgtaagggaagctgggcacataaatgctacgaccagcagcacgtacagcagtgcggctgctgtgagattacaaggagagaaaatgcatcacaaaatgtcaagtgggaagggcccagttacatggtgagaaccctccttcccagtttgctaacccttcttccacattcctctttgttaytgagtggaataatttctttttctttycttttttttcctttttaaacgaggtgcaaatgcattttcacacctccaactaaaacgaggtgaaggctccaagctaattaccccttattaatgagctctacaatggtgtgttggcctgcacatcgcacatgtgcgcatgaagatgaacatttgtgctccaggtgggatggattcttccaagtgctaaattctttttcagtagcagaatgcttaacactggaaactgtttacagtgcagctttctttcccctaaattctgtttatttattattat

SEQ ID NO: 23463 - DNA, 600 bp, Chicken  19866894236652_2
ttagaaactgggaatcgccttcagctctaccagctgagtgagggcacctcatggcactacaaactgctggcagcacatccacagccttaagggcaccgtaagggaagctgggcacataaatgctacgaccagcagcacgtacagcagtgcggctgctgtgagattacaaggagagaaaatgcatcacaaaatgtcaagtgggaagggcccagttacatggtgagaaccctccttcccagtttgctaacccttcttccacattcctctttgttaytgagtggaataatttctttttctttycttttttttcctttttaaacgaggtgcaaatgcattttcacacctccaactaaaacgaggtgaaggctccaagctaattaccccttattaatgagctctacaatggtgtgttggcctgcacatcgcacatgtgcgcatgaagatgaacatttgtgctccaggtgggatggattcttccaagtgctaaattctttttcagtagcagaatgcttaacactggaaactgtttacagtgcagctttctttcccctaaattctgtttatttattattattttttttaatattgaactgcactaaa

SEQ ID NO: 23464 - DNA, 600 bp, Chicken  19866894236654_1
ctgtaaatcagcctctaagtggaatgtccattgctctataaaatattaaaagcctgtaattagagcataaattgtaagaaatgcaacagtttctccaatcagacagcatacacttttagcattcatctgcaactattcatagacaaacacacttagatgtttcttgtactttctatgtatggatatgcatttgtgtaatgacgattattaaagaaataatatctagtagtggattctaaagagtctatttcatggaagcagctatacccctgtaaggaagcagccaatttgactaacagraaactctttctcattagcttgttttcaattgttcttgcttgagaaattttgtttgttctcatcaaygtgactttgaaatgagactaaagggaaagaagctggatggcacagaaactcttacactctacaccaagtcttcacagcacaaacttcaaaaagaatctgcagtgataggagtcagcagttgagttgaattatttcctagagatgtcaggtgtccaaaataacaaatttaaacattgtgccttaaaaatgtttaagatccacacaccattaaagccatgtaatgaatttgacctt

SEQ ID NO: 23465 - DNA, 600 bp, Chicken  19866894236654_2
ataaattgtaagaaatgcaacagtttctccaatcagacagcatacacttttagcattcatctgcaactattcatagacaaacacacttagatgtttcttgtactttctatgtatggatatgcatttgtgtaatgacgattattaaagaaataatatctagtagtggattctaaagagtctatttcatggaagcagctatacccctgtaaggaagcagccaatttgactaacagraaactctttctcattagcttgttttcaattgttcttgcttgagaaattttgtttgttctcatcaaygtgactttgaaatgagactaaagggaaagaagctggatggcacagaaactcttacactctacaccaagtcttcacagcacaaacttcaaaaagaatctgcagtgataggagtcagcagttgagttgaattatttcctagagatgtcaggtgtccaaaataacaaatttaaacattgtgccttaaaaatgtttaagatccacacaccattaaagccatgtaatgaatttgaccttaaaatgggtttttaataaggcttatcccacataacttttgcctaagttgaaccttatttcactact

SEQ ID NO: 23466 - DNA, 600 bp, Chicken  19866894236662_1
ggcatcaagtatcttgtagtgcttagttttgtaggaaatatacacccaccacatgaaatacatgggttgaagtttggaatttgcatgctaccaccaaaataagcccacatctgctcataaactggggaaacataagatcacaacttaatttgaagttcagttcgtagatgattccttgtactgcagtgtcatcattttaactatctcataggctaaagatggggcttcaaatctggagggtttagtagctttttttccttctaacattttgtatttgcaccagtttttcttcagttctgmactgtgtaaaatattgtgggtggcttttttgaaggctcataacaatacataaaaggacacgcactgtctgcagaaggtcttatgggatcaaaatggccaaattactttgttatgagctgtattttcaaccctgagagctgaggtctacctgtgctttatagcaagggtctgtgtcatccaaatgtcaacaccttgaagattcttgcaagtgaatgcctcctgccacagctgaggtgtcatggtcatactctgaatgccccatttaaattttaatgtcatgctgaagggacatctgctgtc

SEQ ID NO: 23467 - DNA, 600 bp, Chicken  19866894236662_2
cctgggcatcagaattaccaggcagatatgctgctggggtatggttagagctggatcctatgctggtattggcagaatttcttcagctggggcaagatgagacaaataagtcaaataatccttctggcattctgagttgaggtcacagagatgctgcacgacaggcatagagtatctgaagtgtcttgtttttgtaggagcctgttttggttagatattattggatagggggaaaaaaaaggcaaacagaatgaacaatattttgcatcatgctgctgcatcttcttcctcaacctggtmatttagcatgtatgcacacccactgctggaggtggggtggggatactgttacaagtttcatcacagcagccagctctggatcccagctgtgtcttcagtggcatgagccagcttgattatgctaaagcacccctggatcccttcctcttttgtttcattcttcccagggttttaaagcttaaacatttgacatgcttgggtagtttcttctctaattttatcccagctgactgtgcaatgagtttaactcagagcccttaggtgcaagccactttcctcaatgtatattaaaccttataa

SEQ ID NO: 23468 - DNA, 599 bp, Chicken  19866894236677_1
  misc_feature (1)..(179): n is any nucleotide
nnnnnnnnnnnnnnnnnnnnnnnnnnnnnnnnnnnnnnnnnnnnnnnnnnnnnnnnnnnnnnnnnnnnnnnnnnnnnnnnnnnnnnnnnnnnnnnnnnnnnnnnnnnnnnnnnnnnnnnnnnnnnnnnnnnnnnnnnnnnnnnnnnnnnnnnnnnnnnnnnnnnnnnnnnnnnnnnnnntatgctctgacagcccggagctcttagagcctgcagcaacgccttctccaagaagagcccccatcctttgcagagcctctcctgcacaccctgaaacacggcctgaaggccgggggacatyggggctgccctgcaagagctgccctgcctggctgggtgcagttctgccctggggtgctggtgggtgtwgggggagctgggtgaaactgatccctaaaaactgttacgggccaagctgccgtcttggggcttcccaagcatcctgccctattgaagtcatattgactgccgtgctagagctcctagctgctaattttgtaaatagccatttgtaggatgttggatcttttcgacgaatttctcggtttaatttgtttccgtatttaaatgcagtgttcatgtggtgtaatttataagcgt

SEQ ID NO: 23469 - DNA, 599 bp, Chicken  19866894236677_2
  misc_feature (1)..(111): n is any nucleotide
nnnnnnnnnnnnnnnnnnnnnnnnnnnnnnnnnnnnnnnnnnnnnnnnnnnnnnnnnnnnnnnnnnnnnnnnnnnnnnnnnnnnnnnnnnnnnnnnnnnnnnnnnnnnnnntatgctctgacagcccggagctcttagagcctgcagcaacgccttctccaagaagagcccccatcctttgcagagcctctcctgcacaccctgaaacacggcctgaaggccgggggacatyggggctgccctgcaagagctgccctgcctggctgggtgcagttctgccctggggtgctggtgggtgtwgggggagctgggtgaaactgatccctaaaaactgttacgggccaagctgccgtcttggggcttcccaagcatcctgccctattgaagtcatattgactgccgtgctagagctcctagctgctaattttgtaaatagccatttgtaggatgttggatcttttcgacgaatttctcggtttaatttgtttccgtatttaaatgcagtgttcatgtggtgtaatttataagcgtcggcgctggaaagcaacagctgtagttggtgtattttaaacttttttttttttttttgcttttctttt

SEQ ID NO: 23470 - DNA, 599 bp, Chicken  19866894236681_1
  misc_feature (1)..(123): n is any nucleotide
nnnnnnnnnnnnnnnnnnnnnnnnnnnnnnnnnnnnnnnnnnnnnnnnnnnnnnnnnnnnnnnnnnnnnnnnnnnnnnnnnnnnnnnnnnnnnnnnnnnnnnnnnnnnnnnnnnnnnnnnnnntaagaagcagcattaaaatccccttcccctctatgcagacaaacacacaattgcaaacacacctccatgcacaaagcaataagatccccaaaggtgagctgggcacctcagcagagccaaccatcaccaccccagcacctaactgtgcatgcagcagccccctgcactgagctgtcrctcttcctacagcagcaacagttggggctgcccaccacaaggaaccatcayggagtgatgggaatgctcattgggtttgtttgtgagcagttaccccatgcaggctgctctcagctgcagcccagccctcctccaggttgcacatctgggctgaatacttgacctatatagacagcctgtgacaggaaatacctcaaatccatccaacttggttttaaaaccttttatacagagtaaggcttggtgttacggagacacggtgcatctgctctagcagggagcttagacatttacatatt

SEQ ID NO: 23471 - DNA, 599 bp, Chicken  19866894236681_2
  misc_feature (1)..(72): n is any nucleotide
nnnnnnnnnnnnnnnnnnnnnnnnnnnnnnnnnnnnnnnnnnnnnnnnnnnnnnnnnnnnnnnnnnnnnnnntaagaagcagcattaaaatccccttcccctctatgcagacaaacacacaattgcaaacacacctccatgcacaaagcaataagatccccaaaggtgagctgggcacctcagcagagccaaccatcaccaccccagcacctaactgtgcatgcagcagccccctgcactgagctgtcrctcttcctacagcagcaacagttggggctgcccaccacaaggaaccatcayggagtgatgggaatgctcattgggtttgtttgtgagcagttaccccatgcaggctgctctcagctgcagcccagccctcctccaggttgcacatctgggctgaatacttgacctatatagacagcctgtgacaggaaatacctcaaatccatccaacttggttttaaaaccttttatacagagtaaggcttggtgttacggagacacggtgcatctgctctagcagggagcttagacatttacatatttgtccccaaaatcacatctgttgttactgttatttatgaaataatatgaag

SEQ ID NO: 23472 - DNA, 599 bp, Chicken  19866894236684_1
ctccctacactcacccctgagctatttgtttacagctcggctccgtgggaatgcaaggccaatttgtcaccaacttaatggaagtcagtatagggagtgatttttcaactgaagcccttaagaacaagtttgtatgacctgcatcatctcctaaattaaaagatacgtcttcagaagcagcaacacacagtaacagtctactacgaaaatgcccacgagtcagaaatcagctccatcccagcactgtcctgacttgtaagagcaggtctgcagcccaggctgtgagcacagaccttctaycttcagtaattttacagcccagattttacccgggcccttgatcctctaccctccaatttactaccaacatagcctctagcctgaaattcaaatacctcgcatagcgcaataaagacttgaaaagggaccatccctatctgtttatgtgcttctcttcatagcccggctttgctggggagagatgacctgccctgtgctccctccactctcttccaaaggcagggaaatcaagctccccacacgctgcaggaacttcaaaggcacccgaacctttcatgagccaaatgaatcataaaagg

SEQ ID NO: 23473 - DNA, 600 bp, Chicken  19866894236689_1
acatttgttcaaagaagcatgaaaactatggtagcacttcacaggaggttgtaaattttctgctctatatgcattattagtcacactgcctactggtagggttctgcaggtattcggctgacctatgcctatggaagtacggcttcagaaatactctttgttgctttagttgcatggcactggctcaaattacacaggatgtttaagcttctaaagacccatattcagagggaacaccatgctggaaagtagcctgtgaaagagggaatagtccagagggtttgttgttgagtttgggtrttttactttgtttaaagtacgggtggtatatcctggaggtagagtaaatgttgatgcagaagaacatgtgacggtgacgtatcacacgtatttacacaaaacacagtatgcccctggagtattctacctccacccaacccaaggcactcactatcaaaaggaaaaggttcacattgcacaggtggaaattcagaatacataatgaaaatgtccgcataatgcacatgagaattacatctataatcatgaggaggtgacgcctttttcctggcttcttatattgtgcacacacatattata

SEQ ID NO: 23474 - DNA, 600 bp, Chicken  19866894236689_2
caacatggactggatagctgtatgaaaggcggaggaaagggtcaaaattcaactatgcagacatttgaagcaagttagcaacaaaaacagcagcatttttagggcagaaacatcctatctctggaatccatcctgtttttaagagtagttacagaactgctaacattgctttttctttggcattctcggcctaacaataataaatacctagaaagcaactgagtggaccagaagcagtaaatcaagtaaaagaaccaccccacaaaaagaaaaagcttatgatgtgcgtaaggcaaatayagcatcatcttggtttgacaaagttctgtgtttcaactagctgtagcgggcacttaaggatcttttctaaaataataacgcacgtgtcctctaaaagtactgggaaaagtaactgctaaaaacttatgtacttggtcttcacaagtagatgaaatgaaaaaggacacaccagcagtggtggaaagacagcaactagccaagcagaccctttgtaaactcagctttttgctgtatatactccagtggatatagctgagctttcaactacagtcatgaaggaagatgtagtcggtggcttct

SEQ ID NO: 23475 - DNA, 600 bp, Chicken  19866894236690_1
gagaaacaaactgtgtttccttgttctctaacaaactcgccaccctcacactaccttatcaaaatgacagttaatgtcatcaacaagagtctctttccttctcctacttgtagctcctaaatcagatacattttttatgtttctaagacatctcagaagcactgaccgtcacaggtaagtgaccgaggagcctgcatgcaagaattgcgtctcctggaaggatggaagaccaagagccagtaaatttgaaccaatataaagtaactgaatcataatagtcagaaaaataaatctaatttyacaaaatcctagttagaaaaaaagaatgacaaggatttctaaaacacaggcgatgaagtcaaagctcttcttaaycttttttacctaaaacagaatccagaatctacctctttcatggattcttagctaccaaaggtmtgaatacctactcagcattcaacctcacttcaaattccattcacatatctctttcctccaaaaaaactgatatcactttagcttcaaaaacagattcagcatgccttttcccactttttttctcctgcttttcccactccaytttcttgttcttccatcccc

SEQ ID NO: 23476 - DNA, 600 bp, Chicken  19866894236690_2
gtcatcaacaagagtctctttccttctcctacttgtagctcctaaatcagatacattttttatgtttctaagacatctcagaagcactgaccgtcacaggtaagtgaccgaggagcctgcatgcaagaattgcgtctcctggaaggatggaagaccaagagccagtaaatttgaaccaatataaagtaactgaatcataatagtcagaaaaataaatctaatttyacaaaatcctagttagaaaaaaagaatgacaaggatttctaaaacacaggcgatgaagtcaaagctcttcttaaycttttttacctaaaacagaatccagaatctacctctttcatggattcttagctaccaaaggtmtgaatacctactcagcattcaacctcacttcaaattccattcacatatctctttcctccaaaaaaactgatatcactttagcttcaaaaacagattcagcatgccttttcccactttttttctcctgcttttcccactccaytttcttgttcttccatcccccagtagactgttcttctgcctttgggaacactgcttgatttaattaaaatcttagcacatctgttaagctaccaa

SEQ ID NO: 23477 - DNA, 600 bp, Chicken  19866894236690_3
gtttctaagacatctcagaagcactgaccgtcacaggtaagtgaccgaggagcctgcatgcaagaattgcgtctcctggaaggatggaagaccaagagccagtaaatttgaaccaatataaagtaactgaatcataatagtcagaaaaataaatctaatttyacaaaatcctagttagaaaaaaagaatgacaaggatttctaaaacacaggcgatgaagtcaaagctcttcttaaycttttttacctaaaacagaatccagaatctacctctttcatggattcttagctaccaaaggtmtgaatacctactcagcattcaacctcacttcaaattccattcacatatctctttcctccaaaaaaactgatatcactttagcttcaaaaacagattcagcatgccttttcccactttttttctcctgcttttcccactccaytttcttgttcttccatcccccagtagactgttcttctgcctttgggaacactgcttgatttaattaaaatcttagcacatctgttaagctaccaaaaggcaaaatgttcttatcaaaataggaaggcaaagcataastatcagagtgaagtattgcca

SEQ ID NO: 23478 - DNA, 600 bp, Chicken  19866894236690_4
agaaaaataaatctaatttyacaaaatcctagttagaaaaaaagaatgacaaggatttctaaaacacaggcgatgaagtcaaagctcttcttaaycttttttacctaaaacagaatccagaatctacctctttcatggattcttagctaccaaaggtmtgaatacctactcagcattcaacctcacttcaaattccattcacatatctctttcctccaaaaaaactgatatcactttagcttcaaaaacagattcagcatgccttttcccactttttttctcctgcttttcccactccaytttcttgttcttccatcccccagtagactgttcttctgcctttgggaacactgcttgatttaattaaaatcttagcacatctgttaagctaccaaaaggcaaaatgttcttatcaaaataggaaggcaaagcataastatcagagtgaagtattgccatgtacttgggcccagtatttcattgccacacgtacaaactcaatcagcataaacacatacatcaactgcatacattagttgtattaatgttcttgactgagacctgacacattagcgatgatcactttgtgagataataggt

SEQ ID NO: 23479 - DNA, 600 bp, Chicken  19866894236690_5
gattcttagctaccaaaggtmtgaatacctactcagcattcaacctcacttcaaattccattcacatatctctttcctccaaaaaaactgatatcactttagcttcaaaaacagattcagcatgccttttcccactttttttctcctgcttttcccactccaytttcttgttcttccatcccccagtagactgttcttctgcctttgggaacactgcttgatttaattaaaatcttagcacatctgttaagctaccaaaaggcaaaatgttcttatcaaaataggaaggcaaagcataastatcagagtgaagtattgccatgtacttgggcccagtatttcattgccacacgtacaaactcaatcagcataaacacatacatcaactgcatacattagttgtattaatgttcttgactgagacctgacacattagcgatgatcactttgtgagataataggtttggagtgactgattcactgctcaagcttcaagatgtgcttttataaatacggtgggaattcatttgctctgaatggcggggccccacttacttgtctgcatgggaaaagacttgtcctaagtggacaagtggaaac

SEQ ID NO: 23480 - DNA, 600 bp, Chicken  19866894236691_1
cttcaacagcctaaacgaaaataatgttctggtttggtgtccctccaattctcgtggtttcgttgaggattttggagaatgcatttactcctttgctaactgcaagaacagatttatcctgcagccatgtgctgaatgattatacaggcctagagggagtctgaaagcataaacatttacttcataaaagagattctgcagacaggaggccagagacagttgactctgggtaatcatttgtgctctgtttaaaaaaaaaaaaaaaccttgtttgccagaagccagaagggagacatgcayacacttcaggaacaggcccttgccacagtggacggtgaagaaatccaaaggggccaagtgagaaggcggtctgcgagccgagctctaaatayagcactgacagcaaagccatctttagcgcagatgtgaagctctgagctccttgtctcattgtgaggggctttgccttggctcgggctggggaaataataaacaagtaactccacatccagggaaaaccctggagctttgtgtctcccatccagatgcgcagtgagatacaggctccttctttggcctttcccacagtaggaatatcaa

SEQ ID NO: 23481 - DNA, 600 bp, Chicken  19866894236691_2
ttgctaactgcaagaacagatttatcctgcagccatgtgctgaatgattatacaggcctagagggagtctgaaagcataaacatttacttcataaaagagattctgcagacaggaggccagagacagttgactctgggtaatcatttgtgctctgtttaaaaaaaaaaaaaaaccttgtttgccagaagccagaagggagacatgcayacacttcaggaacaggcccttgccacagtggacggtgaagaaatccaaaggggccaagtgagaaggcggtctgcgagccgagctctaaatayagcactgacagcaaagccatctttagcgcagatgtgaagctctgagctccttgtctcattgtgaggggctttgccttggctcgggctggggaaataataaacaagtaactccacatccagggaaaaccctggagctttgtgtctcccatccagatgcgcagtgagatacaggctccttctttggcctttcccacagtaggaatatcaatgaggacttgtctcctctttacctggctgtttattttcacaaaacttgtaagaacgtaaagttgctgagatctccaccctgctaacaaattt

SEQ ID NO: 23482 - DNA, 600 bp, Chicken  19866894236697_1
tccacgcaatttcacttggccaattgttttccctttcttaaagctgccatcaaaattgatgttgattgaagattctgaagcaaagtttgctttattgggtgagttccaatgctggagacctgattacgagggctcgccgctggttcctcgtgcttccccagctatttcatgaagcacccttagtgagtctgacaactgcctggcttttgaggatgcctccttcccattccctggaagcctcaccacgtttgaggtaaaagagggagcctggaattctgggagtggagcattaacaaaaarcagccttgcctcawctccccagaaggctgaatcctggtgggcaaagctttactgcttggaatgatggcccaacagaaagatgcatgtctgtctcatatgacaagttagcacagctgtgatgtagcaaagaaagcaatacttactatgatgttgcaaagaaccaagaagaacgagatctcctttaatgctttcctcttccaacccaggtgagagtaggtgtggatgtaggatagggaaactctgcggaactcctgcccgagctccagcacgctcactcgcctctggtcgggggcttcgcgg

SEQ ID NO: 23483 - DNA, 600 bp, Chicken  19866894236697_2
cttggccaattgttttccctttcttaaagctgccatcaaaattgatgttgattgaagattctgaagcaaagtttgctttattgggtgagttccaatgctggagacctgattacgagggctcgccgctggttcctcgtgcttccccagctatttcatgaagcacccttagtgagtctgacaactgcctggcttttgaggatgcctccttcccattccctggaagcctcaccacgtttgaggtaaaagagggagcctggaattctgggagtggagcattaacaaaaarcagccttgcctcawctccccagaaggctgaatcctggtgggcaaagctttactgcttggaatgatggcccaacagaaagatgcatgtctgtctcatatgacaagttagcacagctgtgatgtagcaaagaaagcaatacttactatgatgttgcaaagaaccaagaagaacgagatctcctttaatgctttcctcttccaacccaggtgagagtaggtgtggatgtaggatagggaaactctgcggaactcctgcccgagctccagcacgctcactcgcctctggtcgggggcttcgcggttgtgctcttcgct

SEQ ID NO: 23484 - DNA, 600 bp, Chicken  19866894236701_1
tttaagcctagtaattttaactgtaaggtaatattttcattaatgtaactgaatgtttcttagcagttgtatgcttagtgtactgcatttcctcctcccaggtcccctcatctccttagatctggggaatagaaaggaattcatcccttgtatacatgacagtatggagacgaatcttctgtttgtagagttttttaaatctggatttcaaaagctctcattttatctctggttttggagggcatctactcaggcagctgcatagacacacttcttagccggcatcttttctgtatgggrgagtacagctagacctttaccgttccttagcactccatgcaggctagtgtggcttaaagagagtcctttgtaatatccagtccgcccatgtttctctctctgccattctcagcctcttgcctgcatctcctgcattccccctgaagtgcrggaactggagctggtctttgacagagaaaatgctgctgactactccctgcacttgataatactgtgttcacaaagtgtagatgtatgtgcatgatgcataagtacagttacctaagctcgggctgcagattacattcttgtttttccaca

SEQ ID NO: 23485 - DNA, 600 bp, Chicken  19866894236701_2
tatacatgacagtatggagacgaatcttctgtttgtagagttttttaaatctggatttcaaaagctctcattttatctctggttttggagggcatctactcaggcagctgcatagacacacttcttagccggcatcttttctgtatgggrgagtacagctagacctttaccgttccttagcactccatgcaggctagtgtggcttaaagagagtcctttgtaatatccagtccgcccatgtttctctctctgccattctcagcctcttgcctgcatctcctgcattccccctgaagtgcrggaactggagctggtctttgacagagaaaatgctgctgactactccctgcacttgataatactgtgttcacaaagtgtagatgtatgtgcatgatgcataagtacagttacctaagctcgggctgcagattacattcttgtttttccacattttgctgaaatcctgtggcttctccttttcacctcttcactctcaggatgggagaagtcaaggctgatgatacttactgttgctgtgcaagtgaggagatggttctgccctacagaccccaaggacagtttcactattttatattttgt

SEQ ID NO: 23486 - DNA, 599 bp, Chicken  19866894236703_1
  misc_feature (1)..(95): n is any nucleotide
nnnnnnnnnnnnnnnnnnnnnnnnnnnnnnnnnnnnnnnnnnnnnnnnnnnnnnnnnnnnnnnnnnnnnnnnnnnnnnnnnnnnnnnnnnnnnnnggagacgaagcctaaatactcatccctggggaaaaccagcaccaaaaccagaacagaagcctctctgattcctgtttctgtggcacataaaaacaaaccctttggcatttctctcactttcactcagattgcaccccaaatcacacccatgaaatgacttcagaaacttctgaaaatgaacccatggaggcattggctctgcaartaaacacamatgraagcayggatttcagtgtttgtgcataatcagaaygatagcaaaattccacttttaaggtcagtcttattttgatcatgaaacttctcagctcctttccacttatgtgctcacacagatgacttgaggaattttattttatttctctctcagggcaaattatgttcagagagaaaaaaaatgagctctagcaaygaacrccaatgactgccttataaatcatctctttctctgatggaaagtcctacatccttcctgatccacccccgcggcttatctgtggatgt

SEQ ID NO: 23487 - DNA, 599 bp, Chicken  19866894236703_2
  misc_feature (1)..(86): n is any nucleotide
nnnnnnnnnnnnnnnnnnnnnnnnnnnnnnnnnnnnnnnnnnnnnnnnnnnnnnnnnnnnnnnnnnnnnnnnnnnnnnnnnnnnnnggagacgaagcctaaatactcatccctggggaaaaccagcaccaaaaccagaacagaagcctctctgattcctgtttctgtggcacataaaaacaaaccctttggcatttctctcactttcactcagattgcaccccaaatcacacccatgaaatgacttcagaaacttctgaaaatgaacccatggaggcattggctctgcaartaaacacamatgraagcayggatttcagtgtttgtgcataatcagaaygatagcaaaattccacttttaaggtcagtcttattttgatcatgaaacttctcagctcctttccacttatgtgctcacacagatgacttgaggaattttattttatttctctctcagggcaaattatgttcagagagaaaaaaaatgagctctagcaaygaacrccaatgactgccttataaatcatctctttctctgatggaaagtcctacatccttcctgatccacccccgcggcttatctgtggatgtgggagagga

SEQ ID NO: 23488 - DNA, 599 bp, Chicken  19866894236703_3
  misc_feature (1)..(82): n is any nucleotide
nnnnnnnnnnnnnnnnnnnnnnnnnnnnnnnnnnnnnnnnnnnnnnnnnnnnnnnnnnnnnnnnnnnnnnnnnnnnnnnnnnggagacgaagcctaaatactcatccctggggaaaaccagcaccaaaaccagaacagaagcctctctgattcctgtttctgtggcacataaaaacaaaccctttggcatttctctcactttcactcagattgcaccccaaatcacacccatgaaatgacttcagaaacttctgaaaatgaacccatggaggcattggctctgcaartaaacacamatgraagcayggatttcagtgtttgtgcataatcagaaygatagcaaaattccacttttaaggtcagtcttattttgatcatgaaacttctcagctcctttccacttatgtgctcacacagatgacttgaggaattttattttatttctctctcagggcaaattatgttcagagagaaaaaaaatgagctctagcaaygaacrccaatgactgccttataaatcatctctttctctgatggaaagtcctacatccttcctgatccacccccgcggcttatctgtggatgtgggagaggaaaaa

SEQ ID NO: 23489 - DNA, 599 bp, Chicken  19866894236703_4
  misc_feature (1)..(76): n is any nucleotide
nnnnnnnnnnnnnnnnnnnnnnnnnnnnnnnnnnnnnnnnnnnnnnnnnnnnnnnnnnnnnnnnnnnnnnnnnnnnggagacgaagcctaaatactcatccctggggaaaaccagcaccaaaaccagaacagaagcctctctgattcctgtttctgtggcacataaaaacaaaccctttggcatttctctcactttcactcagattgcaccccaaatcacacccatgaaatgacttcagaaacttctgaaaatgaacccatggaggcattggctctgcaartaaacacamatgraagcayggatttcagtgtttgtgcataatcagaaygatagcaaaattccacttttaaggtcagtcttattttgatcatgaaacttctcagctcctttccacttatgtgctcacacagatgacttgaggaattttattttatttctctctcagggcaaattatgttcagagagaaaaaaaatgagctctagcaaygaacrccaatgactgccttataaatcatctctttctctgatggaaagtcctacatccttcctgatccacccccgcggcttatctgtggatgtgggagaggaaaaaagacag

SEQ ID NO: 23490 - DNA, 599 bp, Chicken  19866894236703_5
  misc_feature (1)..(47): n is any nucleotide
nnnnnnnnnnnnnnnnnnnnnnnnnnnnnnnnnnnnnnnnnnnnnnnggagacgaagcctaaatactcatccctggggaaaaccagcaccaaaaccagaacagaagcctctctgattcctgtttctgtggcacataaaaacaaaccctttggcatttctctcactttcactcagattgcaccccaaatcacacccatgaaatgacttcagaaacttctgaaaatgaacccatggaggcattggctctgcaartaaacacamatgraagcayggatttcagtgtttgtgcataatcagaaygatagcaaaattccacttttaaggtcagtcttattttgatcatgaaacttctcagctcctttccacttatgtgctcacacagatgacttgaggaattttattttatttctctctcagggcaaattatgttcagagagaaaaaaaatgagctctagcaaygaacrccaatgactgccttataaatcatctctttctctgatggaaagtcctacatccttcctgatccacccccgcggcttatctgtggatgtgggagaggaaaaaagacagaaagagcccacagcatattacttatacgt

SEQ ID NO: 23491 - DNA, 600 bp, Chicken  19866894236703_6
ctcactttcactcagattgcaccccaaatcacacccatgaaatgacttcagaaacttctgaaaatgaacccatggaggcattggctctgcaartaaacacamatgraagcayggatttcagtgtttgtgcataatcagaaygatagcaaaattccacttttaaggtcagtcttattttgatcatgaaacttctcagctcctttccacttatgtgctcacacagatgacttgaggaattttattttatttctctctcagggcaaattatgttcagagagaaaaaaaatgagctctagcaaygaacrccaatgactgccttataaatcatctctttctctgatggaaagtcctacatccttcctgatccacccccgcggcttatctgtggatgtgggagaggaaaaaagacagaaagagcccacagcatattacttatacgttcacagaagtagagcctgaaaagcccctatgcatatttgccacttgtatatataaaccacctaataaaaggctgcacataccaattaccttttcttttcttgtacataatgtcaaggagtaaacagcaattagcagctgcagtgcttttctattcaagac

SEQ ID NO: 23492 - DNA, 600 bp, Chicken  19866894236703_7
tttcactcagattgcaccccaaatcacacccatgaaatgacttcagaaacttctgaaaatgaacccatggaggcattggctctgcaartaaacacamatgraagcayggatttcagtgtttgtgcataatcagaaygatagcaaaattccacttttaaggtcagtcttattttgatcatgaaacttctcagctcctttccacttatgtgctcacacagatgacttgaggaattttattttatttctctctcagggcaaattatgttcagagagaaaaaaaatgagctctagcaaygaacrccaatgactgccttataaatcatctctttctctgatggaaagtcctacatccttcctgatccacccccgcggcttatctgtggatgtgggagaggaaaaaagacagaaagagcccacagcatattacttatacgttcacagaagtagagcctgaaaagcccctatgcatatttgccacttgtatatataaaccacctaataaaaggctgcacataccaattaccttttcttttcttgtacataatgtcaaggagtaaacagcaattagcagctgcagtgcttttctattcaagacgtgta

SEQ ID NO: 23493 - DNA, 599 bp, Chicken  19866894236708_1
  misc_feature (1)..(76): n is any nucleotide
nnnnnnnnnnnnnnnnnnnnnnnnnnnnnnnnnnnnnnnnnnnnnnnnnnnnnnnnnnnnnnnnnnnnnnnnnnnnagaagagggaggacacagctcagattcctgtcttcctgcagtcaagctctagtgaattacaattacagatgtacacctgaatccccccaaatcctgctgttcagaccacttccacacagtgctcggccactcaaagggcttctcaatatgggacttctcttttgcataaccattcccctgctcattttctttagtacccctcctgagaccactgcctgctcatyacacccagtttgctgactcccacagatgccatcacgatgaacgtaggctgtggggatgcccatgtttcacaggtgacttacacataagaaatggatgaggaattaatttcctcctgagaacaagatgaaaaatgaacttgtgttccatcatgcttcattcctctgtcttttattaagacagactctcctactaataaaagtgtaccatcaactctaatgctacttaatgagacctgcagtaggttctctgctttcatttccagctggaaacctcacaggggcatctgtactttatgttt

SEQ ID NO: 23494 - DNA, 599 bp, Chicken  19866894236709_1
  misc_feature (1)..(78): n is any nucleotide
nnnnnnnnnnnnnnnnnnnnnnnnnnnnnnnnnnnnnnnnnnnnnnnnnnnnnnnnnnnnnnnnnnnnnnnnnnnnnnatctgacaatttcacaaatttattttttaagatttcgtattacaccagcatgtcattacactatcaaaaacgttaccttcactaattaatatactcctccaaatgactgttggttacctgcagcactggaacttatttatcatcatatatgtgatctcacctccaaacgccttttgctagactgcatccccagcacaaatgaatgcaatgccaatgaagtcrtatcttcaccagcaattaactgtgtatatcagtttaaaaataatatatatatttattacttatatcaacacatatgttggtattttattacttctgtaaatgttgctagctgagttggagctaggtattacaagagatcagactctcatcaaaaaaactatccatctccatggacaggtaatgtcttgagacctatgtgtaaaccaaagtacgtctaaattgactttgaacatccagtttgaattacctttaataatctacacaccgttttgcaatattaatgactcctgtgcacagtg

SEQ ID NO: 23495 - DNA, 600 bp, Chicken  19866894236714_1
aaaaacaatgtgtctcaaactacatattgacatcttggtaataaataggcacacaaggtgctacctattctgaagcttattttggataaaacaaaaagaaaattgttcttttgaagtgtctcaaagaaaaatatctaaaattataagtgtgtttaatttcttctttgatttatctaaatatttgtgaagaatcctaaagatttcaccttcagactgtgctaagaagtaatcacctggaaaatttgttcttccttattgtccttgttaaatatgtggaaaaaataatgtatttttgaggtsctgccaggagccatttctatactgttaaaatttatgaaaaacaaaacaaaacaaaaarcaacacttgttactgtcattagtttcatctaatcatacatgtatgtgtgtatatatatatataagtgtawattttaagttatataaaaatatgttaaaatattcaggccatattttgcactattcaaatattttaaagtgatgagactaaaatttgcaacctgtactccaaatgcaattttaacatggagcttaaatgctaaaatgacatatctgtattttctctgcttagttcaagtcgtt

SEQ ID NO: 23496 - DNA, 600 bp, Chicken  19866894236714_2
tgctacctattctgaagcttattttggataaaacaaaaagaaaattgttcttttgaagtgtctcaaagaaaaatatctaaaattataagtgtgtttaatttcttctttgatttatctaaatatttgtgaagaatcctaaagatttcaccttcagactgtgctaagaagtaatcacctggaaaatttgttcttccttattgtccttgttaaatatgtggaaaaaataatgtatttttgaggtsctgccaggagccatttctatactgttaaaatttatgaaaaacaaaacaaaacaaaaarcaacacttgttactgtcattagtttcatctaatcatacatgtatgtgtgtatatatatatataagtgtawattttaagttatataaaaatatgttaaaatattcaggccatattttgcactattcaaatattttaaagtgatgagactaaaatttgcaacctgtactccaaatgcaattttaacatggagcttaaatgctaaaatgacatatctgtattttctctgcttagttcaagtcgttaaaaatatgtgmgtatgtgttgaatttaaggtacatattcatattgaccaaacaatcc

SEQ ID NO: 23497 - DNA, 600 bp, Chicken  19866894236714_3
aaatatctaaaattataagtgtgtttaatttcttctttgatttatctaaatatttgtgaagaatcctaaagatttcaccttcagactgtgctaagaagtaatcacctggaaaatttgttcttccttattgtccttgttaaatatgtggaaaaaataatgtatttttgaggtsctgccaggagccatttctatactgttaaaatttatgaaaaacaaaacaaaacaaaaarcaacacttgttactgtcattagtttcatctaatcatacatgtatgtgtgtatatatatatataagtgtawattttaagttatataaaaatatgttaaaatattcaggccatattttgcactattcaaatattttaaagtgatgagactaaaatttgcaacctgtactccaaatgcaattttaacatggagcttaaatgctaaaatgacatatctgtattttctctgcttagttcaagtcgttaaaaatatgtgmgtatgtgttgaatttaaggtacatattcatattgaccaaacaatccataatatggcattttagcatacactgcattctctgtaaataacagagctgaagcctaccaacctctcttc

SEQ ID NO: 23498 - DNA, 449 bp, Chicken  19866894236714_4
atttctatactgttaaaatttatgaaaaacaaaacaaaacaaaaarcaacacttgttactgtcattagtttcatctaatcatacatgtatgtgtgtatatatatatataagtgtawattttaagttatataaaaatatgttaaaatattcaggccatattttgcactattcaaatattttaaagtgatgagactaaaatttgcaacctgtactccaaatgcaattttaacatggagcttaaatgctaaaatgacatatctgtattttctctgcttagttcaagtcgttaaaaatatgtgmgtatgtgttgaatttaaggtacatattcatattgaccaaacaatccataatatggcattttagcatacactgcattctctgtaaataacagagctgaagcctaccaacctctcttccttattgctttttttttttttttaattattttt

SEQ ID NO: 23499 - DNA, 600 bp, Chicken  19866894236733_1
caatggatacatcttaaaacattcacacatgcactacatgtaacaactgacagaatctgctcagactctctaatgcttagtgattccctgatggctgagcgaagaatctactgtaatttccatgtaattccctgttaaggcagacatacagggaaattttatatttcctgcagaaaatcctcctttacacttaacgtgtttctaattcattaattggtttctgtaggaagctttagtgtctgtttcattcatgttatcacatgggcacagactgttaatttaatctgaccttaactctarwgycttctggttggagtcctgttcttatgctttctattggygtgcaaagtgtacgtaattaaactacagcatttttacacagcatgtaggttcatcctctttattgaggcattactggaaaattaagtgggaaggaggtacgttaagaactaacatttctgtttcacacttcccactaggtaagtctctgtaaacaagtatctcrtgcacgtgaaagaggttaccttctgctatgtgcgtcttgaaattgtctgctgagagttcatacattccctgcttaggttcgggggcttttggtgg

SEQ ID NO: 23500 - DNA, 600 bp, Chicken  19866894236733_2
aatggatacatcttaaaacattcacacatgcactacatgtaacaactgacagaatctgctcagactctctaatgcttagtgattccctgatggctgagcgaagaatctactgtaatttccatgtaattccctgttaaggcagacatacagggaaattttatatttcctgcagaaaatcctcctttacacttaacgtgtttctaattcattaattggtttctgtaggaagctttagtgtctgtttcattcatgttatcacatgggcacagactgttaatttaatctgaccttaactctarwgycttctggttggagtcctgttcttatgctttctattggygtgcaaagtgtacgtaattaaactacagcatttttacacagcatgtaggttcatcctctttattgaggcattactggaaaattaagtgggaaggaggtacgttaagaactaacatttctgtttcacacttcccactaggtaagtctctgtaaacaagtatctcrtgcacgtgaaagaggttaccttctgctatgtgcgtcttgaaattgtctgctgagagttcatacattccctgcttaggttcgggggcttttggtggt

SEQ ID NO: 23501 - DNA, 600 bp, Chicken  19866894236733_3
tggatacatcttaaaacattcacacatgcactacatgtaacaactgacagaatctgctcagactctctaatgcttagtgattccctgatggctgagcgaagaatctactgtaatttccatgtaattccctgttaaggcagacatacagggaaattttatatttcctgcagaaaatcctcctttacacttaacgtgtttctaattcattaattggtttctgtaggaagctttagtgtctgtttcattcatgttatcacatgggcacagactgttaatttaatctgaccttaactctarwgycttctggttggagtcctgttcttatgctttctattggygtgcaaagtgtacgtaattaaactacagcatttttacacagcatgtaggttcatcctctttattgaggcattactggaaaattaagtgggaaggaggtacgttaagaactaacatttctgtttcacacttcccactaggtaagtctctgtaaacaagtatctcrtgcacgtgaaagaggttaccttctgctatgtgcgtcttgaaattgtctgctgagagttcatacattccctgcttaggttcgggggcttttggtggttc

SEQ ID NO: 23502 - DNA, 600 bp, Chicken  19866894236733_4
aacaactgacagaatctgctcagactctctaatgcttagtgattccctgatggctgagcgaagaatctactgtaatttccatgtaattccctgttaaggcagacatacagggaaattttatatttcctgcagaaaatcctcctttacacttaacgtgtttctaattcattaattggtttctgtaggaagctttagtgtctgtttcattcatgttatcacatgggcacagactgttaatttaatctgaccttaactctarwgycttctggttggagtcctgttcttatgctttctattggygtgcaaagtgtacgtaattaaactacagcatttttacacagcatgtaggttcatcctctttattgaggcattactggaaaattaagtgggaaggaggtacgttaagaactaacatttctgtttcacacttcccactaggtaagtctctgtaaacaagtatctcrtgcacgtgaaagaggttaccttctgctatgtgcgtcttgaaattgtctgctgagagttcatacattccctgcttaggttcgggggcttttggtggttccacagcagattctggatcctattcaagagaaaagttaa

SEQ ID NO: 23503 - DNA, 600 bp, Chicken  19866894236733_5
ttcattaattggtttctgtaggaagctttagtgtctgtttcattcatgttatcacatgggcacagactgttaatttaatctgaccttaactctarwgycttctggttggagtcctgttcttatgctttctattggygtgcaaagtgtacgtaattaaactacagcatttttacacagcatgtaggttcatcctctttattgaggcattactggaaaattaagtgggaaggaggtacgttaagaactaacatttctgtttcacacttcccactaggtaagtctctgtaaacaagtatctcrtgcacgtgaaagaggttaccttctgctatgtgcgtcttgaaattgtctgctgagagttcatacattccctgcttaggttcgggggcttttggtggttccacagcagattctggatcctattcaagagaaaagttaatttttaccagtctccaacagtaaacacacaatatttggttcctgtaccatgccattctatggtagtgcctgaaaatttacattcctaaagctatctcccaatttagcttgatatttgaaagcaaaacgtgaaaaagactaccacacagacaagagctgtcacca

SEQ ID NO: 23504 - DNA, 600 bp, Chicken  19866894236733_6
ctgctatgtgcgtcttgaaattgtctgctgagagttcatacattccctgcttaggttcgggggcttttggtggttccacagcagattctggatcctattcaagagaaaagttaatttttaccagtctccaacagtaaacacacaatatttggttcctgtaccatgccattctatggtagtgcctgaaaatttacattcctaaagctatctcccaatttagcttgatatttgaaagcaaaacgtgaaaaagactaccacacagacaagagctgtcaccattattggaaaaacagccttcaytgatgctgtagtattgccacagtgcacagtaattgccatatatttatacacttagttcaygtaactctytatcttcaagtctgccaccaaaccagtatcaatgctatcttggctatttaaaaatatgtaatgaaaaagcaatttttggctgctgtagtgcaggaaagaggaacctagtggtcccatgaaggcagcaagagcagaagagcaaatattttaccagtaatctgcagcaaacacactggcacttagcaaaagcaaaaagccatttcaagataccaggttagactgggaaagaat

SEQ ID NO: 23505 - DNA, 552 bp, Chicken  19866894236733_7
gggcttttggtggttccacagcagattctggatcctattcaagagaaaagttaatttttaccagtctccaacagtaaacacacaatatttggttcctgtaccatgccattctatggtagtgcctgaaaatttacattcctaaagctatctcccaatttagcttgatatttgaaagcaaaacgtgaaaaagactaccacacagacaagagctgtcaccattattggaaaaacagccttcaytgatgctgtagtattgccacagtgcacagtaattgccatatatttatacacttagttcaygtaactctytatcttcaagtctgccaccaaaccagtatcaatgctatcttggctatttaaaaatatgtaatgaaaaagcaatttttggctgctgtagtgcaggaaagaggaacctagtggtcccatgaaggcagcaagagcagaagagcaaatattttaccagtaatctgcagcaaacacactggcacttagcaaaagcaaaaagccatttcaagataccaggttagactgggaaagaatatttaagaacca

SEQ ID NO: 23506 - DNA, 543 bp, Chicken  19866894236733_8
gtggttccacagcagattctggatcctattcaagagaaaagttaatttttaccagtctccaacagtaaacacacaatatttggttcctgtaccatgccattctatggtagtgcctgaaaatttacattcctaaagctatctcccaatttagcttgatatttgaaagcaaaacgtgaaaaagactaccacacagacaagagctgtcaccattattggaaaaacagccttcaytgatgctgtagtattgccacagtgcacagtaattgccatatatttatacacttagttcaygtaactctytatcttcaagtctgccaccaaaccagtatcaatgctatcttggctatttaaaaatatgtaatgaaaaagcaatttttggctgctgtagtgcaggaaagaggaacctagtggtcccatgaaggcagcaagagcagaagagcaaatattttaccagtaatctgcagcaaacacactggcacttagcaaaagcaaaaagccatttcaagataccaggttagactgggaaagaatatttaagaacca

SEQ ID NO: 23507 - DNA, 599 bp, Chicken  19866894236738_1
  misc_feature (1)..(25): n is any nucleotide
nnnnnnnnnnnnnnnnnnnnnnnnnatttttcttttatgaattgcatgaaacatgaggttttgcgctcctttaaagtgcattagcatcaaatattttaattatggatattcttactatcagtaaggatgttaaaattctccctaaatcttggtctcagacctggtaactgagatttgcagctcaatgtgaacatttggctacagcagttttacccaaattaaacgaatgtacaatattaacaagtaatctaattaaatgcatgctatgatgtttgtgtatattctacagtccatgccacytaccataaaagtattagagctcatcagtgcacagaatattgccttcaactccagtaaaaggaataatttccctgcagggtagtaacactcttcaacgtggcgaatagccacaggctgcagggttgtgactttatggtaaatagctacctctttcatcaacagagcaatgaattggaagagcccctggtgaaatgtatgagggtaatttgatttcttcaggtataaacacgcaacccactcgttttcaggcactgctaattaggctgggttatccagatgccttggggtaattattttgg

SEQ ID NO: 23508 - DNA, 600 bp, Chicken  19866894236741_1
gcaatggaaaggaatggtatgggtttggtttaacaaggcagagttcccggctgcttgcagagaaatgcctttcccaccttgccagaaaaaggaattcagcagctggggatggggaatggaacaattgcaagaaattaggccgccaactcgcttccccatgttctttctcattattgctcaaataaccatttgtactcgcaccagatgcttgttaatcaaggccaattaggctattttgctcagaaaatttccaaccggcaagacaaatagttcaaatagcacagagggtcaaccaaagcrggagcaccggtgacagcttcatgtgcrtttagccaaatagaaagcagacatggcaagggcacgcatgtagggctcccacgtggattgcattgtgtatttgccccggggggatgagttgcactcgccctggtcagccaggctgttcagacagcagttcaggtgtttgtgcgttgatttagactaacatcatatgctgagttcctcatctagcttgcccaaaatgtcaaggtaaataaggcttaaatataataatattaaccaagatcttcaggggtgctttctcagaggggtaccctgaga

SEQ ID NO: 23509 - DNA, 600 bp, Chicken  19866894236741_2
gtttaacaaggcagagttcccggctgcttgcagagaaatgcctttcccaccttgccagaaaaaggaattcagcagctggggatggggaatggaacaattgcaagaaattaggccgccaactcgcttccccatgttctttctcattattgctcaaataaccatttgtactcgcaccagatgcttgttaatcaaggccaattaggctattttgctcagaaaatttccaaccggcaagacaaatagttcaaatagcacagagggtcaaccaaagcrggagcaccggtgacagcttcatgtgcrtttagccaaatagaaagcagacatggcaagggcacgcatgtagggctcccacgtggattgcattgtgtatttgccccggggggatgagttgcactcgccctggtcagccaggctgttcagacagcagttcaggtgtttgtgcgttgatttagactaacatcatatgctgagttcctcatctagcttgcccaaaatgtcaaggtaaataaggcttaaatataataatattaaccaagatcttcaggggtgctttctcagaggggtaccctgagaaaaggtcagacagccgctgcagcgcac

SEQ ID NO: 23510 - DNA, 503 bp, Chicken  19866894236743_1
tcaggtaagagctgcagtcccgcaggctccgtcccacagccgtgtggtagcagaggagcctggtgctgctctgccgccctccgcccggggcagaccctcatcctactcttctcttccctcggcgttctcagtactgaatatgcaaatgtaacctttaattccactgaatgctatgaacgaggatcactctttgtaccattttttttttcggcagataaaactgggaaaaataaagaccggaaaattgcacacaggtaaacaaagtgtttgagccaacgctaacagggtctgatcttacayaatgctccaaatttgagcaagcccacaacaactgagatgaaaaaccacatttatcaagaaataaatacaagaacagatataaataatctttagatatgtttttaaagtttcctttgcagtttttactctttcctggactttttttgaacacttcagcgcagcagaactggagcagtgctgcccatacagcagcacccccctct

SEQ ID NO: 23511 - DNA, 600 bp, Chicken  19866894236745_1
agaatttggctcaaagaaactcagaaggatagaaccttacaaacccatgtttcccattgagcaattcaaataatccaggatttttcttgtgggcagtgcacagaaattgatcaagaatataaagaagatggtttaccaacagaaaaattaagtggcattagacgttatgtgaaagatgatcttcccccagaatacccaaaatggctcctgtcaagtctaatgactgtttctgttaaatgtgcttcatattaccacatattttttttaatcataaaatatgggtgcttataaaatagactkcatataggaatgagtgacaaaacaaaataaaatactaagtccttaccatctgttttctttgattcacttcccacaccagattgatcttttttgtctgccatacagtcttcctttatttcacctagaatgaagcaataagggatactataagcattataatgcagactgcagtgtattaatgcttgtaactccatcaaatttcagcatccaaaaacgatgttccttaagaggaaatacctggattcacaatgaactaggtttaacacagtatcacagaataatgcaacagtcaaagtttat

SEQ ID NO: 23512 - DNA, 599 bp, Chicken  19866894236748_1
tgtggaaatgatgcttgcactgggagcagcattgccttcagcttggaagattgaacagacggaaacacttgcagctaatgttgtcagagcatgtgcactctaagggggtcatttccaggcttttaatgccttgcagttgtgtagtctggctgtttctttattcagaaagtcaaaaaacaccactttgactgtctggatcgacactttctgttccacggaccagaccacctcctgcactgactcgtttcatcaacagcttgaatggcaaagctgtccagccttgactccgggtctcccagwgacagaaaatcatcrcaagcacaggcagccctagctgttaattaccagaactgctgtgtgcttcctccttgttatctcactgcactatctgggggttgtttctgtaccagcctactgctttgaagagcgcattacctaagtactgttccccacataggtggcaaaaggcagggagcagctttgaagagtgacagcttggattttaggtgggaagtatgaagggagtgcaatttaactgcaatttaatggctgaaattaaaggaaaagtgggaaacaaatacgttgagtcatttttgccc

SEQ ID NO: 23513 - DNA, 584 bp, Chicken  19866894236748_2
tgcactgggagcagcattgccttcagcttggaagattgaacagacggaaacacttgcagctaatgttgtcagagcatgtgcactctaagggggtcatttccaggcttttaatgccttgcagttgtgtagtctggctgtttctttattcagaaagtcaaaaaacaccactttgactgtctggatcgacactttctgttccacggaccagaccacctcctgcactgactcgtttcatcaacagcttgaatggcaaagctgtccagccttgactccgggtctcccagwgacagaaaatcatcrcaagcacaggcagccctagctgttaattaccagaactgctgtgtgcttcctccttgttatctcactgcactatctgggggttgtttctgtaccagcctactgctttgaagagcgcattacctaagtactgttccccacataggtggcaaaaggcagggagcagctttgaagagtgacagcttggattttaggtgggaagtatgaagggagtgcaatttaactgcaatttaatggctgaaattaaaggaaaagtgggaaacaaatacgttgagtcatttttgccc

SEQ ID NO: 23514 - DNA, 600 bp, Chicken  19866894236749_1
gctcacatccaaccctccgactctccttgtcctcctcctcccagatgtggcccttcagaacagcagaaggtattttcccattcctctcccctaatgaagtggtgttttttttctttgtctccaccacaggtcagaggaccgactgctctcttgccaggtaggtgtggcacaaaggctcacttctgctgcaaatcaattgccagcccagggtatgcatgtgtgaggaaagaaaggagttcatttcactgctgtgtaaccacattcccatccttcacgtggctttaaataccactgcaacasatcagtgcggagtggtggtggtgcttctgctttcgtcccgtgctctgctctgcaatggaactggattgcagcaggccccagagaatcacctcctcacttgtaattaggaccaatcaccragcaataactaaccttcccttgatgaggtttttataaagcataacaaacgtctgtctgcagatggatgggtttggggagctgggctgcrcgtgggggctgtgcatcatcctgccttgtaacaaagggaaggtgattactgctgatccacagccattactacttttcagatgccttacagca

SEQ ID NO: 23515 - DNA, 600 bp, Chicken  19866894236749_2
tccaccacaggtcagaggaccgactgctctcttgccaggtaggtgtggcacaaaggctcacttctgctgcaaatcaattgccagcccagggtatgcatgtgtgaggaaagaaaggagttcatttcactgctgtgtaaccacattcccatccttcacgtggctttaaataccactgcaacasatcagtgcggagtggtggtggtgcttctgctttcgtcccgtgctctgctctgcaatggaactggattgcagcaggccccagagaatcacctcctcacttgtaattaggaccaatcaccragcaataactaaccttcccttgatgaggtttttataaagcataacaaacgtctgtctgcagatggatgggtttggggagctgggctgcrcgtgggggctgtgcatcatcctgccttgtaacaaagggaaggtgattactgctgatccacagccattactacttttcagatgccttacagcaaagcagagctgacaggtcctaattagtgcctgacatctgtaataataaaatattattcatcacgaaacaattttaaatatcaaagaatcgttactgctaatagtttagaataggcctta

SEQ ID NO: 23516 - DNA, 600 bp, Chicken  19866894236749_3
ggtatgcatgtgtgaggaaagaaaggagttcatttcactgctgtgtaaccacattcccatccttcacgtggctttaaataccactgcaacasatcagtgcggagtggtggtggtgcttctgctttcgtcccgtgctctgctctgcaatggaactggattgcagcaggccccagagaatcacctcctcacttgtaattaggaccaatcaccragcaataactaaccttcccttgatgaggtttttataaagcataacaaacgtctgtctgcagatggatgggtttggggagctgggctgcrcgtgggggctgtgcatcatcctgccttgtaacaaagggaaggtgattactgctgatccacagccattactacttttcagatgccttacagcaaagcagagctgacaggtcctaattagtgcctgacatctgtaataataaaatattattcatcacgaaacaattttaaatatcaaagaatcgttactgctaatagtttagaataggccttattgtcagtgacagcccatggaatctgcttgctttttattttccgtggttcattcagtatttttgatttatttctttcctaacaggaatt

SEQ ID NO: 23517 - DNA, 600 bp, Chicken  19866894236753_1
ctgcagagggagaaaaatgcacgatgtcctcagccaggtgctgacctccagaaggccagggagccatcctgggagttttatggaccctttctgagcatggggctagggcaaggaggagtacagaaaacctatgtacctcaagatgaggcttaccaatcccattggaaccccatcccctaaatgggacaagtaggcaatgtggccagtgtgaggagagctgcaaggtgctgcactgggatggggatagggtgtctgcaacgtgggcagtagcagcccggccatctctgggtaagttcagcycatggggtaggaggcagggagaccctgcaaggccttgtctggtgccctgtgacatcaaggcttcatggcactggaagtacatctccccacctcccatcccacctggtggcttgaggaggaggcgaggaaatgtgctggggtagtgctgcataccctcacctggttgtggttacttacatggtggggggtacatgaacttctccagggttgttgctgagcagagcgttcttgatgtggctgcgacccactccgctggcccctgcagggaaagaggggtggacatgagctgggctgaggagt

SEQ ID NO: 23518 - DNA, 594 bp, Chicken  19866894236753_2
ttccagccctggagaagggtctccctgccctatgtgctctcgcaggtgcctgcaggctgggctgcttagaccagaagctccacggaagtgctgactttggtgcagctgcacagaccataaggacatttaagagccagaaactcctgaaataactcctcagcactggaatgcaggtgccagaccacatgcacaatgccacgtggcaggtatcaccctgcctggcaatggctgcaggtagaagaaatgcttcccagtgcttaccagcttctgaagggcagtgctgtcccagccctggttccycacagcccccaccacatgcaggaggacagggacaggacctacctatgagcaccagtgtcttcctcttgaaggcaggcagcctcaccacctcctcgtaggaaactacatccagctggtcaaaaactgcagtggaggagaaataacagagtaattagagctgtctcaactacaagataggactgtgcatgctggagcaaagccaaatcctttggcaaaatatagggagcaatcaaggtagctgtgagcttccccctgctggcggcctggaaagagcaccagccccagcagcaacca

SEQ ID NO: 23519 - DNA, 600 bp, Chicken  19866894236761_1
tgcttcagctggatggctgctttctcagtactcgttcagggagaataccaaaaagtaaccccttttttggaatgaactctgactgacccaacacacgtggagaactttggcaccttgaaaagaagctgagcaccctttttgagttgtaggatcgaagatggctgtttgagtttgtgcaccaggcaggaatggggctggtttcaccgagggtgcgtaagaagtaatgagctttattaccaggtagtttgttgtccagtgccaagcactccaagttcagattgagtgaagtgagagcctctyttctgtttgcctgtgactggactgagtatttgagctcagactacgtgggttgttgtggatgcccatccctggaggtgcccgaggccgtggatggggctgggggcagccagcccatggcaggggggagaactggggggggcctgaatgtcccatccaacccagccgttctgtgatgctgtgttagatctcagctggccttgggaagcacagcgagaacccaaactcaatctggtgttaaaacaccactgcaaaaaaaaaaaggaaataggatactgctgagggtgcagtgctgtcatttgg

SEQ ID NO: 23520 - DNA, 599 bp, Chicken  19866894236766_1
  misc_feature (1)..(131): n is any nucleotide
nnnnnnnnnnnnnnnnnnnnnnnnnnnnnnnnnnnnnnnnnnnnnnnnnnnnnnnnnnnnnnnnnnnnnnnnnnnnnnnnnnnnnnnnnnnnnnnnnnnnnnnnnnnnnnnnnnnnnnnnnnnnnnnnnnnctgcgatagagacccactgtgccaggtgctgtgagacaagctgcaagcaactgcaagttatgagaacggtgccttgttgtgcttagcatttatttgtaccgctctatataaatggctgtgtgcagtcattaaatggcttggctgctagaaaccatatgagtgtgtggcytcgtccctcgcctcatctcagctgattattgctctccaggggatctcggacttgttgtttgtcaacaagattcttcaggaattgtgaaaatttctggaaatgaagatttctttgaaggatttttatcttaaaatggaacaaggctgttttcacttaaaggtaaaaatatatgggaacatttaaattagtggagtggggaaggagaggggacagaaagccagcagatgcagaaagagaacagagttcaaggtgatgaattgtgtatcctcaggtaaagaagaggaaagtgtcaaaatgaa

SEQ ID NO: 23521 - DNA, 600 bp, Chicken  19866894236766_2
gattattgctctccaggggatctcggacttgttgtttgtcaacaagattcttcaggaattgtgaaaatttctggaaatgaagatttctttgaaggatttttatcttaaaatggaacaaggctgttttcacttaaaggtaaaaatatatgggaacatttaaattagtggagtggggaaggagaggggacagaaagccagcagatgcagaaagagaacagagttcaaggtgatgaattgtgtatcctcaggtaaagaagaggaaagtgtcaaaatgaaaattgtaattgatgagagacaatmtctttaaatagattttcagttaggcagtgcactgaaaagtgagaaataaaagttgtgtaaaaatgccggaagtctaagaaayaataagaagaaaatcagtgtctcttgttttaaactagcatatcgatatataacatgcaaaaactcaatggaaggaagtcaaatagaggaaaagtaatagaaacgcaaaaactatatgggaactatagaatagatgcgcatgaaattacagcataatgtaattggtaatatccaactaggataacaatgttttctgtgacctccagagcaccatcaaac

SEQ ID NO: 23522 - DNA, 541 bp, Chicken  19866894236766_3
atttctttgaaggatttttatcttaaaatggaacaaggctgttttcacttaaaggtaaaaatatatgggaacatttaaattagtggagtggggaaggagaggggacagaaagccagcagatgcagaaagagaacagagttcaaggtgatgaattgtgtatcctcaggtaaagaagaggaaagtgtcaaaatgaaaattgtaattgatgagagacaatmtctttaaatagattttcagttaggcagtgcactgaaaagtgagaaataaaagttgtgtaaaaatgccggaagtctaagaaayaataagaagaaaatcagtgtctcttgttttaaactagcatatcgatatataacatgcaaaaactcaatggaaggaagtcaaatagaggaaaagtaatagaaacgcaaaaactatatgggaactatagaatagatgcgcatgaaattacagcataatgtaattggtaatatccaactaggataacaatgttttctgtgacctccagagcaccatcaaactaaaagaccaagaaacagaaata

SEQ ID NO: 23523 - DNA, 600 bp, Chicken  19866894236770_1
acttttaatctgacttgctggctagtccagcttgaattttgctagctttcacacatacccactcagaacagagagcactcccacaaagaagataattagaagcagagtttaatgagaaaatggggcagactgggatgatgaaattcaagattcagtctgacaagcataaagacaaaaaacttgtttacatctgaacagcttcttttatcccatttcacctccatttttttcatagatgttccttaccaattcaccttgaccattctctttcccgtctttcatcctttcccagatgtcctmtaataagtctcacacattcccacaattcatttacaataacatgcagtaagttttatataatctccaaacattattgctacaaaaacatgactgaagcaaatttaattcgggaaagttttgatccttgtcttgtacctgattcttgttcagcacagtctgatactttgtaatacaaagacaactcctcaacttttatagaatggaatagctcaaatagctgtgggttcacactttctgctaccagcttatcatctttcttttgccttaagccataggtctacatctcagaaaactagcttt

SEQ ID NO: 23524 - DNA, 599 bp, Chicken  19866894236771_1
  misc_feature (1)..(44): n is any nucleotide
nnnnnnnnnnnnnnnnnnnnnnnnnnnnnnnnnnnnnnnnnnnnacccagcaaaatatgttatcttatgcaaaatatctgggttgtcacagtaatgttggcaggtatctcacaatcctggtgtggggcttgctgtgcagttagtgctgctgtgcctgcagttgacagggctgtaagtaactgctgggggaggggcacttagatgcatctcaagtagtggcacgtggctggtaggttcccttgctgcagctgtaatggacgtgcacagaagcaccagggagcaggcatcccttttgctctrtgtgctgccctgcccgtatagacagtggttctgtggatctggagtgcagtacagatgtcgcttgttcagcagcagagttgactggagagtatttctcttcaaccagtccttcactgttaggtggccaagatgttaattagctcattgtttcagcttaattttatgatggtgctataattatatccctcagttgtgccatgaagtaattgctgcatcttttccaaattctatgctgagatatgttattggtaaactttgcatttggcagagagttttgaaaatactctaaggcagttggt

SEQ ID NO: 23525 - DNA, 600 bp, Chicken  19866894236776_1
agctatttccaaaccttggaaggagagctaagtgggagaattgggctatctatgggcacagtctgcagggatgctccaatattaatagataaatacaatcccatcagatacttactataagaacagaaaagtcattcattgctacccagagttttcagcctatcagcatgtccagttaagcttcatttaggattccaattatgtggattatgtttttaagaacttctttattttattgtgtctccaaattagttatttctttctggtaggaccataatacaaaatgaaaaaataaggacmcttattttaaaaacagactgttttcttagaagatggttgggaaaaatgagaaataaatcaatactgtgaagcaagaaaaatgcagtgattgttgagctgtattgtgtcttgtgcgcatgacgtgaccttgagcaattacagctcaaatgtttcttttgagtctccaaaaaaaagtgacatacacaaagcactatttctattcaaaaccagtcttactgagaggtgctaattcacctatttatgtaatgacccaaaggtgtatcaaacctcttcgattaaaataaaaacaaataaaaacaa

SEQ ID NO: 23526 - DNA, 600 bp, Chicken  19866894236778_1
catgattctatgaatctctgcattaggacggctgagcccggcttgtccaagagatgagctttatgaacgagccctgcaagcacccatctacccatcgcctcctttctggtgacaaccaaaggcacaaacccacccatgcatggcggaatgcaccccccggggatcccttttttgagtgcaagcaacccagagcaccccacgactcctgaacaccagtggtgtgcatggatgctccatgccctcagtaccattccccctgggctgcccagagcagaggctgatctcatccttggaccatayttccttcccagttcctcaccgacagtgatgatgttcagcatcttcttccacacgttgtactgcagagagcccaggtacttggcggagtcgatgagcatccccaaaggcacagcctctggctcctcagccgtgcaggcaatcctagggcaggagaagaggacagggatggaatggggctgctggcaccctgctttcctgcaggggttcccctggcagcaccccaggtctcctaccaggctgccttccctttgtgtgagcagagcaggagctcctgcttcagctccagttccagggccccca

SEQ ID NO: 23527 - DNA, 600 bp, Chicken  19866894236784_1
ggaaggggaggctggaggaggaagcacacgcacgccctgacctgcagccattgcccagcctcaggttcccctctcctctctgataggtgctcccagccatggccagcaagtgcgtgggctgcacacagctgaggacgtcgggctcctgcctgcaatgtccttttctacagctgaactaccaaagcttttcttccctactttctctctgaagttttcctgttggcttccaaacaggagatcaagaagctcaaggaactgatgagcgcaacggagaagattaggagagaaaagtggattgaygagaaaaccaaaaagatcaaagagatcaccgtgaaaggtacagacccattggatagaagtggagcacaagaaaacctgtgcatgtctgctcaccccttcccagtgccgctgtagccaggtctgaggcacctgcagagccctgagttgtgctgataatcctccctgctgccccagggctggagccagagatccagaagctgatcaccaagcaccgccaggacatccagaagctgaagatgctgcatgaggccgagctgctgcagtcagacgagcgggcagcacagcggtactgccggcagg

SEQ ID NO: 23528 - DNA, 600 bp, Chicken  19866894236791_1
taagagccaaacagaaatcagaggtacacaggtcaactccatcgagttgctccaagagaatccatgcatcaaaatagcatcaggtaatagagctggctgaaggcagctcccatgcagccctacactacgtgctgcgctgccccccctgccccagggcagagcgctggcgccagcagtgtgcctggggcagtgcctgccctatggcagctatgggaaggcatggaagaaagcccttttcctctctctgtaactgctctgtgctgagtaatggggtgcagcctctaccagctcctgtggcaygcagcgagcaggtttgcacccacgcctctgtgccaatcacaccccctcccatcatctcaacaagccccagcaaggacatgcttccccaggagctgattttccagctgggacagggtatccccagcaggaaccacactcacagcccagaggaaggtcactcacaggatcatgtgggcaatggccgtgccaagcagcagcaccaaaccacgtcactcagataaggcagcctatgagctatcgccacgctcggtgcaatggttggcatcataaagaaaggcacagtgcatccccactgccccc

SEQ ID NO: 23529 - DNA, 600 bp, Chicken  19866894236791_2
caggggtgggccgatggagtggtgcctaacgaggcacagagatctcatccctggctgcacggatatcgatcgcactccatcgcagacctgccctaaaccggtctcattcctaaaccgttctgcataaagcattggcgtcacaagtcagaagggaaaggtaatgagagatcgcaatcagccccagcacaaaaggaaggagattcctgcatgattctggctggagatggaaaagctctgccggtgggatcagctctgtgctgctgtgccatgagtgcctttcctgcgtcgcagagcacgcartcyggccctggggaataattcccagcgtagaaaaagtaattccaaaaaagccccaaacaaaacaaaatttcaagggggggaaggaagcgggcaggaaaaaacacagatgctctccagacaactgcaggacggaggccagatctgtatgcgggcactgcactgggaggccaatccttctggaagttgatgatttaggcacctgaattggaacaagcagatttccacgaggggctgagccacccccatgaggagggtgctgtgtcctcacaactgctggggggaagctgagctcagctgaag

SEQ ID NO: 23530 - DNA, 600 bp, Chicken  19866894236791_3
gggtgggccgatggagtggtgcctaacgaggcacagagatctcatccctggctgcacggatatcgatcgcactccatcgcagacctgccctaaaccggtctcattcctaaaccgttctgcataaagcattggcgtcacaagtcagaagggaaaggtaatgagagatcgcaatcagccccagcacaaaaggaaggagattcctgcatgattctggctggagatggaaaagctctgccggtgggatcagctctgtgctgctgtgccatgagtgcctttcctgcgtcgcagagcacgcartcyggccctggggaataattcccagcgtagaaaaagtaattccaaaaaagccccaaacaaaacaaaatttcaagggggggaaggaagcgggcaggaaaaaacacagatgctctccagacaactgcaggacggaggccagatctgtatgcgggcactgcactgggaggccaatccttctggaagttgatgatttaggcacctgaattggaacaagcagatttccacgaggggctgagccacccccatgaggagggtgctgtgtcctcacaactgctggggggaagctgagctcagctgaagaca

SEQ ID NO: 23531 - DNA, 600 bp, Chicken  19866894236791_4
accttaaagcgcacccatccccaccccctgctgtgggctgatggcctccagcagctcaggctgcccacccaacctggccttgggcaccaacagggatggggcacccccagctctgggtaaggtgagatctgggtgtctctttttcagactggattccacagatcgacgtgttactctcaccaggaaggtgtaagattgcccagcccatgtgtgttgttcagccttgctctctgccctacacaaacaggacctggagccacgaaattgaggcgagctgatgaaactcaccccccaaatcawttctcactgctgccgtttcgggttgacctggggtgtgatgcacagcgccggagcttcatttggtgctactggtcctcctccatgctaccaacacaaaccacgagcccaaaaggcagcgcatgagcagacaggaacaatgaagccacttgttctcaggaagcatttgacctctgccaacagccaaccggatccagacaaggaccggggcagccggagcagctcatggcagagcgaaggcagaaccgtatcgcctggcaccgagctgctatttccagcacttacatctcatcctcacgtcag

SEQ ID NO: 23532 - DNA, 600 bp, Chicken  19866894236794_1
gggtacagggatcaggatctgcattactggagaaaggcaggtaatgcacccatcttcagtggggcaaggagaatccagagaactgcagggacagtcagtttctgggacagtcacagtgcaggcaatattagaagtcatttattggcatatgaagaagaaggtattaattgggaagagtcagcatttgtgccagaccaaaccgattgcctcctatgattaaatgacttcattgtggatgaggggaaagcttgagtttagcaaggctttttgcacagtctcacacagaatccttgcacccartttcagatgttgcagtctggatgggcaaaatcctgaccagattgacgttcagaagggctcatactgtgcctgaaagttggttacaaatcgaattctacaggggctatcctgtctgatgtctttgtcagtgacctacatgcagaggcagaatgcagtactttcaggctatcactgatgataytaaatggacggtgtagttgatgtgcttgagatcaggcctgccattcagagagattcatgtttgctagaagatagggccaacaggagccccatgaaagtcagcgtggacaaatatagcat

SEQ ID NO: 23533 - DNA, 600 bp, Chicken  19866894236794_2
catttgtgccagaccaaaccgattgcctcctatgattaaatgacttcattgtggatgaggggaaagcttgagtttagcaaggctttttgcacagtctcacacagaatccttgcacccartttcagatgttgcagtctggatgggcaaaatcctgaccagattgacgttcagaagggctcatactgtgcctgaaagttggttacaaatcgaattctacaggggctatcctgtctgatgtctttgtcagtgacctacatgcagaggcagaatgcagtactttcaggctatcactgatgataytaaatggacggtgtagttgatgtgcttgagatcaggcctgccattcagagagattcatgtttgctagaagatagggccaacaggagccccatgaaagtcagcgtggacaaatatagcatcctgcacctcagatgggctaggcccctgcacaggctaaggmatggctggcttggtaacagctctgctggaaagggcatgtaaggccttgtgttgggctgtgtgtgagttagcggcaaaccctggcagcagtgaaagtacattagaccatatgaacagcagcacaggtggcagatgaaggga

SEQ ID NO: 23534 - DNA, 600 bp, Chicken  19866894236794_3
ttgacgttcagaagggctcatactgtgcctgaaagttggttacaaatcgaattctacaggggctatcctgtctgatgtctttgtcagtgacctacatgcagaggcagaatgcagtactttcaggctatcactgatgataytaaatggacggtgtagttgatgtgcttgagatcaggcctgccattcagagagattcatgtttgctagaagatagggccaacaggagccccatgaaagtcagcgtggacaaatatagcatcctgcacctcagatgggctaggcccctgcacaggctaaggmatggctggcttggtaacagctctgctggaaagggcatgtaaggccttgtgttgggctgtgtgtgagttagcggcaaaccctggcagcagtgaaagtacattagaccatatgaacagcagcacaggtggcagatgaagggaattggtaattccctttcactcagtgctcattagaccacatctggcagagtgagtccagtcttgacttccccagcgtatgaaagcttttgataaacccaaatgaatccactggaagaacagaaagatagctgggggtttaagcatgaaatttaagagcaga

SEQ ID NO: 23535 - DNA, 600 bp, Chicken  19866894236794_4
gtggagttactgagaagataaggttgggctctcagccaaagaatgagagatgaaggtcataaataatcagggaggcttgggctagataaagggaaaaaaaaaaaaagatactatatggacaattagtcagcaaaatggttcacctagtggggttttgctgtctcagaagggaggattttaagactgagctgtacaaagacattagcaatctggtctgggatttgatgacctcccaaagtcccttccactcacagttattttatgataactcttaggatggatcttctccattttctctgyggagtttcctccatttaatacagtttgtaggcttaaagacactgcatatactgctgttcaccccacagactaggaaaattatataaaaggttggcccccaattttagctagacaagatctaaggcaatttgagcaaaaacatcaggaggcaggatgcgacaagagttttttttattgtttttaatacgagtgaattgattaaaagatctgaaatgttgtaaagcaatatacatactgaataaataatatgcacagaagagtcatgtctacattgtaacactggctagtactcmgaatact

SEQ ID NO: 23536 - DNA, 600 bp, Chicken  19866894236794_5
tctctgyggagtttcctccatttaatacagtttgtaggcttaaagacactgcatatactgctgttcaccccacagactaggaaaattatataaaaggttggcccccaattttagctagacaagatctaaggcaatttgagcaaaaacatcaggaggcaggatgcgacaagagttttttttattgtttttaatacgagtgaattgattaaaagatctgaaatgttgtaaagcaatatacatactgaataaataatatgcacagaagagtcatgtctacattgtaacactggctagtactcmgaatacttaaaataaatccagtgacgttggataaaagtccataaaaatgctatcctgtcttcccttgtatgaaattgttcaagtataaaaaaatccaatacagtgtaaaatattaaattccatgtcggtcaagagtaaaaattgcaagtattgtagtttcacaggacaatgtaaagcagcatttcctagcaaagggaaaaatagtcagtctacatacagatgagtgagaaaactgcactaatgtacttgagaggtctacatgaagaactatgagagggaaaaagaatgaactagcaatat

SEQ ID NO: 23537 - DNA, 600 bp, Chicken  19866894236796_1
tacaagagtgctgcaccatctgactgcaggtggcgaggaacaagcccagggagcagatagcaaatttcacaaaacaaagattctgtttccatggagacatcttcgggactaagttatcttgagacatcacaggctctttgtaaatttggacagacaaaagctaaacacagacaatgttaaccacagtcatttccatgtaaaaattatttaagtggtactactaatcttgatttttatgcaaatggccagcaggagttcagctgccttttgcacagttcccttgcacagaaacacactacrttgccagagattattttgtatgagaggagattaaaaggaagagtgaactgggatatacgaacgcatccaaatgtactgactggaagctcagaagacacatgccctgcacagcagtcacgtaaagtcagctgcccaaaatgcagctcctcagcagggctggcacgaagcatggcaagtagctcaagtggttctcaggtattgtacccctccagtccttcactgcaaatgtgctgcccttcacatgatgaggcacaggagctgacagggcactcgctactaatccaagcaactcagaggcag

SEQ ID NO: 23538 - DNA, 594 bp, Chicken  19866894236798_1
cctggaaagtccaaaacaatgatccaaattttcacttgtaaagtcaaaatactacaggggccgggacttccagtacacaaagctcttctcagacatccattaatccttgaaacagcctgtgaggtaggaaattgtgttattattcccacttcactggtggtgattctgaagcactgagattatttgatttgccacaggctacacagcaaatccatgccagacccaggattaagattcagcagcacctgacatctgcgcaaatactcaagcccctgtctcttctacttctagaacacacayttacttgtgtacttgcctattttcaccaggtctcctgatgagcactcacaacaaaccagtgtatgtcactgtgtagtacaaggatgtgcacacataccaagaacgtacacatctaatgaagacacaggcaaaaacatgtcagtttggagaaatctccccagaagtctaaaggaagatctgcacagcaaactttcaacagttatatattgcttactggaaatttataacttcaaacaaagtagtaaattctcagtagtagtttacttcgtgttatgccaacacacagaaagaaca

SEQ ID NO: 23539 - DNA, 599 bp, Chicken  19866894236800_1
  misc_feature (1)..(130): n is any nucleotide
nnnnnnnnnnnnnnnnnnnnnnnnnnnnnnnnnnnnnnnnnnnnnnnnnnnnnnnnnnnnnnnnnnnnnnnnnnnnnnnnnnnnnnnnnnnnnnnnnnnnnnnnnnnnnnnnnnnnnnnnnnnnnnnnnnagtgctttaaagtgaaattaattatgcctctgaacattaattaagtttttgcaaacatcttgacaggattcagtattgtcaatgcattatggatgagtaattacaaacactattcctatgtgatttttaacatgctgttaaggaaccttcctttttaaggtatgacattycttgttcatttgagagagctagtgtgaggctggtaggctttagatggctaactgtttaaaaataatgaatatgctgtatttgtgatgaagtctatgaattttgcattcttcttattaggtacacagtaatgctaatattttttgcagacacagatattttaatcttcttttaacttttatcctttgtccaggagaaacatggggactttccagactttgctgcctatttagtcttctgtatcataacgtgaactgttgcctgcagttaatacccactttccattatttttgctattctt

SEQ ID NO: 23540 - DNA, 600 bp, Chicken  19866894236809_1
atggggaacaaagtgtcagattttaaccctaagtctttggaacaccaaacctaagagaaaggaacttaagtcccacaaagggagcttcggcagaagagggaaggaaatgggcactgttattagagaagaggtgctttgtgactgtgaaacaaaacatgagaggaagcagcttaatgatgtcttcagattcatataggcatggaaggaacgtttaaaacccttggggaagctcgtggttccttgaagaagtggaatgtgaatcagagtatcgaagatgatgctcaaatggtgtgcgttaasacatgggctcagcattaattgtatgaggtcaaggaaatgtgactgtcgggatccattgtgtttaagggtaacaaacaaaaaacttgtgccacaaaggccaaggcaagagacagttctgcaacctgctcatacccatggaggctttggatcatggtggatcatgggctggagagcagtaacccatggctgtattcaagttgccaagattttcaggatttgatagtaagtcagacacatttttgaagttgtttgcaagagcagagccagccaatgaaccgctgacatgcagccatacaggta

SEQ ID NO: 23541 - DNA, 600 bp, Chicken  19866894236809_2
tgggctcagcattaattgtatgaggtcaaggaaatgtgactgtcgggatccattgtgtttaagggtaacaaacaaaaaacttgtgccacaaaggccaaggcaagagacagttctgcaacctgctcatacccatggaggctttggatcatggtggatcatgggctggagagcagtaacccatggctgtattcaagttgccaagattttcaggatttgatagtaagtcagacacatttttgaagttgtttgcaagagcagagccagccaatgaaccgctgacatgcagccatacaggtacawgtgtttgtcttaccaagtttctccacagcttccacacacacgctgggatacattcccactctgtacgtagcaatcaggatgagagcatttgtcttcaccactatgaggcctccctctgcctagataatacagacgggacaaagttagatgcatgcacatacatactgccttacaatttaggctactcacagacatctcctttgccagtatctttgaggacaaggaagacaaatactctcgaatcctaagaaaggatgcagccagaacagtagctgtgcatgctttgaagactggacacac

SEQ ID NO: 23542 - DNA, 600 bp, Chicken  19866894236814_1
aagcaaagaagtttaaatactcgtcagagaggtgagttgcaagcattagccatcatccagaagtgggagcgagacaggactgtggttttccttttgtctgtgtttgatggtgttccctttccctcccatgtttccaccaactcaaaccatcagctgcagctgcagggatgcttgtctgcatttgatgtttgtctgccagtgggctggctggagtctgatcacagaagctgtttctgtggagcagccaggcacaggttgcattctgcctgctctaattaatgatgcactcagtgttccctrtttgtggtgcccacgtcccccaccgtccaggttccacagagcccacctctctggttgagcagactgtagctgcaggtgtgtgcaatgagcacttccacccaaactgctggggggtccgagctgcagtgtagctacactgactgatctctcactgctttcaccctcctgcaaaccctttgccatcatgggattgccccagcctgataccagcatcaccaagagcagaagctgccctgcccttcctgcactgccctgctcactaccattagcctcgcatgagcagtatctcctctaatggac

SEQ ID NO: 23543 - DNA, 600 bp, Chicken  19866894236814_2
gtcccccaccgtccaggttccacagagcccacctctctggttgagcagactgtagctgcaggtgtgtgcaatgagcacttccacccaaactgctggggggtccgagctgcagtgtagctacactgactgatctctcactgctttcaccctcctgcaaaccctttgccatcatgggattgccccagcctgataccagcatcaccaagagcagaagctgccctgcccttcctgcactgccctgctcactaccattagcctcgcatgagcagtatctcctctaatggacattgcatgtgttastgcactgagtatgagagtgttgttgcatgtgtttccaagcattgccaactgtatcgcagactgtccttgtgtgtrtacccccaggagatgtttttttcatctgttaatctggcttcaggcgtacagagcatactaacccagaagggtttccatagagctccttcatcctggatgaagctaaactgtcccaagtttcatgggcaaccagatgaccaggggtagcagggtattcagatacagtccagatcctgcccaccgttgctagtgttcttctgaggtctgttagttaattgttaatcc

SEQ ID NO: 23544 - DNA, 600 bp, Chicken  19866894236814_3
cacttccacccaaactgctggggggtccgagctgcagtgtagctacactgactgatctctcactgctttcaccctcctgcaaaccctttgccatcatgggattgccccagcctgataccagcatcaccaagagcagaagctgccctgcccttcctgcactgccctgctcactaccattagcctcgcatgagcagtatctcctctaatggacattgcatgtgttastgcactgagtatgagagtgttgttgcatgtgtttccaagcattgccaactgtatcgcagactgtccttgtgtgtrtacccccaggagatgtttttttcatctgttaatctggcttcaggcgtacagagcatactaacccagaagggtttccatagagctccttcatcctggatgaagctaaactgtcccaagtttcatgggcaaccagatgaccaggggtagcagggtattcagatacagtccagatcctgcccaccgttgctagtgttcttctgaggtctgttagttaattgttaatccttaataagaagacccttactatatataaactttgtggagggtattctcagacctccttcagaagttggttttttc

SEQ ID NO: 23545 - DNA, 600 bp, Chicken  19866894236817_1
aacagaaagcatgttacactgcttgatagcaacacaaaatgtgacgctgtgctaaaagaaacgcctggatgaatgtttggtagctgtgcctgcagagcagcaagttctctatcaggcagaaagcagcccacaaaatatttctgcaacactgcactttgctgcgcgtggcaaaaacgccacgaggtgttattttttcataaagctgtggtgaacttggcgtgcgctcgggatcagacggtctgttccttatgtgagattctgagctgaatactcacagattggaggccaaggttttggagyggctcccagccagcttcctcccaagctaggctttctacaggtccagagagcaaaatgactgcaygagaactgagctcttcttaacatctcaggctatctggcaacaaatgaccaaaggtccaatggactggaccctggaacagggctttgtgcagagcagcacagtgcctacacttgcataactcctcgcagtccaacttcccactcaccggaaagcagcagcaggctgcagcactaatgattccttctcttctaaagcctcaagactttatgtgctttgaggagattgaagataagcat

SEQ ID NO: 23546 - DNA, 600 bp, Chicken  19866894236817_2
ctggatgaatgtttggtagctgtgcctgcagagcagcaagttctctatcaggcagaaagcagcccacaaaatatttctgcaacactgcactttgctgcgcgtggcaaaaacgccacgaggtgttattttttcataaagctgtggtgaacttggcgtgcgctcgggatcagacggtctgttccttatgtgagattctgagctgaatactcacagattggaggccaaggttttggagyggctcccagccagcttcctcccaagctaggctttctacaggtccagagagcaaaatgactgcaygagaactgagctcttcttaacatctcaggctatctggcaacaaatgaccaaaggtccaatggactggaccctggaacagggctttgtgcagagcagcacagtgcctacacttgcataactcctcgcagtccaacttcccactcaccggaaagcagcagcaggctgcagcactaatgattccttctcttctaaagcctcaagactttatgtgctttgaggagattgaagataagcattaaattttgattaaagggacactgccaacttatgttaagcttagaatttaggcttttctaacag

SEQ ID NO: 23547 - DNA, 600 bp, Chicken  19866894236817_3
ttggtagctgtgcctgcagagcagcaagttctctatcaggcagaaagcagcccacaaaatatttctgcaacactgcactttgctgcgcgtggcaaaaacgccacgaggtgttattttttcataaagctgtggtgaacttggcgtgcgctcgggatcagacggtctgttccttatgtgagattctgagctgaatactcacagattggaggccaaggttttggagyggctcccagccagcttcctcccaagctaggctttctacaggtccagagagcaaaatgactgcaygagaactgagcycttcttaacatctcaggctatctggcaacaaatgaccaaaggtccaatggactggaccctggaacagggctttgtgcagagcagcacagtgcctacacttgcataactcctcgcagtccaacttcccactcaccggaaagcagcagcaggctgcagcactaatgattccttctcttctaaagcctcaagactttatgtgctttgaggagattgaagataagcattaaattttgattaaagggacactgccaacttatgttaagcttagaatttaggcttttctaacaggcaggtgtaggt

SEQ ID NO: 23548 - DNA, 600 bp, Chicken  19866894236817_4
tggtagctgtgcctgcagagcagcaagttctctatcaggcagaaagcagcccacaaaatatttctgcaacactgcactttgctgcgcgtggcaaaaacgccacgaggtgttattttttcataaagctgtggtgaacttggcgtgcgctcgggatcagacggtctgttccttatgtgagattctgagctgaatactcacagattggaggccaaggttttggagyggctcccagccagcttcctcccaagctaggctttctacaggtccagagagcaaaatgactgcaygagaactgagctyttcttaacatctcaggctatctggcaacaaatgaccaaaggtccaatggactggaccctggaacagggctttgtgcagagcagcacagtgcctacacttgcataactcctcgcagtccaacttcccactcaccggaaagcagcagcaggctgcagcactaatgattccttctcttctaaagcctcaagactttatgtgctttgaggagattgaagataagcattaaattttgattaaagggacactgccaacttatgttaagcttagaatttaggcttttctaacaggcaggtgtaggtg

SEQ ID NO: 23549 - DNA, 600 bp, Chicken  19866894236817_5
ggtagctgtgcctgcagagcagcaagttctctatcaggcagaaagcagcccacaaaatatttctgcaacactgcactttgctgcgcgtggcaaaaacgccacgaggtgttattttttcataaagctgtggtgaacttggcgtgcgctcgggatcagacggtctgttccttatgtgagattctgagctgaatactcacagattggaggccaaggttttggagyggctcccagccagcttcctcccaagctaggctttctacaggtccagagagcaaaatgactgcaygagaactgagctcytcttaacatctcaggctatctggcaacaaatgaccaaaggtccaatggactggaccctggaacagggctttgtgcagagcagcacagtgcctacacttgcataactcctcgcagtccaacttcccactcaccggaaagcagcagcaggctgcagcactaatgattccttctcttctaaagcctcaagactttatgtgctttgaggagattgaagataagcattaaattttgattaaagggacactgccaacttatgttaagcttagaatttaggcttttctaacaggcaggtgtaggtgg

SEQ ID NO: 23550 - DNA, 599 bp, Chicken  19866894236822_1
  misc_feature (1)..(21): n is any nucleotide
nnnnnnnnnnnnnnnnnnnnnatgtagtgtataagtgatgggagaaaaggagtccactttgttattctgaaactggactgcaaagcagggctggtattccaacactggtgatctgctttttattgcagatagtaattcccaggaacacaaagactttcagtgaagatgaaacacagcagatctttacttaaatgctctcactttcctttattgtgttacagtgaaaaagctttagtgtatttatattacctgagaaaataatgaaaaataaaaagaaaacaacaacaacaacaaaaaaamcaactctctttcccagttcattactgagggagaaaactttttcacatgactttgaattgtattactatccgttttatgcatccatgttgaacaataccatttcttagacatgttgacacattatacatttatttgcagttttatttccctttaacagagactgacattcatttaaagatggctttcatttctttgctttttagattagaaataagccataacatctatgtaataataatcccttgtgctcctattaggggaaagtgtgatgagtaacggcatctactttctcccttaat

SEQ ID NO: 23551 - DNA, 600 bp, Chicken  19866894236822_2
tatgcaagtctgatctctgcaacagaaacagacttcccaacactggtaacactgctaattcttctcaagatttgtctgtttaaacttacttgttcatgctatctgcataatgaattgtcctcttcaaggtgataaattatttattagagtaatgaacaaatcaatcaggagagctagataactgaaacacacagcttttggcaaagtaaggtctgaatgtttacattcatcacagaagagccttgacttcgatgcagacctttcagaggtgtttattaatcatgatctcattacagtttyggtgaactaatagctttttatttgtcagaattgtttctgatgatgtagtactgttgtcccagaaatacagatctatgtcgsttcttccaaaaagtaatgcctcctatttatttccatggaaactaaaacagatacaaagaacacaataacactgtttgacagaggaaattctcagctacaaaatgctatttttcaacctagtcatcatcattaaccacttcacacagatgtgatgatctagacattctttkttttgtggtgcaagtgctgtgcatggccattcagaatgtggcttctctt

SEQ ID NO: 23552 - DNA, 600 bp, Chicken  19866894236822_3
aaacttacttgttcatgctatctgcataatgaattgtcctcttcaaggtgataaattatttattagagtaatgaacaaatcaatcaggagagctagataactgaaacacacagcttttggcaaagtaaggtctgaatgtttacattcatcacagaagagccttgacttcgatgcagacctttcagaggtgtttattaatcatgatctcattacagtttyggtgaactaatagctttttatttgtcagaattgtttctgatgatgtagtactgttgtcccagaaatacagatctatgtcgsttcttccaaaaagtaatgcctcctatttatttccatggaaactaaaacagatacaaagaacacaataacactgtttgacagaggaaattctcagctacaaaatgctatttttcaacctagtcatcatcattaaccacttcacacagatgtgatgatctagacattctttkttttgtggtgcaagtgctgtgcatggccattcagaatgtggcttctctttcacatcactgtcatcactgctgaaatgcaccacctggtgcctcactgtgctcacatacactgattggtctccataaacat

SEQ ID NO: 23553 - DNA, 600 bp, Chicken  19866894236822_4
atgcagacctttcagaggtgtttattaatcatgatctcattacagtttyggtgaactaatagctttttatttgtcagaattgtttctgatgatgtagtactgttgtcccagaaatacagatctatgtcgsttcttccaaaaagtaatgcctcctatttatttccatggaaactaaaacagatacaaagaacacaataacactgtttgacagaggaaattctcagctacaaaatgctatttttcaacctagtcatcatcattaaccacttcacacagatgtgatgatctagacattctttkttttgtggtgcaagtgctgtgcatggccattcagaatgtggcttctctttcacatcactgtcatcactgctgaaatgcaccacctggtgcctcactgtgctcacatacactgattggtctccataaacattcagcaagtgtcaatggatgtcaatcggtgccactgtttccaaattgaggaattcagtgacaccttttcttcacacacttttatgtcattcaccattctgtcaggctgcccttctgatgccatctgttataaaataacaaatactggaatactgttgggatggatcaacc

SEQ ID NO: 23554 - DNA, 600 bp, Chicken  19866894236827_1
atcctgaagggggaatgcatatctcacagactaggaatacagaaaataatgttaagtgctggctgcaggacatcaaactagcctgctagtcaaaagagttaattctcccactgtgtttagtattgatgtggccttgctctgagtattgttaaggtccccaaatgcttccagagaagggcagcaggactggtaagaagggctggaatttactccttgtgaggacaggctgaggcgtcccatctggagaacaggaggcctcattgctttctgcagctcccttaggaggggaagcaaagggaratgttaggctctgctccttccttgtgggccscgatacaacacatggaaatggcactgagctgcacaagaggaggatcagactgaacactsrgagaaacattgtttccctgatggtgatcgaacactggaacaggcttcctaacaggatggttgatggctcctgaagtcagttttctaagggcattacccagatgccccttataacatgctttaactcttgctcagccccaaagtggtcaggtagctggatttgatctctgaaggtcctttccagcttaactattccattttttcttctgt

SEQ ID NO: 23555 - DNA, 600 bp, Chicken  19866894236827_2
taggaatacagaaaataatgttaagtgctggctgcaggacatcaaactagcctgctagtcaaaagagttaattctcccactgtgtttagtattgatgtggccttgctctgagtattgttaaggtccccaaatgcttccagagaagggcagcaggactggtaagaagggctggaatttactccttgtgaggacaggctgaggcgtcccatctggagaacaggaggcctcattgctttctgcagctcccttaggaggggaagcaaagggaratgttaggctctgctccttccttgtgggccscgatacaacacatggaaatggcactgagctgcacaagaggaggatcagactgaacactsrgagaaacattgtttccctgatggtgatcgaacactggaacaggcttcctaacaggatggttgatggctcctgaagtcagttttctaagggcattacccagatgccccttataacatgctttaactcttgctcagccccaaagtggtcaggtagctggatttgatctctgaaggtcctttccagcttaactattccattttttcttctgttcttatcctgttcttacctctgtgcaattat

SEQ ID NO: 23556 - DNA, 600 bp, Chicken  19866894236827_3
caaaagagttaattctcccactgtgtttagtattgatgtggccttgctctgagtattgttaaggtccccaaatgcttccagagaagggcagcaggactggtaagaagggctggaatttactccttgtgaggacaggctgaggcgtcccatctggagaacaggaggcctcattgctttctgcagctcccttaggaggggaagcaaagggaratgttaggctctgctccttccttgtgggccscgatacaacacatggaaatggcactgagctgcacaagaggaggatcagactgaacactsrgagaaacattgtttccctgatggtgatcgaacactggaacaggcttcctaacaggatggttgatggctcctgaagtcagttttctaagggcattacccagatgccccttataacatgctttaactcttgctcagccccaaagtggtcaggtagctggatttgatctctgaaggtcctttccagcttaactattccattttttcttctgttcttatcctgttcttacctctgtgcaattatgctgactgcttgcgtggagtttccagccaatagataaatgttgtggttgctatgagttt

SEQ ID NO: 23557 - DNA, 600 bp, Chicken  19866894236827_4
aaaagagttaattctcccactgtgtttagtattgatgtggccttgctctgagtattgttaaggtccccaaatgcttccagagaagggcagcaggactggtaagaagggctggaatttactccttgtgaggacaggctgaggcgtcccatctggagaacaggaggcctcattgctttctgcagctcccttaggaggggaagcaaagggaratgttaggctctgctccttccttgtgggccscgatacaacacatggaaatggcactgagctgcacaagaggaggatcagactgaacactsrgagaaacattgtttccctgatggtgatcgaacactggaacaggcttcctaacaggatggttgatggctcctgaagtcagttttctaagggcattacccagatgccccttataacatgctttaactcttgctcagccccaaagtggtcaggtagctggatttgatctctgaaggtcctttccagcttaactattccattttttcttctgttcttatcctgttcttacctctgtgcaattatgctgactgcttgcgtggagtttccagccaatagataaatgttgtggttgctatgagtttt

SEQ ID NO: 23558 - DNA, 600 bp, Chicken  19866894236827_5
ttaatcagtgattaagactttattacactgtgtaaaacactgcaggcaatgcgtaagtgtgctgggctttagagctagaccttcctaagaggggataaggatctgttttcagcttcacagcaaaattcctgcctgaaatctgtccggatgcacaaccatagcaggctggaaaagacctgtaaaaatacccagtatttaaccatcagcccacccccaccatgcccactgcccacatccctccgtgccatgtccacacggttcttgaacgccttcagggatggtgcctccaccacctccctrggcagcctgtgccactgcctcaccgctctgtctgagaagagttttttactaatatccgactgaaacccccttgtgtgcactttgagaccattacctctcattctcagtgatctccccctgcctggagacttttgttttttttaaataaattccttccttccatggctaccctcaaagacttctgagaagcatgtgggtaggggcgcacccctatgcctaggattctgtgaggctactaggagttcagctagcagacatacaaattttaatgcgaaaactgggtcttcccaggggaagtag

SEQ ID NO: 23559 - DNA, 600 bp, Chicken  19866894236828_1
gaccagtatgatcgctgctaaaacaggcaaggtaagctaccttgggtcacttaaaaccatatgtagcttgtcaaataggatggaatttaaaaaggaaaaaaggaggattctggttgttaaggaattaagtctgattgttgtaagtctttcgaagtgaggtgtctttaatttttaacatttacatctgctgtgaatgctgttaagcagttccgagccgtagatagcacagcaggaagtagttttactggctttagaaattcatataactctttttctcctgaatgatttgttttctacaaygttacaacgccacgttgaattgaaaggtgttacagatcattttcccaaattccctatttccagagagcaactaaagaagggtgatctctttgctagttaattcattaatggcaaacattctcatcttaccagaccactcagaagaaggcatagaaagcatttctgtaggaagaagttttttcacacagagggtggtgacrcactggaacaggttgcccagggaggctgtggatgccccatccctggaggcattcaaggccaggctggatgtggctctgggcagcctggtctggtggttgg

SEQ ID NO: 23560 - DNA, 600 bp, Chicken  19866894236828_2
taagcagttccgagccgtagatagcacagcaggaagtagttttactggctttagaaattcatataactctttttctcctgaatgatttgttttctacaaygttacaacgccacgttgaattgaaaggtgttacagatcattttcccaaattccctatttccagagagcaactaaagaagggtgatctctttgctagttaattcattaatggcaaacattctcatcttaccagaccactcagaagaaggcatagaaagcatttctgtaggaagaagttttttcacacagagggtggtgacrcactggaacaggttgcccagggaggctgtggatgccccatccctggaggcattcaaggccaggctggatgtggctctgggcagcctggtctggtggttggcaaccctacacatagcaggggagttgaaactcgataatcattgcggtccttttcaacccaggccattccatgattctatcattctgtgaggagagtgttttcttttttgtattattggccctctgagcagggaactgggtagggagactscatgatagggagaaaccccatctgtatggggggttgtcagccccggggca

SEQ ID NO: 23561 - DNA, 600 bp, Chicken  19866894236828_3
tagaaagcatttctgtaggaagaagttttttcacacagagggtggtgacrcactggaacaggttgcccagggaggctgtggatgccccatccctggaggcattcaaggccaggctggatgtggctctgggcagcctggtctggtggttggcaaccctacacatagcaggggagttgaaactcgataatcattgcggtccttttcaacccaggccattccatgattctatcattctgtgaggagagtgttttcttttttgtattattggccctctgagcagggaactgggtagggagactscatgatagggagaaaccccatctgtatggggggttgtcagccccggggcagggcctcagagcattcctgtgccgcactgtaacgcgcagcctgacgccatcacctgggcatggcctgattcagcctttgcacagggagagagagcagaatcatctggattttttgttctcctaatctcacctttcccagcaggtcccagcccatctctggacccyctgctctccctgaagcaaggccattttgctaaagagagtaataagaatgataatagaaagatatcttgcaaggtttgttagccca

SEQ ID NO: 23562 - DNA, 600 bp, Chicken  19866894236828_4
ttccatgattctatcattctgtgaggagagtgttttcttttttgtattattggccctctgagcagggaactgggtagggagactscatgatagggagaaaccccatctgtatggggggttgtcagccccggggcagggcctcagagcattcctgtgccgcactgtaacgcgcagcctgacgccatcacctgggcatggcctgattcagcctttgcacagggagagagagcagaatcatctggattttttgttctcctaatctcacctttcccagcaggtcccagcccatctctggacccyctgctctccctgaagcaaggccattttgctaaagagagtaataagaatgataatagaaagatatcttgcaaggtttgttagcccagaaggaggcagcaaggagcctgactccagggcagactgggttaggtgttggcaagatttgctgagatctgaggatgggtttctatgccaaggactgtttgtgtgtttacaagaaaggataatttggcacagcactgaaattgtcaccaaggcttggaccagggcttgcctcttccagtacgcctcatgcagaattgggtcttgaggaaataaatg

SEQ ID NO: 23563 - DNA, 600 bp, Chicken  19866894236834_1
gatacgacagaaggaagggatgccatacaaagggacctgaacaagcttgagaagtgaacctaataaccttcagtagcgtcaagtctaagatgttgttgctcttgcattgaggtaacccccaatatgtatacagaatgggagaagaactccttgagaagtagccctgagaaggacttggagatcctggtgggtaaaaagctggatgtgagctagcagtgtgctcttgcagcccggaaggccaacagtaccttgtgttgcatcaaaagaaggtgaaggaggagactgtcactctctgctctsttcttgtaaggctccacttgaagtactgcatccaggcctggggatgcctgttcaggaaggatgcagagctgttggaacaggttcagaggagggccatgaaaacgatcagagggctggagtgcccctcctacaaagacaggctgagggagctgggatcattcagcctggaaaagacaaggctctgggccttccagtacttaaaaggagcttgtaaattggaaggagacagactttttacatgatcagagagtgacaggaccagggaaaatggttttaagctaaaagaggggtgatttaggt

SEQ ID NO: 23564 - DNA, 600 bp, Chicken  19866894236835_1
tagattttttttatagtacatggttttatgaagtgtaatatttttatagcagattgacgatctttggactttctatattgttacacacaactgcttgcaaacaagctctttgctcccctttttctgtgcactgtgtgcagtgctgctgctgctatgccgctggcctcagctgctgctcccacaagctgacagtgttgtgaagccacacgaacagactgcaaaaagctgtgagcgggtgggagggctggcagtgtgctgggactggccggagggctggaggctgagctgaagcagggcaarggctgggctgtctgtggggagatgcctcactgctcacctgtctgtactctgtcgttttggcttggcatgcctatcttttccttcctttataaagaaataaaaaaaaaaaaaaaaagagagagagagagaaaaagggatcccgcttggttttgcatgatgcctttccagtccccaagcactggccatgcttgaatgccaggtgtggtgatggtaaagacacagttttacctttccaatcagactggagctgttacctctgtgcaacctgaatactcaagcctctaatttgggaagcaacga

SEQ ID NO: 23565 - DNA, 599 bp, Chicken  19866894236837_1
  misc_feature (1)..(23): n is any nucleotide
nnnnnnnnnnnnnnnnnnnnnnnagcctctcctcgtgtgtcgtttgccgtgggcctcattcactcaccacatcagctggaattaagggctggccaggagtcgcagctgaagatgtaacgctgctcttcatggaaacatgcagatgataatttcagcagaaaggctgaaatgcagcaaaggggaggtgaaggcagccctggaatataaatgtctcttgcctgtggcggagcacgagccaattggctatgaactgcactgcctaagaatattaaacatctgaagggacagaggcagagaatkaaaggaactttaaaaagccggttatgctgctggcaaacctacccctcaaatccccattttaatcctttcacatctattgcagcacaccgaaggttacgagacttaataattctggtcttcagcagcgttgcacagagacgacgacctattttctttggaaaaatatctctaagtcgtatgaacacgyacacacgcacagacattacagcacactccccaaagcacragtgctgcagggtaattagctccagtttcaagaggcagatgccttaaattaaaaacaaggggaaacggatgtc

SEQ ID NO: 23566 - DNA, 600 bp, Chicken  19866894236837_2
aaggcagccctggaatataaatgtctcttgcctgtggcggagcacgagccaattggctatgaactgcactgcctaagaatattaaacatctgaagggacagaggcagagaatkaaaggaactttaaaaagccggttatgctgctggcaaacctacccctcaaatccccattttaatcctttcacatctattgcagcacaccgaaggttacgagacttaataattctggtcttcagcagcgttgcacagagacgacgacctattttctttggaaaaatatctctaagtcgtatgaacacgyacacacgcacagacattacagcacactccccaaagcacragtgctgcagggtaattagctccagtttcaagaggcagatgccttaaattaaaaacaaggggaaacggatgtcctgcaatattacaactgattaccagtttgtttggttttgtttttcaaccacccccatcaatttcagaggaccgttatagggaaaaaatacacacgaagactcatcttgtgatgtaccacaacacgcgtcttagcgtgttgttttggcgtgtcttttggcgacctgcagcactgagtgcttaacacaca

SEQ ID NO: 23567 - DNA, 600 bp, Chicken  19866894236837_3
gagcacgagccaattggctatgaactgcactgcctaagaatattaaacatctgaagggacagaggcagagaatkaaaggaactttaaaaagccggttatgctgctggcaaacctacccctcaaatccccattttaatcctttcacatctattgcagcacaccgaaggttacgagacttaataattctggtcttcagcagcgttgcacagagacgacgacctattttctttggaaaaatatctctaagtcgtatgaacacgyacacacgcacagacattacagcacactccccaaagcacragtgctgcagggtaattagctccagtttcaagaggcagatgccttaaattaaaaacaaggggaaacggatgtcctgcaatattacaactgattaccagtttgtttggttttgtttttcaaccacccccatcaatttcagaggaccgttatagggaaaaaatacacacgaagactcatcttgtgatgtaccacaacacgcgtcttagcgtgttgttttggcgtgtcttttggcgacctgcagcactgagtgcttaacacacatacccatttttcagggcacctccttaaaaccttcattca

SEQ ID NO: 23568 - DNA, 600 bp, Chicken  19866894236843_1
cgaaaagacttggttacaatcaaacaggttggaaatcacccagagaaagagcaagagaaagagagatggttttattctagttgtagagtccttcattatacagaaacgacagtttatttcatcccattaacaagagtgacagtagatcacggactgcagcacagctaccaccagcaccgagacgtccacccacagctctggggtaacacaggaacccaactgcacacagcagagaatcgaacagtcggctcaaaaactcaacaccgggatgtggttcacttctcagggtgtgtgtgtgtrtrtatatatatatgtatattgatattctttccctactcaagcgtttcctaatatccacatggaagcacaaaacggctttaaacacctggacatatatagattttccatctttatatatatatatatttatagatatttataacagtaaagatatgtttctcattactacaacttcaactcctggaagcggctgggaatcaataacagctttactacagtcacggccgataggtgtgtgtcacaaatacaaagagaacaaaccacgggtgagagctgagtcagaacactccgggacagaac

SEQ ID NO: 23569 - DNA, 600 bp, Chicken  19866894236843_2
aaaagacttggttacaatcaaacaggttggaaatcacccagagaaagagcaagagaaagagagatggttttattctagttgtagagtccttcattatacagaaacgacagtttatttcatcccattaacaagagtgacagtagatcacggactgcagcacagctaccaccagcaccgagacgtccacccacagctctggggtaacacaggaacccaactgcacacagcagagaatcgaacagtcggctcaaaaactcaacaccgggatgtggttcacttctcagggtgtgtgtgtgtrtrtatatatatatgtatattgatattctttccctactcaagcgtttcctaatatccacatggaagcacaaaacggctttaaacacctggacatatatagattttccatctttatatatatatatatttatagatatttataacagtaaagatatgtttctcattactacaacttcaactcctggaagcggctgggaatcaataacagctttactacagtcacggccgataggtgtgtgtcacaaatacaaagagaacaaaccacgggtgagagctgagtcagaacactccgggacagaacag

SEQ ID NO: 23570 - DNA, 479 bp, Chicken  19866894236844_1
gcacaaattgttccacacacacttttcttttcatggaggggggggggggaaaccaacaaaatgaaccattttaaaaagccttaatctacttttggcattaagaaaatcctcctaccgtattgctaaagctcagccacattagacactgaggaagatgatgtttttctcgaggtttggtttggtttctttttcctttgttgcggttgacaaatgcaagaatggatactgcattgacgtggttgcacctctctgcttggcagctcagctttcaccaccacgagcccagggctgtgctggggmttgcatggctgctgcactcagggcaatgcagttctccccagagctctgctgctgaggctgtaaccgtatttaaaagaaggcagtttgtggccgagcccttaggtgkacacatctgtgcacctcacctgaagtctgtacaccccatggagctgcattgctgccacttgaggagctctgca

SEQ ID NO: 23571 - DNA, 373 bp, Chicken  19866894236844_2
tcctcctaccgtattgctaaagctcagccacattagacactgaggaagatgatgtttttctcgaggtttggtttggtttctttttcctttgttgcggttgacaaatgcaagaatggatactgcattgacgtggttgcacctctctgcttggcagctcagctttcaccaccacgagcccagggctgtgctggggmttgcatggctgctgcactcagggcaatgcagttctccccagagctctgctgctgaggctgtaaccgtatttaaaagaaggcagtttgtggccgagcccttaggtgkacacatctgtgcacctcacctgaagtctgtacaccccatggagctgcattgctgccacttgaggagctctgca

SEQ ID NO: 23572 - DNA, 600 bp, Chicken  19866894236853_1
gtatagagttagtaacttggacttcctatctctgccattgttagtcaggtttttcagatccaatagcatgctatcagtactcttctgagcattttaatttgtaagcactgctttgaaggaactggatgcagtggaattggatacagttatgtcaccacccaacgtgtctatctcttcaggctgtgccaattgccttggaacattgttctgggagcttctcttatctggctacccactgtgactcctaaatcccagttagagccactgctttccaagacacggtctccagacttctaaacrtgacctacattctttgttccttctgaatgacctttcatacagctgtctcaaaaagcatgttcaaataatcctggcttactaaaggatgtcaaattccctatagaaaaagtgttttttctttgcattatttagtgctctatgcattttaagtcatctgcattttactagtcatgctgttaaatattccttcagatcactcataaatttatgtagtagtagaggacagcattttccaatacatggggcttgattccccaaggcaggagtgccaagggtatctttggaagtcattctacttca

SEQ ID NO: 23573 - DNA, 600 bp, Chicken  19866894236865_1
atttcctgataagcagcactaggcaggccactttacctcttctgatctctgtttctttacctaagagagaagaataatgacagtattccagctgcacatatgtgtagttgttggaatttcctgagatagcaagcccaaattcagcctttttcaaattaaaaaataatttaaaaaatgaaaaatctcaacaggcaatgaaggaaaggattcagcatttctcattgcccagtcttgtttccttaccgtacgctggtgactcacatacctctgagaacgaggaaacagggagctaaggcacaycagtacacctgaactctgccctgtttgagcagtgattcagtcttcccacaccaaacgtaagcatgacacacgatttctgaaacagagtacctcagaactgcagcacagctccctgctgaaggaaactcatgtgcaggtgtgtgatattgaatgaggaaccctgtgcacatgtggtactacaacactgagacccaactccctgatgcagcccctgatgttttttctttattcctctttcacagtgaacttgagaaccattaggatcagatacagatacagactttgacttacccaccacaa

SEQ ID NO: 23574 - DNA, 600 bp, Chicken  19866894236871_1
gcacatggagatgctgctttttgctcctttgagaatgaacaggagggggtcaaaaggtaacttggtgtcacaaaacaagatacagtaccttgactgctgtccactcctgtgggtcagggggctaacaaggaataggctgtctgaaatctgggcacttcaggctgtcatatccaccttaagcatataagtgaagtgaaaaaaatgcaaacacaattttagtcatcttcacacagtgcacacacacatatataaaaatacatatgcacagcacaacatctctttggaagccacagaactgtrtaaagctataactatgctccggagctttctacagtaacgcacaaatttatacacatgcactcagagagaatcactgaccaaaagagaggatgatggcatgacagcaatcaatttacacacagcacatagccagtcctgctgggggcaagagggcaaaaaaatagagtgcttgttctagagcattcataaccaaaatacaggatgtaaggaggccaaggaaactgaagcctcagaaatactgtagaaaaggaaacaggtgtcgtctcccagaacttctaatctataaaatggaaacttttg

SEQ ID NO: 23575 - DNA, 600 bp, Chicken  19866894236880_1
tggaagtgttgcatagacaggttaacaaaccagctcctgtctcaaaagtaaatacaaaagtcactttgctcgctgtgacttggagatggcaaagaaaaagatattaaaaagtgtgcatttctaaacaaacatatgttgtcttctagaactacatccttgtaccaatttacattgaatttattacatctgttctgggtggtttgaccaaccacattgcggaatttattctgccagtaacttttaaaaagaaaagtatctacatgaagacagcttcactgtttatattttgttgcaaatacrtgaattgtgagttctttttcactggaagaagtcgatcagtacctggaatagatggctgaactgaaacctgtggtgtgtctgctaggtattaggaatttaacattgataacttctgctttaaaggacattaatgcagttccatttcctcagtgagatttaggattattagtgagctgatttaaatctcaagctcaaaaaggtgagaatagccactagtttttaatacagtatctaatagaatgtggttactacttaaaatgcttaagatcttttttcacgtgggttattggcacaagctag

SEQ ID NO: 23576 - DNA, 600 bp, Chicken  19866894236885_1
caaacataagcgatgaaacctttcactaggtaacttcaaacacaacattcacatgtctaagggcactaagtgcatttaaaaaataaaataaaataaaataaaataaaataaaataaaattttagcacagggctgacctacatgcctgttctaaaaagaacttgttggacattcttcattgtccatggcagaatatgtacatttagggttgaaaaaggctgttaccaccatgcttttgctttgcatcatagtacgtagaagcagcccttcacctcaccaccattctttcagtcagatttckactattacatccacattaaaatcagacacactagctaactagctcggacagtagtgacaaaagtttcaggctgaggacttcaaggaagtccatgggctgtgtgctgggcttttctgtccctggttccatggtttttggagattcagcattactgctggcccttccttgggaaggcggtgtttttttacagtgtgcaacagaccccaaagcactcagactataaactagccccctgtacacaaagctcagatacgagcccttagaagtgttattttttccctatttctcatgcattttaat

SEQ ID NO: 23577 - DNA, 600 bp, Chicken  19866894236885_2
tggttccatggtttttggagattcagcattactgctggcccttccttgggaaggcggtgtttttttacagtgtgcaacagaccccaaagcactcagactataaactagccccctgtacacaaagctcagatacgagcccttagaagtgttattttttccctatttctcatgcattttaatgctatctttgctttcttgaagtgtgacaagatttcatattgcagtctcccttccctccttctgaatggttagaaagggactcaaacacagttgagaaatgacgtcacactccagcccaamtgtacagtcagaggagataggtagacattcacaaagcctaccaaagctctaaactttcctgagaaaaagtgtacttaaacaaatgcttatatcattttctgaacgaagtgttggataaactccaaaattctctcattttaacgaggaaagcttataattatgtggtaactcatctttgacttagattcctgggtgttatcttcctgtaaagcaaaaaacactccagtgagctcccaacaaaattgaagccagtgggattgtcaccatcaacatcaaataattgggatttcaatccatgct

SEQ ID NO: 23578 - DNA, 600 bp, Chicken  19866894236886_1
agtgtttctgttggtttcaatgcatttcagactggattcacacttatctctgcatatgaacagagaattttctcttatagtagactaattaccacaaaggaagaatggcccagaaattagagaataaacttaagcttcactacaacactcatatttttcattacctttctctctcacttaggcttttgttgtttatttttttcaacggtagtaacaaatcccagcatgctgtaactactgcttccagagctctattacttcatagctgcattaatgtttctctgtgcctatgttaatgcmgtctgtgtatttatgtctgcgctatcttaggttaaactccttctggacgaagaaatgtctgaaccatttatgctgtctgagtagtactggacgtattttcagacaagaagggccatggaatcttttacctgcagtcctgatcacataaccactagagcatttgtctagaatacaaaggttctctgcaacagtaacaaaatgaaacaacttctgtcatgaaaaaacctgtgtgtcacaggactccatacaatcatatcctctggactgatgtgcaggcaactgaaagagcaggtgcacttg

SEQ ID NO: 23579 - DNA, 600 bp, Chicken  19866894236886_2
ctagaatacaaaggttctctgcaacagtaacaaaatgaaacaacttctgtcatgaaaaaacctgtgtgtcacaggactccatacaatcatatcctctggactgatgtgcaggcaactgaaagagcaggtgcacttgttcctctaaatatcttttactgttactgaagggatcaagggaaataccacctgagttctctgtccttcaactaactgccctgaaactcctgaaacttttttgttcaggactggcagagactgcattcttcaaactattgtattcattggatagtccaagacacyaattgcacgtgtttagaaattatttcctatcctgcagtgttttgtgaatctctcagtctttacaacgaataaaaccactgtattattttcagattcgtgcctatgttaagaatttacttttacagtgaaatgttctgaacttataaccaggagagacaagtaaaactgaaaagtgttgctctgcacagaacagtaaggtatgcttttagatgacatagatggttccattacaactcattaacttctgcatagagggtttccagctgtaaagggaatacatattttgtctactgaggctct

SEQ ID NO: 23580 - DNA, 542 bp, Chicken  19866894236893_1
ggtgtgaggtgagccgaccatactgctgtgtgtcagttctcacccagcagaacactgagttcctctctaatctagttctgtctgaattatgggagtttaacacaaacaaaacaaaacaaccccaaccatttaacatagtgttaaaaatgcagaagtaagctcagctcctttggccatcaatggattagggagaaacacgtgatgtgggatgaggcaaagtgaagtaaaacaacacacaacttgcgagaggagttccactgcagaacaagaattctacatcataccatagccatggcatcrtttatcctttcttcttgtgaaaacacaaatattccttgcaaatacccagctgagattagcaaactctcaagcacagtgctgtccgkcccagagaaaggacaagatcatcttttgcataatccttgcttaaggctaatgttttccaagtcactgaaggggaagaacctttaacattttcagctcaggatgccagacatgatttcccttcccacacagttttacaaatttgcattcagtttcat

SEQ ID NO: 23581 - DNA, 456 bp, Chicken  19866894236893_2
ttatgggagtttaacacaaacaaaacaaaacaaccccaaccatttaacatagtgttaaaaatgcagaagtaagctcagctcctttggccatcaatggattagggagaaacacgtgatgtgggatgaggcaaagtgaagtaaaacaacacacaacttgcgagaggagttccactgcagaacaagaattctacatcataccatagccatggcatcrtttatcctttcttcttgtgaaaacacaaatattccttgcaaatacccagctgagattagcaaactctcaagcacagtgctgtccgkcccagagaaaggacaagatcatcttttgcataatccttgcttaaggctaatgttttccaagtcactgaaggggaagaacctttaacattttcagctcaggatgccagacatgatttcccttcccacacagttttacaaatttgcattcagtttcat

SEQ ID NO: 23582 - DNA, 600 bp, Chicken  19866894236896_1
ggatggtgaccccaccactccctgggcagctgtgccactgcatcaccactctttcagtgaagaaatagtccctaatatccatgctgatatccataatccaatctgatttcctaatatccgacattcaatcatggggctgttttcctcagaactgacttgtaagtgaaacttgaaaccgtgggagcagttctgcttgctggacacttggggcagatttggcattttgtgcagatttggaaaagcccatcccatgccctcaggctgtgtgggatcctcagctcaagggtatgcttcccacarggagaaggttggtgcagcttagctcagatttgaagagtggtctttcattgggagctcatatcccagaagagttttagggaaacactgtgccctgctggaggatgctgaaaatttagccttatgggcttggaggaaagcagaaagtcttgatatgagccttccccctttggcaggaggctgatgggaccaggacgcctgcttcagtttgtcgctaatgtgaatctctgggcaggatgaggctgttggargctcctggatggaccaatggrtcacagctgtcccagaycatcatggcacaaa

SEQ ID NO: 23583 - DNA, 600 bp, Chicken  19866894236896_2
ccatgccctcaggctgtgtgggatcctcagctcaagggtatgcttcccacarggagaaggttggtgcagcttagctcagatttgaagagtggtctttcattgggagctcatatcccagaagagttttagggaaacactgtgccctgctggaggatgctgaaaatttagccttatgggcttggaggaaagcagaaagtcttgatatgagccttccccctttggcaggaggctgatgggaccaggacgcctgcttcagtttgtcgctaatgtgaatctctgggcaggatgaggctgttggargctcctggatggaccaatggrtcacagctgtcccagaycatcatggcacaaatcctcccyggcgcagccarcttggctgcatggggatctgctgcagcaggaatggtgttggctcttcctttcccggccctacaacctcgcaagcactgagagctgggggctggagctggaactgcagatagcagaagaggtcactccagcaattcaatgctttttgcactatccctctttgcatacttgagcaaaggccatggccaatctgaccttttgagagacctgatttaaraattcctgcccagt

SEQ ID NO: 23584 - DNA, 600 bp, Chicken  19866894236896_3
gatcctcagctcaagggtatgcttcccacarggagaaggttggtgcagcttagctcagatttgaagagtggtctttcattgggagctcatatcccagaagagttttagggaaacactgtgccctgctggaggatgctgaaaatttagccttatgggcttggaggaaagcagaaagtcttgatatgagccttccccctttggcaggaggctgatgggaccaggacgcctgcttcagtttgtcgctaatgtgaatctctgggcaggatgaggctgttggargctcctggatggaccaatggrtcacagctgtcccagaycatcatggcacaaatcctcccyggcgcagccarcttggctgcatggggatctgctgcagcaggaatggtgttggctcttcctttcccggccctacaacctcgcaagcactgagagctgggggctggagctggaactgcagatagcagaagaggtcactccagcaattcaatgctttttgcactatccctctttgcatacttgagcaaaggccatggccaatctgaccttttgagagacctgatttaaraattcctgcccagtacgagtcgagaggagccgttg

SEQ ID NO: 23585 - DNA, 600 bp, Chicken  19866894236896_4
tatgcttcccacarggagaaggttggtgcagcttagctcagatttgaagagtggtctttcattgggagctcatatcccagaagagttttagggaaacactgtgccctgctggaggatgctgaaaatttagccttatgggcttggaggaaagcagaaagtcttgatatgagccttccccctttggcaggaggctgatgggaccaggacgcctgcttcagtttgtcgctaatgtgaatctctgggcaggatgaggctgttggargctcctggatggaccaatggrtcacagctgtcccagaycatcatggcacaaatcctcccyggcgcagccarcttggctgcatggggatctgctgcagcaggaatggtgttggctcttcctttcccggccctacaacctcgcaagcactgagagctgggggctggagctggaactgcagatagcagaagaggtcactccagcaattcaatgctttttgcactatccctctttgcatacttgagcaaaggccatggccaatctgaccttttgagagacctgatttaaraattcctgcccagtacgagtcgagaggagccgttgtaagagctctgaagcag

SEQ ID NO: 23586 - DNA, 600 bp, Chicken  19866894236896_5
ttggtgcagcttagctcagatttgaagagtggtctttcattgggagctcatatcccagaagagttttagggaaacactgtgccctgctggaggatgctgaaaatttagccttatgggcttggaggaaagcagaaagtcttgatatgagccttccccctttggcaggaggctgatgggaccaggacgcctgcttcagtttgtcgctaatgtgaatctctgggcaggatgaggctgttggargctcctggatggaccaatggrtcacagctgtcccagaycatcatggcacaaatcctcccyggcgcagccarcttggctgcatggggatctgctgcagcaggaatggtgttggctcttcctttcccggccctacaacctcgcaagcactgagagctgggggctggagctggaactgcagatagcagaagaggtcactccagcaattcaatgctttttgcactatccctctttgcatacttgagcaaaggccatggccaatctgaccttttgagagacctgatttaaraattcctgcccagtacgagtcgagaggagccgttgtaagagctctgaagcagctctagggtctgcctgtcaagt

SEQ ID NO: 23587 - DNA, 600 bp, Chicken  19866894236896_6
tagctcagatttgaagagtggtctttcattgggagctcatatcccagaagagttttagggaaacactgtgccctgctggaggatgctgaaaatttagccttatgggcttggaggaaagcagaaagtcttgatatgagccttccccctttggcaggaggctgatgggaccaggacgcctgcttcagtttgtcgctaatgtgaatctctgggcaggatgaggctgttggargctcctggatggaccaatggrtcacagctgtcccagaycatcatggcacaaatcctcccyggcgcagccarcttggctgcatggggatctgctgcagcaggaatggtgttggctcttcctttcccggccctacaacctcgcaagcactgagagctgggggctggagctggaactgcagatagcagaagaggtcactccagcaattcaatgctttttgcactatccctctttgcatacttgagcaaaggccatggccaatctgaccttttgagagacctgatttaaraattcctgcccagtacgagtcgagaggagccgttgtaagagctctgaagcagctctagggtctgcctgtcaagtctgatcaaact

SEQ ID NO: 23588 - DNA, 410 bp, Chicken  19866894236896_7
tgaggctgttggargctcctggatggaccaatggrtcacagctgtcccagaycatcatggcacaaatcctcccyggcgcagccarcttggctgcatggggatctgctgcagcaggaatggtgttggctcttcctttcccggccctacaacctcgcaagcactgagagctgggggctggagctggaactgcagatagcagaagaggtcactccagcaattcaatgctttttgcactatccctctttgcatacttgagcaaaggccatggccaatctgaccttttgagagacctgatttaaraattcctgcccagtacgagtcgagaggagccgttgtaagagctctgaagcagctctagggtctgcctgtcaagtctgatcaaactccggaaagccaaaatgtgcccatct

SEQ ID NO: 23589 - DNA, 600 bp, Chicken  19866894236908_1
tagcaagaatcttatatatcacatcatgtgagttcaaatttctgttcttattcatctcagtcatggttgacttcttcggctcctcccaaatttcagattttataattttatactgggactcaggttgtaagatgtcttctcttcatgttacttttttcagttctttttaaggggtgcagtgatatagagttttctcccagaggagattaatttttgcaaaactgtctgcctacagggtatccgcaatttagcagtttgtgtcagaaagtggggaaaaaaaaatacatatatatatatatwggtctgaactctacaacaattacaacaattgaagaagcccagtgtttctcttttttttttctcttcatttttctccatctagagctatctgtccatatggatggatgtctctttttgtttatcgctatctctcttcatttctttttttcttcctttacgaatcaacatgcatcattgtccagttttacattattgtcttccaactaaaccaactagtaatgttttcaaagatgggctgattgggaattaaaacaatctgaagaacaataaaaaacagactggggagatgaaagaattatc

SEQ ID NO: 23590 - DNA, 600 bp, Chicken  19866894236913_1
gggctctaaaggcttaccattgccatacctgtatgatctgtgtgtatgagctcaggctctgtgggaaaatcctgctgttatttccaaagttgtgcagctctgccaggcctcgccagctttgcgcgtagcgtcgtttggctgcaggcattcagtgctggcgactgccagaaaatgcctcctcggcttctgcagctggggctgcctgtatgtaacttcatatggaaatggtgcatgtaggagccaggaggtgaggcacactcagcacttctgcaattctggctgagcgaagctgtgctgctrttaagcactcyggattgctcaggctcttttaagtatattggcataaactttcccatsatatcagaagtgttttgttgagaaactgagaaggtaagaaccggaggaatgtgtttttycccttcagccatggctgcwtcattaaggttttaaactaggcgaagagaaggtgttcctagtcaccaaaatgctaagacacaggaaagaaggaatgcgcagctcacatttagaaaacaaatacggacttccccttaagaggggaagaaatccgccttgatggaaaatattattatatcaaatatt

SEQ ID NO: 23591 - DNA, 600 bp, Chicken  19866894236913_10
tttgctgctctcgatgctaataattagcagtggtacccggtgtacgtaagttttttctgacctaggcctatggtgacttgttagcgtgagcattgagctgcttcacttgtttgtgctcacacagaataattgyatctgtgacaakgtgaaattcattytgaaaaggaaatggtgtgagttggaacttctgtttctcagcgagtaacttctgcttgaggatagctgaaaggtgatagcagcaagagcggggttggtctcttctcactggtgacaggtgacaggatgaggggaaatggcctyaagttgtgccacggtaagtttaggttggatatcatgaaaatctttacagaaagggttgttaagcactggaatgggctccccagggargtggttgagtcaccatccctggatgtrtttaaaaaccatttggatgtggtgctcagggacatgatttagcagagggttgttagasttagggtactatggttaggtcatggttggactcgatgatctttaaggtcttttccaacctgagtgattctatgattcagtgatttcaaacattaatcatgagtaagtgatttgataagctattaagtg

SEQ ID NO: 23592 - DNA, 600 bp, Chicken  19866894236913_11
gagcattgagctgcttcacttgtttgtgctcacacagaataattgyatctgtgacaakgtgaaattcattytgaaaaggaaatggtgtgagttggaacttctgtttctcagcgagtaacttctgcttgaggatagctgaaaggtgatagcagcaagagcggggttggtctcttctcactggtgacaggtgacaggatgaggggaaatggcctyaagttgtgccacggtaagtttaggttggatatcatgaaaatctttacagaaagggttgttaagcactggaatgggctccccagggargtggttgagtcaccatccctggatgtrtttaaaaaccatttggatgtggtgctcagggacatgatttagcagagggttgttagasttagggtactatggttaggtcatggttggactcgatgatctttaaggtcttttccaacctgagtgattctatgattcagtgatttcaaacattaatcatgagtaagtgatttgataagctattaagtgcataaaacaaccagaaatcactgatttttttttaaagcaagaccacttctgaagcctgttttacagaatttcatccttaaaatgctg

SEQ ID NO: 23593 - DNA, 600 bp, Chicken  19866894236913_12
gctcacacagaataattgyatctgtgacaakgtgaaattcattytgaaaaggaaatggtgtgagttggaacttctgtttctcagcgagtaacttctgcttgaggatagctgaaaggtgatagcagcaagagcggggttggtctcttctcactggtgacaggtgacaggatgaggggaaatggcctyaagttgtgccacggtaagtttaggttggatatcatgaaaatctttacagaaagggttgttaagcactggaatgggctccccagggargtggttgagtcaccatccctggatgtrtttaaaaaccatttggatgtggtgctcagggacatgatttagcagagggttgttagasttagggtactatggttaggtcatggttggactcgatgatctttaaggtcttttccaacctgagtgattctatgattcagtgatttcaaacattaatcatgagtaagtgatttgataagctattaagtgcataaaacaaccagaaatcactgatttttttttaaagcaagaccacttctgaagcctgttttacagaatttcatccttaaaatgctgacagtatttgttgttgatttctcctac

SEQ ID NO: 23594 - DNA, 600 bp, Chicken  19866894236913_13
tgtgagttggaacttctgtttctcagcgagtaacttctgcttgaggatagctgaaaggtgatagcagcaagagcggggttggtctcttctcactggtgacaggtgacaggatgaggggaaatggcctyaagttgtgccacggtaagtttaggttggatatcatgaaaatctttacagaaagggttgttaagcactggaatgggctccccagggargtggttgagtcaccatccctggatgtrtttaaaaaccatttggatgtggtgctcagggacatgatttagcagagggttgttagasttagggtactatggttaggtcatggttggactcgatgatctttaaggtcttttccaacctgagtgattctatgattcagtgatttcaaacattaatcatgagtaagtgatttgataagctattaagtgcataaaacaaccagaaatcactgatttttttttaaagcaagaccacttctgaagcctgttttacagaatttcatccttaaaatgctgacagtatttgttgttgatttctcctactgaagagtgaacatcttttgaaaagttattattttttccaatgtgaagtgaaaaggct

SEQ ID NO: 23595 - DNA, 600 bp, Chicken  19866894236913_2
gcttaccattgccatacctgtatgatctgtgtgtatgagctcaggctctgtgggaaaatcctgctgttatttccaaagttgtgcagctctgccaggcctcgccagctttgcgcgtagcgtcgtttggctgcaggcattcagtgctggcgactgccagaaaatgcctcctcggcttctgcagctggggctgcctgtatgtaacttcatatggaaatggtgcatgtaggagccaggaggtgaggcacactcagcacttctgcaattctggctgagcgaagctgtgctgctrttaagcactcyggattgctcaggctcttttaagtatattggcataaactttcccatsatatcagaagtgttttgttgagaaactgagaaggtaagaaccggaggaatgtgtttttycccttcagccatggctgcwtcattaaggttttaaactaggcgaagagaaggtgttcctagtcaccaaaatgctaagacacaggaaagaaggaatgcgcagctcacatttagaaaacaaatacggacttccccttaagaggggaagaaatccgccttgatggaaaatattattatatcaaatatttgtagaatgcc

SEQ ID NO: 23596 - DNA, 600 bp, Chicken  19866894236913_3
tctgtgggaaaatcctgctgttatttccaaagttgtgcagctctgccaggcctcgccagctttgcgcgtagcgtcgtttggctgcaggcattcagtgctggcgactgccagaaaatgcctcctcggcttctgcagctggggctgcctgtatgtaacttcatatggaaatggtgcatgtaggagccaggaggtgaggcacactcagcacttctgcaattctggctgagcgaagctgtgctgctrttaagcactcyggattgctcaggctcttttaagtatattggcataaactttcccatsatatcagaagtgttttgttgagaaactgagaaggtaagaaccggaggaatgtgtttttycccttcagccatggctgcwtcattaaggttttaaactaggcgaagagaaggtgttcctagtcaccaaaatgctaagacacaggaaagaaggaatgcgcagctcacatttagaaaacaaatacggacttccccttaagaggggaagaaatccgccttgatggaaaatattattatatcaaatatttgtagaatgccctatraagagaacgtggcagactctagcttgggttaaccacgggag

SEQ ID NO: 23597 - DNA, 600 bp, Chicken  19866894236913_4
ctttgcgcgtagcgtcgtttggctgcaggcattcagtgctggcgactgccagaaaatgcctcctcggcttctgcagctggggctgcctgtatgtaacttcatatggaaatggtgcatgtaggagccaggaggtgaggcacactcagcacttctgcaattctggctgagcgaagctgtgctgctrttaagcactcyggattgctcaggctcttttaagtatattggcataaactttcccatsatatcagaagtgttttgttgagaaactgagaaggtaagaaccggaggaatgtgtttttycccttcagccatggctgcwtcattaaggttttaaactaggcgaagagaaggtgttcctagtcaccaaaatgctaagacacaggaaagaaggaatgcgcagctcacatttagaaaacaaatacggacttccccttaagaggggaagaaatccgccttgatggaaaatattattatatcaaatatttgtagaatgccctatraagagaacgtggcagactctagcttgggttaaccacgggagcacacatggggaaaggctttgtttggcagctcagagcaatgctgtgtttgctgctctcg

SEQ ID NO: 23598 - DNA, 600 bp, Chicken  19866894236913_5
tggctgcaggcattcagtgctggcgactgccagaaaatgcctcctcggcttctgcagctggggctgcctgtatgtaacttcatatggaaatggtgcatgtaggagccaggaggtgaggcacactcagcacttctgcaattctggctgagcgaagctgtgctgctrttaagcactcyggattgctcaggctcttttaagtatattggcataaactttcccatsatatcagaagtgttttgttgagaaactgagaaggtaagaaccggaggaatgtgtttttycccttcagccatggctgcwtcattaaggttttaaactaggcgaagagaaggtgttcctagtcaccaaaatgctaagacacaggaaagaaggaatgcgcagctcacatttagaaaacaaatacggacttccccttaagaggggaagaaatccgccttgatggaaaatattattatatcaaatatttgtagaatgccctatraagagaacgtggcagactctagcttgggttaaccacgggagcacacatggggaaaggctttgtttggcagctcagagcaatgctgtgtttgctgctctcgatgctaataattagcagtg

SEQ ID NO: 23599 - DNA, 600 bp, Chicken  19866894236913_6
gctcaggctcttttaagtatattggcataaactttcccatsatatcagaagtgttttgttgagaaactgagaaggtaagaaccggaggaatgtgtttttycccttcagccatggctgcwtcattaaggttttaaactaggcgaagagaaggtgttcctagtcaccaaaatgctaagacacaggaaagaaggaatgcgcagctcacatttagaaaacaaatacggacttccccttaagaggggaagaaatccgccttgatggaaaatattattatatcaaatatttgtagaatgccctatraagagaacgtggcagactctagcttgggttaaccacgggagcacacatggggaaaggctttgtttggcagctcagagcaatgctgtgtttgctgctctcgatgctaataattagcagtggtacccggtgtacgtaagttttttctgacctaggcctatggtgacttgttagcgtgagcattgagctgcttcacttgtttgtgctcacacagaataattgyatctgtgacaakgtgaaattcattytgaaaaggaaatggtgtgagttggaacttctgtttctcagcgagtaacttctgct

SEQ ID NO: 23600 - DNA, 600 bp, Chicken  19866894236913_7
acggacttccccttaagaggggaagaaatccgccttgatggaaaatattattatatcaaatatttgtagaatgccctatraagagaacgtggcagactctagcttgggttaaccacgggagcacacatggggaaaggctttgtttggcagctcagagcaatgctgtgtttgctgctctcgatgctaataattagcagtggtacccggtgtacgtaagttttttctgacctaggcctatggtgacttgttagcgtgagcattgagctgcttcacttgtttgtgctcacacagaataattgyatctgtgacaakgtgaaattcattytgaaaaggaaatggtgtgagttggaacttctgtttctcagcgagtaacttctgcttgaggatagctgaaaggtgatagcagcaagagcggggttggtctcttctcactggtgacaggtgacaggatgaggggaaatggcctyaagttgtgccacggtaagtttaggttggatatcatgaaaatctttacagaaagggttgttaagcactggaatgggctccccagggargtggttgagtcaccatccctggatgtrtttaaaaaccatttggatg

SEQ ID NO: 23601 - DNA, 600 bp, Chicken  19866894236913_8
ttaagaggggaagaaatccgccttgatggaaaatattattatatcaaatatttgtagaatgccctatraagagaacgtggcagactctagcttgggttaaccacgggagcacacatggggaaaggctttgtttggcagctcagagcaatgctgtgtttgctgctctcgatgctaataattagcagtggtacccggtgtacgtaagttttttctgacctaggcctatggtgacttgttagcgtgagcattgagctgcttcacttgtttgtgctcacacagaataattgyatctgtgacaakgtgaaattcattytgaaaaggaaatggtgtgagttggaacttctgtttctcagcgagtaacttctgcttgaggatagctgaaaggtgatagcagcaagagcggggttggtctcttctcactggtgacaggtgacaggatgaggggaaatggcctyaagttgtgccacggtaagtttaggttggatatcatgaaaatctttacagaaagggttgttaagcactggaatgggctccccagggargtggttgagtcaccatccctggatgtrtttaaaaaccatttggatgtggtgctcaggg

SEQ ID NO: 23602 - DNA, 600 bp, Chicken  19866894236913_9
aaatccgccttgatggaaaatattattatatcaaatatttgtagaatgccctatraagagaacgtggcagactctagcttgggttaaccacgggagcacacatggggaaaggctttgtttggcagctcagagcaatgctgtgtttgctgctctcgatgctaataattagcagtggtacccggtgtacgtaagttttttctgacctaggcctatggtgacttgttagcgtgagcattgagctgcttcacttgtttgtgctcacacagaataattgyatctgtgacaakgtgaaattcattytgaaaaggaaatggtgtgagttggaacttctgtttctcagcgagtaacttctgcttgaggatagctgaaaggtgatagcagcaagagcggggttggtctcttctcactggtgacaggtgacaggatgaggggaaatggcctyaagttgtgccacggtaagtttaggttggatatcatgaaaatctttacagaaagggttgttaagcactggaatgggctccccagggargtggttgagtcaccatccctggatgtrtttaaaaaccatttggatgtggtgctcagggacatgatttagca

SEQ ID NO: 23603 - DNA, 600 bp, Chicken  19866894236915_1
taaaggggcaggatttggcctttggctgtcattgtgctgtctcactggctggctcttttctaggaatatggaatactgtgttcagagtacatctcagttctgtcccttgataccggagttgataggaaaagattcttgtgcgtagcttgttgcagcagctctatggcaatttattaccaaaagaaaaaaaaaaaaggaaaaaatagttacccaagtttaaaagataggtagtggaatataagcacagacaataaaagagttctcacaagcagtcaccataatttgatcttgcctcagtaytgtcccaggcttgatgcagacttgctacagagaattaatgctccatagcagttctacaaaacaggcgttgtataaatcctgctgtggaagatgcacttcattttaattccctttctacatatagaagcatctgcacatttctgtcacttttagcaaaagttgtctgatggttacctagcttcataaaaagattcctttttttgccggtgcctctctctgtatagatgtgtacataggtgtatattaccagctatatggtgtatatgcaaaaacggggaacaaaaaaccaaaccactgcca

SEQ ID NO: 23604 - DNA, 600 bp, Chicken  19866894236923_1
tgttacgggggacagctcttctaaaagcactaaatttagaattcctagtttaggtttctccaaagttgatattagttcttctaaatttgaacaggattctccattatctaaaggagatgtgactcttaccaaatatcaaatgaatgcagctgaatctgaatcaaaaatatcatcatctgctgatgtgaaaatttcatttacagatcttgagattttgaatggagagggttcttatgaacaaggaattacgaaaccagaaggagtaaaaacgccacctgctgagctgtctggtggtgacayagaatatactgttaaaatacctaagttccgaaaaccaaagtttggattttcttggtcaaagggaaaaccatcagaaagtgatattggttccaaagtggaatctgaattttccacagaaaagatgacatctggagatgtttgatattgaaaatccatctcagattcctgaatctgagtttggcctaaaaatgcaaaagacctcacctgaatttgttacgggtgcatcaaagttggatgttagtctgccatcaccagagattaccttgccaaaattagaaatggatatccatgacccagagt

SEQ ID NO: 23605 - DNA, 600 bp, Chicken  19866894236926_1
ccagcatccatctgttctggtagcatcctgaacccttcatctcacagtgcctcccctttgttgtgtggatggcactgctgtcagcaatgccctatgtatcccagctgctggttcttataggcagtataaaataataacagtaataataacaataagtggcttctctggatttaatttagcttgttctatgagaaaagtggtatgcagttttcattccccaaaaccttttgtaaaactggtgcttccataggtggatctctttactctgagtcatctgatggccagaaggaatctgagacwgcatctttagaggcctctaaaagtgttcatcgagtttcctagcttttaaaattttgttactctcttgccattgaccttacaggaactatggattcgatcactggagccagactaatgatttttattgcagagccgctgagctagggttaatgttatcagcgttatttgccattggagcaactgtatattttggtactcttaatcctgacatgacattgggttgttggtgttgggctgcatgtatatgtggtgcacatatatgcacacatgttcagtgtttccatagttcagaattaaaat

SEQ ID NO: 23606 - DNA, 600 bp, Chicken  19866894236929_1
agtttctattattttaattattccagactagaaaagaaagattgagagatacagatgatttacaaaattccctatgaaagtgaagcaagagaaaaaaatttatcttgagtttccagatctgcaatccagatctcctgctgtgaccttagtgttactctagtttccctgaattttcactgtaatcactcagtgttgctggctttgctatcacctcagtacagactactaccttcagtccatatcatgactatgtcttgtcactggttaaatcccaccagctcttgtgccacaactgctttygctccatgctcttacagggtgctcatctggtcatggtattwttgcacaactgggcagctctcctatgaatcttgtttgtcctggatttgatgcacaactaaaatgtcattcctgcaaagcagcaactcagcaaacagaaatcatttagtccagcaaatctatatcagttcagaatttgacctgtgtgtgcgtaacacagaagacagagcaagaggaagggaggacatacacatgaacacttgcctgaacccaaaagataacagggttagagaaacccaacgctttgtcagcatctgaaag

SEQ ID NO: 23607 - DNA, 600 bp, Chicken  19866894236929_2
ttgagagatacagatgatttacaaaattccctatgaaagtgaagcaagagaaaaaaatttatcttgagtttccagatctgcaatccagatctcctgctgtgaccttagtgttactctagtttccctgaattttcactgtaatcactcagtgttgctggctttgctatcacctcagtacagactactaccttcagtccatatcatgactatgtcttgtcactggttaaatcccaccagctcttgtgccacaactgctttygctccatgctcttacagggtgctcatctggtcatggtattwttgcacaactgggcagctctcctatgaatcttgtttgtcctggatttgatgcacaactaaaatgtcattcctgcaaagcagcaactcagcaaacagaaatcatttagtccagcaaatctatatcagttcagaatttgacctgtgtgtgcgtaacacagaagacagagcaagaggaagggaggacatacacatgaacacttgcctgaacccaaaagataacagggttagagaaacccaacgctttgtcagcatctgaaagaaaatgttgttcttcagagtgaaccttaactaactgttcaa

SEQ ID NO: 23608 - DNA, 600 bp, Chicken  19866894236933_1
gcagggttggaaagggtgacgtggtgccgaaatgcacggtgaggagtggctctgactgaatgctaaatgcacacatataacgcatcttgttagagcaggttgacaggcaggcaccttttgttgattcccaggataaaggtgacacgggtttgcttttttttccctcttggaggctttgggaaggggctgcatgcttctaatggcccagcacaggagtcacagtgctccctttctcccagcagggcaagggacaggagtcatggagcttccatcattgagctagtacttctgggggaaacrttattatgtaaagggtaactgcgaatggagctgagccccacgtattgactcttcctttgtagctccagtgagctggcagtctgtggctcaccttctgacaccaggtaaaagtaaccataaaatgggacagaacttctgggatccatacagtggtgtggcggggaaacaatcaccatgcccagggcaactgtctcatccactggcctgcagcaaagcagtcgtgatggcaggattaaccccagagaagacagaaggtcctcccacctgcagccttcagtttaatctgggtattttaaccca

SEQ ID NO: 23609 - DNA, 599 bp, Chicken  19866894236937_1
  misc_feature (1)..(142): n is any nucleotide
nnnnnnnnnnnnnnnnnnnnnnnnnnnnnnnnnnnnnnnnnnnnnnnnnnnnnnnnnnnnnnnnnnnnnnnnnnnnnnnnnnnnnnnnnnnnnnnnnnnnnnnnnnnnnnnnnnnnnnnnnnnnnnnnnnnnnnnnnnnnnncacttgtcctttgcacatggggtgccagaattcctgccactctcacacagtttgagggcataggaacgttgggactatgctcaactgtcttcttgttttcactgcttggtttcatattgaaagcacactttgtcccagattcaattaaagaaatagtwaatctgatttattctatcaggagcaagatttaacaaaacttacaggttttagccacaaagagaaaaagtagtcaattaagaaaaatattwtttgaccaagtttatttggccaatatttatgtattctggccaagtcttgttaaagcctgtgctgtaggcccctttgctcattccaaagtcttctgttaaaaagcatttacaaaacactgtatgaattttgggaacagttagaggccaatgcaccaagcttgtatatgtacaaaacwttgtatattagaacttatggtgaatatttgtac

SEQ ID NO: 23610 - DNA, 599 bp, Chicken  19866894236937_2
  misc_feature (1)..(52): n is any nucleotide
nnnnnnnnnnnnnnnnnnnnnnnnnnnnnnnnnnnnnnnnnnnnnnnnnnnncacttgtcctttgcacatggggtgccagaattcctgccactctcacacagtttgagggcataggaacgttgggactatgctcaactgtcttcttgttttcactgcttggtttcatattgaaagcacactttgtcccagattcaattaaagaaatagtwaatctgatttattctatcaggagcaagatttaacaaaacttacaggttttagccacaaagagaaaaagtagtcaattaagaaaaatattwtttgaccaagtttatttggccaatatttatgtattctggccaagtcttgttaaagcctgtgctgtaggcccctttgctcattccaaagtcttctgttaaaaagcatttacaaaacactgtatgaattttgggaacagttagaggccaatgcaccaagcttgtatatgtacaaaacwttgtatattagaacttatggtgaatatttgtacaatttcagtattgcaaatatttgttagaaagatactgggttttattccaaatagttttacttaacaggcaatatatctttacactgcact

SEQ ID NO: 23611 - DNA, 600 bp, Chicken  19866894236937_3
acactttgtcccagattcaattaaagaaatagtwaatctgatttattctatcaggagcaagatttaacaaaacttacaggttttagccacaaagagaaaaagtagtcaattaagaaaaatattwtttgaccaagtttatttggccaatatttatgtattctggccaagtcttgttaaagcctgtgctgtaggcccctttgctcattccaaagtcttctgttaaaaagcatttacaaaacactgtatgaattttgggaacagttagaggccaatgcaccaagcttgtatatgtacaaaacwttgtatattagaacttatggtgaatatttgtacaatttcagtattgcaaatatttgttagaaagatactgggttttattccaaatagttttacttaacaggcaatatatctttacactgcactttcaattccaggttaaactgatgtaaatgaagacacaccaggcatttactagcaaacaaagcatctatgagcagaatggtgctgaaaaacactgcatatcccagtgggtcccccagctacagctttctggctcatctaacaaaccaagcagcatttctggggagctgggccaaattg

SEQ ID NO: 23612 - DNA, 600 bp, Chicken  19866894236938_1
catgtgctgatggtctgagaggcccaggaagtcactggagcttttgcatttttcctgtgtgtagaaacaaatccttagcatccccttaaaaatacgtggcttgccagctttgaagggaaactttgggctatcatctcatcactactacatctctcttggaatactacctggaaggacatagacagtggccaaagctctgttctgtgcaggcagtcacttctgggagagagttttggccatgcccccagtctattacaaaaggtctcaacaagcagtctctttctaccatttctaataatmtacttgcaaggaaaagaaaaatatgggatacttcttctaaaggaaagaaaaagtgggccctcayagcagtaatttagtcaattaattttcatttatgctagtttttctttcctcccgtttacctttctaataactacaattattctcacactggcattactgttatctctggaatagatttgctcacactgaaaaaatccaattgagtcagagcatgtaacgagaaaatgtaatccatcattattaaaaaagacagcttacctttatctgggtgttaaatagtacaaatccatgagagtc

SEQ ID NO: 23613 - DNA, 600 bp, Chicken  19866894236938_2
aaacaaatccttagcatccccttaaaaatacgtggcttgccagctttgaagggaaactttgggctatcatctcatcactactacatctctcttggaatactacctggaaggacatagacagtggccaaagctctgttctgtgcaggcagtcacttctgggagagagttttggccatgcccccagtctattacaaaaggtctcaacaagcagtctctttctaccatttctaataatmtacttgcaaggaaaagaaaaatatgggatacttcttctaaaggaaagaaaaagtgggccctcayagcagtaatttagtcaattaattttcatttatgctagtttttctttcctcccgtttacctttctaataactacaattattctcacactggcattactgttatctctggaatagatttgctcacactgaaaaaatccaattgagtcagagcatgtaacgagaaaatgtaatccatcattattaaaaaagacagcttacctttatctgggtgttaaatagtacaaatccatgagagtcagtgaatgttttgaagtaaaaacgaagggcattatgaaggctgaagtggatttgtcaccgaatt

SEQ ID NO: 23614 - DNA, 600 bp, Chicken  19866894236955_1
ctttgtagatcctttccaactattcttttctattccattccgttccattccattccattccattccattccattccattccattccattccattccattccattccattccattctgctgtgctccgctctgttctattctatataccaaatgagacattaagtacactagggatgcatggatcagggatgctaagatcaccatggccattataaaactaaaaatacaaagagaggataaatccctcttgtgtggcaagctgattggatttacatgccaggtgcatttagatcacctttytctccaagttcttctggcataagactgcttttccggacatctgttgaattataatactgaggaacaattcagagcttacagattgtccctggacttttataaaatgtgaccagtgatcaaggtcttctgtagatcctacagatcctagtgacattgttgcctttttctctgtcacctctcactatttcctgttgctaattcactattttgcttttccttcaactgtgcaaatacagcatgttgaggtactatttgctgaactgtatagggagaaaaggtttcacaacagtcttgcaggaa

SEQ ID NO: 23615 - DNA, 600 bp, Chicken  19866894236955_2
gacattgttgcctttttctctgtcacctctcactatttcctgttgctaattcactattttgcttttccttcaactgtgcaaatacagcatgttgaggtactatttgctgaactgtatagggagaaaaggtttcacaacagtcttgcaggaagattcacattgaagctccacagctgaaagagcagtgggagagcatgagttcatggctaggaacactgacaaggaaagtagaaatgcccttgcttagtcactgtctgtttttgcattacctttgttgtaccacagctgaagtgcttggtygcagaattttcccaattcttgagtttagcatgcgtgattttttgcagaggaagaggagacgtgataagagtatttcaggaacactttgtttgcattcagatagccttgtcctagtgagtctgtggaaagggagctcgctccctccttgaaattttatgtggtttatgctttatatacgtacaaacacagacacacacacttatgctcatttgcacatttcagttgtgatcaatcccaacaactattcacaattcaattactgctgcttcaaactggaagccgagttgtttcttgctgtgg

SEQ ID NO: 23616 - DNA, 600 bp, Chicken  19866894236958_1
gattctccttatcgaatgatgaccacatatcagtctgctctaaaggtaacccaggttggatggggatcagctaaaagaaaaggtgaaccatagggtaattagcaactcagtgatcagggcttgtaactgaaggggaatgggtaccatgacatgcctggaaggcactgagttcacaaagcagttgaataatgtgtgaggtggtggttgtggtccctgtgatagtgaacggtggtgaagagctgcaaaacttgaactaaatcttcctcgagtggaatctgttttgtctgtgatggtgactgrtgagtgatctccttgttgtaattttgatccacgagcttttaatctcattttctccctatgtcttactgaggagagagtggctgtggctgggtgttttggggccaaccagggcagtagtggagacagtgaaggcaagaatgggaagtggttgctgcatggcacttaacccacgggccttgaagaaatcattaaggytggaaagaccaataaaatcacgtagcccaaccaccaacctatgcctgtgaccactaaggttactttggggcacaaatcaggaatagtatttttagacatagttaa

SEQ ID NO: 23617 - DNA, 600 bp, Chicken  19866894236958_2
aggtggtggttgtggtccctgtgatagtgaacggtggtgaagagctgcaaaacttgaactaaatcttcctcgagtggaatctgttttgtctgtgatggtgactgrtgagtgatctccttgttgtaattttgatccacgagcttttaatctcattttctccctatgtcttactgaggagagagtggctgtggctgggtgttttggggccaaccagggcagtagtggagacagtgaaggcaagaatgggaagtggttgctgcatggcacttaacccacgggccttgaagaaatcattaaggytggaaagaccaataaaatcacgtagcccaaccaccaacctatgcctgtgaccactaaggttactttggggcacaaatcaggaatagtatttttagacatagttaatattttatggagcaagtaaaccacaggaagaaagaaagctggtgctatgaaagaggagtaggacactggctgtaacctatttagatttataactttatgtgaacaagagccycgcagtcagctgttaatttcagactcagtaacctaaaaacgtggaagcttgtttaaaataagctgagcagggcagctgtttct

SEQ ID NO: 23618 - DNA, 600 bp, Chicken  19866894236958_3
agtagtggagacagtgaaggcaagaatgggaagtggttgctgcatggcacttaacccacgggccttgaagaaatcattaaggytggaaagaccaataaaatcacgtagcccaaccaccaacctatgcctgtgaccactaaggttactttggggcacaaatcaggaatagtatttttagacatagttaatattttatggagcaagtaaaccacaggaagaaagaaagctggtgctatgaaagaggagtaggacactggctgtaacctatttagatttataactttatgtgaacaagagccycgcagtcagctgttaatttcagactcagtaacctaaaaacgtggaagcttgtttaaaataagctgagcagggcagctgtttctgtggctccagggcatactaagagaattacagaccgtgcaaattaacagaacaaacaaagtgggtatgtgcataaacattacctattggggaaggagccttggagaacggctgtgcctcacagccccgttgaatgcatatgtagattaacattaatctgcttgcatttgcaaatgctgtttgaccaggttcatcctcaaaaatctgtacggaaggtaa

SEQ ID NO: 23619 - DNA, 600 bp, Chicken  19866894236960_1
tttgctagtggggtgttggtcagcaggtggtgagtaagtgttgtggatgcttaattgtttttttttttttctcttccgtcttagtttttatctcaacccagaagttcaattctgtttccacttcttctccctcatccttctggggaggaagagggtgtgaacaaatggcagcgtggtgtttagctgactgctggtttaaaccacaacagatgtgtagcatcattacatttctttaggtagttctttctgcatttttttcatttttcttatttctctgtaccaaatgtttccccccttcasgctttaaaagcctatttaaaaagtaaatagggagctctgaacactccagagttttgccagtgccctttgcctttggatggtattcaacaaaagagcatgtttcttttttttgtttgtttgtttggttttttttaattaaaatggattatttgtaacaaccaaaaaagatattgtatgactttttttttccattagtgttatatttgtttcacctttctccatatggaagaaaatagtgtaccttggtagatgtgctctcattaaagactcagtgtagccagttcataaggtcatagatta

SEQ ID NO: 23620 - DNA, 600 bp, Chicken  19866894236968_1
tgtcagcaggtaagattaccttgcttctcatctcctcacacatctctatccttgtcatcttcattgtgtcacctttcactggaggaagtcttgcacttctcttttgtctgttaaactttctcaaattgcccttctcagtaacgtgtcagtgccaaatatatttcatagtcttcctgtcccgagtcatttaaatgctatctcaaaaatgagattatataaggagtaggaaactcaactatcgataaatattttcatttctttaactaatggggtaggtacaaagcaatgcagtgaccaaarcaattatttaatatagaaaagcagcggagtagagttgttttcttactgctatctcaatcaaataaaattgttaaacagccatcccagcaaattaaaaaaacaacaccgtgtattcctgtgctaagatgagagagagagactttaagctgaggaatttggttttgtagcttaaaccgtagcattctccttttttttttggctaatgttgttgatgtctgtgtttagttgaggactagagcattgccactgttggcagacatgaataaatctagcttccatgtctgtctgaaaactgtagtg

SEQ ID NO: 23621 - DNA, 599 bp, Chicken  19866894236971_1
  misc_feature (1)..(47): n is any nucleotide
nnnnnnnnnnnnnnnnnnnnnnnnnnnnnnnnnnnnnnnnnnnnnnncagctgctcagggaatggagctggtaattggcatgcaaagtgtgggtaaccgctcaaagtccactctctaattttatttttattatttttatcatttattactattttttaaattaatgggagcactgtgctctacaaatgttacacataggaagtaactgtgcataagaccatacctacagtgtagttataatgatctgaattcttttcacgggctttaggatgatactataatttaggatgactgtaatawacaattcatgttcatacaagagatagtaatgaaaagcaactcacagtcaacattaaataccaaaaataaaaaataaaaaaattaaggatcaactgttgcccaattatccaatttgtttttctgccttacaattaaattctataacgtaacactctggataagcaggaaagcattcagtgggaggttattgtccagagtactgcctagggaagaataacaaagaatgattcagaggagaacttctgccttcagaaaacattttctgggcaayagagagaaatggtttatcaattatatac

SEQ ID NO: 23622 - DNA, 600 bp, Chicken  19866894236971_2
gatactataatttaggatgactgtaatawacaattcatgttcatacaagagatagtaatgaaaagcaactcacagtcaacattaaataccaaaaataaaaaataaaaaaattaaggatcaactgttgcccaattatccaatttgtttttctgccttacaattaaattctataacgtaacactctggataagcaggaaagcattcagtgggaggttattgtccagagtactgcctagggaagaataacaaagaatgattcagaggagaacttctgccttcagaaaacattttctgggcaayagagagaaatggtttatcaattatatacctctctttttaatgcatcatagtagctgttttcttataaaacttctttcgcagtgaaagctttgcaattgtttatccaatagctacctacctttgatgctattttgagcaaattagtatttgtggtatttgtgtctgtaagagcagtaagaaaaaaaaaagtgagattttcttatactgactctaaaattataatatatcacctcatagctcttcaggactgagatttattatatgttcaaatgctttttggattagataaatgaacataca

SEQ ID NO: 23623 - DNA, 600 bp, Chicken  19866894236973_1
gtgcacagactgatggattctctattggatggctttttggcagttgggatagactttttgcaatggactaaatacttactaaagattgtgttctggtatttcccttttcattttatgcagtttgactgttacctgtcctgcttgagcaaaggcttcaagtcagccactgttattaaagtcctttaacttcttgtactgggcggggtgtagagcttgaggtggtttctccttgtctagagaggagtttattcacttcttatcaaacttttttactctagacttgaggcctatgggaagtaygagctccaagccctcagtaaccctgtcagttaaaatcttctcaggattcccattttcacatatcacgggacaagatgttctgtggtagaaactactgcatgctgtatggaacagccaaggtaaatctctaagttgctgtcaggaggttctccatcaggcattatgtttttcaagtcagtggaatttatttagaattttcttgaatgctaaagaktggagcatgttctgcaatgactgtttgatgtttgtccagtgccctaaatgagctgtgccatggcatcactgcagccactggttaac

SEQ ID NO: 23624 - DNA, 499 bp, Chicken  19866894236973_2
tgaggtggtttctccttgtctagagaggagtttattcacttcttatcaaacttttttactctagacttgaggcctatgggaagtaygagctccaagccctcagtaaccctgtcagttaaaatcttctcaggattcccattttcacatatcacgggacaagatgttctgtggtagaaactactgcatgctgtatggaacagccaaggtaaatctctaagttgctgtcaggaggttctccatcaggcattatgtttttcaagtcagtggaatttatttagaattttcttgaatgctaaagaktggagcatgttctgcaatgactgtttgatgtttgtccagtgccctaaatgagctgtgccatggcatcactgcagccactggttaacagaattataaaagtagacatcagagaggctttggcacttgctacagtgaaatatctaccagagaggagcaggcctaacatttgcttgtctggcatttcttaccaacaaacctg

SEQ ID NO: 23625 - DNA, 600 bp, Chicken  19866894236990_1
aatgatttcctttttggctttactattggctagttaagaagcgcacaaatatgtgttaggttggctgtagagcagaggcattctgggtgcacggagtctgttgtgcgtgcaaagttcagcaatgcataataggttattgcccttcagcgtgtgaaaaaggtacatgcttaaaagacattcatgctgtactactccccagttaagatctccaaagtgtttataaagaaaatatccttaaactagtgttgaatttttgctgctgcttactctgagtgtagtacagtgcgtttgtgttttcayatctcctgtgcactgtggtggttaattgcagtagtccgaggatttgggtttttccctgtgcagaagcactttgttgtacaggggaaggtgatgcgtttctgacctataacataatttactaaaactgtgttagttacctgtagtatattgtatttgccgaaagaccagaagagagcaaatttgatcaagaacagtctgaaattgtagcgtgtgatcttgtaatacaataggaaataaatgaagtaaccaattcttggtgctggcaaaaattttgccattggatgtgtgctgagatttgtc

SEQ ID NO: 23626 - DNA, 599 bp, Chicken  19866894236997_1
  misc_feature (1)..(77): n is any nucleotide
nnnnnnnnnnnnnnnnnnnnnnnnnnnnnnnnnnnnnnnnnnnnnnnnnnnnnnnnnnnnnnnnnnnnnnnnnnnnntgcagggcaggcgcagccagattgtgacctgctcatctcacctaggaagaagagctatcatttgaatttgtatttatacagtgatcgatctatctatctatataaattgtacttaagtagtcagccctaccatgttatcttctttcccttaaactcatcaggatctgaagtgggtaaagaaagtactcatataaagctaatgaaagaggcagtcttatcaccrtattttgcttagtaacttccttcagatttgtcagtgtgaccattgaatattcatttagtaagagtttatttgccattaagacttggttaacatccttagctgtcagaaataagtgcattgaaataaaatgccttgttttcttgggttccccatgttttaaactcttaaattttccccatatttgggaaaactggcacggctcccatggtggcagtgtgaggcacctgcaggtcctctgccaygtggaatccctttgggccagagaggagtagcagcactgggtaagctgctgctgctaa

SEQ ID NO: 23627 - DNA, 600 bp, Chicken  19866894236997_2
tgaagtgggtaaagaaagtactcatataaagctaatgaaagaggcagtcttatcaccrtattttgcttagtaacttccttcagatttgtcagtgtgaccattgaatattcatttagtaagagtttatttgccattaagacttggttaacatccttagctgtcagaaataagtgcattgaaataaaatgccttgttttcttgggttccccatgttttaaactcttaaattttccccatatttgggaaaactggcacggctcccatggtggcagtgtgaggcacctgcaggtcctctgccaygtggaatccctttgggccagagaggagtagcagcactgggtaagctgctgctgctaacaaacacatcgttatggagcagatagctgtctgatacaactcagtgcttgttttaatgtgcatcttatgaacagcatgaagcatgttttgccttgaagtaatgtgtagctctcgtgcagtttgacttcttgttcctgcttatttgacctccctcactcatttgtgattaaatatgaaaattggtacaaaattccctggggctgtttgcttcagcattgcatcccatttgctttctgctgtccc

SEQ ID NO: 23628 - DNA, 600 bp, Chicken  19866894237000_1
ttttgtccagcagctaaaaaaatatatatttttataattaacacagtgaaggtggtcttgtttgtttccagaggcagatgttttctctgactttgaactctttaagaattttctcctacaccataggttagcaaacaagtgcaacatttttgtttttcccccttctttttgacaaggctttgacctctgcatttcagtgtttcaggagtaaaatcactgagacttggtttttcaccttgtagtatctacacaggagctcaaagaaaaagaaaaagaaaagaaaaaccccaacaaaaaaamctgctgtagatgtagtgccactccaatgtggggaacagcagaacttcatttagagctttaggcagacagtatattaaactgtagaaatgtttgtgccaatgasagaggattttccctttcattcagctcgacagcatttgaccatcttcactacagaatggcataacaccaccaattttacagccagagactgttttcgggctgtcttagaagcttacagatttttttctgaacagaagcaygttgaaacttttccatcttttttgaccagttatctgctacattgtgaacatttgcttc

SEQ ID NO: 23629 - DNA, 600 bp, Chicken  19866894237000_2
aagaattttctcctacaccataggttagcaaacaagtgcaacatttttgtttttcccccttctttttgacaaggctttgacctctgcatttcagtgtttcaggagtaaaatcactgagacttggtttttcaccttgtagtatctacacaggagctcaaagaaaaagaaaaagaaaagaaaaaccccaacaaaaaaamctgctgtagatgtagtgccactccaatgtggggaacagcagaacttcatttagagctttaggcagacagtatattaaactgtagaaatgtttgtgccaatgasagaggattttccctttcattcagctcgacagcatttgaccatcttcactacagaatggcataacaccaccaattttacagccagagactgttttcgggctgtcttagaagcttacagatttttttctgaacagaagcaygttgaaacttttccatcttttttgaccagttatctgctacattgtgaacatttgcttctgctttgtgtttatctctgtcataagcagcttgtgtttgccagttttctttttttcagatctcatgcaatatatattatatagttatatatatatatatatac

SEQ ID NO: 23630 - DNA, 600 bp, Chicken  19866894237000_3
tatctacacaggagctcaaagaaaaagaaaaagaaaagaaaaaccccaacaaaaaaamctgctgtagatgtagtgccactccaatgtggggaacagcagaacttcatttagagctttaggcagacagtatattaaactgtagaaatgtttgtgccaatgasagaggattttccctttcattcagctcgacagcatttgaccatcttcactacagaatggcataacaccaccaattttacagccagagactgttttcgggctgtcttagaagcttacagatttttttctgaacagaagcaygttgaaacttttccatcttttttgaccagttatctgctacattgtgaacatttgcttctgctttgtgtttatctctgtcataagcagcttgtgtttgccagttttctttttttcagatctcatgcaatatatattatatagttatatatatatatatatacatatatatacacacacacatacacacacacacatatatactgagggacttggtggaatcatcactttttatgcaatgcaatctttatgtttgcatttggcaagaatctaggagctccacatgaaagacccttatacagt

SEQ ID NO: 23631 - DNA, 600 bp, Chicken  19866894237007_1
cttacgctgatatctcataataaaatcttgtgagcctatgacacattgtacgtgaaatagatcccagctagaagataaaagaaaagagaagtagactttgcgcagtaatactgtacagaaaagcagaacatacagaaaaaaagtctgagatgaatgatgagtatttattttgtattccttgtgttctgtgttgggttctttttttgccagaatgaaacaaataaacattcgttcactgaaaaaatatttgacaaagattctccagtatgtctttgcactgttttctccctatatcttgcwgctgaaaataatttattcttcactgacacatatcaaacacattattattagacagcattaaaactttgattagtaggaacaagcatagtcaagataatcacatactttttcttttgttcactgacattgttaaggaaaacttgttacttacccaacattttctgcatcttcatcacactcagccctatatttgcaaactccacattttgagtgttttctctgaacttctgtcccagatccttcatactctaaacaaaacaaggtgctgttagcagaaagcatgacttctatatgaagctc

SEQ ID NO: 23632 - DNA, 600 bp, Chicken  19866894237007_2
ttaaaactttgattagtaggaacaagcatagtcaagataatcacatactttttcttttgttcactgacattgttaaggaaaacttgttacttacccaacattttctgcatcttcatcacactcagccctatatttgcaaactccacattttgagtgttttctctgaacttctgtcccagatccttcatactctaaacaaaacaaggtgctgttagcagaaagcatgacttctatatgaagctctgactttgcctgcctaaattcatttatcttcaactatattgtcaacagttatcatakacttacactgaagctataaaccttaatagtgctccctctttcaaaatccagcaattggaggttggtagaacagtaacaatgacaagaaagcatcccaaaaaacaactgcttcattgattgtctcttcctttattgttatttcattgtatttattctcacttcaccagacacgcaatcagcattgacatgtcccagacacattcaatctgaactggcgctgataacagataaaccctgtaccttccaatgttcttgagtattaggtaggaaggatgtgaaagctgttttcttttatggtat

SEQ ID NO: 23633 - DNA, 600 bp, Chicken  19866894237009_1
cgggttctctgcaggagggccccttcctgggataattatagaactccttgcaggaatgatagatctggataggaacctgaggagaagtgctcttttaccttaagtgaccaactgtgctatcctatccagaagagcagtagagttaagatggaagtactgaacagcagacagtctgtgctgactcctctttttggggtggatctttgtatttcaaataattctggtcagaaggggacctgacttgggggcactcggggaagcatccgaaagtattgcattcaccagtttcttttcagaaarctgctctaagagatacaagtctcgctggaggtcctttrtaagttcttgtgtttaattaaagcagtaaggtttacattgccacttaatcggcatcaccgttgagacgtgtctgcttggtgactaaaacattgtgtagtgcttgtgcttgagaatatgcctttattaaagcctgatttgttattctttgtgttatcgtgctatagggacacagttactgagttaaatcttcagctaacaaatatcagtatgtgtttaaatgaaattaactaatctttccataaattatagaacatattggag

SEQ ID NO: 23634 - DNA, 600 bp, Chicken  19866894237009_2
tagaactccttgcaggaatgatagatctggataggaacctgaggagaagtgctcttttaccttaagtgaccaactgtgctatcctatccagaagagcagtagagttaagatggaagtactgaacagcagacagtctgtgctgactcctctttttggggtggatctttgtatttcaaataattctggtcagaaggggacctgacttgggggcactcggggaagcatccgaaagtattgcattcaccagtttcttttcagaaarctgctctaagagatacaagtctcgctggaggtcctttrtaagttcttgtgtttaattaaagcagtaaggtttacattgccacttaatcggcatcaccgttgagacgtgtctgcttggtgactaaaacattgtgtagtgcttgtgcttgagaatatgcctttattaaagcctgatttgttattctttgtgttatcgtgctatagggacacagttactgagttaaatcttcagctaacaaatatcagtatgtgtttaaatgaaattaactaatctttccataaattatagaacatattggagagcaaatacagaggacttactatttttaaaatatcaca

SEQ ID NO: 23635 - DNA, 600 bp, Chicken  19866894237012_1
tgttgcaataactgctctacgaatttagtcatggttattgtataaatagggttgggcaaagttgtggctgcatctgaaaaatgttattgaataagcttactttcattggaacgtctgctgtagtttaccagcatgtcttgaagtaaaaactctacgtaagccagaaaagctcatgggcatttggaaactgcaaatgtgtgctctgtcactatgagatgcacctcttcagagccggcaatggctgctgatagcattatatactagcggattctgtcacctttagttgtgcacgcttttccycacaaaagccaacatgagactttctactcatgctttttacacaacgtttttaggagggaaggaggcagcaggaatcgcccaggtttggaaggttatctagtcaataaaatatgtagagttgtttctcccaccttctgtttctgttctttctcacctttgcagttaaaagacagtcttgaactgataggatcctaagtgaatcttatcaaggtcagagtttgttctggcacagatttgaatatgaaaccttgtagatatctgattcccaaacatgtttgaaaaccattttcaccactgcca

SEQ ID NO: 23636 - DNA, 600 bp, Chicken  19866894237025_1
atattagaattacttttttcagcattttgggaaattcatggtggtgacctaaattgtggaataaggtatgagtatacctataatccagcaagttatagtaaaactgaaattcatttggaccttgtctgatgtacaggtagggactaagaggactgcatctgtcagctaagttctatatgacttaacttgacagttgactcaatttttacttcagtggggctttacagcaaggcaaagaaaaaaaagatgtgtaaataggtaaacttggtaaatgtactaatttattatttctttatatayagttttccttggttttcagtttaggtttctcactgaagagggaatgagacagtgaacataactctgtgtctttgctatgaatgatcctgaataaaataaaactgtgcctctctattttgcttctatattggaataagttcacaaatccactattaagcacatatgtttacatttttcctgaagttgtgttatgcacgtaggaattcttcacttcctctcttatgtctgatctttttcataaacaaggaacaaatgagtggtaacataccctgtgagttttgttcacactggtacagtatt

SEQ ID NO: 23637 - DNA, 600 bp, Chicken  19866894237026_1
tcctccagcaaacaatatatctttttgtgcatactctcatttccccggaagtgcactgcctccacaagtgcaaaaatactgatgaatgttgctgatgggagctcctgcagatagccattcattgtaaagatactgaagatgctttaacatcttcagtacatctgcaggtgctgttacagctaggtttatttccagtacctcatcaaactaactggcaattccaaactactgtcttccacataaggaagtccaaaagaagaagggactttcccaagtaataggggaagcctgtgaaaggcygaaagcttaagttttgatcacctgaacctcagtgcattccattaacttatgactacaactcaaaaaaagaacaaaggggagcaagcaaaggggaaaattcacttggagtgmattctaaacatatcataaagtcactggaagtacgcaatgctgctctagtaacttagattattaagacttaggctctgttcatttattcattcttaaactatattaccctttttctgctttcttcacctgtgaagtcttaccaggtggcacagctcagcgcagataaacatacaggaatcagagtgaagc

SEQ ID NO: 23638 - DNA, 600 bp, Chicken  19866894237026_2
tagccattcattgtaaagatactgaagatgctttaacatcttcagtacatctgcaggtgctgttacagctaggtttatttccagtacctcatcaaactaactggcaattccaaactactgtcttccacataaggaagtccaaaagaagaagggactttcccaagtaataggggaagcctgtgaaaggcygaaagcttaagttttgatcacctgaacctcagtgcattccattaacttatgactacaactcaaaaaaagaacaaaggggagcaagcaaaggggaaaattcacttggagtgmattctaaacatatcataaagtcactggaagtacgcaatgctgctctagtaacttagattattaagacttaggctctgttcatttattcattcttaaactatattaccctttttctgctttcttcacctgtgaagtcttaccaggtggcacagctcagcgcagataaacatacaggaatcagagtgaagctcttgttcaatcatatcaggtcagggtaagcatttgacagagtcgggacaaactttagatagataatctaacagatggatgaagtgtctatgaaaaacatgggtttcagtt

SEQ ID NO: 23639 - DNA, 600 bp, Chicken  19866894237030_1
agtagctctgactaagcccaaacacgtgcacaatgaatttaatgtgcgcagccttccacttcatatacagcgtagtccttacttttcccctggaaatcacttgttttgaagggacagcattacttcaatttttaaataactaaaaattctatattgcaaactttgctccccttaaaaacgtagcaattttgatttacagtttacccttcttttttatcagattgctgaatctaaggagaagacaaacaggaaatccacaaaacagaaaaagcagctttcactagcttcttgttgaaacartcaagatatcatttattctcatcatcttagaagcaggaatactaaatggatgctaaaacagtttatcttccataaagatcagaacaccaaattaaactttagagagaagatgaaaaggtttgggacaaatgcaacwcttacaggtggctgattcatcttaagatttctctcagatctgagcaaaaataaaatgacaaatagcctgccaaccatgaactgaatgaaaactgatgaaaacgcatcctattcttaccgtagatagcttttgtaccttcagtactgctaaaagtatttctccct

SEQ ID NO: 23640 - DNA, 600 bp, Chicken  19866894237030_2
taactaaaaattctatattgcaaactttgctccccttaaaaacgtagcaattttgatttacagtttacccttcttttttatcagattgctgaatctaaggagaagacaaacaggaaatccacaaaacagaaaaagcagctttcactagcttcttgttgaaacartcaagatatcatttattctcatcatcttagaagcaggaatactaaatggatgctaaaacagtttatcttccataaagatcagaacaccaaattaaactttagagagaagatgaaaaggtttgggacaaatgcaacwcttacaggtggctgattcatcttaagatttctctcagatctgagcaaaaataaaatgacaaatagcctgccaaccatgaactgaatgaaaactgatgaaaacgcatcctattcttaccgtagatagcttttgtaccttcagtactgctaaaagtatttctcccttctacaggaaaatgaaagcttttctcccccatcccctgctattaagcactatagtcctccccaggatacagaacaagcaggccaataaacatcaaacacatgcaagcatcccattagctgactgattctacctctt

SEQ ID NO: 23641 - DNA, 600 bp, Chicken  19866894237031_1
atttcctttattattcagctgtacaatgttcttcagtggtaatttcttacactaaatgtaatagcaatttggtataaaaaacagcagaaaggtaacgagggaagagaaagagagagagatgcagagggcggcaagaaaggcaacaacatttgctaaacaaatctgaagaagcaaggaaaaaaaacacaggaaacatttcagcctacaatagctggttggctaagatgcttttctaagaaagatgtttaattctgctcaggactcataccagtacttcactgttatgagtgagggcttctytcacatccttcagctgctttgtgaactcagcgttttggtataatgaaaatggcaaacagcaaaactctcagagattctcatcagtgacaacacctaaggatatgcagaaagatgctccaaaaataagaataattttaaaagctattcaaattttcatttcaagaagaagaaactggttcagttggtgttgttgctgttgcttaatatagcattgtccaaaaaaccccataagaatggctgctgactcagtcctaggtatgtggtttcaaccttcttgaaaattatggtcccgtggccttg

SEQ ID NO: 23642 - DNA, 600 bp, Chicken  19866894237037_1
cagaggagagggagtgctggaagagctgcttggtggatttggttgttcaacacatgctgagctctggaggtgctgaacataattgcagaaaattgagtggaattccgtgtactttgttggtagctggagtataagggagacccgcattcttccagcaactaacaatgctttttacgctgttcagtagttgagccccaaatctcctctagtgcaagtctttcttcagtgcttaaggcacagctgttaggtgctcagtgatcttctgtcaattcttgatatggtttgaggtgctgttttgcygattggttctggtgcattctaatttgctggggacacctgttccttaattatcaccatcctccctctgtctcttctgtttcagctccttctgatgcgtgagctaataacatgatcggaaaggaggcttggagcagtgtgtgcatgttgagaggtggagtttgagacaaattcatcacaaacttgagagtaatttctggtaatagtttatgtctactttggtttgctctcagtccttaagctgcatccctttagagtcatagaatcatagattcttcaggctaaagtttgtcctttgcaatt

SEQ ID NO: 23643 - DNA, 541 bp, Chicken  19866894237037_2
aggaggcttggagcagtgtgtgcatgttgagaggtggagtttgagacaaattcatcacaaacttgagagtaatttctggtaatagtttatgtctactttggtttgctctcagtccttaagctgcatccctttagagtcatagaatcatagattcttcaggctaaagtttgtcctttgcaatttgtgtactatcctgagaccagccgtggcagtttgtagtagagggcaggagaggatggaaggaatggggagtttgagttcctgcttagaaaagaaaggaacaagaggagggaagagcayggaaggcttgtaactgattgatgtgcttctgaaagtgtcacagtagttaaggttgttctagctcctattcttgtcaggcatgccggtaatgctgtattgagtgtgatttcagcacctgctcctcagagcctgaattatttcactaatcagaattctgtatatgctttgtctctgtttttttgcttgcaaaaaaaaaaaaacaaaaaaaaacacaaaaccaagtgtcaatgatggccccggg

SEQ ID NO: 23644 - DNA, 600 bp, Chicken  19866894237040_1
aaaagtacttacgtatgattaaaaatgttaagtaacgtaccctacctcagtgtgaaaaagaacatctctttttaaactataagaagacactaaaaagtaccatacgcttaaagataccttaaagcaaatgcaatcaaccaaagatttagacataaatccagtgtctgtataaccacctgatatcatatgctatcgatttctctttaaagagatagataatgaagcttaaaattcagaaagtaaaaaacaataacagaaactatactccttaatgttatataataaacattgtacgtacayaatataatataatatatgtacatatactgttgttttttcttgtttttttttttgtgattttttgttcaatttacagaagtaaattcagacatcctgctggctttcagctacccaataaaagctgttttcaaagtatgaagcaaaagtcagaattaatgcagaattatttagatttaggagagatctcatttctgaaggcttttcaagtatccagttcagtttgtctgtgggttatatgattaaaaaacatgactttttgtagccttttgttttttggacrcagtgctcgttcctatcaca

SEQ ID NO: 23645 - DNA, 600 bp, Chicken  19866894237040_2
acctcagtgtgaaaaagaacatctctttttaaactataagaagacactaaaaagtaccatacgcttaaagataccttaaagcaaatgcaatcaaccaaagatttagacataaatccagtgtctgtataaccacctgatatcatatgctatcgatttctctttaaagagatagataatgaagcttaaaattcagaaagtaaaaaacaataacagaaactatactccttaatgttatataataaacattgtacgtacayaatataatataatatatgtacatatactgttgttttttcttgyttttttttttgtgattttttgttcaatttacagaagtaaattcagacatcctgctggctttcagctacccaataaaagctgttttcaaagtatgaagcaaaagtcagaattaatgcagaattatttagatttaggagagatctcatttctgaaggcttttcaagtatccagttcagtttgtctgtgggttatatgattaaaaaacatgactttttgtagccttttgttttttggacrcagtgctcgttcctatcacatgctcttgcttattcatacctgctctcctcccagtctcgaggt

SEQ ID NO: 23646 - DNA, 600 bp, Chicken  19866894237040_3; identical to SEQ ID NO: 23645

SEQ ID NO: 23647 - DNA, 484 bp, Chicken  19866894237040_4
aataaacattgtacgtacayaatataatataatatatgtacatatactgttgttttttcttgtttttttttttgtgattttttgttcaatttacagaagtaaattcagacatcctgctggctttcagctacccaataaaagctgttttcaaagtatgaagcaaaagtcagaattaatgcagaattatttagatttaggagagatctcatttctgaaggcttttcaagtatccagttcagtttgtctgtgggttatatgattaaaaaacatgactttttgtagccttttgttttttggacrcagtgctcgttcctatcacatgctcttgcttattcatacctgctctcctcccagtctcgaggtttctttgtttcatttggtttgatgcagcggatgtagtggggtgtgcacttcatgagggtgccaacaagatcgtttgcttgtttctgtgaaatggatggaaaaagttatagaaagagaatag

SEQ ID NO: 23648 - DNA, 600 bp, Chicken  19866894237047_1
aaaaacttttcaactgctctcccaccatcctggtagggttgatttcaataaccagaaccgtggccataaaccttacctagtaatcctccataggatgatgtctgcttgggcggaacaccaaagaaaagctgtcctattctatctaggtactggaatgacacaagatggagaacaatgtcagctgctttgtttgcaggtagaaataccacagaagtgagatcgctgactcctgtctacaagctgtattcaaacatcctacttctcagtgtgccatcaagagcaactgaaatgctgtgcctratagatttatcagttcccattaccactaataaaacacactcttccaaataaaagccaccccctgtctaaattgtctatcagcagctcactacctggaggaaacacttaaagccagcacccagcagctgtttcagccacattacatacagtgtgacccacttggtttgcactcagaataatcagccactatttaactaattctgtgggttacaccctgcttgcagtttccagtaacttacctcattatacatgggatctcttttcagggacggttgatactgttcacacaatactgtaaat

SEQ ID NO: 23649 - DNA, 600 bp, Chicken  19866894237052_1
tgcagcatccatcccacctggaaaggcttcacaacctttcagacaagttgtggccccatttcaatgttttcattagcgcatacctgacagctgtggtactatttcttaactatgtgtgccgcggtgatctggaaactgcccttgatggtctgtttggtgcagccaggaacctgcagacacatttacattctacctgtgcatagcctgactgacaaacactgattgagtagggcagctgatgaaaaataattgtgataagcagcagaaccagcaaatgaagcacatcctctaaggctgacratgaccacatttgccataaataaaagggtgctagtttgttccctgtgatgacgcccaagctctgaaaacacagaygttacatacttgtacatactgacagayggtcacacagagcccataaatccttgaacttgtgaataaaaatttgcatgattaattataatcctgaataacacagttaaagtcccttgtgatgggacccaaatgaagatctgaacctcatccgtagcttttcttcccatacttatatagagacagaatgaaattacggcaagtaaatgtgtgaggacttctgctttt

SEQ ID NO: 23650 - DNA, 600 bp, Chicken  19866894237052_2
gcgcatacctgacagctgtggtactatttcttaactatgtgtgccgcggtgatctggaaactgcccttgatggtctgtttggtgcagccaggaacctgcagacacatttacattctacctgtgcatagcctgactgacaaacactgattgagtagggcagctgatgaaaaataattgtgataagcagcagaaccagcaaatgaagcacatcctctaaggctgacratgaccacatttgccataaataaaagggtgctagtttgttccctgtgatgacgcccaagctctgaaaacacagaygttacatacttgtacatactgacagayggtcacacagagcccataaatccttgaacttgtgaataaaaatttgcatgattaattataatcctgaataacacagttaaagtcccttgtgatgggacccaaatgaagatctgaacctcatccgtagcttttcttcccatacttatatagagacagaatgaaattacggcaagtaaatgtgtgaggacttctgcttttcagttggatagaacatgtcatgttggatagaaaatctggaggatgtggcagttcagtctagcaaatgagttttga

SEQ ID NO: 23651 - DNA, 600 bp, Chicken  19866894237052_3
ttcttaactatgtgtgccgcggtgatctggaaactgcccttgatggtctgtttggtgcagccaggaacctgcagacacatttacattctacctgtgcatagcctgactgacaaacactgattgagtagggcagctgatgaaaaataattgtgataagcagcagaaccagcaaatgaagcacatcctctaaggctgacratgaccacatttgccataaataaaagggtgctagtttgttccctgtgatgacgcccaagctctgaaaacacagaygttacatacttgtacatactgacagayggtcacacagagcccataaatccttgaacttgtgaataaaaatttgcatgattaattataatcctgaataacacagttaaagtcccttgtgatgggacccaaatgaagatctgaacctcatccgtagcttttcttcccatacttatatagagacagaatgaaattacggcaagtaaatgtgtgaggacttctgcttttcagttggatagaacatgtcatgttggatagaaaatctggaggatgtggcagttcagtctagcaaatgagttttgatacactggcccgattgttcactcatct

SEQ ID NO: 23652 - DNA, 523 bp, Chicken  19866894237052_4
gtcacacagagcccataaatccttgaacttgtgaataaaaatttgcatgattaattataatcctgaataacacagttaaagtcccttgtgatgggacccaaatgaagatctgaacctcatccgtagcttttcttcccatacttatatagagacagaatgaaattacggcaagtaaatgtgtgaggacttctgcttttcagttggatagaacatgtcatgttggatagaaaatctggaggatgtggcagttcagtctagcaaatgagttttgatacactggcccgattgttcactcatctstaggagccaggaattarcttgttttatcagttaatggtaaccacattgattatgggaaaagaggtttgtagcttgttggtaccgcagagcaggcatcagaaatttcccctgtgcttccagttgttctctccataacctggagcagtcattcaagacttgcatataatgtaatctttccactgggcaactgtgtttgtccaccacaatcagccttataagcata

SEQ ID NO: 23653 - DNA, 506 bp, Chicken  19866894237052_5
aatccttgaacttgtgaataaaaatttgcatgattaattataatcctgaataacacagttaaagtcccttgtgatgggacccaaatgaagatctgaacctcatccgtagcttttcttcccatacttatatagagacagaatgaaattacggcaagtaaatgtgtgaggacttctgcttttcagttggatagaacatgtcatgttggatagaaaatctggaggatgtggcagttcagtctagcaaatgagttttgatacactggcccgattgttcactcatctstaggagccaggaattarcttgttttatcagttaatggtaaccacattgattatgggaaaagaggtttgtagcttgttggtaccgcagagcaggcatcagaaatttcccctgtgcttccagttgttctctccataacctggagcagtcattcaagacttgcatataatgtaatctttccactgggcaactgtgtttgtccaccacaatcagccttataagcata

SEQ ID NO: 23654 - DNA, 600 bp, Chicken  19866894237063_1
gcaggagcaaaagaggaaataagcatacccaaaaatccctgccctgactaccccaggcactatttttagtggtgcaaggacaccttggatacatgactgcagcaagaggtgaggctgtttgcacagtgattggtaccccagcctggaaacatcggctggccccaaggggagaggacagctcttcatctattggtgctggagatgggcactgcaggtgggcactgcagatggtttcagccactctatgggatctgagagccccaactgaagcagccaggaccctccttcccccgctccgtytgcaggtggttttggagacgaagacacggattactcacagatgtgtgactaacaccccctgagcaacgatttatcaaccggtgactgacttcacacgcagtgctaagtccacagccaagataaacagcgaaggaccgagccttgcagccctccagctatgtatgtgagcatcagacacgggcaaacgagacagcccaggttaacrtcaggaagagaacagccaccagctgagygctgaggctgcgttggatggatgggctttccaggcacagccytgcagagatgtgcagcacatctttc

SEQ ID NO: 23655 - DNA, 600 bp, Chicken  19866894237063_2
gcactgcaggtgggcactgcagatggtttcagccactctatgggatctgagagccccaactgaagcagccaggaccctccttcccccgctccgtytgcaggtggttttggagacgaagacacggattactcacagatgtgtgactaacaccccctgagcaacgatttatcaaccggtgactgacttcacacgcagtgctaagtccacagccaagataaacagcgaaggaccgagccttgcagccctccagctatgtatgtgagcatcagacacgggcaaacgagacagcccaggttaacrtcaggaagagaacagccaccagctgagygctgaggctgcgttggatggatgggctttccaggcacagccytgcagagatgtgcagcacatctttctccatcccacagcactaaaagcagacatggcaacacgtccacctctcttaacaaagtgctgcgccatcccggctgaggtggtccatacagagataaatgacaccacgtggactcattcttcctccctgcagggaggcacactgcactgcatggccggggtagccatgcctatgggctgtcccattggtctgagcctcagcattgg

SEQ ID NO: 23656 - DNA, 600 bp, Chicken  19866894237063_3
tcagccactctatgggatctgagagccccaactgaagcagccaggaccctccttcccccgctccgtytgcaggtggttttggagacgaagacacggattactcacagatgtgtgactaacaccccctgagcaacgatttatcaaccggtgactgacttcacacgcagtgctaagtccacagccaagataaacagcgaaggaccgagccttgcagccctccagctatgtatgtgagcatcagacacgggcaaacgagacagcccaggttaacrtcaggaagagaacagccaccagctgagygctgaggctgcgttggatggatgggctttccaggcacagccytgcagagatgtgcagcacatctttctccatcccacagcactaaaagcagacatggcaacacgtccacctctcttaacaaagtgctgcgccatcccggctgaggtggtccatacagagataaatgacaccacgtggactcattcttcctccctgcagggaggcacactgcactgcatggccggggtagccatgcctatgggctgtcccattggtctgagcctcagcattggtacgcaaagctttcccggagctgtgctg

SEQ ID NO: 23657 - DNA, 600 bp, Chicken  19866894237063_4
aggaccctccttcccccgctccgtytgcaggtggttttggagacgaagacacggattactcacagatgtgtgactaacaccccctgagcaacgatttatcaaccggtgactgacttcacacgcagtgctaagtccacagccaagataaacagcgaaggaccgagccttgcagccctccagctatgtatgtgagcatcagacacgggcaaacgagacagcccaggttaacrtcaggaagagaacagccaccagctgagygctgaggctgcgttggatggatgggctttccaggcacagccytgcagagatgtgcagcacatctttctccatcccacagcactaaaagcagacatggcaacacgtccacctctcttaacaaagtgctgcgccatcccggctgaggtggtccatacagagataaatgacaccacgtggactcattcttcctccctgcagggaggcacactgcactgcatggccggggtagccatgcctatgggctgtcccattggtctgagcctcagcattggtacgcaaagctttcccggagctgtgctgaacagggaagcactgccaagccccagctcacagctgggaaat

SEQ ID NO: 23658 - DNA, 600 bp, Chicken  19866894237063_5
gccccagctcacagctgggaaatgatgcagggtgaggttaacgagtgcttctcggaaggaggaccccacctccctagctcagctcagcactgttgctggatccccttctgcagagttcccttcccatgaccgggctgcccatgagctgagttcctcctctccgtcacatcctgctgggagcacagagaccctgccttcacctgcagcacccacagccccgagaagtgcagattgccacccagcctggaaacagcagcacctcatcctgctgccagcaacacctggcacagcaagggctcmggacaacgctcacacacctcgagcagcagacgaacccycgtgcatccacaggcaaacaaaacaaggcaagcgggcgaacccaaaggcatcacccaggtgacaaaagccttctygcacccaaagcccccagcactggtgggagctgcacgttcccactgcacggcagcccacgtggctccagccctgagcgcaggatcccaccgcaggtcctggcagccccattttgggcagcgggctgtacaggaagcgcagctcggagctgtgtggttagagttcagggcccgattctctcaccagttt

SEQ ID NO: 23659 - DNA, 600 bp, Chicken  19866894237063_6
taacgagtgcttctcggaaggaggaccccacctccctagctcagctcagcactgttgctggatccccttctgcagagttcccttcccatgaccgggctgcccatgagctgagttcctcctctccgtcacatcctgctgggagcacagagaccctgccttcacctgcagcacccacagccccgagaagtgcagattgccacccagcctggaaacagcagcacctcatcctgctgccagcaacacctggcacagcaagggctcmggacaacgctcacacacctcgagcagcagacgaacccycgtgcatccacaggcaaacaaaacaaggcaagcgggcgaacccaaaggcatcacccaggtgacaaaagccttctygcacccaaagcccccagcactggtgggagctgcacgttcccactgcacggcagcccacgtggctccagccctgagcgcaggatcccaccgcaggtcctggcagccccattttgggcagcgggctgtacaggaagcgcagctcggagctgtgtggttagagttcagggcccgattctctcaccagttttcacaacagcatctcattggcctcaaacaggaaatcag

SEQ ID NO: 23660 - DNA, 600 bp, Chicken  19866894237063_7
agttcccttcccatgaccgggctgcccatgagctgagttcctcctctccgtcacatcctgctgggagcacagagaccctgccttcacctgcagcacccacagccccgagaagtgcagattgccacccagcctggaaacagcagcacctcatcctgctgccagcaacacctggcacagcaagggctcmggacaacgctcacacacctcgagcagcagacgaacccycgtgcatccacaggcaaacaaaacaaggcaagcgggcgaacccaaaggcatcacccaggtgacaaaagccttctygcacccaaagcccccagcactggtgggagctgcacgttcccactgcacggcagcccacgtggctccagccctgagcgcaggatcccaccgcaggtcctggcagccccattttgggcagcgggctgtacaggaagcgcagctcggagctgtgtggttagagttcagggcccgattctctcaccagttttcacaacagcatctcattggcctcaaacaggaaatcagcatacgtaaacagctctgctcatttatttgtttttatgcctcgtagactttggtaagggaaggacggctttctct

SEQ ID NO: 23661 - DNA, 561 bp, Chicken  19866894237075_1
tgtttccctgctgactgttgctcagagctgtgccattctcccggagtatgctcagcctgcagagcccacagctcagctgcccatggagtcagggcacgcagactggggccgcccctccagcccccagctccactaacaggtgaagggctgcatgcggctgagccaactctcagcgtctctgtcaaaactgcccatggagagcccagttgtggctcctctgcctccatccctatctgcaggcaggcgggaagtgggggcagctccattgcaccggtctgtgccccgtgctgtcccctccgyccggcagcggctccgggccgcagcatttggggctgcgcttactggaagcggcacagggcaggggtggtgggcgttgctatttctgctcgccacatcctctgacagtttctaagaaccggcggtggattcctggtaagagatttcgatgtgtgacaatatcccgcgagcgcacagccccgtggtagccggctcggctacaagccctgaggtgcgaaatgccacctcgtgccgctcggtgacagcgtgtgggagcggggccag

SEQ ID NO: 23662 - DNA, 600 bp, Chicken  19866894237082_1
cctaaatccgaaacacggcatcataccagctgctaggatggagtggttattcatagtcttctcattactgactcttcaaaatggaataaacttttcattggattagctttatttccctcgctgcttcattctgagctattttagagtaagaaagagctgatgaaaggaaggtatgtaaacttgcaaattacagtttgacaatatcctatgcctatagattggaggaaaaatatcattgattcaaataagtaactaaagataaatgtcatttatgattaatatatttaccaaaaaaatgaytttttttttttcagaaaaataagtaccacataaaccttcagtttagctaatggggtaagtgaagacacgttcaacatctgacaaatgactagctctgttcccagaagtgtctakgctaaactataatagttctctgtctcttatattctatacactataaatatacactatctcttagaaaatggatcaaggtttatatttcagagaaaggtattcatctgttctatgaaacatttctctgagtaattatgaagaaagggtaaaagatacaaggaaacataatgtcagacatagtaaaat

SEQ ID NO: 23663 - DNA, 564 bp, Chicken  19866894237082_2
ccctcgctgcttcattctgagctattttagagtaagaaagagctgatgaaaggaaggtatgtaaacttgcaaattacagtttgacaatatcctatgcctatagattggaggaaaaatatcattgattcaaataagtaactaaagataaatgtcatttatgattaatatatttaccaaaaaaatgattttttttttttcagaaaaataagtaccacataaaccttcagtttagctaatggggtaagtgaagacacgttcaacatctgacaaatgactagctctgttcccagaagtgtctakgctaaactataatagttctctgtctcttatattctatacactataaatatacactatctcttagaaaatggatcaaggtttatatttcagagaaaggtattcatctgttctatgaaacatttctctgagtaattatgaagaaagggtaaaagatacaaggaaacataatgtcagacatagtaaaataaatatcttaatataattactggaaataaaatcaatcacagagatggaataggtaaattgcatacttcaaaaacaatt

SEQ ID NO: 23664 - DNA, 600 bp, Chicken  19866894237086_1
catgcttatctgaccttctaggtcagaaattattggaatacaatgtactgtttgaatttttgttttctgtgaacaaagcacagtgcctcaagcttcagagtaaaagaaagacacttttaaatctgggctagatctactgtctaccctgagtctcttaattctaattgtattgtctacacaggtatgcatccagttgtatcttggtatcagtctgctctcagatatcccaaccaaatttgtgtgaattgctttgatgttcttggaggaggtgggatgtgaaagcctggcaagattactgtsgtttttttaaactctctaatctgttcttctatgaccagaccyttcctgtccctttgagagcattgacagaaatatactctttagttaggagctgcaggacctcctgaatcagctgtgttaaaaagcaataacttgggcagtcgcttttcttatctgtgggcctagaagaaatgaagtcctcgattcagagaggaaatagagaaatgcattatttaagacttcaatgctgttgctgcagaatggattgytttttctttcttttagcagaagcagccaaagagcaatgcatgcatattttag

SEQ ID NO: 23665 - DNA, 600 bp, Chicken  19866894237086_2
atgtactgtttgaatttttgttttctgtgaacaaagcacagtgcctcaagcttcagagtaaaagaaagacacttttaaatctgggctagatctactgtctaccctgagtctcttaattctaattgtattgtctacacaggtatgcatccagttgtatcttggtatcagtctgctctcagatatcccaaccaaatttgtgtgaattgctttgatgttcttggaggaggtgggatgtgaaagcctggcaagattactgtsgtttttttaaactctctaatctgttcttctatgaccagaccyttcctgtccctttgagagcattgacagaaatatactctttagttaggagctgcaggacctcctgaatcagctgtgttaaaaagcaataacttgggcagtcgcttttcttatctgtgggcctagaagaaatgaagtcctcgattcagagaggaaatagagaaatgcattatttaagacttcaatgctgttgctgcagaatggattgytttttctttcttttagcagaagcagccaaagagcaatgcatgcatattttagacactagggactgagactggcatccttgggaacatgtctctt

SEQ ID NO: 23666 - DNA, 486 bp, Chicken  19866894237086_3
ctttgatgttcttggaggaggtgggatgtgaaagcctggcaagattactgtsgtttttttaaactctctaatctgttcttctatgaccagaccyttcctgtccctttgagagcattgacagaaatatactctttagttaggagctgcaggacctcctgaatcagctgtgttaaaaagcaataacttgggcagtcgcttttcttatctgtgggcctagaagaaatgaagtcctcgattcagagaggaaatagagaaatgcattatttaagacttcaatgctgttgctgcagaatggattgytttttctttcttttagcagaagcagccaaagagcaatgcatgcatattttagacactagggactgagactggcatccttgggaacatgtctcttcctgctgtctcaggcaaaaatatagacatttaggtggctctgattaaaaatgaaactagggggaaaattggaggctaggtgaaaaatgaagt

SEQ ID NO: 23667 - DNA, 599 bp, Chicken  19866894237089_1
  misc_feature (1)..(76): n is any nucleotide
nnnnnnnnnnnnnnnnnnnnnnnnnnnnnnnnnnnnnnnnnnnnnnnnnnnnnnnnnnnnnnnnnnnnnnnnnnnncgagttaattttaaagctatgtaaatggaagttaccagcaatatcagactgaagaagtaaatcccaccagggaattacttaaagggtttaaaatggatacgttttcatttcaaagctgaacaatctaatggcttagagcggtcttcagtatgcaggatgagcagtggaggtgtggggaggagcctgccccctcactgccactgagcaggggtttcccacttcaytgcaccttctccttaccctcatccttactcccctgtctattcagggtgtgctctggaaggtgtagtcataaagagctccataacagcttactttgcttccagaaatatgtattaattatcacttttttagtctgcctttattttacgttttgcatgcctgagtctcagagtgaatacaaatagaaggcagaaccttaacgaaaatgactatgaggtgactagtygggtatcagagataatgctgagttgtttattgtcatttagttgtggctctaagaggctctgaaaggatgagctgc

SEQ ID NO: 23668 - DNA, 600 bp, Chicken  19866894237089_2
tatgcaggatgagcagtggaggtgtggggaggagcctgccccctcactgccactgagcaggggtttcccacttcaytgcaccttctccttaccctcatccttactcccctgtctattcagggtgtgctctggaaggtgtagtcataaagagctccataacagcttactttgcttccagaaatatgtattaattatcacttttttagtctgcctttattttacgttttgcatgcctgagtctcagagtgaatacaaatagaaggcagaaccttaacgaaaatgactatgaggtgactagtygggtatcagagataatgctgagttgtttattgtcatttagttgtggctctaagaggctctgaaaggatgagctgcagtgggatgagagggaaggtatattggcttaataaccartaaaaggaaacgcaatatagcaaaacacagtgagtttgtcgggcagagtgctgttcccagtagagttatacagggatgcgtggtgttctgcaaactgctaaacaactcatgaagagcagtgtgagctgtcaggtgtcagactgtgcaggtggtgtggaattactcaggacagccaaatgcaagaag

SEQ ID NO: 23669 - DNA, 600 bp, Chicken  19866894237089_3
attcagggtgtgctctggaaggtgtagtcataaagagctccataacagcttactttgcttccagaaatatgtattaattatcacttttttagtctgcctttattttacgttttgcatgcctgagtctcagagtgaatacaaatagaaggcagaaccttaacgaaaatgactatgaggtgactagtygggtatcagagataatgctgagttgtttattgtcatttagttgtggctctaagaggctctgaaaggatgagctgcagtgggatgagagggaaggtatattggcttaataaccartaaaaggaaacgcaatatagcaaaacacagtgagtttgtcgggcagagtgctgttcccagtagagttatacagggatgcgtggtgttctgcaaactgctaaacaactcatgaagagcagtgtgagctgtcaggtgtcagactgtgcaggtggtgtggaattactcaggacagccaaatgcaagaagagactatgaaggtttgccagaaaatgtcacgatgccaagtgaatcagtaataaaaagcagaaaatattcaacgcaaagcatcacttaactgaagatgaagagtagatatctttg

SEQ ID NO: 23670 - DNA, 600 bp, Chicken  19866894237090_1
gtcaggtgtagtctggcacaaaggtaaaagcagtgcccatgcagctgtgatctccagcacaagagcgtcctgtggctgaacaccagcctcaggggatgccgtaatttagagcacagctccaggaacttaccagcacttctctttgagtggttaattctgtttctcttttcttgctcagtgaactggtctccacttttactcgaattcctgtcgtgtcgcctctgcatctcctctccagtgtctttccagctggatttctctcccctggcttcttgtcctggggacagaaaacgagtcctygcagactgagtttgtctttacagatcaacaaactgtgaaaggatctgacttcccgtttcatttccgttcaagttttcaaagccacacatgctgtgtctgcttctgtatatccaagccacaagaagaatcatcaagcataactcagctatttataaatgtcatgttgttacctccctgcatgccttccaagttgttccagtgctggagatagcagggtcattttcaggctgtgatgtacctgagtgatctgtatcttagtagtcctcagagtgggtctcagagctgcctcttcttttcaac

SEQ ID NO: 23671 - DNA, 600 bp, Chicken  19866894237092_1
tttcttccagtctatctcgtcagtctttggcatctctgctggcaccattcatcactaacaggctgatgagaaaccgaactcggctccaacccatcaatatttgctgtgggagaaactaagatacccgccttcactatgtctgaagagctatacccactctgaactaattcccagtttctaatatggcattttaggaccaagggtcatccatacatattaagaggtttgatcgtgagaactagaccagggtggagcagacatacagggaaaattcctatgttgtctccgtttgaattactrgatcttgcagatataaccrtactgtacaaagatgggccacatgatactagtaagtcttgagcaatacaactctgatctggatttaaactgacagtcggagaggaatgagatatagagcctctacctcgagtcatctaatcctttttctgtgatgtgattttaatataattctttgcattcacatagcatggcttaatctgaattagctttctgagcaagatctggcatgagctgatcatttagcctctccaacctgttttgtttcagccagtgctaattttaggtctcctcaatgttttc

SEQ ID NO: 23672 - DNA, 600 bp, Chicken  19866894237092_2
tcagtctttggcatctctgctggcaccattcatcactaacaggctgatgagaaaccgaactcggctccaacccatcaatatttgctgtgggagaaactaagatacccgccttcactatgtctgaagagctatacccactctgaactaattcccagtttctaatatggcattttaggaccaagggtcatccatacatattaagaggtttgatcgtgagaactagaccagggtggagcagacatacagggaaaattcctatgttgtctccgtttgaattactrgatcttgcagatataaccrtactgtacaaagatgggccacatgatactagtaagtcttgagcaatacaactctgatctggatttaaactgacagtcggagaggaatgagatatagagcctctacctcgagtcatctaatcctttttctgtgatgtgattttaatataattctttgcattcacatagcatggcttaatctgaattagctttctgagcaagatctggcatgagctgatcatttagcctctccaacctgttttgtttcagccagtgctaattttaggtctcctcaatgttttctccagctgttttgtcatga

SEQ ID NO: 23673 - DNA, 600 bp, Chicken  19866894237097_1
cttgcttccccccttctataagctgattattagagagtgcagagagcatagtgacattttacaacaaaggaaataagacttatctgtagtagcaagttttccccttttcctcctaattttgagagaagaaatcacagctaacaatatcacaggcaatgtagacaaaagggttggcagataggtactcagacaccgtagtcagaaagaccctagcaatgcctttaactgcaggacagctaaaggcaagtgcggaaacaagtttagttgcaaagtaatgtagatcctcctggttcacaaagraaagccagctttgttcctttttgcagtcagcacatcacggagaaaaaaaggaacttatctgtaaatctctttaaagcatgatccctatgagaaaataaaaaaggaggcaaaaacaagctacactgaagtagagggggagttttcagcacgacatcggactctgattactgaggataagccaaacctgttgtaaacaataatgcagtaatgtgaagacacatgcaaaatttggaagaaaatgcatgatgttctccaactcagacatgtttacattccttgtagctaccacagaaaacttac

SEQ ID NO: 23674 - DNA, 600 bp, Chicken  19866894237105_1
ctttcctgtcctctaggtagttttaatttccaaattaaaggtgaggtatgagaatcttcctggagagatgtcatcccatacttctagattggagatcattttactgtgagtacaagagtcctgtcttatccttacacaaaccaaaccaaaagatggatttaattcagttctacaggactcagaactgtctagagaagtactcactgaattaatctcaccacctgtattaaaagagactctatgactaatatagaatcgagggaaaggagagaaccaacagagttgtttcattagctgttytttttgttgtttgcaaaacagtctggaggatgcacagaagccaggcatgagtcagtttgctctggatcattaaatcagcatcactgaaatcactgatacacttcaacgtgctctgtgaatgtgcgtgaaaaagtatttgggatttttgttttctttttgcttttaatgtcccaaagaacattttgaactcaagttctccaggcatgaactgtgattccataacctacagtccaggaaaaggagtcttactggggggatgttatgggcagcctgactgctctgctgctcatttcttccttc

SEQ ID NO: 23675 - DNA, 599 bp, Chicken  19866894237111_1
  misc_feature (1)..(159): n is any nucleotide
nnnnnnnnnnnnnnnnnnnnnnnnnnnnnnnnnnnnnnnnnnnnnnnnnnnnnnnnnnnnnnnnnnnnnnnnnnnnnnnnnnnnnnnnnnnnnnnnnnnnnnnnnnnnnnnnnnnnnnnnnnnnnnnnnnnnnnnnnnnnnnnnnnnnnnnnnnnnnnnaaggcagtgtttagggtttgtatccaaagaaataagtgatccccataaacatggttctcctctcctcccagcacccccagcactgggggaacaagctcttcatggcaccaagagaggatggatggaggaggcaccaggcaygtcacraacaaagggctgctccgctcacgcagatgggatcacattaagtgtgcttggatgcttcccaagggacacatccttctttttaacagcaccaccatttattttctgctggctttgagttcctctgacctctcttcgtgctgcccaaatgggctctcctgaagagcaccctgtgcaggccgggagctgacaaccatcttagcacccaacgggagcagtgcaggcagaggcacagagcctggcagcgcattttcttctcagggagatttccagcagaaggaattattgtacacttt

SEQ ID NO: 23676 - DNA, 599 bp, Chicken  19866894237111_2
  misc_feature (1)..(153): n is any nucleotide
nnnnnnnnnnnnnnnnnnnnnnnnnnnnnnnnnnnnnnnnnnnnnnnnnnnnnnnnnnnnnnnnnnnnnnnnnnnnnnnnnnnnnnnnnnnnnnnnnnnnnnnnnnnnnnnnnnnnnnnnnnnnnnnnnnnnnnnnnnnnnnnnnnnnnnnnnaaggcagtgtttagggtttgtatccaaagaaataagtgatccccataaacatggttctcctctcctcccagcacccccagcactgggggaacaagctcttcatggcaccaagagaggatggatggaggaggcaccaggcaygtcacraacaaagggctgctccgctcacgcagatgggatcacattaagtgtgcttggatgcttcccaagggacacatccttctttttaacagcaccaccatttattttctgctggctttgagttcctctgacctctcttcgtgctgcccaaatgggctctcctgaagagcaccctgtgcaggccgggagctgacaaccatcttagcacccaacgggagcagtgcaggcagaggcacagagcctggcagcgcattttcttctcagggagatttccagcagaaggaattattgtacactttatgcct

SEQ ID NO: 23677 - DNA, 511 bp, Chicken  19866894237116_1
tcctgctttcccttgtctctggggtctgcaacagcaggtgagtgctgcggcatcggcctgcttgcatttggtggggagattaatttgtgtgtaggcatcgcagagcatcatgaggttcctgctaaaactcttttgtttcagtcactaccagtcacattgcatcacctggtactgcttctggtttcaggtaccttggagacagccaagaggcatacttttctgatctatcagatcatcagagtgcaaaaggatgggctcctggtgacaggtgatgccagctcctctcatgccctctaaccrtrgcaggctgtgggtcagactgatggacatcatgggcagtcccagcacatctgcagaccccgtgccaaccagtggcatgtcaggttctgtgggcaacagaaggctgaggatcccctggataaacctgctgtcggaaacaggctgctgcagagctgctctgaaagtgtggggagctctgctgaaagcacaaggcagaaacccttagaccttg

SEQ ID NO: 23678 - DNA, 509 bp, Chicken  19866894237116_2
ctgctttcccttgtctctggggtctgcaacagcaggtgagtgctgcggcatcggcctgcttgcatttggtggggagattaatttgtgtgtaggcatcgcagagcatcatgaggttcctgctaaaactcttttgtttcagtcactaccagtcacattgcatcacctggtactgcttctggtttcaggtaccttggagacagccaagaggcatacttttctgatctatcagatcatcagagtgcaaaaggatgggctcctggtgacaggtgatgccagctcctctcatgccctctaaccrtrgcaggctgtgggtcagactgatggacatcatgggcagtcccagcacatctgcagaccccgtgccaaccagtggcatgtcaggttctgtgggcaacagaaggctgaggatcccctggataaacctgctgtcggaaacaggctgctgcagagctgctctgaaagtgtggggagctctgctgaaagcacaaggcagaaacccttagaccttg

SEQ ID NO: 23679 - DNA, 599 bp, Chicken  19866894237132_1
  misc_feature (1)..(223): n is any nucleotide
nnnnnnnnnnnnnnnnnnnnnnnnnnnnnnnnnnnnnnnnnnnnnnnnnnnnnnnnnnnnnnnnnnnnnnnnnnnnnnnnnnnnnnnnnnnnnnnnnnnnnnnnnnnnnnnnnnnnnnnnnnnnnnnnnnnnnnnnnnnnnnnnnnnnnnnnnnnnnnnnnnnnnnnnnnnnnnnnnnnnnnnnnnnnnnnnnnnnnnnnnnnnnnnnnnnnnnnnnnnnnnnttttttttttccccctaaattattaatgtgggaaatttttaaatgtgtatcactaatgtgatctttgagcatgtaaytgatgaaatcctgcctaaagacccccaggaaagtgatttagaaagacaattctttaaaataatgtctgttacctctgattttcccatgctgttaccagttaacacagtatgttcatktatcattgaactcttattaactcactgcagctatgacctgaccttaacaaagttacttcaaattgccaactactaaaatgactgtgtactgtagtagtaacatcttattaaacatgagctgcttttcagatgtgaaaagatactagatattacttttataatttcagcatatagtccaaaga

SEQ ID NO: 23680 - DNA, 599 bp, Chicken  19866894237132_2
  misc_feature (1)..(106): n is any nucleotide
nnnnnnnnnnnnnnnnnnnnnnnnnnnnnnnnnnnnnnnnnnnnnnnnnnnnnnnnnnnnnnnnnnnnnnnnnnnnnnnnnnnnnnnnnnnnnnnnnnnnnnnnnnttttttttttccccctaaattattaatgtgggaaatttttaaatgtgtatcactaatgtgatctttgagcatgtaaytgatgaaatcctgcctaaagacccccaggaaagtgatttagaaagacaattctttaaaataatgtctgttacctctgattttcccatgctgttaccagttaacacagtatgttcatktatcattgaactcttattaactcactgcagctatgacctgaccttaacaaagttacttcaaattgccaactactaaaatgactgtgtactgtagtagtaacatcttattaaacatgagctgcttttcagatgtgaaaagatactagatattacttttataatttcagcatatagtccaaagatagtttgcaagtttagtagattttctaggtaaaagttaatgaattacatactttattgaaattaatcttttatgtctatgtaaacagatttttttctctctctcttcctcataaata

SEQ ID NO: 23681 - DNA, 599 bp, Chicken  19866894237133_1
  misc_feature (1)..(35): n is any nucleotide
nnnnnnnnnnnnnnnnnnnnnnnnnnnnnnnnnnnactgttatgtctaatgcagctgaagatgagactaatgaaagatactactgcatttgtccttcccgtagctggtggtaggtaataacagtctatacatggacacttctggcacatctaaagataagaggctcatttccaaaaactgtattgacaataaagtcagtatgaatcagagtaacaatgaaatatgctttaaagctagccaggaagttcagcaatctggccacaatctctgatcacccccagcatcacatgtaatcatctrtttggctttggagaagggggaaatactcctcatctgcagttaaagatattacctgagaacgcacacagcacattaaccaaaatctagttttctttttttaatggtgctttacttgggctgaggacttccactgcataaaactgagtgtttctccactgagtctgaccaattacagagatggtttagtagcagcgcaaaggagttttgcttcttcaggcttcttgcttctacagtcagcctgcagctacagagttagcagctgtgagcagagrtatgtcatgcatatgtcattcacaytg

SEQ ID NO: 23682 - DNA, 600 bp, Chicken  19866894237133_2
cacccccagcatcacatgtaatcatctrtttggctttggagaagggggaaatactcctcatctgcagttaaagatattacctgagaacgcacacagcacattaaccaaaatctagttttctttttttaatggtgctttacttgggctgaggacttccactgcataaaactgagtgtttctccactgagtctgaccaattacagagatggtttagtagcagcgcaaaggagttttgcttcttcaggcttcttgcttctacagtcagcctgcagctacagagttagcagctgtgagcagagrtatgtcatgcatatgtcattcacaytggaaaatactggcccagcttcttacatggttcaggactcacgaatgtcactgcaatgagatcactttggaagagtcatggatccctttcttcattcaccaaccatttccaatcactctttcatattaacatagcactcatttcttgtttatggacaggaaccagctagttcttggccctgaccatgaatctttgtgccccaaagagcttatacctaactgtccaaacacagagagagcacagaaacatggtcagctttgacaggagaagaaaga

SEQ ID NO: 23683 - DNA, 600 bp, Chicken  19866894237133_3
ctrtttggctttggagaagggggaaatactcctcatctgcagttaaagatattacctgagaacgcacacagcacattaaccaaaatctagttttctttttttaatggtgctttacttgggctgaggacttccactgcataaaactgagtgtttctccactgagtctgaccaattacagagatggtttagtagcagcgcaaaggagttttgcttcttcaggcttcttgcttctacagtcagcctgcagctacagagttagcagctgtgagcagagrtatgtcatgcatatgtcattcacaytggaaaatactggcccagcttcttacatggttcaggactcacgaatgtcactgcaatgagatcactttggaagagtcatggatccctttcttcattcaccaaccatttccaatcactctttcatattaacatagcactcatttcttgtttatggacaggaaccagctagttcttggccctgaccatgaatctttgtgccccaaagagcttatacctaactgtccaaacacagagagagcacagaaacatggtcagctttgacaggagaagaaagatcagggtaacctttagttgtggtca

SEQ ID NO: 23684 - DNA, 599 bp, Chicken  19866894237140_1
  misc_feature (1)..(66): n is any nucleotide
nnnnnnnnnnnnnnnnnnnnnnnnnnnnnnnnnnnnnnnnnnnnnnnnnnnnnnnnnnnnnnnnnnatatacattttccatctttttctcctgcgataggcatgacatgaaattctaaacagaactcaagtttcaaagtcactgaatgttaaggtctgcagcttcgatactagggtagagaggggtcaccgtcttgaaatatttaatttaaatagataacaaaatattgattttattagcataatgaagccccaaaattatggcccttcacaaaattttttttctactcacaaatagacraatggacaaaagcaaggcaaaaggggtagtagtaagctacaggccactaatataacaagaacaaaatgacagctattattttggcagagataatctatgctgaaacacaaaacacacacgcacacaatttctttcaatacaattttcttgtcttcccactgacttctatgattaccacagaaagcagggttctaaacacatttctcaattgaatcttcaatcaataacggtaaaaatttgagaagggagatatgggaaaatgtattatagcattagtaactgtttgcaaaacagaccga

SEQ ID NO: 23685 - DNA, 600 bp, Chicken  19866894237144_1
gagctggaacacaaaggtactaacaacaagaggaaaaatgcctgtttactggattgcatttgttagcacgctgtcttcagatattgttcccccaggaatagtgagaatatgtgctgcacgaacaatgatttaacatctgaaaatggtacttaaagagttttctgtctggtagtaatgtgatgaaggcttctgaatggaacctggggacttcatttcttctatttatctatatgtctctctggttttagtcagcggtaattgcatatttaaccccttaaacaggtttaaccctctcagcamcaacttttcttttccttttgctctcacgtctgcttttgttacactacagctgtgccgaagcattcctggccgaaaatcagacaagcaaaggggattttggagaagttgtggccagggcagcrcaccgagcagcataccaggctcctcctctgctctgcctttccctctgcttcctttttaaggaaagcaatggataatagcagccacggaaagcgttttaatgggattcggtgcggctgggagctgtatagcagagaatgagagcaagaaagagagctgtagcgagggggggtgttgctg

SEQ ID NO: 23686 - DNA, 600 bp, Chicken  19866894237144_2
caatgatttaacatctgaaaatggtacttaaagagttttctgtctggtagtaatgtgatgaaggcttctgaatggaacctggggacttcatttcttctatttatctatatgtctctctggttttagtcagcggtaattgcatatttaaccccttaaacaggtttaaccctctcagcamcaacttttcttttccttttgctctcacgtctgcttttgttacactacagctgtgccgaagcattcctggccgaaaatcagacaagcaaaggggattttggagaagttgtggccagggcagcrcaccgagcagcataccaggctcctcctctgctctgcctttccctctgcttcctttttaaggaaagcaatggataatagcagccacggaaagcgttttaatgggattcggtgcggctgggagctgtatagcagagaatgagagcaagaaagagagctgtagcgagggggggtgttgctgatggggcggtaaatcaacactatgaatttgctgcttacttcagcactctacttctttccatctccctcaattagcacttgttctggggggcttgcttaatagcttacgcgaaacaaatatta

SEQ ID NO: 23687 - DNA, 600 bp, Chicken  19866894237144_3
gctgtgccgaagcattcctggccgaaaatcagacaagcaaaggggattttggagaagttgtggccagggcagcrcaccgagcagcataccaggctcctcctctgctctgcctttccctctgcttcctttttaaggaaagcaatggataatagcagccacggaaagcgttttaatgggattcggtgcggctgggagctgtatagcagagaatgagagcaagaaagagagctgtagcgagggggggtgttgctgatggggcggtaaatcaacactatgaatttgctgcttacttcagcactrtacttctttccatctccctcaattagcacttgttctggggggcttgcttaatagcttacgcgaaacaaatattaacataaattgtttaattacatcaaaatctcgaattcctccaagacgaaaaattgtttttagctgtgagtacatctgcaataaaacatcatcgagttaaagtaaacgagctctaaggaaagccataagattgtagctgagctacttttacagtttattttcatggtatttaaattatgataccggtgggtatttttaattagtgcctctttaaagtgtgcacttgtc

SEQ ID NO: 23688 - DNA, 377 bp, Chicken  19866894237162_1
tattgctctcatttctcccctaacagggacttgaggttcccttgcagaagtgcatcccaaccatcaggtggggctctgtcaatgttcctctgagaacccatttcgcgttgtatacatctcactagagggagaataactgtgatctggtcgttctctgcaagagtgctgcgtgcatagtgctgaaggaatagatttactgtcgaaatggaaaatcaaatttgtactctgaatccacactctttcagactttcaaataatgctgaaagtgtccatgccattaagcattaggggccacacagmtatttcatctgtgttttaccatatttctgccacttttttttttttttcctcaaaggaaagaaaggaaaaataaacta

SEQ ID NO: 23689 - DNA, 599 bp, Chicken  19866894237165_1
  misc_feature (1)..(52): n is any nucleotide
nnnnnnnnnnnnnnnnnnnnnnnnnnnnnnnnnnnnnnnnnnnnnnnnnnnntccggaatgatctttatgtctttatagataaattccaataatcagaaagcaggaaaagtggttgaaaagcacctagcctgtgtagaggtacaaacattatatcattgcacatgctccaggatgcaagtgcctaactgaaatgcagtccttcttggctatgggcaacaacttcctgagccctctgtttgtagaattttttatgtaagatttatgtaagcctttattcacaatctctcacaagttgctgyattggtgacttgcttgctcctctcgagcaatatgcagtctcaaggacactgcttatggccaggagacagtgcagagcattctcagttatggtttattatggagccaagtggggaactttctacatttcattctgcactgtgttgaccttggcaagtgatctcctgtgaagtatgcagagcaacaccagcaaatcacatgttggtaatgtacacccctctttggctggcagacattttgagcattgcaaaaaggtcaatacttctgagactggcttttcagggagctagcagaagtacca

SEQ ID NO: 23690 - DNA, 600 bp, Chicken  19866894237165_2
attatggagccaagtggggaactttctacatttcattctgcactgtgttgaccttggcaagtgatctcctgtgaagtatgcagagcaacaccagcaaatcacatgttggtaatgtacacccctctttggctggcagacattttgagcattgcaaaaaggtcaatacttctgagactggcttttcagggagctagcagaagtaccagcctgtgggatgtttgtccatagcctcctcagcactaccaagctaaattacaattctcaggcttttgttatatacatggagaaaaccagcccttsatcatagcacatctataarcaaagctcctgtgaacctgtgaaccagctcctgtgctgtaaccctcaggaggagtgaaagttagtgctgtgaaaccacctttagcctgtggattgggaagaacaaggtgtaaaaccctgctgtcttgggacatagctgttgtggycacattttgtgtggtcaataatgataaggaatctcacctactgacaagcagatggaacaaygcctcgtagcctcaggctgatgtaacaaagatgtcagaagtttctgtcacaccctcattgcaatgaatgtataat

SEQ ID NO: 23691 - DNA, 600 bp, Chicken  19866894237165_3
aactttctacatttcattctgcactgtgttgaccttggcaagtgatctcctgtgaagtatgcagagcaacaccagcaaatcacatgttggtaatgtacacccctctttggctggcagacattttgagcattgcaaaaaggtcaatacttctgagactggcttttcagggagctagcagaagtaccagcctgtgggatgtttgtccatagcctcctcagcactaccaagctaaattacaattctcaggcttttgttatatacatggagaaaaccagcccttsatcatagcacatctataarcaaagctcctgtgaacctgtgaaccagctcctgtgctgtaaccctcaggaggagtgaaagttagtgctgtgaaaccacctttagcctgtggattgggaagaacaaggtgtaaaaccctgctgtcttgggacatagctgttgtggycacattttgtgtggtcaataatgataaggaatctcacctactgacaagcagatggaacaaygcctcgtagcctcaggctgatgtaacaaagatgtcagaagtttctgtcacaccctcattgcaatgaatgtataattttcataatgaaattcatg

SEQ ID NO: 23692 - DNA, 600 bp, Chicken  19866894237165_4
acttctgagactggcttttcagggagctagcagaagtaccagcctgtgggatgtttgtccatagcctcctcagcactaccaagctaaattacaattctcaggcttttgttatatacatggagaaaaccagcccttsatcatagcacatctataarcaaagctcctgtgaacctgtgaaccagctcctgtgctgtaaccctcaggaggagtgaaagttagtgctgtgaaaccacctttagcctgtggattgggaagaacaaggtgtaaaaccctgctgtcttgggacatagctgttgtggycacattttgtgtggtcaataatgataaggaatctcacctactgacaagcagatggaacaaygcctcgtagcctcaggctgatgtaacaaagatgtcagaagtttctgtcacaccctcattgcaatgaatgtataattttcataatgaaattcatgttatattttaattctacttccgaaatacatgckatcttgggttacattctgattgaatttgagctgggtttattttctggtgatgagcttcttgtatctttcattaagaaaccaagcagagatcttcaaaaaaatgcttatttta

SEQ ID NO: 23693 - DNA, 600 bp, Chicken  19866894237165_5
tagcctcctcagcactaccaagctaaattacaattctcaggcttttgttatatacatggagaaaaccagcccttsatcatagcacatctataarcaaagctcctgtgaacctgtgaaccagctcctgtgctgtaaccctcaggaggagtgaaagttagtgctgtgaaaccacctttagcctgtggattgggaagaacaaggtgtaaaaccctgctgtcttgggacatagctgttgtggycacattttgtgtggtcaataatgataaggaatctcacctactgacaagcagatggaacaaygcctcgtagcctcaggctgatgtaacaaagatgtcagaagtttctgtcacaccctcattgcaatgaatgtataattttcataatgaaattcatgttatattttaattctacttccgaaatacatgckatcttgggttacattctgattgaatttgagctgggtttattttctggtgatgagcttcttgtatctttcattaagaaaccaagcagagatcttcaaaaaaatgcttattttaatctcaggtcaaaaatatttctgtacattacaaacctaacacaggaacctctcaaagatct

SEQ ID NO: 23694 - DNA, 600 bp, Chicken  19866894237165_6
tgctgtaaccctcaggaggagtgaaagttagtgctgtgaaaccacctttagcctgtggattgggaagaacaaggtgtaaaaccctgctgtcttgggacatagctgttgtggycacattttgtgtggtcaataatgataaggaatctcacctactgacaagcagatggaacaaygcctcgtagcctcaggctgatgtaacaaagatgtcagaagtttctgtcacaccctcattgcaatgaatgtataattttcataatgaaattcatgttatattttaattctacttccgaaatacatgckatcttgggttacattctgattgaatttgagctgggtttattttctggtgatgagcttcttgtatctttcattaagaaaccaagcagagatcttcaaaaaaatgcttattttaatctcaggtcaaaaatatttctgtacattacaaacctaacacaggaacctctcaaagatctcttaaatataacatcaggaaaaaaatctgcttagggagtgagagatgtaaggagcagtgaatccccacatgagaggacatccacttcaaatgaagatttccttatatcaggttacaggtagccatgt

SEQ ID NO: 23695 - DNA, 600 bp, Chicken  19866894237166_1
agcggagctgtccttgaggaaaacccagacctccatctgtgctctgctccccttcaaacagctgcttccagggcggtgtaagccacgatgcatccattactttaaataaaattgcaatgctggaacaagcaaaataaagttttccttagccccctggagcactgttggacacccttcccctgcccagggcttatttcatttccttcaggagtctggccaggggcgagcaatggctgcgctctacaagtagtaaaaaagtgctcttttttggctgcaagctgattgctgccacatctcacwgacaggggagggcagcccacagcctctgaagagcaccttcaggctgtgcttgagcacctgctcagcagtgagggccagcagatatgcttgtggtggtcttgactctgtraccrygatcagtaggccagaaccacatggctcgtcactgtccttccacctaccacaagctctgttttccatctctccctctctctgccttacttttcttttcctgagttgcatttaccatactccgttgtctcttgccatgagctgcagacttgctgctttaagtctgaggctctagatttgtctcattct

SEQ ID NO: 23696 - DNA, 589 bp, Chicken  19866894237166_2
aattgcaatgctggaacaagcaaaataaagttttccttagccccctggagcactgttggacacccttcccctgcccagggcttatttcatttccttcaggagtctggccaggggcgagcaatggctgcgctctacaagtagtaaaaaagtgctcttttttggctgcaagctgattgctgccacatctcacwgacaggggagggcagcccacagcctctgaagagcaccttcaggctgtgcttgagcacctgctcagcagtgagggccagcagatatgcttgtggtggtcttgactctgtraccrygatcagtaggccagaaccacatggctcgtcactgtccttccacctaccacaagctctgttttccatctctccctctctctgccttacttttcttttcctgagttgcatttaccatactccgttgtctcttgccatgagctgcagacttgctgctttaagtctgaggctctagatttgtctcattctccaggatgttgctgggcttgatcttgcctgctttaagggatgtgatttcagggctcccaagtaacattcaaaatgaaaaataagtaatgaactctgct

SEQ ID NO: 23697 - DNA, 585 bp, Chicken  19866894237166_3
gcaatgctggaacaagcaaaataaagttttccttagccccctggagcactgttggacacccttcccctgcccagggcttatttcatttccttcaggagtctggccaggggcgagcaatggctgcgctctacaagtagtaaaaaagtgctcttttttggctgcaagctgattgctgccacatctcacwgacaggggagggcagcccacagcctctgaagagcaccttcaggctgtgcttgagcacctgctcagcagtgagggccagcagatatgcttgtggtggtcttgactctgtraccrygatcagtaggccagaaccacatggctcgtcactgtccttccacctaccacaagctctgttttccatctctccctctctctgccttacttttcttttcctgagttgcatttaccatactccgttgtctcttgccatgagctgcagacttgctgctttaagtctgaggctctagatttgtctcattctccaggatgttgctgggcttgatcttgcctgctttaagggatgtgatttcagggctcccaagtaacattcaaaatgaaaaataagtaatgaactctgct

SEQ ID NO: 23698 - DNA, 584 bp, Chicken  19866894237166_4
caatgctggaacaagcaaaataaagttttccttagccccctggagcactgttggacacccttcccctgcccagggcttatttcatttccttcaggagtctggccaggggcgagcaatggctgcgctctacaagtagtaaaaaagtgctcttttttggctgcaagctgattgctgccacatctcacwgacaggggagggcagcccacagcctctgaagagcaccttcaggctgtgcttgagcacctgctcagcagtgagggccagcagatatgcttgtggtggtcttgactctgtraccrygatcagtaggccagaaccacatggctcgtcactgtccttccacctaccacaagctctgttttccatctctccctctctctgccttacttttcttttcctgagttgcatttaccatactccgttgtctcttgccatgagctgcagacttgctgctttaagtctgaggctctagatttgtctcattctccaggatgttgctgggcttgatcttgcctgctttaagggatgtgatttcagggctcccaagtaacattcaaaatgaaaaataagtaatgaactctgct

SEQ ID NO: 23699 - DNA, 600 bp, Chicken  19866894237171_1
ctcctggggcactcaagagtttgagaggctgaagaggaagaaccccgctgactatgagaacgaccagtgactgcatctctaagatgttaccgctgtgtattaccaacggcctgttgctatgcttgttcatgtaaccagagggacagggagataatatataataatgcctaataaactttaactttggcccatgtctttatacggagtctgtcttgaaatgtttaaggtgaattgcaccacgttatctgtcaggtgaattccatacagagagataactgtactaaaattctctgggctcamattgctttatttcacgtttycagactctctgactcctacttcctggaaatacttctcagtgtagttagctgaaggcagcccttgctacagcacaggtgatgagaaataacagtacagcggtgagctctttgatccctttatctttccctcactaaccactttttgcttgaattagaatacattctagtctccgtacctgtgaagaacaaacagtctgatatgatactgacaaaaattgcccaactggactgatggttcagacttgaatagagctttgaccttctatacaattaccaagtt

SEQ ID NO: 23700 - DNA, 600 bp, Chicken  19866894237171_2
ttgagaggctgaagaggaagaaccccgctgactatgagaacgaccagtgactgcatctctaagatgttaccgctgtgtattaccaacggcctgttgctatgcttgttcatgtaaccagagggacagggagataatatataataatgcctaataaactttaactttggcccatgtctttatacggagtctgtcttgaaatgtttaaggtgaattgcaccacgttatctgtcaggtgaattccatacagagagataactgtactaaaattctctgggctcamattgctttatttcacgtttycagactctctgactcctacttcctggaaatacttctcagtgtagttagctgaaggcagcccttgctacagcacaggtgatgagaaataacagtacagcggtgagctctttgatccctttatctttccctcactaaccactttttgcttgaattagaatacattctagtctccgtacctgtgaagaacaaacagtctgatatgatactgacaaaaattgcccaactggactgatggttcagacttgaatagagctttgaccttctatacaattaccaagttatcatctgattattattaat

SEQ ID NO: 23701 - DNA, 600 bp, Chicken  19866894237171_3
gcttgaattagaatacattctagtctccgtacctgtgaagaacaaacagtctgatatgatactgacaaaaattgcccaactggactgatggttcagacttgaatagagctttgaccttctatacaattaccaagttatcatctgattattattaataaatatgataaactgcaattctgatgtttggttagtgttagttggctgagtaattcctagggaactacaaggaagtaaaaggattattttaacacccaaagatgatttaaggaactctattactaccattatattttcaaacaygtgactacaaaattcactttagrgctcttacgtatacgacacgctttgctctccaaagtccagaacatttggctcattcctttatcttttatttttcttagtgttgagctgtctgtctcaaattcaagcataagcaaagtatcacctttatctccctgacacgctattcctgtagctggtactgaaaatttatctaatctgcagagtgtgacgtttttctgtgatagttcctttatgggttaagggctgagctgtctgaaagacgaagatgctcagtctctcacttcagcaaactgggag

SEQ ID NO: 23702 - DNA, 600 bp, Chicken  19866894237171_4
tctccgtacctgtgaagaacaaacagtctgatatgatactgacaaaaattgcccaactggactgatggttcagacttgaatagagctttgaccttctatacaattaccaagttatcatctgattattattaataaatatgataaactgcaattctgatgtttggttagtgttagttggctgagtaattcctagggaactacaaggaagtaaaaggattattttaacacccaaagatgatttaaggaactctattactaccattatattttcaaacaygtgactacaaaattcactttagrgctcttacgtatacgacacgctttgctctccaaagtccagaacatttggctcattcctttatcttttatttttcttagtgttgagctgtctgtctcaaattcaagcataagcaaagtatcacctttatctccctgacacgctattcctgtagctggtactgaaaatttatctaatctgcagagtgtgacgtttttctgtgatagttcctttatgggttaagggctgagctgtctgaaagacgaagatgctcagtctctcacttcagcaaactgggagtatacaccttttatagctgaagg

SEQ ID NO: 23703 - DNA, 600 bp, Chicken  19866894237171_5
ggctttcttgttctgtactcccaggtgcagtctgaggttggcagaaacaagtaaagcaagctactcctcagtgctgcaagttctgctaaaaataaactgtctaactctctttcagttcaatcctatcttctgcttaagcaagggagcaatgaactgggtactccaattctgagaacagtcaaagatgtccacaggcatacttgattcagaactcttatttgggtcctatttacttaccctcaaaaagcaacagcagttgagtagtagcctgaataacaggacatctaagcttcatacagygggagcttgagtcagtacttctttttcaatgcctctcagcagttctgttgagcacgagcagctcagaacagagcccagcctctctgatgaggtctctgccctcattcacagacagctgaactatgtcctgaccagctgctagactactgtaaacaggtggcacattcagctgccgctggtgagtttacctacaacccggcagccccgtgagcctcgarcagcagcactgctgccaggccctggcttttaaccttcmtgctgcagggtcagcagatgggctggagctgctccctgtctgct

SEQ ID NO: 23704 - DNA, 600 bp, Chicken  19866894237171_6
ttgggtcctatttacttaccctcaaaaagcaacagcagttgagtagtagcctgaataacaggacatctaagcttcatacagygggagcttgagtcagtacttctttttcaatgcctctcagcagttctgttgagcacgagcagctcagaacagagcccagcctctctgatgaggtctctgccctcattcacagacagctgaactatgtcctgaccagctgctagactactgtaaacaggtggcacattcagctgccgctggtgagtttacctacaacccggcagccccgtgagcctcgarcagcagcactgctgccaggccctggcttttaaccttcmtgctgcagggtcagcagatgggctggagctgctccctgtctgctcctgcttctggcagtgtctgctgcaatcccgctgagctgctgtcatctctgcagttgcctgcaggcccagcccgtgcagcagggagcgagatgcaaacccggcacatcggcacactgctgcggtggtggctcccacctgccaggtgggacgtgggagttcagctgagcagcayttcagagtctgaacaatgcagttgaaaatttctccatcacctgat

SEQ ID NO: 23705 - DNA, 600 bp, Chicken  19866894237171_7
ttgagtagtagcctgaataacaggacatctaagcttcatacagygggagcttgagtcagtacttctttttcaatgcctctcagcagttctgttgagcacgagcagctcagaacagagcccagcctctctgatgaggtctctgccctcattcacagacagctgaactatgtcctgaccagctgctagactactgtaaacaggtggcacattcagctgccgctggtgagtttacctacaacccggcagccccgtgagcctcgarcagcagcactgctgccaggccctggcttttaaccttcmtgctgcagggtcagcagatgggctggagctgctccctgtctgctcctgcttctggcagtgtctgctgcaatcccgctgagctgctgtcatctctgcagttgcctgcaggcccagcccgtgcagcagggagcgagatgcaaacccggcacatcggcacactgctgcggtggtggctcccacctgccaggtgggacgtgggagttcagctgagcagcayttcagagtctgaacaatgcagttgaaaatttctccatcacctgatttattttctgatgttccttcactaaatgttaaaagtgg

SEQ ID NO: 23706 - DNA, 546 bp, Chicken  19866894237171_8
cgctggtgagtttacctacaacccggcagccccgtgagcctcgarcagcagcactgctgccaggccctggcttttaaccttcmtgctgcagggtcagcagatgggctggagctgctccctgtctgctcctgcttctggcagtgtctgctgcaatcccgctgagctgctgtcatctctgcagttgcctgcaggcccagcccgtgcagcagggagcgagatgcaaacccggcacatcggcacactgctgcggtggtggctcccacctgccaggtgggacgtgggagttcagctgagcagcayttcagagtctgaacaatgcagttgaaaatttctccatcacctgatttattttctgatgttccttcactaaatgttaaaagtggcaacacagcagtgttttatgttttctttttcaattgtttaaacaattgcaatggctgttactggcagcagtagacctggactgcgctgtatttgcatacatggaaacaattagtccctttttctttcctcacacagctaaacagattgcagcctaaaagggat

SEQ ID NO: 23707 - DNA, 600 bp, Chicken  19866894237173_1
gaataactgcactacagctctgtaggtgctgcaatctctgagataatgttgcatttgggaaataagtaccgtttcattcttggtgctccctctgttgtcatttgtttgctttcaggcagtaggcttggagggaaagcagtccagatttctgtctggttttaacaaagtgttctgataacattaattgacccttgaacgtgcacagtgatagttctaagccacagtggatgtctcactaatgcagcaagtctctctacaaaaagagtaagtggtttgcttggaggagagcctggttgagcrtgccttcctgtgcacattcccacatgttgcgttcccctcagagctgtgctggtcccggcactttgcagtgtgatgagtggcactgacacaaaagccatatttctgccaagtccaccttgaactaatttaagaaacagtcagacctggtttgtgcagctctaccacttcttgaggcatacatctgaagaaaaggtttgcattactgacacatccctagcaatataaacagaagaaatatacgtataatttccgcagaaattggagcggaaggggctctctttggatagggatggctctggg

SEQ ID NO: 23708 - DNA, 421 bp, Chicken  19866894237179_1
aggggtgaggggcgcggaccccctttggtacagcccagtaggggggactcggggtgctgcgcccgccgtggcggctgtcccttagtggggggctgctggggtcaccccgcccacggggacggggagcgggcggcagtgggacagctggggggcaaagggaggggggacagcccacagtgggggtccatcggcaggcagcgaggggacaaggcgtggggtaagcaggtgggagggggtgtccctaaacgcatcaatgggtgaacgcatccgaagcacgttcgttgtgccaaggatgtgatrtgctgcgaggagcgctgcctggggggatgtgtgccctcggggtgccctccccagcccacgggtctgccggcgaaaggggtggccgtgggtctgccgtgtgctgtgtggggtggagatggaa

SEQ ID NO: 23709 - DNA, 599 bp, Chicken  19866894237188_1
  misc_feature (1)..(22): n is any nucleotide
nnnnnnnnnnnnnnnnnnnnnnctttaattcttattttcttttaggctcctgctttcttaataaaacctatatttttgaaaatcagttttaaacactgcaaattatcccaaagtagcatttattttttgctagtaagagataagtttacatatagagaatatacttatacactcagtgcctgactcaagcccatttcagtctataggtgcctttccattgctagaataagttttgagagatgacttgctaaggtaatccagccatttataaagtaattagcataaaccacagagtgtgasgtatgtgtgaggatacattttttagactttttaggatacattttctagatattttttttacattttagactcacatttgtgagtctaagcatccatcattaaaacttagagcatttataagagcaaggcttagttttcctaactacagctggcaactgtttccttttgattaagcactgtgaagtgctgagtattccagaccagtaatggcacatacagcgttgaataaaactgagcccttgcctctcaccacatgaccctggatgactttgactttgttagcaatagcacagtatttg

SEQ ID NO: 23710 - DNA, 600 bp, Chicken  19866894237194_1
ggaggactttctattgttcgatttttctcctggacattaccaacccaggatactttccagaatatacttgccccaacactcagatttttatttgcttcaactgttgtttctagtcatataaactactagcaactgttgatagatacttctcttcccagcaactgttatgaataaaaccaccttccagagtaattactggatggcatttatggatgaatgtgtcttcccttctccatataaaatgcggaatttagcatttttctacatgtgctcttatttctgttacttttcttctttttytctctctctctcatttgtttgtttgttcgtttgttatttgatttacataatggaatagagattgaaacagattgaaggagagactctcctttaggaggctaaactgttgcacatactgtgttgcaaagawtagctgtgctctttactttcacttagtgtccacagaatgggtggaactgaaaacaggagagaagatagagtactgcagtactgctatcaggaatcacctacatattagtaagagaactgagttaggttggtttaggattgagagaatatcagtttctaagatacaagtga

SEQ ID NO: 23711 - DNA, 600 bp, Chicken  19866894237194_2
aactgttgatagatacttctcttcccagcaactgttatgaataaaaccaccttccagagtaattactggatggcatttatggatgaatgtgtcttcccttctccatataaaatgcggaatttagcatttttctacatgtgctcttatttctgttacttttcttctttttytctctctctctcatttgtttgtttgttcgtttgttatttgatttacataatggaatagagattgaaacagattgaaggagagactctcctttaggaggctaaactgttgcacatactgtgttgcaaagawtagctgtgctctttactttcacttagtgtccacagaatgggtggaactgaaaacaggagagaagatagagtactgcagtactgctatcaggaatcacctacatattagtaagagaactgagttaggttggtttaggattgagagaatatcagtttctaagatacaagtgaagtatgtaaaaaaataataaataaatatataaaaggccaaggagtatcaatttgaatatggagttctaagaagaatataggaagttatttaatgtctttagaaaaatagttgggagcactgtatggttca

SEQ ID NO: 23712 - DNA, 599 bp, Chicken  19866894237205_1
  misc_feature (1)..(40): n is any nucleotide
nnnnnnnnnnnnnnnnnnnnnnnnnnnnnnnnnnnnnnnncctcatttgtttgtattaataaactttagtcactcttctctaatcctggaatgggctttgagatacttaggctactgcagaaactgagtaatgctgctgttttgaatccaggggaataaaggtgtatttgcatcatattcctggactggagggaaatattttcaagagactgtagagagcttcatggcagaactgagttttgggggtgagaaaggacgtgaaggatggtgtctcattccatccctccaagcttcttcaarcttgcactggcgaaggcagagtttgtttaccatgattaaccatgccaatttatccattggtaatgaaaaactctgtgaattattactttttttcaatgagattcaccatatagctttccaaaatgtagatatycataggctaaaaaggtggataagaactcacagattcagcagaagaatatcttacttcaggtagtggaaaaccatctcttctgcatatgtcttctcagattagtctgcatttrctcaatgtttttacattagtaacgtaataaaacatttgaaaacaatctcttatg

SEQ ID NO: 23713 - DNA, 600 bp, Chicken  19866894237205_2
ctgctgttttgaatccaggggaataaaggtgtatttgcatcatattcctggactggagggaaatattttcaagagactgtagagagcttcatggcagaactgagttttgggggtgagaaaggacgtgaaggatggtgtctcattccatccctccaagcttcttcaarcttgcactggcgaaggcagagtttgtttaccatgattaaccatgccaatttatccattggtaatgaaaaactctgtgaattattactttttttcaatgagattcaccatatagctttccaaaatgtagatatycataggctaaaaaggtggataagaactcacagattcagcagaagaatatcttacttcaggtagtggaaaaccatctcttctgcatatgtcttctcagattagtctgcatttrctcaatgtttttacattagtaacgtaataaaacatttgaaaacaatctcttatgtaattatcagtgctctgattccatcagaaactccccatatatctgacttcaaaagattaggctctttaccaaacagagtaaagactgcctgtcagtaaagactaatatctaatcacatctatttttactgcagt

SEQ ID NO: 23714 - DNA, 600 bp, Chicken  19866894237205_3
gtgagaaaggacgtgaaggatggtgtctcattccatccctccaagcttcttcaarcttgcactggcgaaggcagagtttgtttaccatgattaaccatgccaatttatccattggtaatgaaaaactctgtgaattattactttttttcaatgagattcaccatatagctttccaaaatgtagatatycataggctaaaaaggtggataagaactcacagattcagcagaagaatatcttacttcaggtagtggaaaaccatctcttctgcatatgtcttctcagattagtctgcatttrctcaatgtttttacattagtaacgtaataaaacatttgaaaacaatctcttatgtaattatcagtgctctgattccatcagaaactccccatatatctgacttcaaaagattaggctctttaccaaacagagtaaagactgcctgtcagtaaagactaatatctaatcacatctatttttactgcagtaaaaatcatttttaaatgccttatttgttaggacttttcatctaaaagtgtgaaataaaggatatatwttttttaacagaagtgctscaaaagtaaagatgggaaatagcac

SEQ ID NO: 23715 - DNA, 577 bp, Chicken  19866894237205_4
aaccatctcttctgcatatgtcttctcagattagtctgcatttrctcaatgtttttacattagtaacgtaataaaacatttgaaaacaatctcttatgtaattatcagtgctctgattccatcagaaactccccatatatctgacttcaaaagattaggctctttaccaaacagagtaaagactgcctgtcagtaaagactaatatctaatcacatctatttttactgcagtaaaaatcatttttaaatgccttatttgttaggacttttcatctaaaagtgtgaaataaaggatatatwttttttaacagaagtgctscaaaagtaaagatgggaaatagcacaatgtcacctgcaaaactaacttgtaacaggagcactggccatgaagatttcagttatattctggccattaggaaaaaaacaaacaaacagtgagtgttataatctgagaatagctgtgtggttaagtaagggaagccaatatatggagcaaggttctgtctgactgaatcatggataaacatgaatggcaaaggtataatgtgatttctcagttgtcttaggcaaaggaaat

SEQ ID NO: 23716 - DNA, 558 bp, Chicken  19866894237205_5
gtcttctcagattagtctgcatttrctcaatgtttttacattagtaacgtaataaaacatttgaaaacaatctcttatgtaattatcagtgctctgattccatcagaaactccccatatatctgacttcaaaagattaggctctttaccaaacagagtaaagactgcctgtcagtaaagactaatatctaatcacatctatttttactgcagtaaaaatcatttttaaatgccttatttgttaggacttttcatctaaaagtgtgaaataaaggatatatwttttttaacagaagtgctscaaaagtaaagatgggaaatagcacaatgtcacctgcaaaactaacttgtaacaggagcactggccatgaagatttcagttatattctggccattaggaaaaaaacaaacaaacagtgagtgttataatctgagaatagctgtgtggttaagtaagggaagccaatatatggagcaaggttctgtctgactgaatcatggataaacatgaatggcaaaggtataatgtgatttctcagttgtcttaggcaaaggaaat

SEQ ID NO: 23717 - DNA, 600 bp, Chicken  19866894237211_1
ataagtatcagcaagcactcaacaaaattttcctgttttacaagttaaccttactgctctaactcattgctatttgacctcatacatgagtgtatccacaaagtaggtattagaagtaggaaaactccttccacacaattctcacaaatatatccccatagctcctagagagtccaatctgaaataagaccttgtcatacatcaaaaaatgtttgagaatgttttgagctcctcaacaccagacaagtcagctgcatttaaataagtgtttactaattgcaatccattttgttctttccwgcmtcttttacaggcttctttaatttctgaattagcagaaagtaatgaccaccttataaccaatttaagtcccacctccttttctctcattcaaaagaaacaaaagcataagttgccttcctttatcactacactgtaatatattctgagttcagaagggatttcccctgaagagacagagacatgagggaggagtcaccataaagaattaattaacaaaaaaatatttttaattatgttggttgacatttgctgcctcggaaggaacacctcatgtttacgtgagtcacaaacaccgaa

SEQ ID NO: 23718 - DNA, 600 bp, Chicken  19866894237211_2
agtatcagcaagcactcaacaaaattttcctgttttacaagttaaccttactgctctaactcattgctatttgacctcatacatgagtgtatccacaaagtaggtattagaagtaggaaaactccttccacacaattctcacaaatatatccccatagctcctagagagtccaatctgaaataagaccttgtcatacatcaaaaaatgtttgagaatgttttgagctcctcaacaccagacaagtcagctgcatttaaataagtgtttactaattgcaatccattttgttctttccwgcmtcttttacaggcttctttaatttctgaattagcagaaagtaatgaccaccttataaccaatttaagtcccacctccttttctctcattcaaaagaaacaaaagcataagttgccttcctttatcactacactgtaatatattctgagttcagaagggatttcccctgaagagacagagacatgagggaggagtcaccataaagaattaattaacaaaaaaatatttttaattatgttggttgacatttgctgcctcggaaggaacacctcatgtttacgtgagtcacaaacaccgaagct

SEQ ID NO: 23719 - DNA, 600 bp, Chicken  19866894237213_1
atattttgtggaattatcagataatatcttcagagtttgaatatatatattttcagaacacaacaactaaattttccaaggaaataatacagagcttgctttcatgttttgtacattttacaaaagaatgaacaaaactataaatgctaaaaaaaaaatgtaaaggaaaaataacaaaactaagggcaggcagtggcaatagcagtagaagacacagttagagaaaggaagaagaacttgacttatcccactgatttctggacagatagtccaccaggataataatgcccggcaagacamaaggcagctgtaagctctgcttttctatctgatgactgtatgagttagtttccttttaatatgcatctagccatcaaattcacacagtacatctagtgacatatttaaaattagagtgtaattacaggtgctgcagagaccaagcagcactgtgagaaagcacagaggtgtggtaaccagggatgtgttgggaggatggcggygaggctggaggtgcagtagttaagagtttcccagagcactccttgggcagtgccctcacttrctgcctgggaatggtctgtgctactgcatgccagg

SEQ ID NO: 23720 - DNA, 600 bp, Chicken  19866894237213_2
agtagaagacacagttagagaaaggaagaagaacttgacttatcccactgatttctggacagatagtccaccaggataataatgcccggcaagacamaaggcagctgtaagctctgcttttctatctgatgactgtatgagttagtttccttttaatatgcatctagccatcaaattcacacagtacatctagtgacatatttaaaattagagtgtaattacaggtgctgcagagaccaagcagcactgtgagaaagcacagaggtgtggtaaccagggatgtgttgggaggatggcggygaggctggaggtgcagtagttaagagtttcccagagcactccttgggcagtgccctcacttrctgcctgggaatggtctgtgctactgcatgccaggtttagagggaatagaagccatctgacacaagtagcaaatttttcctttctaaaaccacagttaaatagttaaatataatcacccactctacctcatttccttgtgggccgctcttcaggtatttttgccctgttagtctcagaaactctttcctagacctctgtttccaagtctacctatacataagatcacaaccagtcttt

SEQ ID NO: 23721 - DNA, 541 bp, Chicken  19866894237213_3
atagtccaccaggataataatgcccggcaagacamaaggcagctgtaagctctgcttttctatctgatgactgtatgagttagtttccttttaatatgcatctagccatcaaattcacacagtacatctagtgacatatttaaaattagagtgtaattacaggtgctgcagagaccaagcagcactgtgagaaagcacagaggtgtggtaaccagggatgtgttgggaggatggcggygaggctggaggtgcagtagttaagagtttcccagagcactccttgggcagtgccctcacttrctgcctgggaatggtctgtgctactgcatgccaggtttagagggaatagaagccatctgacacaagtagcaaatttttcctttctaaaaccacagttaaatagttaaatataatcacccactctacctcatttccttgtgggccgctcttcaggtatttttgccctgttagtctcagaaactctttcctagacctctgtttccaagtctacctatacataagatcacaaccagtctttcag

SEQ ID NO: 23722 - DNA, 600 bp, Chicken  19866894237216_1
cccctgtactcagcactggtgaggccgcatcctcgagtactatgtccagttttgggcccctcactgtaagaaagacatcgaggccctggagcgtgtccagaggaggacaacaaagctggtgaggggtctggagcacaggccttatgaggagcggctgaaggggctgggattgttcagtctggagaagaggaggcacaggggagacactattgctctctataactacctgaaggcaggttgtagtgagctgggggtcggcctcttctcttgtgtgactagtgataggactagagggaatgkcttcaagctgtgccagggaagattcagtctggacgttaggaaataytacttctctgaaagggtggtcaggcactggaatgggctgcccagggaggtgggtggagtcactgaccctggtggtgttcaaagagcgtttggatgttgtgttgagggatatggtttagcgagaaccattgatgaarggcgaatggttggactggatgatcctgtgagtcttttccagccttagtgattctatgattctatagcctgcttttaagtgcattatcaatgcagatatgtgttttactctggtattcg

SEQ ID NO: 23723 - DNA, 600 bp, Chicken  19866894237216_2
cagttttgggcccctcactgtaagaaagacatcgaggccctggagcgtgtccagaggaggacaacaaagctggtgaggggtctggagcacaggccttatgaggagcggctgaaggggctgggattgttcagtctggagaagaggaggcacaggggagacactattgctctctataactacctgaaggcaggttgtagtgagctgggggtcggcctcttctcttgtgtgactagtgataggactagagggaatgkcttcaagctgtgccagggaagattcagtctggacgttaggaaataytacttctctgaaagggtggtcaggcactggaatgggctgcccagggaggtgggtggagtcactgaccctggtggtgttcaaagagcgtttggatgttgtgttgagggatatggtttagcgagaaccattgatgaarggcgaatggttggactggatgatcctgtgagtcttttccagccttagtgattctatgattctatagcctgcttttaagtgcattatcaatgcagatatgtgttttactctggtattcggatgatgcttggacctgtgggctttgtattacaatggacagaagct

SEQ ID NO: 23724 - DNA, 565 bp, Chicken  19866894237216_3
agaagaggaggcacaggggagacactattgctctctataactacctgaaggcaggttgtagtgagctgggggtcggcctcttctcttgtgtgactagtgataggactagagggaatgkcttcaagctgtgccagggaagattcagtctggacgttaggaaataytacttctctgaaagggtggtcaggcactggaatgggctgcccagggaggtgggtggagtcactgaccctggtggtgttcaaagagcgtttggatgttgtgttgagggatatggtttagcgagaaccattgatgaarggcgaatggttggactggatgatcctgtgagtcttttccagccttagtgattctatgattctatagcctgcttttaagtgcattatcaatgcagatatgtgttttactctggtattcggatgatgcttggacctgtgggctttgtattacaatggacagaagctcctgccaaattttaaggaactgtgctttgaggacacagccttttacatcatgattgtgaatgacgttttattgtggtactattaggcaagtcataaaagct

SEQ ID NO: 23725 - DNA, 600 bp, Chicken  19866894237233_1
tggggagaggtggaataagaggaaaacacaaagggaaccagccttagcaagcaaaaactgctgaatgctgtttttagatgctcagaggatttttttattattattatttcaatttagcacagatgagctcccttgcccattgccccttatcttatatttgggcatttaatcactcccatatatccatatggcttttgactttcttctgttaaagatcatgcttgcatttcttcagtccaattttccagagctactttgaattctaatcccagcaccctgagtgactgagcctcttcatckcacaaggactgcttatgttgcatgccttgttttacaaggacaaatgtgatcttcatggatatgagtgtaatttatgcgtcctataaaaaataatccctttttgtttctctaaatggtactgaaatgtgaagttaatgcagaaacacaagtatgtgaagataatgaaggatgtagttgctaagcttggtggaacatcatttatgcctcrtgcagagtgctgaactaagtaaaatcttgatctgcatcaaatgaagtgaacttaactgacttccttgaagatgcataaacgagaaggccagg

SEQ ID NO: 23726 - DNA, 600 bp, Chicken  19866894237233_2
ttaaagatcatgcttgcatttcttcagtccaattttccagagctactttgaattctaatcccagcaccctgagtgactgagcctcttcatckcacaaggactgcttatgttgcatgccttgttttacaaggacaaatgtgatcttcatggatatgagtgtaatttatgcgtcctataaaaaataatccctttttgtttctctaaatggtactgaaatgtgaagttaatgcagaaacacaagtatgtgaagataatgaaggatgtagttgctaagcttggtggaacatcatttatgcctcrtgcagagtgctgaactaagtaaaatcttgatctgcatcaaatgaagtgaacttaactgacttccttgaagatgcataaacgagaaggccaggaagcaaagctgcagtgttgtctggctgcatgcatagtgggagatacgaatccaaccattctggcaccaggctcagaagatgcagctgatcaataaactcaagtgaacactccaaactgtttgcttcttcttttttttttttttttggaaaattttcagttggattcaggtatacaaataaaacaactgccatgcagatctaaactcca

SEQ ID NO: 23727 - DNA, 600 bp, Chicken  19866894237235_1
gatatcccccacttttgtataactgtattagcactattgtgctgcagtctcctgacgttgtccacacacttccccatatcatggacataaactttcagtactgttctgtttctgtagtagcctgaaacttacctgggctcaaagttaacccagaagtctcactgcagatcttgtacttcaggcctgaggtatgcgtgtgttcatgttcttagacttcaaaaatacagcagccgttactttattttaaatgatgtttttcaatgctaattgaggcactgttgctaaagggggccaaatgaraaactccagttgctttgtggagtgcactgaacagttttacaaacaaaacaaactagaaattgagatcatctgaaatacaaatgaaaacagtcagtgtgggcagggattctcttgatagtctgcacacaaatatgccagcccgggtgataaatcctgtgctcctaacgttccccgtgtcttgaaaatatactggaaggttacagatatttagaacaaatcaactgtacatatttcactatagccttggtctctcaaggagaaaaatggatctctgtgtctcatctgtaatttgaaatatgt

SEQ ID NO: 23728 - DNA, 600 bp, Chicken  19866894237242_1
tcgattctgtgtgaataaagaaattttagtgcagactgggctttgtttctgaacaaacagtattttgatatacaaaaacagattgcttttatacagcttcagccctggtcaatttcaagaatctgaagttatgtcaggaacataaggaaaagatgcatgtcccaagaagtctttcagtctatataaactttctttatgcaagtctaattagtgcagtaaacctttggtatttggagagcaatgagggaattgaatattgagatctgagtgctacaacaaaaaggaaagaataaggagcargttttgaaaaccaaggaaaaactgactatatttgttggtgtaaggatgcaaaactagctcttttaaaatatctttcccaccttttcccaaatgactggtagaattgcaatttaaactgaatgtgttgttatagctatgttgttatagtttctctttgggtgtagaattgattcttcttgaatcctcttttagacttaatatggactttacaatctttgtcagtccttctccaagtgctcactactttttacatgctctggagtatgccgagcatttaatagagatttctattctgatgtc

SEQ ID NO: 23729 - DNA, 599 bp, Chicken  19866894237246_1
  misc_feature (1)..(77): n is any nucleotide
nnnnnnnnnnnnnnnnnnnnnnnnnnnnnnnnnnnnnnnnnnnnnnnnnnnnnnnnnnnnnnnnnnnnnnnnnnnnntaataaagaaatagagtagttcttttaggctatagataattcattcaagtatctttaaacacctgacttcagcaagaaggtcaagcaaatccgtaatcctactgtctcaaacattcactgttaaagacaggtttaattattcacacctaataaatattaacaggttgaatcacacagcttacatttacattctctatttaagagaaactttggtcttgtcttycttaataggtttggtcatatctaagattcatctaggctgcaatagactacttctcaaacctggggaatacccagaatctaccagctgagtgtacaggacgatacaggccactggcaatccagtaagagttcttcatatgcgtggaagcattgccagttggcatctccatggttcaaataattttcttttatataacaggtaataccacctactgaagaccttcaatgacagcacgttacaagaggcttaaaattgcaaatgttaagaaagagcaaagaaggagccaggaggttccagaa

SEQ ID NO: 23730 - DNA, 600 bp, Chicken  19866894237252_1
atctctcagtatttatataaaggaactatggtttcttatctgacaggagaatatggttgcttaaatacactctatggtgctcaatgctaaaattatctttgtttctaaagcaattaatctcagacatagttgtaacttccttagcaagcaatccctttaaaaccgtggctctacatcagaattcaaaactccaaactgaaccagagtagacaactatgagaagaacacaaggtaaggcagagaaaagagaaatcaatctagacatctgctttacgagctacagaaggagacaacaaaaasctgctctctctcagcattgcaacagttttcaaactgagttgtaacagactgaagagaagtcttacactgccaaggaatacatacatgttttatgctggtgcattacctgacacaagatgcagtaatgcaattatttatttccaagagaagatgctacagaagcaaaggtacaaaaccagatgagtagggtcctgttcccagcctaaataacctcacacctgctaccgtgacacacaaaaagcgctactagagctatcagctgaaaaaggaactctcccacagcagcacagctcccaggtt

SEQ ID NO: 23731 - DNA, 600 bp, Chicken  19866894237258_1
agcctgagccagtgattgagcacctggtgggaaggcagggccaacccaggggagctcaggtgcatgcaataagcatcttcggggtgaccagaagggctggagccaggatccaccccttcccagacctcattaagggttggcagcagaggtgagggtatctgcctacctgatgccttccaaagctaggcaatttttcttcctttgtttctgtgtccacagttgctgcatttgggcttgttctctgtagcctaggattgttctactctgctattattgctctactttccgttgtattataaygttgcagcagtaattgytgtcccagaaggttagcaccaaagaacatagtgggatgatagatcaggagactgagcagagccacgtttactatgaagaacagcttaacttgtatcggggtatctcatagctaacagggagtggggcatggtggaaagaatgcaagatggtgctgactgtgttccatagatgggtcactcatagagggacactggtacagtgcacatctgccttgaaggggtggggtggaagttcatttaagcaaactagcatctcttctttaaaattagaagatatgtgcta

SEQ ID NO: 23732 - DNA, 600 bp, Chicken  19866894237258_2
gagcacctggtgggaaggcagggccaacccaggggagctcaggtgcatgcaataagcatcttcggggtgaccagaagggctggagccaggatccaccccttcccagacctcattaagggttggcagcagaggtgagggtatctgcctacctgatgccttccaaagctaggcaatttttcttcctttgtttctgtgtccacagttgctgcatttgggcttgttctctgtagcctaggattgttctactctgctattattgctctactttccgttgtattataaygttgcagcagtaattgytgtcccagaaggttagcaccaaagaacatagtgggatgatagatcaggagactgagcagagccacgtttactatgaagaacagcttaacttgtatcggggtatctcatagctaacagggagtggggcatggtggaaagaatgcaagatggtgctgactgtgttccatagatgggtcactcatagagggacactggtacagtgcacatctgccttgaaggggtggggtggaagttcatttaagcaaactagcatctcttctttaaaattagaagatatgtgctatcctgagtgctgttatc

SEQ ID NO: 23733 - DNA, 600 bp, Chicken  19866894237263_1
tttttatttgtaggacttgctttagataagtacactcattttacttctcctattagaagatatgctgatatagttgtccacaggctcttgatggcagcaactctgaaggaaactaaggatattaaggataaactattcagtaacaaggatcttgaggacttgtgcaaacacattaataacaggaacagggtaaggtggtcactgcgtgtgtctgtttgcatgctacccagggaaggaggataccactctctactgtgacttttgggtaccacgacattgcagcactccttttagatatgytttttttttcaaggggttggggaataagtaatggaaaaaatatataaagatcaaagccatacaggcttcttagaatacttacctgtccctttgtgttctctttttgtggggggtgcctgcaggcagcccagcatgctcagaaacagtcyactgaactctttcaatgcatgtacttcaaagataaaagcccagaaacagatgagcgctgcatagcagatggagttatctactcaattcgaacaaatggtgtgcttgtttttgtgccaaggtaagttgattaaagcttgggctgagactaaa

SEQ ID NO: 23734 - DNA, 529 bp, Chicken  19866894237263_2
tcttgaggacttgtgcaaacacattaataacaggaacagggtaaggtggtcactgcgtgtgtctgtttgcatgctacccagggaaggaggataccactctctactgtgacttttgggtaccacgacattgcagcactccttttagatatgytttttttttcaaggggttggggaataagtaatggaaaaaatatataaagatcaaagccatacaggcttcttagaatacttacctgtccctttgtgttctctttttgtggggggtgcctgcaggcagcccagcatgctcagaaacagtcyactgaactctttcaatgcatgtacttcaaagataaaagcccagaaacagatgagcgctgcatagcagatggagttatctactcaattcgaacaaatggtgtgcttgtttttgtgccaaggtaagttgattaaagcttgggctgagactaaaaatcagacagctgcttctggaatgctgtgaggacacctctggtccttgagaaaaggatgtgctgactgatgactgcat

SEQ ID NO: 23735 - DNA, 600 bp, Chicken  19866894237276_1
catcagtctccttttatgtgtatatacgtgcatgtttgatactgctcacggacacagaagaagagcagataattatttgatcatcttctgcagtgttatggatagacactgagtttaaacactgagtttaaatgagctactcttgattaatgattttataaactctagtgtagggtcaatagtagaaagggaattgctgctattatttctgcaagaggcatccatgctattttctccttctcctagcttattattcttgtgtgtctgagttcagaagtcttgaaaggagaggagtatatrtaacatttgtttgtcctttggaaaaaaaataaatctgtttcccacacacttcctaagagggaagcaatagtaccactacaataaaaataataataagttgcaactgcactttagctggaaatgtctgtactgtgttgtttctggaagatgttaataatgtagcatccagcttttattgtcacaaaaaaaaaaaaaaaaaaaaaaagtcaagggtgaagaccttagaagatgctccaaggtattttttttctctcattaagttgttttgaaaatgccagtcactttggtgtagtctgtgcc

SEQ ID NO: 23736 - DNA, 600 bp, Chicken  19866894237285_1
gcctgttacgtgtagtctcactttactggaatatattaagtaatgggttttgttttggtttcctcaacaggttgttacagctgtgccaacgaaccatggcactgcctgttggacgaggaatgtttactttgttctcctatcatcctattccagcagaacaactgcccattcctaagctgaatctaactggtgtgttgctcagtgttttcttctgaagaaattcagtatttaacagaacacgacgtagtttcttagttgttaccccattgttttttgaacctcttgcaatcttacagcacmttctatgtctttcttccatagcgtaagtgggctttgggaagaaatagctctttttgttttgaatctgctgcttgctagtgttttctcctggaatggtcaagaccaacattttctaatgcaggcattatagcaggcacattctgataggcagagaatagcccaaggatgtgtagctgttyggtgtygtggtcatacagaaagcagatactgcaagtcctcattgctttttatycagtgtactgtgctcgtcatctgatgtkcctgaagatatctaagattgtctttagatcagaaatacaa

SEQ ID NO: 23737 - DNA, 600 bp, Chicken  19866894237285_2
aatctaactggtgtgttgctcagtgttttcttctgaagaaattcagtatttaacagaacacgacgtagtttcttagttgttaccccattgttttttgaacctcttgcaatcttacagcacmttctatgtctttcttccatagcgtaagtgggctttgggaagaaatagctctttttgttttgaatctgctgcttgctagtgttttctcctggaatggtcaagaccaacattttctaatgcaggcattatagcaggcacattctgataggcagagaatagcccaaggatgtgtagctgttyggtgtygtggtcatacagaaagcagatactgcaagtcctcattgctttttatycagtgtactgtgctcgtcatctgatgtkcctgaagatatctaagattgtctttagatcagaaatacaactttcatgctgccagtgttcacttggcaagctactgaaattcagagcagtttccggaggggtttggattcaactaattgctgtcaatgatttcaatttcatgggcaggccgtgctcctcctaggaactcaacygttgatctgaacagtgggaacatcgacggtgcctcctaacatggct

SEQ ID NO: 23738 - DNA, 600 bp, Chicken  19866894237285_3
actggtgtgttgctcagtgttttcttctgaagaaattcagtatttaacagaacacgacgtagtttcttagttgttaccccattgttttttgaacctcttgcaatcttacagcacmttctatgtctttcttccatagcgtaagtgggctttgggaagaaatagctctttttgttttgaatctgctgcttgctagtgttttctcctggaatggtcaagaccaacattttctaatgcaggcattatagcaggcacattctgataggcagagaatagcccaaggatgtgtagctgttyggtgtygtggtcatacagaaagcagatactgcaagtcctcattgctttttatycagtgtactgtgctcgtcatctgatgtkcctgaagatatctaagattgtctttagatcagaaatacaactttcatgctgccagtgttcacttggcaagctactgaaattcagagcagtttccggaggggtttggattcaactaattgctgtcaatgatttcaatttcatgggcaggccgtgctcctcctaggaactcaacygttgatctgaacagtgggaacatcgacggtgcctcctaacatggcttgctgg

SEQ ID NO: 23739 - DNA, 600 bp, Chicken  19866894237285_4
cagaacacgacgtagtttcttagttgttaccccattgttttttgaacctcttgcaatcttacagcacmttctatgtctttcttccatagcgtaagtgggctttgggaagaaatagctctttttgttttgaatctgctgcttgctagtgttttctcctggaatggtcaagaccaacattttctaatgcaggcattatagcaggcacattctgataggcagagaatagcccaaggatgtgtagctgttyggtgtygtggtcatacagaaagcagatactgcaagtcctcattgctttttatycagtgtactgtgctcgtcatctgatgtkcctgaagatatctaagattgtctttagatcagaaatacaactttcatgctgccagtgttcacttggcaagctactgaaattcagagcagtttccggaggggtttggattcaactaattgctgtcaatgatttcaatttcatgggcaggccgtgctcctcctaggaactcaacygttgatctgaacagtgggaacatcgacggtgcctcctaacatggcttgctgggctagctttcacaatggggtagctgctgggctgaagatagcacctgc

SEQ ID NO: 23740 - DNA, 600 bp, Chicken  19866894237285_5
accccattgttttttgaacctcttgcaatcttacagcacmttctatgtctttcttccatagcgtaagtgggctttgggaagaaatagctctttttgttttgaatctgctgcttgctagtgttttctcctggaatggtcaagaccaacattttctaatgcaggcattatagcaggcacattctgataggcagagaatagcccaaggatgtgtagctgttyggtgtygtggtcatacagaaagcagatactgcaagtcctcattgctttttatycagtgtactgtgctcgtcatctgatgtkcctgaagatatctaagattgtctttagatcagaaatacaactttcatgctgccagtgttcacttggcaagctactgaaattcagagcagtttccggaggggtttggattcaactaattgctgtcaatgatttcaatttcatgggcaggccgtgctcctcctaggaactcaacygttgatctgaacagtgggaacatcgacggtgcctcctaacatggcttgctgggctagctttcacaatggggtagctgctgggctgaagatagcacctgcttcacggatagactcttcttggattatc

SEQ ID NO: 23741 - DNA, 580 bp, Chicken  19866894237285_6
gcacattctgataggcagagaatagcccaaggatgtgtagctgttyggtgtygtggtcatacagaaagcagatactgcaagtcctcattgctttttatycagtgtactgtgctcgtcatctgatgtkcctgaagatatctaagattgtctttagatcagaaatacaactttcatgctgccagtgttcacttggcaagctactgaaattcagagcagtttccggaggggtttggattcaactaattgctgtcaatgatttcaatttcatgggcaggccgtgctcctcctaggaactcaacygttgatctgaacagtgggaacatcgacggtgcctcctaacatggcttgctgggctagctttcacaatggggtagctgctgggctgaagatagcacctgcttcacggatagactcttcttggattatctataacaagcctaagaatgctgaacaagcaaacgaatatgctggcttcctcatggctctgggtctcagtgggcatctcacaaagcttgccacactcaatatacatgactacttaacaaaggtgaggccttctttcataagcagcagagagaaa

SEQ ID NO: 23742 - DNA, 600 bp, Chicken  19866894237286_1
ttgcgtttgtcccttttcttacaaaagcatctcctcttcccacgcgaggcgcccgtggctgtgtgatgacacacttgaggtgtctgcttttgaaatgagccaaatgctgacagtcgcggatgtataaatattgaactgagggctttcagggttgccagacgtacagcatcctttgccaaaacatgatgaaaaagaccctcagctcgtcattataaaagccttgctcacatttctgcaaatgaccccgtactttggcatgcaactgctcttctgcattcttcatgtatttttcccttgtayaaataaattgagcgcagtcagatcaccatagtcactgacattattttggaactrtgtgtaccatgacaaaattgtgactgtttcttctttagtttaattattgattaccaaaaatattttagttcaagaatttcgggcatgaggtatgtaaattactgggactttaggaaatgaaatagagagaaaatgaagagaagaactgataaaagcgcgttaaatatagtaatcataaaagctggtgtgacagcaaatagtaaattggcagactcattaggaaatgtattcattcatttttgcttt

SEQ ID NO: 23743 - DNA, 600 bp, Chicken  19866894237286_2
gtggctgtgtgatgacacacttgaggtgtctgcttttgaaatgagccaaatgctgacagtcgcggatgtataaatattgaactgagggctttcagggttgccagacgtacagcatcctttgccaaaacatgatgaaaaagaccctcagctcgtcattataaaagccttgctcacatttctgcaaatgaccccgtactttggcatgcaactgctcttctgcattcttcatgtatttttcccttgtayaaataaattgagcgcagtcagatcaccatagtcactgacattattttggaactrtgtgtaccatgacaaaattgtgactgtttcttctttagtttaattattgattaccaaaaatattttagttcaagaatttcgggcatgaggtatgtaaattactgggactttaggaaatgaaatagagagaaaatgaagagaagaactgataaaagcgcgttaaatatagtaatcataaaagctggtgtgacagcaaatagtaaattggcagactcattaggaaatgtattcattcatttttgctttcacatgcrtttttgtgcattttaggggacaagctcagcttggttcctgaaatat

SEQ ID NO: 23744 - DNA, 600 bp, Chicken  19866894237286_3
tgagcgcagtcagatcaccatagtcactgacattattttggaactrtgtgtaccatgacaaaattgtgactgtttcttctttagtttaattattgattaccaaaaatattttagttcaagaatttcgggcatgaggtatgtaaattactgggactttaggaaatgaaatagagagaaaatgaagagaagaactgataaaagcgcgttaaatatagtaatcataaaagctggtgtgacagcaaatagtaaattggcagactcattaggaaatgtattcattcatttttgctttcacatgcrtttttgtgcattttaggggacaagctcagcttggttcctgaaatataaatcttctgggccatgggatattcaggtaagcgagataattggatatattcaaacattagcatctaaaaagtaaatcagctggatgtctttacaaacgaaggagacttgtacaggaaacacaaacaggtaagattgttttgaagatacctcccggattccacaaaggtgcctttagcacaaatgcaattctaaatactgacagtgctttggaatagaaaaccttttaactgaggacaattacgatttttctta

SEQ ID NO: 23745 - DNA, 600 bp, Chicken  19866894237301_1
aattatcatagccttgtgagaatgttcataagtgagccacctaagcacacttttaaagaagggccatcccagtctaatctgcttcgcagggtacgtgaatgcaccaagttactgtgacctctacagtgggtcacaaagtcaattcaaacattaaatgcctctgaaacagtttgcaggatgacttttgcatgcccaccactttcaaatatccaggtccatgatctcaaggaagccacaggtttggattcagaatactgctgacaaaactttcatatggcttcagccctcacttcacacttygagaaccaaaattaagcactagaaaatacttagatatctgaattctaacatctaycagcacatcactaactgtacccawagtgtaacagaacaattcaaacactgtcacttaatgaaaaaaacaaaacaacctaacataaacatagcttacagtagtactgttgttgctcattcagtaattaccaagagatatcttctttattctaacaagcataaaaaaaactattttcttcaaagcaaggttcttttaacaaactaaactagattcagagtctgccagtatcatctcactaagaatct

SEQ ID NO: 23746 - DNA, 600 bp, Chicken  19866894237301_2
aagaagggccatcccagtctaatctgcttcgcagggtacgtgaatgcaccaagttactgtgacctctacagtgggtcacaaagtcaattcaaacattaaatgcctctgaaacagtttgcaggatgacttttgcatgcccaccactttcaaatatccaggtccatgatctcaaggaagccacaggtttggattcagaatactgctgacaaaactttcatatggcttcagccctcacttcacacttygagaaccaaaattaagcactagaaaatacttagatatctgaattctaacatctaycagcacatcactaactgtacccawagtgtaacagaacaattcaaacactgtcacttaatgaaaaaaacaaaacaacctaacataaacatagcttacagtagtactgttgttgctcattcagtaattaccaagagatatcttctttattctaacaagcataaaaaaaactattttcttcaaagcaaggttcttttaacaaactaaactagattcagagtctgccagtatcatctcactaagaatcttgatccaccagtcattcagtgtgctgttattcttactaacatgccaatagtcaca

SEQ ID NO: 23747 - DNA, 600 bp, Chicken  19866894237301_3
tgcttcgcagggtacgtgaatgcaccaagttactgtgacctctacagtgggtcacaaagtcaattcaaacattaaatgcctctgaaacagtttgcaggatgacttttgcatgcccaccactttcaaatatccaggtccatgatctcaaggaagccacaggtttggattcagaatactgctgacaaaactttcatatggcttcagccctcacttcacacttygagaaccaaaattaagcactagaaaatacttagatatctgaattctaacatctaycagcacatcactaactgtacccawagtgtaacagaacaattcaaacactgtcacttaatgaaaaaaacaaaacaacctaacataaacatagcttacagtagtactgttgttgctcattcagtaattaccaagagatatcttctttattctaacaagcataaaaaaaactattttcttcaaagcaaggttcttttaacaaactaaactagattcagagtctgccagtatcatctcactaagaatcttgatccaccagtcattcagtgtgctgttattcttactaacatgccaatagtcacaccctcacaagcactggcaacctta

SEQ ID NO: 23748 - DNA, 600 bp, Chicken  19866894237314_1
cagcactcaaaccatgtcctctgagggacagatcggggtgcactgcccatctaccctatagcactgcacagagatcacgacagggtcagatttgggatgcaagcttacctggtgccagagaatcaggattgaggactttgatcatgtgcaagactttttctgtcttcttgggcacctcgggaggcccaccgtggggtgacactgccacgtgcagctcggagtgaaagctctgctggccctcagcattcccagcctgtgggtagaagggttgtaggctcagcctgcccagctgcccaaaakgggggagtgagggatgcaagcgggaacactttgatgctatctttgatgctgtctactcactgtccactcgttggctgctccttctcctctctcggtgccatgtgagccagctggccctgggacctgcaagaaggggaggacggggctcagggctgcactgccatccccttgctgtgagtgggatgctggaccaccctgcacagccagcccaccgagccatctcctgcaaaggctgcaagaggtgggggacaccaccccatgcggagccgggcacacaccttcctgtaaccactggggtgc

SEQ ID NO: 23749 - DNA, 600 bp, Chicken  19866894237335_1
ttaatattgtttctaatattctttttttcgtttttctgaacctcgattagacagacatgtctactttaaaagcagtctctagcaagtccattctctaatgaaacaactagggcagaatggctcactgttaatgttgcatttagtcattaaaaatgtgcatttgtgattctaaaagctgctagaggcaaaacacaacagagagatacatactcaaatttacatttagtttccagcctggtagattcagtgaaactaaaattaacatttccaccttttatatgcatttatggacaaatatayattgaataataaccaccactcatctgaatcatctttcagcagaggactaaatgccttttcaaaaccctaaataatttagcatcataatagtgtgaagkgtgtaaagatacttctctataccactgtgttagctctgggcaccttaaagcagcagagcatgatggctttggcaaggaatacacacagcccattgctacaggaacaaaaatacttgaagtgggctggaaaccatcacgaaataacagtaacagataacccaaatcatcgtaacagcaaataatacagactatacggtgggat

SEQ ID NO: 23750 - DNA, 599 bp, Chicken  19866894237335_2
tgaaacaactagggcagaatggctcactgttaatgttgcatttagtcattaaaaatgtgcatttgtgattctaaaagctgctagaggcaaaacacaacagagagatacatactcaaatttacatttagtttccagcctggtagattcagtgaaactaaaattaacatttccaccttttatatgcatttatggacaaatatayattgaataataaccaccactcatctgaatcatctttcagcagaggactaaatgccttttcaaaaccctaaataatttagcatcataatagtgtgaagkgtgtaaagatacttctctataccactgtgttagctctgggcaccttaaagcagcagagcatgatggctttggcaaggaatacacacagcccattgctacaggaacaaaaatacttgaagtgggctggaaaccatcacgaaataacagtaacagataacccaaatcatcgtaacagcaaataatacagactatacggtgggatcattaattatgaagaactacaaagacttcagtttcagatttcatccatgcttgttaaacgacataacggtgaaacaaattcattcttactatttgtg

SEQ ID NO: 23751 - DNA, 599 bp, Chicken  19866894237336_1
  misc_feature (1)..(257): n is any nucleotide
nnnnnnnnnnnnnnnnnnnnnnnnnnnnnnnnnnnnnnnnnnnnnnnnnnnnnnnnnnnnnnnnnnnnnnnnnnnnnnnnnnnnnnnnnnnnnnnnnnnnnnnnnnnnnnnnnnnnnnnnnnnnnnnnnnnnnnnnnnnnnnnnnnnnnnnnnnnnnnnnnnnnnnnnnnnnnnnnnnnnnnnnnnnnnnnnnnnnnnnnnnnnnnnnnnnnnnnnnnnnnnnnnnnnnnnnnnnnnnnnnnnnnnnnnnnnnnnnntcgagccgctcggtgggagagcagctccgggcttcagctgaarctcatgaattttgcccaagtgctgcagagagaggattgcatttctcccaaggaagccgcgtttcctccgcttccagcacccggccaggagcagggctgtgtgtttcactctgtatttcgctctgcttttgcattttggctgctgctcagagccaaacctctgatcctgctgcggctcattttcaggcgcgtgtgccccagaaacttttttttcctaaatgaatttttcatacagaattctttctcttgatggatgcagtgagaaactatttcccaaacaggaaagagagaggacctccc

SEQ ID NO: 23752 - DNA, 600 bp, Chicken  19866894237337_1
ttagcttcaagaacaacaacaggaaataatagctttaaaaaaaaaaaagtttatatagtccctaggacttagtcttcaaactggtttggatttaaatactatgtcattacattttattgtgatatttttcataagatcaaataatgggatctgaattgcaaaggttcaattggagttgcaccaactttctgaaattgcagaaggttctttataatttctccagcctctcctttaagggttagaataaaactttcatatgacaaaactcaaacctcagtcattagaagaatcttttgagaygtttctacttgtatgtagtatgctctaatgatcatattctttccattgaaattcatactgctttttccggcacgtggtaatagtatattttgtcaatactgaagcttaatttgaagggaaagataagtctttctgacttgctatgagtcactgcagaaccacagttgcaagatgagattctcttttgaaatttccaatatactaatatagttttaaggagccttctttccagcagggacctaatgtgctcaggaacttcctacacactaaagaatacagaaataactcccaatttctgag

SEQ ID NO: 23753 - DNA, 600 bp, Chicken  19866894237339_1
gtattataaagaattatactggaaggaattaagttgaagatatccaccggtctgcatcatacttaaaaataagaggaagagtgcctcgtgcttgttttgtccaaggatgtccaacctgaaaggctctgaataggaaagacctgctgaaaggtaagaatgaaaaaattgagaagccagatgccactcctcactctgcatttggcaggaacatctgaaatgtactccatagactgaactgaagtgtggaatttatgaaaagagacaactcaaacatgccattaattgtgattagagttgtcwagaattgttacctccgggtcctgtagatccattgtttggtttatcatccctctggtttgcatcatatgaaaaataatacataaagatcttttggagcttgaaagcattagtaaccctaaagattttacctccacggacaaacccattagttgctattgcagaagttgacaacccagtaattgaggttaccatcgtggcgaggagaattatgattactccaagacctgtcagtaataagaagataaaatattttactcatgttccacgattcctacaaatcattctctctttaaatggaat

SEQ ID NO: 23754 - DNA, 600 bp, Chicken  19866894237341_1
attgttagcaacaacaaaaactcatctcttttaagtaagcagatatgtcagacatctgaggagcagctctgtggggtatacgccattgttttacagtcatttccttcactgttacagcatttgagaaagttacatacagcatgtctactggaagtggaatatgcatgtacagctcacgagagagacagctgggctaagaaaagcacctggcttctgtatgacagaaatctagtatcttaaatcttaaaataatgaaaagtctttaaagtaagaaaccctgtcctcctccccagagaaacraatggccaatcttccaaggtctgcaaaaagaagaatccaccatcagaactgtgaaaagcaaacacaacaagctctgtgttttatcacatttggaaagctcttgaccaaaatatgaagatttgtgttgtgaagaactcatcgtggttcttaattatgcaattctccttgagcaacaaaaattgcagagtttaccacatgatgagaagaataattctagtagtatattctacatgtgaagaacagttaaaaatccattctcaggcttcaagaggggagagaggagagctagcatctttagca

SEQ ID NO: 23755 - DNA, 600 bp, Chicken  19866894237343_1
tggaaagaaacacaaagtattcacacaaatgaacaaggggagtaaccactgttagaaatactctgtcctactgcaatagttccgccctttcctcctcacatttaattgtgaatgtagtaccatcacattacgtctcaggtactacaactttcctaaataaaagccatttatttgaacaaaacaagaatgagatgcttcaaaggatgcactatgtttactgaccttaggggacactatcccttatggagggaggagaaattacttgttgcactttgatccaaacatcagttttgtggaaayatcagttttgaagacagagtgagctgtaccttcagtcatagaaaggaagaaaaaagtattcgtgtataaagcattttctgaatttgttgtacatcttcagagacattatgaaagaactattttctatcgycatgacaagtacatgatgtatacctacatggaaggactcagtctatgtgattgatacttccctgcatcaaacccatgcaaatttttaaggtagtcatacctcaattcatcttggtgaacaggaagaatgagaagctgcattttaatatagcagagaaacatgttttaata

SEQ ID NO: 23756 - DNA, 600 bp, Chicken  19866894237343_2
cgtctcaggtactacaactttcctaaataaaagccatttatttgaacaaaacaagaatgagatgcttcaaaggatgcactatgtttactgaccttaggggacactatcccttatggagggaggagaaattacttgttgcactttgatccaaacatcagttttgtggaaayatcagttttgaagacagagtgagctgtaccttcagtcatagaaaggaagaaaaaagtattcgtgtataaagcattttctgaatttgttgtacatcttcagagacattatgaaagaactattttctatcgycatgacaagtacatgatgtatacctacatggaaggactcagtctatgtgattgatacttccctgcatcaaacccatgcaaatttttaaggtagtcatacctcaattcatcttggtgaacaggaagaatgagaagctgcattttaatatagcagagaaacatgttttaatacctgaacactgcacatgttaaaaatgctgagattttctacagagctatagctatgggaagtcatggcttgactatatgcaaaaaataagtcctcaggatgattaagatgttgtattcaagcaattaagtt

SEQ ID NO: 23757 - DNA, 600 bp, Chicken  19866894237347_1
agggaggtatcactgtgttcagggtttggctagttagagcagcagctcagcagctgggagcctgacacctatttcagttggaatgtagctgtgttgctatcactgacatgtgcagatcagccagaatattagcaaaatattttcatcaaaaccttggctgtacttttaggttcttcatgctatattgtaaagccttaatctcccttcagtgtgctccagatactgcagcatattggccttgaagagtgtctttaattattccgtggaggtgacgggcatgtaaaatgccaccaggaatgyttttttaatggggaggtaatagagcccactatgtccgaactggaaaactttcagtactgttttacaaggctgatgtaactggggctacatgtggtgcacgttgtggaaacctaaatataaatcagtgtctgcacttgagaactcgagcagaagtgttaataggttataaatggagcaggcataaggaaacctgaggagttaggtgcatatcagcttggcaaatgatgagacagtctgaagatgttattagtcctcattattggtgcttgccctcttccagagggtatcacacagtcagtg

SEQ ID NO: 23758 - DNA, 599 bp, Chicken  19866894237358_1
  misc_feature (1)..(113): n is any nucleotide
nnnnnnnnnnnnnnnnnnnnnnnnnnnnnnnnnnnnnnnnnnnnnnnnnnnnnnnnnnnnnnnnnnnnnnnnnnnnnnnnnnnnnnnnnnnnnnnnnnnnnnnnnnnnnnnnnaaattaatcctgaccccagaggatggctgcggtccttaccagacatacacgatgacataaatacatttaaacacacacaaaataaaataaaccaaacacttgagcacaactgacaacttcgttgaagtgtctgaagatcttctgccgttttagctctgagtgtcagacttgataggcagcttgaagygttctattaaattagctgctatttttagaccttgggagccatractgagtacagagcccacttcrggcggatgaaagctgagaccacatgaggacagagggacaggcagctctgatatactggtgtagggccccatgtgggctcctaatcccagatggaaaacaaccccgttccagaaacatgactcagctttgagaaggaattaccctctctcagagatgccattcaactcctggatatagaaaaatagctgcacggtcccacctattctttccattctacttcatccagactccttc

SEQ ID NO: 23759 - DNA, 599 bp, Chicken  19866894237358_2
  misc_feature (1)..(70): n is any nucleotide
nnnnnnnnnnnnnnnnnnnnnnnnnnnnnnnnnnnnnnnnnnnnnnnnnnnnnnnnnnnnnnnnnnnnnnaaattaatcctgaccccagaggatggctgcggtccttaccagacatacacgatgacataaatacatttaaacacacacaaaataaaataaaccaaacacttgagcacaactgacaacttcgttgaagtgtctgaagatcttctgccgttttagctctgagtgtcagacttgataggcagcttgaagygttctattaaattagctgctatttttagaccttgggagccatractgagtacagagcccacttcrggcggatgaaagctgagaccacatgaggacagagggacaggcagctctgatatactggtgtagggccccatgtgggctcctaatcccagatggaaaacaaccccgttccagaaacatgactcagctttgagaaggaattaccctctctcagagatgccattcaactcctggatatagaaaaatagctgcacggtcccacctattctttccattctacttcatccagactccttccctcgaagctcacctctcctgcacagaagtcagtacagattaa

SEQ ID NO: 23760 - DNA, 599 bp, Chicken  19866894237358_3
  misc_feature (1)..(48): n is any nucleotide
nnnnnnnnnnnnnnnnnnnnnnnnnnnnnnnnnnnnnnnnnnnnnnnnaaattaatcctgaccccagaggatggctgcggtccttaccagacatacacgatgacataaatacatttaaacacacacaaaataaaataaaccaaacacttgagcacaactgacaacttcgttgaagtgtctgaagatcttctgccgttttagctctgagtgtcagacttgataggcagcttgaagygttctattaaattagctgctatttttagaccttgggagccatractgagtacagagcccacttcrggcggatgaaagctgagaccacatgaggacagagggacaggcagctctgatatactggtgtagggccccatgtgggctcctaatcccagatggaaaacaaccccgttccagaaacatgactcagctttgagaaggaattaccctctctcagagatgccattcaactcctggatatagaaaaatagctgcacggtcccacctattctttccattctacttcatccagactccttccctcgaagctcacctctcctgcacagaagtcagtacagattaacctgtctccaaragsccaagtt

SEQ ID NO: 23761 - DNA, 597 bp, Chicken  19866894237358_4
agcccacttcrggcggatgaaagctgagaccacatgaggacagagggacaggcagctctgatatactggtgtagggccccatgtgggctcctaatcccagatggaaaacaaccccgttccagaaacatgactcagctttgagaaggaattaccctctctcagagatgccattcaactcctggatatagaaaaatagctgcacggtcccacctattctttccattctacttcatccagactccttccctcgaagctcacctctcctgcacagaagtcagtacagattaacctgtctccaaragsccaagtttcttcatcatggtaactttcttctgcagcagagtatgtagtgtttaaccaaaccaactgatccttcctgtattttaagaaatctatctgagctcttctcaagcaaatggaaatctattgagagcatttactcccaacttctttttccttgggtctagtaagacatacactccagtcaatatttcctcatctctcccctcccacaaaatattacctacgcctcaccactgaaatagcccagaaaaaaagaaacaaaaggccaaagtataacccatagcctgggagaaa

SEQ ID NO: 23762 - DNA, 594 bp, Chicken  19866894237358_5
ccacttcrggcggatgaaagctgagaccacatgaggacagagggacaggcagctctgatatactggtgtagggccccatgtgggctcctaatcccagatggaaaacaaccccgttccagaaacatgactcagctttgagaaggaattaccctctctcagagatgccattcaactcctggatatagaaaaatagctgcacggtcccacctattctttccattctacttcatccagactccttccctcgaagctcacctctcctgcacagaagtcagtacagattaacctgtctccaaragsccaagtttcttcatcatggtaactttcttctgcagcagagtatgtagtgtttaaccaaaccaactgatccttcctgtattttaagaaatctatctgagctcttctcaagcaaatggaaatctattgagagcatttactcccaacttctttttccttgggtctagtaagacatacactccagtcaatatttcctcatctctcccctcccacaaaatattacctacgcctcaccactgaaatagcccagaaaaaaagaaacaaaaggccaaagtataacccatagcctgggagaaa

SEQ ID NO: 23763 - DNA, 600 bp, Chicken  19866894237359_1
cacagaaggctactgggatgggcaggcacaatatctttttaaattcatgctgatcactcttaaccaccttcttgtcttgcatgtttgccaatggttcccaggatttgctccattatcttcctagggaacaaggtgaggctgaccagactatagttccctgcatcttcttccttgcctttcctgaccatgaatgacatttgccttcttccagtcctgagaaacctttcccaattgccacagcacttcaaagatgattgagagtggcctcacaacactccactgataaagtccaggtctccycagtaacatcattggtgagcaacaggaaataaatagtttgactgtcagacytcaacaacatcctggatctgaaaatcaccaagcagtaaatctccctagacatgaggtcaggtcaggtcactacattgggccctctctgcccaagggttgcagcaacagggtgggggtggatcaagcagagagaatgccagatactgcagtgttgacaaaaactcttagatctttagctgaatactcttccctttcctctttctaccacccaactccagcctatggtcaatgttatagaggaagctgtgc

SEQ ID NO: 23764 - DNA, 600 bp, Chicken  19866894237359_2
gatcactcttaaccaccttcttgtcttgcatgtttgccaatggttcccaggatttgctccattatcttcctagggaacaaggtgaggctgaccagactatagttccctgcatcttcttccttgcctttcctgaccatgaatgacatttgccttcttccagtcctgagaaacctttcccaattgccacagcacttcaaagatgattgagagtggcctcacaacactccactgataaagtccaggtctccycagtaacatcattggtgagcaacaggaaataaatagtttgactgtcagacytcaacaacatcctggatctgaaaatcaccaagcagtaaatctccctagacatgaggtcaggtcaggtcactacattgggccctctctgcccaagggttgcagcaacagggtgggggtggatcaagcagagagaatgccagatactgcagtgttgacaaaaactcttagatctttagctgaatactcttccctttcctctttctaccacccaactccagcctatggtcaatgttatagaggaagctgtgcaagattaaagatagaaagtgacgtaataaagatttaaatatccaccttctc

SEQ ID NO: 23765 - DNA, 600 bp, Chicken  19866894237361_1
cacgcagatgcagtcaggattttttaacgatgatatccttctattggtagaatatgttaaataaaataggtaagaattattttcttacttataaaggtcaggctgaggttgttcacattcaatggtagcatgtagtgcatcaatttcttgttcactgtgaaatgcctttgtatcttgaacggcatagtgtgtctggaatgaataaaaagatgtatatacattgaaaaatttaggacagagatataaggcatttatctgtagatatactctgtttcattgtgaaaagatgtgctagctttyacatatttcaattaagaagcacttttaaatgttccttagtgggtatctgcatacattatttgcagtacatttgcagtatatttgcagtaataaatcaggttagcatgaaagcatataagtacaaaaatgcgtggaaatcatctctgtaatctacatgcctgtactacacacagactgcaaaaaaaaaatcttttgaatattttcataaattaatgtaacatcaagaaaaaagaactcaactggcacaaacttatacacatcagtgcatccgctcacgaatatatgcatgattatattttt

SEQ ID NO: 23766 - DNA, 600 bp, Chicken  19866894237362_1
ctttccgaaaaacagccttagaaatcatttgctctaaggatacccatatctactccagatgcaaagcttaagacacacagttttccttcccccactctcaagattcctcctcattagaaaataactgataaaaatgaaagatacggagtcactactaaatcttccatttgttttttaactttcccagttttatcattttcttgtttctgttgtgagatattcatttggtccctgcctgcttttctagtctgtgcctatttttctcatattgagagattattgaagctgatgtaaaatacyaagtagcgacggactttgatttttgttaagtgttggctccttagcctgtcagcagtcttctctgacataatagcttcactttacatcaataaccatttcatgttggtgatgaacatcttgtagtggccacagagagcttgtaagatactggaagagcagattgtcaaatgtattcaaaggtaagaagtcgtgtaaagcagtcctaagtttrctcttctgttttgaagataatgtcttacactagattgattacatacagcctgaaaagtgtggctcatgcatccactctcgctgcgtgct

SEQ ID NO: 23767 - DNA, 600 bp, Chicken  19866894237362_2
gtgagatattcatttggtccctgcctgcttttctagtctgtgcctatttttctcatattgagagattattgaagctgatgtaaaatacyaagtagcgacggactttgatttttgttaagtgttggctccttagcctgtcagcagtcttctctgacataatagcttcactttacatcaataaccatttcatgttggtgatgaacatcttgtagtggccacagagagcttgtaagatactggaagagcagattgtcaaatgtattcaaaggtaagaagtcgtgtaaagcagtcctaagtttrctcttctgttttgaagataatgtcttacactagattgattacatacagcctgaaaagtgtggctcatgcatccactctcgctgcgtgctgaaagataaaaatcccatttgctgtattttatattggtggtctttgacactggtaatgcagatctgtatgttccttgtaaatcacagatataatgactgccagataacagcttacttgactgctgaatgaagtgtttcttagctggaaactgagctatgccgtgttcatgatctagtgacttacagcattgcgtgagtcacttatttgtat

SEQ ID NO: 23768 - DNA, 600 bp, Chicken  19866894237362_3
agataatgtcttacactagattgattacatacagcctgaaaagtgtggctcatgcatccactctcgctgcgtgctgaaagataaaaatcccatttgctgtattttatattggtggtctttgacactggtaatgcagatctgtatgttccttgtaaatcacagatataatgactgccagataacagcttacttgactgctgaatgaagtgtttcttagctggaaactgagctatgccgtgttcatgatctagtgacttacagcattgcgtgagtcacttatttgtatccccattaaaatayatgtgtgaagagctgtgtaggacaatgctgtagtcataacccagcacaacttgtttttcagctagcctagctcctgtcctgtacattagctgaatttgttagtttgttcatagccctctgtcatcatcctcggcatggtattcaagcactgtgtgtaatccaagagaagttatagtacctgcatggaacttggagagaaacacaaggccactttccctctcagagtttgttttggtaagtaggactgacatcaaaccaaacaaatctacagtcacttcaaagttcacagtcgttggtact

SEQ ID NO: 23769 - DNA, 599 bp, Chicken  19866894237364_1
  misc_feature (1)..(26): n is any nucleotide
nnnnnnnnnnnnnnnnnnnnnnnnnntggagtttctgttttcccaaatatttgtcattagtactggctgcctcacttctttcagcagaatcttccccaagtgagttttcctgcaacataaaaaaaatagttgggtagaacaagatttctttttgccacaggctttgtgattcttcctgcttacattcattgttgctaatttatttattaattttgaattgtaattgcacagagggagagaggagcagcaaatgttctggcatatgggctgccctgtcattggaaatggagatttgcagtygctcttgctgccctgtgccttatgaccccaggctccagactctctctccaccagtctgtttagattcctgctttctgctcccttccaatacaaaattttaattatttctgctttgcctgcttgccagcattttgtaatagagagccagtggcagtaattcagtagtctgctagttatgctgctgctcagagggtcacatatactacagcctattaacattagcatggtaatagcagccggtatgtggaacgcacagtggggaatgttggaagctcctccaaggaccctgaagatactta

SEQ ID NO: 23770 - DNA, 600 bp, Chicken  19866894237367_1
ccttgtttgttctctataaagacttgtgcatatggtaaaaaccacaatagatgttgtggtagtgtcatgtaaaagatcacatagaaacattcaaccataactcaactgtgcagtcttaagtctccattgtagaatgtaattttctggtacgtatttggacttggttctttgaatgaattgtcagaaaaaaatctcacaagaagggatttgatattgcaacaacactcattccacatggcacagttagaactcttcatactaacacctcatgcttcatatacaacatcgatctgaaatgtrtgccatccattttcccagcgctgctggcttattcttcattgtaaatcaggagagaaagtagtttcagaggttgtaattgtttgtsatataagagacagtttagttaatgaatttccacaatgtctgaaggagacaaytttaaaatgaatccaaacacaacaatcataaattaaacaatatccaagtctttaataaagataccttctttgactttttatytcttagaaagattataatgaatgctccaaagcatacacggtgttaaaaaaaccatgggaactattaagaagtctctctaga

SEQ ID NO: 23771 - DNA, 600 bp, Chicken  19866894237367_2
aacattcaaccataactcaactgtgcagtcttaagtctccattgtagaatgtaattttctggtacgtatttggacttggttctttgaatgaattgtcagaaaaaaatctcacaagaagggatttgatattgcaacaacactcattccacatggcacagttagaactcttcatactaacacctcatgcttcatatacaacatcgatctgaaatgtrtgccatccattttcccagcgctgctggcttattcttcattgtaaatcaggagagaaagtagtttcagaggttgtaattgtttgtsatataagagacagtttagttaatgaatttccacaatgtctgaaggagacaaytttaaaatgaatccaaacacaacaatcataaattaaacaatatccaagtctttaataaagataccttctttgactttttatytcttagaaagattataatgaatgctccaaagcatacacggtgttaaaaaaaccatgggaactattaagaagtctctctagaataatacaagctcctttaacaacttttaaaattgtaccagatttgtataaaatacaacccataccatgactggattcttttagta

SEQ ID NO: 23772 - DNA, 600 bp, Chicken  19866894237367_3
aattttctggtacgtatttggacttggttctttgaatgaattgtcagaaaaaaatctcacaagaagggatttgatattgcaacaacactcattccacatggcacagttagaactcttcatactaacacctcatgcttcatatacaacatcgatctgaaatgtrtgccatccattttcccagcgctgctggcttattcttcattgtaaatcaggagagaaagtagtttcagaggttgtaattgtttgtsatataagagacagtttagttaatgaatttccacaatgtctgaaggagacaaytttaaaatgaatccaaacacaacaatcataaattaaacaatatccaagtctttaataaagataccttctttgactttttatytcttagaaagattataatgaatgctccaaagcatacacggtgttaaaaaaaccatgggaactattaagaagtctctctagaataatacaagctcctttaacaacttttaaaattgtaccagatttgtataaaatacaacccataccatgactggattcttttagtatagtaatgcacagtacaaaatgatcactaagcaacttctgtgatctgttata

SEQ ID NO: 23773 - DNA, 600 bp, Chicken  19866894237367_4
caacactcattccacatggcacagttagaactcttcatactaacacctcatgcttcatatacaacatcgatctgaaatgtrtgccatccattttcccagcgctgctggcttattcttcattgtaaatcaggagagaaagtagtttcagaggttgtaattgtttgtsatataagagacagtttagttaatgaatttccacaatgtctgaaggagacaaytttaaaatgaatccaaacacaacaatcataaattaaacaatatccaagtctttaataaagataccttctttgactttttatytcttagaaagattataatgaatgctccaaagcatacacggtgttaaaaaaaccatgggaactattaagaagtctctctagaataatacaagctcctttaacaacttttaaaattgtaccagatttgtataaaatacaacccataccatgactggattcttttagtatagtaatgcacagtacaaaatgatcactaagcaacttctgtgatctgttataatcaacagagcagctaatgaagagtaaggcagccagaatttagtaaatactatccttaaaaaaataataatttttataaatg

SEQ ID NO: 23774 - DNA, 600 bp, Chicken  19866894237368_1
ctttcccactcctgtgcaaaagcacccaaatattttgaaacttggttctaattttaagctaattagaagtcaaccactgtgttctatgtaaataagtagacaatggtgaacccgcagtgaaagagcattgagtagccaaaggattaaatctcggtcaaatatttatcctagccagcatatctcagtttatatgagatccctgtaagctggaagaaaaatgcatccaaaggaaggagacgtcctgcctgtgtgattcagttaacaaatatgtgtctgaatttcagattttgtttgtttttsttccatgtaccagaggtaattgctcaagagtttacaatgcttttcataggatgctggtgaacttggaagctgtattcatctcagtgcagcagccagtctgttttgtaggcggcatccaggaggccttgcaggacagggatggcactctggcaggcaagcatgcttgcttccacagccatcacagcctgaggagagttagggtaagtgaggagagttagggtaacggagggcctgcagcacgtttggatccggtggggtcccatgtgagcagctctgtctgtggctgtccagcattcagca

SEQ ID NO: 23775 - DNA, 600 bp, Chicken  19866894237374_1
atatttctggtttctcttgaaaagcccgatctattttcccagctatgctatttctgaaggatgcaagaagagacagatggtatcaggaaagatgagctggctaaaaaaccgtgaaatccactaatgcatgtgcatatatgtgctattatcactcagaaaagtttttatcccccgtattctaaatccgcataaaaaatgaaaaggtccaagcagatcctcacatatccaaatcagatcacattctttttcttccccctccccacccccaaaaaaatgctttttgacttttttttttttttwaaacggaaatgtgaatttttggacccccaccccaacgtttatttaccctcatttcaccaaactcaaaaccacttcagagttgtgcccagtgtgaacaaaggcagggagctaccagtcacccacagggtcagtctcagctgtgcatcgatgctcttacatggatgcttcccaatggcaggcacttttttttttttttgctgctgttgtgactgctgctcaactaggcagaaatgtcgacctggatttctaaagtgcttcacctgctcaagcttataatcctgtgtatatcatgtacaggtt

SEQ ID NO: 23776 - DNA, 599 bp, Chicken  19866894237376_1
  misc_feature (1)..(112): n is any nucleotide
nnnnnnnnnnnnnnnnnnnnnnnnnnnnnnnnnnnnnnnnnnnnnnnnnnnnnnnnnnnnnnnnnnnnnnnnnnnnnnnnnnnnnnnnnnnnnnnnnnnnnnnnnnnnnnnnagctgggcttatgtcctgctgtctctgagccgcaggatggcatcgagcagcacatggactttgatggccgttacaccttgctggagctgtttgctgagacaacatcctctgaagagcactgcgtgtcctttgagggcattcatctcccccaggtagttgacagtgggcagctgagcaggacctggtaytrtgagggctggcayaggtctgggcctggctygaggcygaggtgcggtgaggaagcaggaggagggyctgtctgcgggcagggtgggctgaggggggctgtgttgctgcccgctggtccgcagccattgcagagccgtggatgagccggagagggcgggaggtgctcagccagctgcagtctgacagccctccctgcccgttgcagatccccgggaagcagctgttcgccctggtgaagcgctacctgtgcgtcacttctctcctggacaagctcagcggyggtgaggagcagagcgag

SEQ ID NO: 23777 - DNA, 599 bp, Chicken  19866894237376_2
  misc_feature (1)..(110): n is any nucleotide
nnnnnnnnnnnnnnnnnnnnnnnnnnnnnnnnnnnnnnnnnnnnnnnnnnnnnnnnnnnnnnnnnnnnnnnnnnnnnnnnnnnnnnnnnnnnnnnnnnnnnnnnnnnnnnagctgggcttatgtcctgctgtctctgagccgcaggatggcatcgagcagcacatggactttgatggccgttacaccttgctggagctgtttgctgagacaacatcctctgaagagcactgcgtgtcctttgagggcattcatctcccccaggtagttgacagtgggcagctgagcaggacctggtaytrtgagggctggcayaggtctgggcctggctygaggcygaggtgcggtgaggaagcaggaggagggyctgtctgcgggcagggtgggctgaggggggctgtgttgctgcccgctggtccgcagccattgcagagccgtggatgagccggagagggcgggaggtgctcagccagctgcagtctgacagccctccctgcccgttgcagatccccgggaagcagctgttcgccctggtgaagcgctacctgtgcgtcacttctctcctggacaagctcagcggyggtgaggagcagagcgagga

SEQ ID NO: 23778 - DNA, 599 bp, Chicken  19866894237376_3
  misc_feature (1)..(97): n is any nucleotide
nnnnnnnnnnnnnnnnnnnnnnnnnnnnnnnnnnnnnnnnnnnnnnnnnnnnnnnnnnnnnnnnnnnnnnnnnnnnnnnnnnnnnnnnnnnnnnnnnagctgggcttatgtcctgctgtctctgagccgcaggatggcatcgagcagcacatggactttgatggccgttacaccttgctggagctgtttgctgagacaacatcctctgaagagcactgcgtgtcctttgagggcattcatctcccccaggtagttgacagtgggcagctgagcaggacctggtaytrtgagggctggcayaggtctgggcctggctygaggcygaggtgcggtgaggaagcaggaggagggyctgtctgcgggcagggtgggctgaggggggctgtgttgctgcccgctggtccgcagccattgcagagccgtggatgagccggagagggcgggaggtgctcagccagctgcagtctgacagccctccctgcccgttgcagatccccgggaagcagctgttcgccctggtgaagcgctacctgtgcgtcacttctctcctggacaagctcagcggyggtgaggagcagagcgaggagtggcaggcgagc

SEQ ID NO: 23779 - DNA, 599 bp, Chicken  19866894237376_4
  misc_feature (1)..(80): n is any nucleotide
nnnnnnnnnnnnnnnnnnnnnnnnnnnnnnnnnnnnnnnnnnnnnnnnnnnnnnnnnnnnnnnnnnnnnnnnnnnnnnnnagctgggcttatgtcctgctgtctctgagccgcaggatggcatcgagcagcacatggactttgatggccgttacaccttgctggagctgtttgctgagacaacatcctctgaagagcactgcgtgtcctttgagggcattcatctcccccaggtagttgacagtgggcagctgagcaggacctggtaytrtgagggctggcayaggtctgggcctggctygaggcygaggtgcggtgaggaagcaggaggagggyctgtctgcgggcagggtgggctgaggggggctgtgttgctgcccgctggtccgcagccattgcagagccgtggatgagccggagagggcgggaggtgctcagccagctgcagtctgacagccctccctgcccgttgcagatccccgggaagcagctgttcgccctggtgaagcgctacctgtgcgtcacttctctcctggacaagctcagcggyggtgaggagcagagcgaggagtggcaggcgagcagccgcgtgaagcagga

SEQ ID NO: 23780 - DNA, 599 bp, Chicken  19866894237376_5
  misc_feature (1)..(74): n is any nucleotide
nnnnnnnnnnnnnnnnnnnnnnnnnnnnnnnnnnnnnnnnnnnnnnnnnnnnnnnnnnnnnnnnnnnnnnnnnnagctgggcttatgtcctgctgtctctgagccgcaggatggcatcgagcagcacatggactttgatggccgttacaccttgctggagctgtttgctgagacaacatcctctgaagagcactgcgtgtcctttgagggcattcatctcccccaggtagttgacagtgggcagctgagcaggacctggtaytrtgagggctggcayaggtctgggcctggctygaggcygaggtgcggtgaggaagcaggaggagggyctgtctgcgggcagggtgggctgaggggggctgtgttgctgcccgctggtccgcagccattgcagagccgtggatgagccggagagggcgggaggtgctcagccagctgcagtctgacagccctccctgcccgttgcagatccccgggaagcagctgttcgccctggtgaagcgctacctgtgcgtcacttctctcctggacaagctcagcggyggtgaggagcagagcgaggagtggcaggcgagcagccgcgtgaagcaggagtttga

SEQ ID NO: 23781 - DNA, 599 bp, Chicken  19866894237376_6
  misc_feature (1)..(45): n is any nucleotide
nnnnnnnnnnnnnnnnnnnnnnnnnnnnnnnnnnnnnnnnnnnnnagctgggcttatgtcctgctgtctctgagccgcaggatggcatcgagcagcacatggactttgatggccgttacaccttgctggagctgtttgctgagacaacatcctctgaagagcactgcgtgtcctttgagggcattcatctcccccaggtagttgacagtgggcagctgagcaggacctggtaytrtgagggctggcayaggtctgggcctggctygaggcygaggtgcggtgaggaagcaggaggagggyctgtctgcgggcagggtgggctgaggggggctgtgttgctgcccgctggtccgcagccattgcagagccgtggatgagccggagagggcgggaggtgctcagccagctgcagtctgacagccctccctgcccgttgcagatccccgggaagcagctgttcgccctggtgaagcgctacctgtgcgtcacttctctcctggacaagctcagcggyggtgaggagcagagcgaggagtggcaggcgagcagccgcgtgaagcaggagtttgagttcagcatggctatggcaaacctcattg

SEQ ID NO: 23782 - DNA, 600 bp, Chicken  19866894237376_7
gctgagcaggacctggtaytrtgagggctggcayaggtctgggcctggctygaggcygaggtgcggtgaggaagcaggaggagggyctgtctgcgggcagggtgggctgaggggggctgtgttgctgcccgctggtccgcagccattgcagagccgtggatgagccggagagggcgggaggtgctcagccagctgcagtctgacagccctccctgcccgttgcagatccccgggaagcagctgttcgccctggtgaagcgctacctgtgcgtcacttctctcctggacaagctcagcggyggtgaggagcagagcgaggagtggcaggcgagcagccgcgtgaagcaggagtttgagttcagcatggctatggcaaacctcattgtggagctggtgcgcgtgatgggctgggaccacagccacaagccggagccgccatcccagcaggagacgaagcctcgcaccgcccgctccatcttccagcgccagcccacatcctccagcgctgctccagcagcccccgctcctccgccaaatgagcccagcaccttcaagacacgctcggccttcccaagccgtagcagctatgtggagtacgtg

SEQ ID NO: 23783 - DNA, 600 bp, Chicken  19866894237383_1
actgccttaagcacaacaatttgtggataaactgaacagccaaaagacttttttgcctaggattaggaactgcaagttaatgggctatctatcaagtcttttggcaaatcttaacggtgcttaagaatattagtggggctatagttaattactattgctagcaaaaatttaacatccttgttttgctttgataccctcttctgcttcaaccactggtttctgaatccttgactagattgaggagcccatttagtcacttagtcttttaaatctgctttttgttaagctgaatgatgttamctcatctgtttccaatgatatttatcaacagaggttctcagtaactttatacagtgatagrttaatggagaagtaaattattttccactggtcttcatactgacttatgttctctgaaattmtcctaaattcaggacttgcttgataattttaccaggagtctgttgcaatggatttcccccttcagttaccagtcacttctacagagcagtatatgcaactaaaacaccaattcttgtgccagaaggctgcaattcaccatgttgcctatgcagttgttaataaccgtagagaccatcr

SEQ ID NO: 23784 - DNA, 600 bp, Chicken  19866894237383_2
attaggaactgcaagttaatgggctatctatcaagtcttttggcaaatcttaacggtgcttaagaatattagtggggctatagttaattactattgctagcaaaaatttaacatccttgttttgctttgataccctcttctgcttcaaccactggtttctgaatccttgactagattgaggagcccatttagtcacttagtcttttaaatctgctttttgttaagctgaatgatgttamctcatctgtttccaatgatatttatcaacagaggttctcagtaactttatacagtgatagrttaatggagaagtaaattattttccactggtcttcatactgacttatgttctctgaaattmtcctaaattcaggacttgcttgataattttaccaggagtctgttgcaatggatttcccccttcagttaccagtcacttctacagagcagtatatgcaactaaaacaccaattcttgtgccagaaggctgcaattcaccatgttgcctatgcagttgttaataaccgtagagaccatcrcattataactaaaactgtagctgctgctctcgtgttataaaccatccatacctgggcaatt

SEQ ID NO: 23785 - DNA, 600 bp, Chicken  19866894237383_3
aagaatattagtggggctatagttaattactattgctagcaaaaatttaacatccttgttttgctttgataccctcttctgcttcaaccactggtttctgaatccttgactagattgaggagcccatttagtcacttagtcttttaaatctgctttttgttaagctgaatgatgttamctcatctgtttccaatgatatttatcaacagaggttctcagtaactttatacagtgatagrttaatggagaagtaaattattttccactggtcttcatactgacttatgttctctgaaattmtcctaaattcaggacttgcttgataattttaccaggagtctgttgcaatggatttcccccttcagttaccagtcacttctacagagcagtatatgcaactaaaacaccaattcttgtgccagaaggctgcaattcaccatgttgcctatgcagttgttaataaccgtagagaccatcrcattataactaaaactgtagctgctgctctcgtgttataaaccatccatacctgggcaattatacccaagggacaacagctttaacctatgggttttttggctatgaaaagggatggatcta

SEQ ID NO: 23786 - DNA, 600 bp, Chicken  19866894237383_4
ctcatctgtttccaatgatatttatcaacagaggttctcagtaactttatacagtgatagrttaatggagaagtaaattattttccactggtcttcatactgacttatgttctctgaaattmtcctaaattcaggacttgcttgataattttaccaggagtctgttgcaatggatttcccccttcagttaccagtcacttctacagagcagtatatgcaactaaaacaccaattcttgtgccagaaggctgcaattcaccatgttgcctatgcagttgttaataaccgtagagaccatcrcattataactaaaactgtagctgctgctctcgtgttataaaccatccatacctgggcaattatacccaagggacaacagctttaacctatgggttttttggctatgaaaagggatggatctatttcaaatctggaaatctcataggagttgtataatagaaaccaaagtagttaatatttgtccttctcaaactacctcacaggcactgaaaatgtgttaagggccctgctgtgccctgaacatcccatatgttgtctacacaagctccattgctgcggtgggacccaacattttgcgtg

SEQ ID NO: 23787 - DNA, 599 bp, Chicken  19866894237384_1
  misc_feature (1)..(1): n is any nucleotide
ngatttggtcgctgctggcagcgaggtgagctgcaggaagagaaatgcccttggggaatgtgcagccgtgctccaacgtggctctgcacctccactgcatcttctgctgtggctcagtttgagcatggagctcttggcttcttctaggccaggatttgaggaggaagcaaaaaaaaaacccctcagttaaaatatcaacagtgcttcctctattcttgcacttctaaaattgtgttctcagctgttgctgttaatggttctctgtatgttttgtatgtgctaccagcttcaatgtgtctrtctctgcaagcccattctgtctttgaggcagaactctggaagagcattgtctgtgttgagctttgtcaggagaaaggtacagagagtgaaaaaaccaaccataccaaccgtattgtaaaatcagatagggwgaagtgtaatgagkattaatgtatcayaagagctaaatgtgagtgaaaaagaggaaggttgtgttttatttgctgtgtaccccttttcctgtgcagcgttctggagctctgagcatcaggatccttggccttggcactgctgctgggaggtatcagaaacttctttgt

SEQ ID NO: 23788 - DNA, 600 bp, Chicken  19866894237384_2
tcttggcttcttctaggccaggatttgaggaggaagcaaaaaaaaaacccctcagttaaaatatcaacagtgcttcctctattcttgcacttctaaaattgtgttctcagctgttgctgttaatggttctctgtatgttttgtatgtgctaccagcttcaatgtgtctrtctctgcaagcccattctgtctttgaggcagaactctggaagagcattgtctgtgttgagctttgtcaggagaaaggtacagagagtgaaaaaaccaaccataccaaccgtattgtaaaatcagatagggwgaagtgtaatgagkattaatgtatcayaagagctaaatgtgagtgaaaaagaggaaggttgtgttttatttgctgtgtaccccttttcctgtgcagcgttctggagctctgagcatcaggatccttggccttggcactgctgctgggaggtatcagaaacttctttgttaatttcttttaaattctgcttttttcaaaatccaccttgctctgtacgatatcaaagggagcaaggacaagaaggttgcatgtatgcagaacttctgcatttcaaagcataaaactgaaatctaggtaaat

SEQ ID NO: 23789 - DNA, 600 bp, Chicken  19866894237384_3
aggccaggatttgaggaggaagcaaaaaaaaaacccctcagttaaaatatcaacagtgcttcctctattcttgcacttctaaaattgtgttctcagctgttgctgttaatggttctctgtatgttttgtatgtgctaccagcttcaatgtgtctrtctctgcaagcccattctgtctttgaggcagaactctggaagagcattgtctgtgttgagctttgtcaggagaaaggtacagagagtgaaaaaaccaaccataccaaccgtattgtaaaatcagatagggwgaagtgtaatgagkattaatgtatcayaagagctaaatgtgagtgaaaaagaggaaggttgtgttttatttgctgtgtaccccttttcctgtgcagcgttctggagctctgagcatcaggatccttggccttggcactgctgctgggaggtatcagaaacttctttgttaatttcttttaaattctgcttttttcaaaatccaccttgctctgtacgatatcaaagggagcaaggacaagaaggttgcatgtatgcagaacttctgcatttcaaagcataaaactgaaatctaggtaaatgggaaagggactaa

SEQ ID NO: 23790 - DNA, 600 bp, Chicken  19866894237384_4
aggaggaagcaaaaaaaaaacccctcagttaaaatatcaacagtgcttcctctattcttgcacttctaaaattgtgttctcagctgttgctgttaatggttctctgtatgttttgtatgtgctaccagcttcaatgtgtctrtctctgcaagcccattctgtctttgaggcagaactctggaagagcattgtctgtgttgagctttgtcaggagaaaggtacagagagtgaaaaaaccaaccataccaaccgtattgtaaaatcagatagggwgaagtgtaatgagkattaatgtatcayaagagctaaatgtgagtgaaaaagaggaaggttgtgttttatttgctgtgtaccccttttcctgtgcagcgttctggagctctgagcatcaggatccttggccttggcactgctgctgggaggtatcagaaacttctttgttaatttcttttaaattctgcttttttcaaaatccaccttgctctgtacgatatcaaagggagcaaggacaagaaggttgcatgtatgcagaacttctgcatttcaaagcataaaactgaaatctaggtaaatgggaaagggactaacgttcaggtgtca

SEQ ID NO: 23791 - DNA, 600 bp, Chicken  19866894237386_1
tatctgatcaaaatatatagggaataaaatacagtttgcgtcatcatattgagaaatgcaagagaccagaatctgaaataacattaaataacgttaacatccagatgaaactagaagcaatcagagaagcagatttctatctttaaaaaatcatattttcaactcagcactatgatttgcagcccatccactgcagttgttacagactctgtgacaataaaggaattgccactacttcatttttgtatgttagtccagaggacaagaaaaggacacttcactgccagacagttctctctrcaaaaatgaacctgaaggcacatacttcaatctgtttttcatcctcaactgatacrccaaccacatatgayaatagttggcaggatatcttcaaggaaaaacgaatccaaggtcagctcatgaaagagagcttttattggatgaaaacatcactgaatttcctttggctgccattgctgtaaggaagcttagaaactttgaactcascaatgaagcgctgatgcaaaatatggaattaatacaataagcttcattcatacggtgtaagatggcaagataaacacagaaaagcatggtaag

SEQ ID NO: 23792 - DNA, 600 bp, Chicken  19866894237386_10
ccatttgctaaaccactccagctagaaacgtarctgtattgtcaagagcattaagtggcacacttatattatgckaaaaacttgtacagaagatagcatccayacatgcaagtaagaaaayatttgagggagggtggggggagaatacagaaagaacaacaaaaaacagttcaacacttaaagatttgtcatttgtaatccctaaagtggaagtttatcttcctctctaaagcacatagtgaagatttccttttttaaacactacacatacacttcctgaattcctaaactctcttccayactacagcaccaagcaggaaatctggcaaagttyggaatttgaccaatcattctgataactgccaaatctgatagcttttcaaatattgtattaaagcagtcctgtgttcactgtcaccagaaataagaaattcacaggactaattcagtctttagtgatgctttctgtgaaaagctaaaggaaaaacaacacagttacacagtttagaacattgggaacaactgtactgacaagaaagggaaagaataaaattctgaagacagaagagccataaaacctcattataacactgacatatg

SEQ ID NO: 23793 - DNA, 600 bp, Chicken  19866894237386_11
tgtattgtcaagagcattaagtggcacacttatattatgckaaaaacttgtacagaagatagcatccayacatgcaagtaagaaaayatttgagggagggtggggggagaatacagaaagaacaacaaaaaacagttcaacacttaaagatttgtcatttgtaatccctaaagtggaagtttatcttcctctctaaagcacatagtgaagatttccttttttaaacactacacatacacttcctgaattcctaaactctcttccayactacagcaccaagcaggaaatctggcaaagttyggaatttgaccaatcattctgataactgccaaatctgatagcttttcaaatattgtattaaagcagtcctgtgttcactgtcaccagaaataagaaattcacaggactaattcagtctttagtgatgctttctgtgaaaagctaaaggaaaaacaacacagttacacagtttagaacattgggaacaactgtactgacaagaaagggaaagaataaaattctgaagacagaagagccataaaacctcattataacactgacatatgtttctctgtatgtgtatacatttatgtttgaaca

SEQ ID NO: 23794 - DNA, 600 bp, Chicken  19866894237386_2
tgcaagagaccagaatctgaaataacattaaataacgttaacatccagatgaaactagaagcaatcagagaagcagatttctatctttaaaaaatcatattttcaactcagcactatgatttgcagcccatccactgcagttgttacagactctgtgacaataaaggaattgccactacttcatttttgtatgttagtccagaggacaagaaaaggacacttcactgccagacagttctctctrcaaaaatgaacctgaaggcacatacttcaatctgtttttcatcctcaactgatacrccaaccacatatgayaatagttggcaggatatcttcaaggaaaaacgaatccaaggtcagctcatgaaagagagcttttattggatgaaaacatcactgaatttcctttggctgccattgctgtaaggaagcttagaaactttgaactcascaatgaagcgctgatgcaaaatatggaattaatacaataagcttcattcatacggtgtaagatggcaagataaacacagaaaagcatggtaagattgcggtactccatcagtcctttcctaaacgacatggcattctacagtcaccaag

SEQ ID NO: 23795 - DNA, 600 bp, Chicken  19866894237386_3
tctgaaataacattaaataacgttaacatccagatgaaactagaagcaatcagagaagcagatttctatctttaaaaaatcatattttcaactcagcactatgatttgcagcccatccactgcagttgttacagactctgtgacaataaaggaattgccactacttcatttttgtatgttagtccagaggacaagaaaaggacacttcactgccagacagttctctctrcaaaaatgaacctgaaggcacatacttcaatctgtttttcatcctcaactgatacrccaaccacatatgayaatagttggcaggatatcttcaaggaaaaacgaatccaaggtcagctcatgaaagagagcttttattggatgaaaacatcactgaatttcctttggctgccattgctgtaaggaagcttagaaactttgaactcascaatgaagcgctgatgcaaaatatggaattaatacaataagcttcattcatacggtgtaagatggcaagataaacacagaaaagcatggtaagattgcggtactccatcagtcctttcctaaacgacatggcattctacagtcaccaagacaactctagataaa

SEQ ID NO: 23796 - DNA, 600 bp, Chicken  19866894237386_4
tctgtgacaataaaggaattgccactacttcatttttgtatgttagtccagaggacaagaaaaggacacttcactgccagacagttctctctrcaaaaatgaacctgaaggcacatacttcaatctgtttttcatcctcaactgatacrccaaccacatatgayaatagttggcaggatatcttcaaggaaaaacgaatccaaggtcagctcatgaaagagagcttttattggatgaaaacatcactgaatttcctttggctgccattgctgtaaggaagcttagaaactttgaactcascaatgaagcgctgatgcaaaatatggaattaatacaataagcttcattcatacggtgtaagatggcaagataaacacagaaaagcatggtaagattgcggtactccatcagtcctttcctaaacgacatggcattctacagtcaccaagacaactctagataaacagccaagaaactcactcatgactcaaggcctttctcaaagcaccagtctatcttcaaacacttcctaacacacaaaacaggtctgtctaaggctcagtaactcaayagttacatgaagcagcactggatatcctt

SEQ ID NO: 23797 - DNA, 600 bp, Chicken  19866894237386_5
gtaaggaagcttagaaactttgaactcascaatgaagcgctgatgcaaaatatggaattaatacaataagcttcattcatacggtgtaagatggcaagataaacacagaaaagcatggtaagattgcggtactccatcagtcctttcctaaacgacatggcattctacagtcaccaagacaactctagataaacagccaagaaactcactcatgactcaaggcctttctcaaagcaccagtctatcttcaaacacttcctaacacacaaaacaggtctgtctaaggctcagtaactcaayagttacatgaagcagcactggatatccttttggtcagcagcagatgcatccaacaactatgccacgagtaagacaactattgcccatttgcttattgttctatggccagtgaatttgtatttccccttcagcatttttattggataaaactgtgttgtatgataatgcaaagtttatttaaatacctacttattcaattttacaccctttttcagttgcacttgtattttataacaacaaaaattccactttctatccaatatttgtttcccacttggcagctgtgatttcttttcatac

SEQ ID NO: 23798 - DNA, 600 bp, Chicken  19866894237386_6
attgcccatttgcttattgttctatggccagtgaatttgtatttccccttcagcatttttattggataaaactgtgttgtatgataatgcaaagtttatttaaatacctacttattcaattttacaccctttttcagttgcacttgtattttataacaacaaaaattccactttctatccaatatttgtttcccacttggcagctgtgatttcttttcatactgagtagagtgaaagctgacttggcagattgtatttatcaatgttccatttgctaaaccactccagctagaaacgtarctgtattgtcaagagcattaagtggcacacttatattatgckaaaaacttgtacagaagatagcatccayacatgcaagtaagaaaayatttgagggagggtggggggagaatacagaaagaacaacaaaaaacagttcaacacttaaagatttgtcatttgtaatccctaaagtggaagtttatcttcctctctaaagcacatagtgaagatttccttttttaaacactacacatacacttcctgaattcctaaactctcttccayactacagcaccaagcaggaaatctggcaaagtt

SEQ ID NO: 23799 - DNA, 600 bp, Chicken  19866894237386_7
ttccccttcagcatttttattggataaaactgtgttgtatgataatgcaaagtttatttaaatacctacttattcaattttacaccctttttcagttgcacttgtattttataacaacaaaaattccactttctatccaatatttgtttcccacttggcagctgtgatttcttttcatactgagtagagtgaaagctgacttggcagattgtatttatcaatgttccatttgctaaaccactccagctagaaacgtarctgtattgtcaagagcattaagtggcacacttatattatgckaaaaacttgtacagaagatagcatccayacatgcaagtaagaaaayatttgagggagggtggggggagaatacagaaagaacaacaaaaaacagttcaacacttaaagatttgtcatttgtaatccctaaagtggaagtttatcttcctctctaaagcacatagtgaagatttccttttttaaacactacacatacacttcctgaattcctaaactctcttccayactacagcaccaagcaggaaatctggcaaagttyggaatttgaccaatcattctgataactgccaaatctgatag

SEQ ID NO: 23800 - DNA, 600 bp, Chicken  19866894237386_8
actgtgttgtatgataatgcaaagtttatttaaatacctacttattcaattttacaccctttttcagttgcacttgtattttataacaacaaaaattccactttctatccaatatttgtttcccacttggcagctgtgatttcttttcatactgagtagagtgaaagctgacttggcagattgtatttatcaatgttccatttgctaaaccactccagctagaaacgtarctgtattgtcaagagcattaagtggcacacttatattatgckaaaaacttgtacagaagatagcatccayacatgcaagtaagaaaayatttgagggagggtggggggagaatacagaaagaacaacaaaaaacagttcaacacttaaagatttgtcatttgtaatccctaaagtggaagtttatcttcctctctaaagcacatagtgaagatttccttttttaaacactacacatacacttcctgaattcctaaactctcttccayactacagcaccaagcaggaaatctggcaaagttyggaatttgaccaatcattctgataactgccaaatctgatagcttttcaaatattgtattaaagcagtcc

SEQ ID NO: 23801 - DNA, 600 bp, Chicken  19866894237386_9
gcaaagtttatttaaatacctacttattcaattttacaccctttttcagttgcacttgtattttataacaacaaaaattccactttctatccaatatttgtttcccacttggcagctgtgatttcttttcatactgagtagagtgaaagctgacttggcagattgtatttatcaatgttccatttgctaaaccactccagctagaaacgtarctgtattgtcaagagcattaagtggcacacttatattatgckaaaaacttgtacagaagatagcatccayacatgcaagtaagaaaayatttgagggagggtggggggagaatacagaaagaacaacaaaaaacagttcaacacttaaagatttgtcatttgtaatccctaaagtggaagtttatcttcctctctaaagcacatagtgaagatttccttttttaaacactacacatacacttcctgaattcctaaactctcttccayactacagcaccaagcaggaaatctggcaaagttyggaatttgaccaatcattctgataactgccaaatctgatagcttttcaaatattgtattaaagcagtcctgtgttcactgtcaccag

SEQ ID NO: 23802 - DNA, 600 bp, Chicken  19866894237392_1
tgcatggagctgggagcaatacgacccgggcaggtgctgcttgcaagctcagcatcagctcctggaggagatggggacggtgacagcagagccctttctgcatcccacaagatgcagagctgcatgtgcccgagtggtccctgcacccaatgctccaaacactaccatgaacatctgcagtgctcagcagccccggggtccatcactgcaaagctgccaccaggatggaagggaaggagcatcgctgcctttggaaccagggaggcaagccctggatgtgcaggggcaatgaggctggcrgcaacacatacragttttggggtataaccattgaaaatactcatttttagggttggagttgccatcttgccgtggggtctggcagagggacagggatggggtaatgctgctcaacactttgcagcctttacatcaggctctgcatcgagcagcagcaaaacctcctccttgcttggagggccaacccggctcttctgggctccgaaggggcaggagcatggaaatcccagttgggctctaccttcctggccccactgctcccagcacggatggttacagcaggagaagagcccctgaaac

SEQ ID NO: 23803 - DNA, 600 bp, Chicken  19866894237392_2
ggagcaatacgacccgggcaggtgctgcttgcaagctcagcatcagctcctggaggagatggggacggtgacagcagagccctttctgcatcccacaagatgcagagctgcatgtgcccgagtggtccctgcacccaatgctccaaacactaccatgaacatctgcagtgctcagcagccccggggtccatcactgcaaagctgccaccaggatggaagggaaggagcatcgctgcctttggaaccagggaggcaagccctggatgtgcaggggcaatgaggctggcrgcaacacatacragttttggggtataaccattgaaaatactcatttttagggttggagttgccatcttgccgtggggtctggcagagggacagggatggggtaatgctgctcaacactttgcagcctttacatcaggctctgcatcgagcagcagcaaaacctcctccttgcttggagggccaacccggctcttctgggctccgaaggggcaggagcatggaaatcccagttgggctctaccttcctggccccactgctcccagcacggatggttacagcaggagaagagcccctgaaacgcagggagatgg

SEQ ID NO: 23804 - DNA, 599 bp, Chicken  19866894237398_1
  misc_feature (1)..(104): n is any nucleotide
nnnnnnnnnnnnnnnnnnnnnnnnnnnnnnnnnnnnnnnnnnnnnnnnnnnnnnnnnnnnnnnnnnnnnnnnnnnnnnnnnnnnnnnnnnnnnnnnnnnnnnnntaggtgaaccaagagaggtcaagggaagccagcataggacacttagaagctttttccaaaatgtaaagtaatggagaagaatctttcagtagtgttggagcttattagcctttggaaatgaatggaaagttgccaggaaaaaagatctatcatgctttctctgttggctgtcttccttgttctggtaagttttgtrgtactttgaagccattaataataataatttaaaaaagggtcttgcaaatacacactgaaatagcatgtttggtgctttgctatcttgaatctattttcaccttctrtttccttcttgtctgggtcagagtgccattaagttttctgataatggcctattgacaatgtgtatgtaaatccagaatgtctgctttctccctttggtggctgatgacaaatgattaagtcactgggaaacagttttgagtttattactagtagctgttgcagaatgaaagcatctgccttgtaatgccaaga

SEQ ID NO: 23805 - DNA, 600 bp, Chicken  19866894237398_2
ggtgaaccaagagaggtcaagggaagccagcataggacacttagaagctttttccaaaatgtaaagtaatggagaagaatctttcagtagtgttggagcttattagcctttggaaatgaatggaaagttgccaggaaaaaagatctatcatgctttctctgttggctgtcttccttgttctggtaagttttgtrgtactttgaagccattaataataataatttaaaaaagggtcttgcaaatacacactgaaatagcatgtttggtgctttgctatcttgaatctattttcaccttctrtttccttcttgtctgggtcagagtgccattaagttttctgataatggcctattgacaatgtgtatgtaaatccagaatgtctgctttctccctttggtggctgatgacaaatgattaagtcactgggaaacagttttgagtttattactagtagctgttgcagaatgaaagcatctgccttgtaatgccaagaacatcctgtgggtgttgaatctttaatgaaacttgttatttctgaagcctatgaaaaggaccttactgagatttaagaataaagtgttgaagcttcagatttgcaca

SEQ ID NO: 23806 - DNA, 599 bp, Chicken  19866894237408_1
  misc_feature (1)..(47): n is any nucleotide
nnnnnnnnnnnnnnnnnnnnnnnnnnnnnnnnnnnnnnnnnnnnnnnattctgtgacttcatagtgctcaactttaacagagtatcacggaaaagctcagtctcttttctgtttgtttatttctcaaataattattttcttattctattatcaaaacactcaaaaaatgatttcatttgactgatatgatcaagtcagactggtcgtagtctaagcctaatgatcttgcagaataaaatgtctagatttcagcttcatttcctagactgtttgagcagttcaatttgagctaagctgtcrttctcaaaaactgccattttgtttagggtgctcccattttgtccctcatctaatggttgccagtgtgaaaataattgaacatctttctgttggttgtcttagcctagagctggagatagtaaataggatatcataagataactgtgatgatattcacacaggcctctaaaacttttcctattcttaagactgagataaacatggaagccatcagacccatcttgcaagtccaagctggtcgagaatcyccagttcctatccatactccagatttaagtcactcttagaagagctggtgt

SEQ ID NO: 23807 - DNA, 600 bp, Chicken  19866894237408_2
tcagcttcatttcctagactgtttgagcagttcaatttgagctaagctgtcrttctcaaaaactgccattttgtttagggtgctcccattttgtccctcatctaatggttgccagtgtgaaaataattgaacatctttctgttggttgtcttagcctagagctggagatagtaaataggatatcataagataactgtgatgatattcacacaggcctctaaaacttttcctattcttaagactgagataaacatggaagccatcagacccatcttgcaagtccaagctggtcgagaatcyccagttcctatccatactccagatttaagtcactcttagaagagctggtgtaactataaacagacytagattcccttggatttcattatgtcctctcataagtcatcacttgcaatacttacagggtttccaagttgaaaagcatttttgtgtaactatgaaatgtagggattagtctcaggtcttagtagtactgtcataaattttccccgattctagtaaagttacaacaggtaaaaccaatttaagcaggtatgctactatagtgctacattttcaaacagattctatactataatg

SEQ ID NO: 23808 - DNA, 600 bp, Chicken  19866894237408_3
cattttgtttagggtgctcccattttgtccctcatctaatggttgccagtgtgaaaataattgaacatctttctgttggttgtcttagcctagagctggagatagtaaataggatatcataagataactgtgatgatattcacacaggcctctaaaacttttcctattcttaagactgagataaacatggaagccatcagacccatcttgcaagtccaagctggtcgagaatcyccagttcctatccatactccagatttaagtcactcttagaagagctggtgtaactataaacagacytagattcccttggatttcattatgtcctctcataagtcatcacttgcaatacttacagggtttccaagttgaaaagcatttttgtgtaactatgaaatgtagggattagtctcaggtcttagtagtactgtcataaattttccccgattctagtaaagttacaacaggtaaaaccaatttaagcaggtatgctactatagtgctacattttcaaacagattctatactataatgaagaaatacaacatttctcattgctgattacatcagaaaatggcaaacaaaagcttatatccaaac

SEQ ID NO: 23809 - DNA, 600 bp, Chicken  19866894237408_4
agtagtactgtcataaattttccccgattctagtaaagttacaacaggtaaaaccaatttaagcaggtatgctactatagtgctacattttcaaacagattctatactataatgaagaaatacaacatttctcattgctgattacatcagaaaatggcaaacaaaagcttatatccaaactctgccctggagcagcgtaaactaaggtgtgattgtcattctcaacaataccacttgtactgagtggaactggggcttgaattcactgatttacagacgtttggaaagtttgatgccaargtgaaataaagaatayrgtggtggccttcaaattatgagcaaaacatttctaatatcaccatggattcaattccacccctttttctggtatgaaaaggtctcactaactcttttcccacaattttattttgccaccattagggaggttaaacagcaagaagaagaacctgaggtagatgtgtgggagctcctgaagaacgccaatcccagtgaatatgagaagattgcttttcagtatggtatcactgacctgagaggcatgttaaagcgtctgaagcgcatgcgcagggaggtgaagaa

SEQ ID NO: 23810 - DNA, 600 bp, Chicken  19866894237408_5
attttccccgattctagtaaagttacaacaggtaaaaccaatttaagcaggtatgctactatagtgctacattttcaaacagattctatactataatgaagaaatacaacatttctcattgctgattacatcagaaaatggcaaacaaaagcttatatccaaactctgccctggagcagcgtaaactaaggtgtgattgtcattctcaacaataccacttgtactgagtggaactggggcttgaattcactgatttacagacgtttggaaagtttgatgccaargtgaaataaagaatayrgtggtggccttcaaattatgagcaaaacatttctaatatcaccatggattcaattccacccctttttctggtatgaaaaggtctcactaactcttttcccacaattttattttgccaccattagggaggttaaacagcaagaagaagaacctgaggtagatgtgtgggagctcctgaagaacgccaatcccagtgaatatgagaagattgcttttcagtatggtatcactgacctgagaggcatgttaaagcgtctgaagcgcatgcgcagggaggtgaagaagagtgcaggtatggat

SEQ ID NO: 23811 - DNA, 600 bp, Chicken  19866894237408_6
ttttccccgattctagtaaagttacaacaggtaaaaccaatttaagcaggtatgctactatagtgctacattttcaaacagattctatactataatgaagaaatacaacatttctcattgctgattacatcagaaaatggcaaacaaaagcttatatccaaactctgccctggagcagcgtaaactaaggtgtgattgtcattctcaacaataccacttgtactgagtggaactggggcttgaattcactgatttacagacgtttggaaagtttgatgccaargtgaaataaagaatayrgtggtggccttcaaattatgagcaaaacatttctaatatcaccatggattcaattccacccctttttctggtatgaaaaggtctcactaactcttttcccacaattttattttgccaccattagggaggttaaacagcaagaagaagaacctgaggtagatgtgtgggagctcctgaagaacgccaatcccagtgaatatgagaagattgcttttcagtatggtatcactgacctgagaggcatgttaaagcgtctgaagcgcatgcgcagggaggtgaagaagagtgcaggtatggata

SEQ ID NO: 23812 - DNA, 600 bp, Chicken  19866894237410_1
atagacgggaattccacaaccaaccacttctacttttaaactgtatttcttatattaaatccaaggaatttcaaaatgtactcagttcttactttaagaatgcgtgctggggggattttagaatcgatgtgatactggaaatgcaaaatgggtgcgtagtgaatgcatctgtgagtgtatgtgtctgcaatgagtatgtctgtgcaagcacatgtagtccagcattttttccacagaattttataaaaattagcacgttaaaatgaagagtggaaaaactaaagagctcttagtgaaatmaataggactcaactgcatagacatctggaattcaacagctattgcatagaagtttgtttgacggcatctagtgatctgctcgtttagggtgggattttgtagttttaaaacagttttaaaatctctaaatatttcttaaagcatttaaaactgaactgaagctccataagtttcttttctgtaagtctctctcaagttccagtgtaaaactccaagtccaaagtgaacctaatatgtggagaatggagaaagtgggataaataattgaaatggttcacctcttatgctaagacttttaat

SEQ ID NO: 23813 - DNA, 599 bp, Chicken  19866894237411_1
  misc_feature (1)..(23): n is any nucleotide
nnnnnnnnnnnnnnnnnnnnnnnccaaaaaagttatgtattggtaagctgaggtgaaacttcagtgatatctagtagatacaaatctccactgtaactttctttggtttaaggacagtcttttgtgtttcatttcagttagtctctaggaggtttgctattctgtatatgactctatgggtttcatgctgatttatggctttaataatacatagatattaaagtagtgcaactgtcacaaataagatgatttgattgtggtgaggcaaacactgctgtgtgaatatttctcattaagatmatgtttctagcaatttgggtgggataattccttactgatacaagctgtatcaacataaactgggattaaaacagtcagtgagaatctttccatcaagaagagtgtttattatcatcttagataaataggaccagtgttatgcctgagttggatatactggtttaaaacccatttgcagtggtgtagtgtcttaattatgtagacaagtacaagccaagtagatacgaccaacatgttaaccttccacaaagcaattcacatatacattgcagtggaataattagttctaattttgaacc

SEQ ID NO: 23814 - DNA, 599 bp, Chicken  19866894237412_1
  misc_feature (1)..(141): n is any nucleotide
nnnnnnnnnnnnnnnnnnnnnnnnnnnnnnnnnnnnnnnnnnnnnnnnnnnnnnnnnnnnnnnnnnnnnnnnnnnnnnnnnnnnnnnnnnnnnnnnnnnnnnnnnnnnnnnnnnnnnnnnnnnnnnnnnnnnnnnnnnnnncggtgaggaccgtgtgcggcagcgggcaggggtcgggcggtaggatgggcgtgtgtagtctgatgtgggaaaccagcagctgctttgggacctctgaaggccacaagtaatcgacagatagtaattcctgttgtggattttatggataatgcccagcgragaaggaaaagtagtgtatattttcctgtgtggtactggaagtgtaacaaaatagcaccttcagaaatgtaaagtaaacaaactcgctaagagaaggatagttgaaaagatgaaggactgaatgtggcgttagaataaacgatgattcagatcgtgacagtcttttcttttaaatagaattatcttcacagaagaaatttgatgaaattaagaaggcgaatcaggctgcagcaagaaagctggctgaagaacagtttagttcttcgtcagaagatgatgatgaagatgctgaaataaaa

SEQ ID NO: 23815 - DNA, 600 bp, Chicken  19866894237412_2
gatgctgaaataaaacaaggaaagattttggcgaaaacatttaccatttacaccagtcaaaccggtaaactttttttgtgtgctgacttttatttggatatgaaagcgtagaagagatgatgttattggttacatcttagactttttgcacagttaaaggggaaacactggtcttctgatgtacttctttctttctgatgtactgaaaatgcttgttcccagtagtgcatacttgctgtgcttcttgccttgttcagcagaaccagtggtatagttttgcagctttacttaagtacttawaatagtgtggttttgtattaatgtatgactggcctctgttcagaggaaaaaaattacttcttgcaacagtctcaacacgtacagaatagcagatcaagcattactgattgctttaaaaatttctgtacattaaagatggagatgcaagtgaactggaacgtacaagacagtacatgaacgaagcttttcagtcaggggctatgacatgtctgatctgcattgcttcagttaaaaggaaccaagctgtaagtactttatggtatgctttcaagtattttaatttgtggcagtatcatacat

SEQ ID NO: 23816 - DNA, 600 bp, Chicken  19866894237417_1
ttgaggagggagtggtcctgatggacccagagattcctgcccatcattctttgattttgtggagtgaattagcaaagagcaacttagtttatgtatgttaagtgaaagaagccttcagaactaatagatgtagttaggagcagtaaaaaaatacaactagaatgtaattaaaaatatatagcgaaagctattttcctgcttatcattgatgacaacatagactgactgggattttaagatttaaaaatttattgacctcaagatgatatagaaagagttatcaatcaaaagaaacaaaamacaatgtttgcacagatcctgagatggtgaatctacgcctctgttgtatacatttcctaaattaaggttaagaaaatgctgcaattagaatgttttgtgtaccttctaaaagaactttaaaaacattttaaatgtaaacaargtccatatatttagcatgtatgtaaatccttaacatacattagtgtcctatgtgaagtgtgccacagtatcaggggatgatgccaagcagaatccaaaataaaatttgactgtatactaagaacaatgtgtgttactcagtaagtgacctcttaatta

SEQ ID NO: 23817 - DNA, 600 bp, Chicken  19866894237417_2
gtaaaaaaatacaactagaatgtaattaaaaatatatagcgaaagctattttcctgcttatcattgatgacaacatagactgactgggattttaagatttaaaaatttattgacctcaagatgatatagaaagagttatcaatcaaaagaaacaaaamacaatgtttgcacagatcctgagatggtgaatctacgcctctgttgtatacatttcctaaattaaggttaagaaaatgctgcaattagaatgttttgtgtaccttctaaaagaactttaaaaacattttaaatgtaaacaargtccatatatttagcatgtatgtaaatccttaacatacattagtgtcctatgtgaagtgtgccacagtatcaggggatgatgccaagcagaatccaaaataaaatttgactgtatactaagaacaatgtgtgttactcagtaagtgacctcttaattaaaattatgcagcaaaaatttagggaaggattagctacttagaaacatcaggtgagtatgctaactttatagattattaatttagtaacaaggtaactagtctgcattgcatctgcaatctgcatctgcaatgcctctgcatt

SEQ ID NO: 23818 - DNA, 600 bp, Chicken  19866894237418_1
agcatagcgttatttatagcgggcttaatgtttgtattctcatttgtgtcagtgctcattaagtcaaggttatgaggtggtatctccttttcttaacaaaaccaaaccttttttcagtaccagcatgccagtggtaaaaaaactgattagaagcaggatgtgacgcacatagcttatactgttaatagctgctggtgtatttggatgtcaagagtgctcccgtagatatggtatctcttagcatctattattttacaccaaacagtaaataactgcagccctcaggtggtacagaattcrgtgttgttagtgctagtcaatgatttggagagggctgtgtyatcggggagcccaggggctgatcctttcaaaaaccgcctccagatgatgttttttgttgtacacaagtggcagcattactaatttttactgaggttatcactacttgaaagatttactaagtgctgacggtgctatctggagagtctgcaaatgttaggacagactccgctccagggagacagaattgtatgaaatttcaggtacggttacaacaataagtgtaaagtgctgatttaacaagatcctttcagcacagac

SEQ ID NO: 23819 - DNA, 600 bp, Chicken  19866894237418_2
atttgtgtcagtgctcattaagtcaaggttatgaggtggtatctccttttcttaacaaaaccaaaccttttttcagtaccagcatgccagtggtaaaaaaactgattagaagcaggatgtgacgcacatagcttatactgttaatagctgctggtgtatttggatgtcaagagtgctcccgtagatatggtatctcttagcatctattattttacaccaaacagtaaataactgcagccctcaggtggtacagaattcrgtgttgttagtgctagtcaatgatttggagagggctgtgtyatcggggagcccaggggctgatcctttcaaaaaccgcctccagatgatgttttttgttgtacacaagtggcagcattactaatttttactgaggttatcactacttgaaagatttactaagtgctgacggtgctatctggagagtctgcaaatgttaggacagactccgctccagggagacagaattgtatgaaatttcaggtacggttacaacaataagtgtaaagtgctgatttaacaagatcctttcagcacagacatgaaacgagaaggaaaactccgtagcaaagcaaagctttg

SEQ ID NO: 23820 - DNA, 600 bp, Chicken  19866894237419_1
cacttctaaaaaaacaaaacaaaaaccaaaacagcaacagcaagaagaatccacgccaagtatcttgctaaaaacaagttcaaaaggagaacaaaaaaagggtgaaatatgcttggattattggactaaaaatcatcttggttttattttatgaaaagttaaaaggtcgatctctgcatctcaacctgttgtgaaaacactcacagcttaaagaagcatcagtcatctctaatcttggccgaggaagggggagattaaaatgattttccatgcttctagacggccataggagtcagaccycagcaagagctaccattacccactrccccaaatccatcaagttgctgctgagracaaggtcaaaattcgttactgacaagaaagcttggggaaaaacaaacaaacaggagaagttctccaactctgagttgaaagtcttttgttcccgacgctggtacatttttgcatcttaggttctcatagcattatgaaattaacaacccatctgactaagtttgtatcccctgccttccgtacgcagccctatctgacttcacctgatggtgggtgggttggccatctgttcaggaaaagaaatcc

SEQ ID NO: 23821 - DNA, 600 bp, Chicken  19866894237419_2
ccaaaacagcaacagcaagaagaatccacgccaagtatcttgctaaaaacaagttcaaaaggagaacaaaaaaagggtgaaatatgcttggattattggactaaaaatcatcttggttttattttatgaaaagttaaaaggtcgatctctgcatctcaacctgttgtgaaaacactcacagcttaaagaagcatcagtcatctctaatcttggccgaggaagggggagattaaaatgattttccatgcttctagacggccataggagtcagaccycagcaagagctaccattacccactrccccaaatccatcaagttgctgctgagracaaggtcaaaattcgttactgacaagaaagcttggggaaaaacaaacaaacaggagaagttctccaactctgagttgaaagtcttttgttcccgacgctggtacatttttgcatcttaggttctcatagcattatgaaattaacaacccatctgactaagtttgtatcccctgccttccgtacgcagccctatctgacttcacctgatggtgggtgggttggccatctgttcaggaaaagaaatcctgtgctttacccaagtttcctccct

SEQ ID NO: 23822 - DNA, 600 bp, Chicken  19866894237419_3
cgccaagtatcttgctaaaaacaagttcaaaaggagaacaaaaaaagggtgaaatatgcttggattattggactaaaaatcatcttggttttattttatgaaaagttaaaaggtcgatctctgcatctcaacctgttgtgaaaacactcacagcttaaagaagcatcagtcatctctaatcttggccgaggaagggggagattaaaatgattttccatgcttctagacggccataggagtcagaccycagcaagagctaccattacccactrccccaaatccatcaagttgctgctgagracaaggtcaaaattcgttactgacaagaaagcttggggaaaaacaaacaaacaggagaagttctccaactctgagttgaaagtcttttgttcccgacgctggtacatttttgcatcttaggttctcatagcattatgaaattaacaacccatctgactaagtttgtatcccctgccttccgtacgcagccctatctgacttcacctgatggtgggtgggttggccatctgttcaggaaaagaaatcctgtgctttacccaagtttcctccctttccccaaccttctttcccccattcaag

SEQ ID NO: 23823 - DNA, 580 bp, Chicken  19866894237419_4
ttcaggaagaaaaaataaataagcaaccttgacacgttcataataaccaatgatttttcaactcctcattatctctaagttaattaggcatttacaacataaatgttttctccagaaagaaattaagctacctgctcaagacaatgatggcagttggactacgatcctaaaaatctttacgtgtgcatcttccccaagaagaaatttgacagagcaaggactgaaggctcaaactgcagattcaccactaccaaatgtgaagtgtgttgcacatttcatctctcctgtaaattagagaaygaaaacagcttgccatgcctcttgagacgagtaggtaccttcaacagcaaagtgctaaaagctgaaccagtactgatgactagctctacacttcctttaagaggatgcaggactctcttcctcaaggaatgtttattttaaaaggaaagaaaacagaggggaaagtcaagattatgcacagcttccctgcagttctaacgtactgtgtattacaaggcagcagaraccaacattaccaatgcatattttatggctattctcctaaaaattattgcatgca

SEQ ID NO: 23824 - DNA, 355 bp, Chicken  19866894237419_5
ggctcaaactgcagattcaccactaccaaatgtgaagtgtgttgcacatttcatctctcctgtaaattagagaaygaaaacagcttgccatgcctcttgagacgagtaggtaccttcaacagcaaagtgctaaaagctgaaccagtactgatgactagctctacacttcctttaagaggatgcaggactctcttcctcaaggaatgtttattttaaaaggaaagaaaacagaggggaaagtcaagattatgcacagcttccctgcagttctaacgtactgtgtattacaaggcagcagaraccaacattaccaatgcatattttatggctattctcctaaaaattattgcatgca

SEQ ID NO: 23825 - DNA, 600 bp, Chicken  19866894237420_1
atttgtgtcagttgggaaatctgaaaaaatgcccacgtcaaatgttattttttaaaagataggagagtatactgccaatccagattcaaattcaaatatggccctaggttcatgcctctaacattcatttatgatgcactttgaagaatattacattaataaatgcagtttatacagtactggaataaccgatgtgccacagatggagagatcatggagctatcagcttgaaatacgtatatttttctgataccttaagccaaggtactgactacagtgtagtttctcatgctgagatawttttagcatatttttccttaggtttgatggtaaagacagaataaattgtccttgaaatctgtaaacatgttttgtacgtcagtgtccgttctctctgacatggaaggagtgcagtgaggaagccatgcttagtattctgcagagtgccaagagctagagagctcttaaggggaagcccccccctccaacaaattgcttcagggaagaatacatcatactccttttcagccttcaaaatatttgtctttgtgaagtgtaatgtggtttgggaaaacaatgctggtagcatttttatatgaa

SEQ ID NO: 23826 - DNA, 599 bp, Chicken  19866894237422_1
  misc_feature (1)..(88): n is any nucleotide
nnnnnnnnnnnnnnnnnnnnnnnnnnnnnnnnnnnnnnnnnnnnnnnnnnnnnnnnnnnnnnnnnnnnnnnnnnnnnnnnnnnnnnnncatctcctgcccctcgaagaaccaagagtctgatatataaactttcatcatatttatatgcagtgtgtaatcatgttccaactttcagtgctttcagatataaataaataaataaataaataaataaataaataaattgaaaccccacaaatagtaaatcatagaatggcctcggttggaagggacctcaaggatcatgaagctccaacccscccgccacaggcagggccaccaaccttcacatttaatactagaccaggctgcccagggccccatccaacctggccttgaacacctgcagggacggggcatccacarcctctctgggcagcctgactataaacacagtytgtccttactcagaaaaaaaacagtattttccccactctacatatacacacttaatacataactggagctaactggcagagctcggccttagaaaaggaatagatccaaaggggagctcagatactctcaagaatcaggcagttgtctcttaagggttgcc

SEQ ID NO: 23827 - DNA, 600 bp, Chicken  19866894237422_2
gaaccaagagtctgatatataaactttcatcatatttatatgcagtgtgtaatcatgttccaactttcagtgctttcagatataaataaataaataaataaataaataaataaataaattgaaaccccacaaatagtaaatcatagaatggcctcggttggaagggacctcaaggatcatgaagctccaacccscccgccacaggcagggccaccaaccttcacatttaatactagaccaggctgcccagggccccatccaacctggccttgaacacctgcagggacggggcatccacarcctctctgggcagcctgactataaacacagtytgtccttactcagaaaaaaaacagtattttccccactctacatatacacacttaatacataactggagctaactggcagagctcggccttagaaaaggaatagatccaaaggggagctcagatactctcaagaatcaggcagttgtctcttaagggttgcccgagcaggtaggaggagctgtgaatctgcagtagacaggagggtgtctgttgtgatatttggattgttgcttcttattacatattttcattcactttgtaacaccat

SEQ ID NO: 23828 - DNA, 600 bp, Chicken  19866894237422_3
tatttatatgcagtgtgtaatcatgttccaactttcagtgctttcagatataaataaataaataaataaataaataaataaataaattgaaaccccacaaatagtaaatcatagaatggcctcggttggaagggacctcaaggatcatgaagctccaacccscccgccacaggcagggccaccaaccttcacatttaatactagaccaggctgcccagggccccatccaacctggccttgaacacctgcagggacggggcatccacarcctctctgggcagcctgactataaacacagtytgtccttactcagaaaaaaaacagtattttccccactctacatatacacacttaatacataactggagctaactggcagagctcggccttagaaaaggaatagatccaaaggggagctcagatactctcaagaatcaggcagttgtctcttaagggttgcccgagcaggtaggaggagctgtgaatctgcagtagacaggagggtgtctgttgtgatatttggattgttgcttcttattacatattttcattcactttgtaacaccatgattcaatacggactattacgaataataaaaa

SEQ ID NO: 23829 - DNA, 600 bp, Chicken  19866894237422_4
aatacataactggagctaactggcagagctcggccttagaaaaggaatagatccaaaggggagctcagatactctcaagaatcaggcagttgtctcttaagggttgcccgagcaggtaggaggagctgtgaatctgcagtagacaggagggtgtctgttgtgatatttggattgttgcttcttattacatattttcattcactttgtaacaccatgattcaatacggactattacgaataataaaaagcttagttgctgcccaggggtttctttactgcaattactctgagcagtaaagygcaatttctgaatcaacatacaggcaatcatcttataaaggatgcatctgttcactgcagtttgcattggggtagttccagtgaggaataaagaggttcatgaactttgcattttcgttccatcacgatggcagatgccttctaccagatgaaaacagtgtaagtgataattgttcgtttctctcttgttcgtcctcctccctccacagccccgctcctactcttgaagaagtgaatgcttgggctcagtcatttgacaagttgatgcttacgccagctggtcgaaatgcttttcgcgaa

SEQ ID NO: 23830 - DNA, 521 bp, Chicken  19866894237433_1
actcctggccagacacccagctggctcctgcactgaaaaatgccccttcattgctgctagccagcagattgtgtccctcttccccggggtaatgatcaccttcacgtccctcattttggctgggagaaatgccacaagtcttgagatatggcaaaggccccatcttcccttcctcctcttctgccaggagctccagggctgtgccagcacattgggatggatgggcatctgcaggatcctggtccagggtgatcctacagctttctggaacattctccttgtacaaaaacctttcattcycccctgtccctcctcatcctcccctgatgggctctgtctggaggctcttgcaaagtacctttagtttagaagagaaatgaccttgggaagtgggagtcttgtagtgtgtcatgcagcagtcacagggcagcctgggggcagaaccagagcctggcttggctctgctctcagggacataacctaaaggagggcaggaggtccaaaggtactttcaggcagat

SEQ ID NO: 23831 - DNA, 599 bp, Chicken  19866894237436_1
  misc_feature (1)..(162): n is any nucleotide
nnnnnnnnnnnnnnnnnnnnnnnnnnnnnnnnnnnnnnnnnnnnnnnnnnnnnnnnnnnnnnnnnnnnnnnnnnnnnnnnnnnnnnnnnnnnnnnnnnnnnnnnnnnnnnnnnnnnnnnnnnnnnnnnnnnnnnnnnnnnnnnnnnnnnnnnnnnnnnnnnntcaaatttatattgagtttacaaactattccaaatccggcaacaatttcatgtatcacatgttccagtatcctgcctgtcactagcagtgctgcattccaccagcaggagcttcacctgctccatcctttctccatgraagggacataaggtttgtaagaactgggatgtggtttgttagaccagctgatgtagctgaaaacaaatcagaagtaactcacgttaggacttgaggtcagatttggtatctaaagctggaccgcactttccagccgcactaaatgatccaataaaagacatcactggaccgtcagagcattttcttttcacattttgacttgaaagactacactgtgcacttacttctgggtgtctgagacgagccatcatgttgccagcagcagcgtgtgtcagctgatgcttgaatctcagaaatgt

SEQ ID NO: 23832 - DNA, 600 bp, Chicken  19866894237436_2
gatccaataaaagacatcactggaccgtcagagcattttcttttcacattttgacttgaaagactacactgtgcacttacttctgggtgtctgagacgagccatcatgttgccagcagcagcgtgtgtcagctgatgcttgaatctcagaaatgtcagtgtaaagcaagttttaagctttgaagtcagagccaccttgctgaaggtaagccaagccaagtacggatgtactatcagtgatggctctgtgaaaagtggcaactactagtaagtgtatttgggtgtgcttgtatttatacamagtgtgttggtgagctctttgattgatggctataaaaggtaggattttattttgctcacagtctgtttggcatgcaaaacgatgggtgcgttggtaggtaagattgctcctgtcttgatgtgggaacgatggcaatactttaaaggcaatcttccatgataaaaaaaaaagagcctgctgtcatcatttaacctggcatgctctacgacacagaccagagggttttcccaaattaattcccgtttgaaccagaggctgtcatctagaaaataaaagcagtcttttctcatctctgtgaat

SEQ ID NO: 23833 - DNA, 521 bp, Chicken  19866894237436_3
ggtgcgttggtaggtaagattgctcctgtcttgatgtgggaacgatggcaatactttaaaggcaatcttccatgataaaaaaaaaagagcctgctgtcatcatttaacctggcatgctctacgacacagaccagagggttttcccaaattaattcccgtttgaaccagaggctgtcatctagaaaataaaagcagtcttttctcatctctgtgaatccttgtgtaaatatcaggttttgcagctgcttacatgtgagacaagtgctattagttcaacactctgggcataaaccaaaccaygacttacatttccatgctgtttgcttggaggagctcagaaacccgttagccatccttcagagtctggctggatgagcgggggagtaggatttcatcaacacattgccatcactttcagtttagctcctcattgctatctttggctgttttggctatgtgtgtataatactctgatgctctgtatatacaacaggagctcctctagctggaagttagtggag

SEQ ID NO: 23834 - DNA, 600 bp, Chicken  19866894237439_1
gtcagaacaacaatccctgggcaacctgtgcccagagggcctcacccactcattcttcctggttggatggcctgcagcatgctccccccctccacactataaagtcagctgccccctgctctccctttaatcctgacctataaactcttgatctgctccacatacagatggagctccatgcactccagagggtgacatgccctcctcatctcccttgtctcttcttcctaaagagcctgaattcttctgttccaacactccaagcatgggaaccatcccactacatctccatgattccartaagatcatggccctgcaggtgtgtgcacatctctaactcctcttgtttattattctccatgctatgtgcatccttaatgatgctgacttattggctggaatggctggaactcctttgtgctcttcatgtgttgacttgtgctcctgttgacttgtgacccttctccatgctctgggcatctattgctggtactggcaacaaaaagttaggagtgggatggatttgaggttccatccccccagcaacagaatagagtagaatagagtagaacataatagaacataatagaatagaatagt

SEQ ID NO: 23835 - DNA, 600 bp, Chicken  19866894237449_1
agctccctaggccatgtagcatcatggccggaacaccagtgggtgcttcctgtcctccatccttcactgctgcttccttctgggattatgcattgactgctttcaaacaggatcggttcacccacaatatcagtggagatttcagttttcccttcccgtacgcgtaatgcccttgtgaatgaaaatcagcatgaatgaagccagctttgtccgcacttgtgccgtagatatgcacaaactccaggaagccaagacttaatttgatctgaaaacccccacagccaatgcattttaaagacwgaaccacaaagccaatcaatagggaccattcagatacttgctgtcagcggctaaaagaaaatggataccgagaaagccataactatgataaatttaggcgctgcttctctctgactaatgtaggcactaaaacactccatgaatatcctgctttgaaacgtgtcatatttctgagaggccaatcaatctcaggttctctgcggaccacattaaaatacatttgtcactgtaagtttatgaaatattgatggtgttttttaggggggtgttgggaggtggagaggcggatcaaaaaaaggg

SEQ ID NO: 23836 - DNA, 600 bp, Chicken  19866894237451_1
tttgcagggaaagttcctgatgtttaaagtatggctggtaagagaagcactttatttaatatgagcttttcacattaaataaaatgtaaatgcaaagacatcagtgctgtgcatatatactatctcctacttctaaatggagataaaataacagtagctgcttaatttctttaaccactctcggatttttttttcatgtaaaatggatgcaacacagtaaatgaagtttgtgtagtatatgtacataatggattttttgttttatagtctgatttgttttttacaatcttttaaagaacwgtagttcttgggccaaagtcagactggttaaacaaggaagatgagtatttcaaagcttcattaaactatgaagtttcaaggattttagctgcagaaacaacttctaattgtttatcttatgttcttgagcttcagttctgataaagtgcataagtctgcttgttatggacctttatcttacgtagataatcttgggtttggtattggaaaggggccatttatctctgcatccttacatcactaggctctataccttcaggaaagcatcagctgattactggaacaagctgcccagacagg

SEQ ID NO: 23837 - DNA, 600 bp, Chicken  19866894237451_2
gatatctgcagcaagtctatttaaatactttaagtgtatcctcaccaccctcaccatgccgcatttttataatttttccaattacttgtgatactttgacccatgtagctgtctggtattgtagaatgtaatacccagaaaactttgttctaataagatgaagtaaaaatactttccaacagtatacaacactaaatgcctaagagctaatcccacttcttgcaaagcctttaaaggaggatgccagaaagttatttaactaaaacttgttacctgcttcagtaacattcagtttcttaragaaactggtggaagagtttctttttggggaattagtttccttcccacagcaagggaaggatgtgaagttttagtgtacctgatgttcttctttttcttcttctcgtttcttttgtattggtattagtattctcatttctttttgtatttgtattagttttgtattttgtatttcattagtaacatgaacttaaatcaggctttggctcctgaagtaattaatcgtatacatcgtacattttatctaacttttattttagtctaagtttatagatatggtaaatatgctgtttagaatgg

SEQ ID NO: 23838 - DNA, 600 bp, Chicken  19866894237452_1
actcgctgtcggtggacgtaaacaccggttctatggagaagtggcccctggctgaactctcctgcccgatccctgcgctgtgccccctccccaaactgctctggggtggggggggaggaagaaaattctttccgcctggtgaaagcagagctgaaattgttttatctcctggtgaaggcttgggagtgttgtgtaggggcctggtgtgcagggacatgtgtgcacagggcttgcacacttatcccctgagctttgagcgtgttgcttgagggggtgacctcagggctctgagcctgcgcraggtttctcagcagcttccatgagcaatatctgcccatatgggcaggctgcaggtgagaaaggtgtgcttaggtggctgaaagcagatacctgcccacctgctggggtggtgcgtggctgggagctgtggcagcgctccygggcacggggaggtgcaggagggagagcacagcctttgcgctcttctgacggatggctgctcccatgcatcctgtgcagagcttggagaggtcattttcatcagccttggtgtaaatctaggattctctgcctgctagatgatctataagtgtaataaaa

SEQ ID NO: 23839 - DNA, 600 bp, Chicken  19866894237452_2
gaaagcagagctgaaattgttttatctcctggtgaaggcttgggagtgttgtgtaggggcctggtgtgcagggacatgtgtgcacagggcttgcacacttatcccctgagctttgagcgtgttgcttgagggggtgacctcagggctctgagcctgcgcraggtttctcagcagcttccatgagcaatatctgcccatatgggcaggctgcaggtgagaaaggtgtgcttaggtggctgaaagcagatacctgcccacctgctggggtggtgcgtggctgggagctgtggcagcgctccygggcacggggaggtgcaggagggagagcacagcctttgcgctcttctgacggatggctgctcccatgcatcctgtgcagagcttggagaggtcattttcatcagccttggtgtaaatctaggattctctgcctgctagatgatctataagtgtaataaaatcctcccgcagcagaactctgcttgcattatggccacattgatagctctgtgcctgcgatgctttgtgccttgctccatcccgcactgtgtcctgttcacttcccaccctgagcatggggctgagcaccagggacaggca

SEQ ID NO: 23840 - DNA, 600 bp, Chicken  19866894237460_1
tgggtgtctgactccagtctgaagccaggtcacagagattaatctaatcacgctgtgttactgctgctgcccaacagtgacacttttccagactctctgattcctgccccatcagccttggatgttctctcacaaaacaaacattaactaaggaaagcatctgcaccagcacgtttgcatgagtttctctgggggaagtggaggatcagcccctgctgcttacaaatgcgttcaattggacactgcctagggcttcagaaaagcagagacctcttgaatctattgtgaaatcagcagcaygttcagcaaggcttttaggaaagctgcccttctactgacagattctgctgctcttactactgatggagcacagatggcatacagacctctaaaacagctcctgggagaatataggagtgtctgagtggtccaagcccagtaagaggtgattttatatgggaaggtcagaaaggcaggctgtggaatggaaagggtggttttatccaggacttctgcagttgggaggccccactgcagtctgatgcacagcaacatacagagcttcgaggtaacatccctgaaaccacaggtgtggatata

SEQ ID NO: 23841 - DNA, 600 bp, Chicken  19866894237460_2
ttggcaatcctgttggcaacacggcctaccacagctccaaagaaggggtgcttcctcgtgtaacctgcatggagaaagcagtgtgctgttatgtggaaggaccagggaaggacaggcagtctccaggtgtgcttgtgggctcagagatttccctctcggcttcctcccagtgctatgcagggggctgcagtcctggtgtctcacagggcacacagctggccagttctgcacatgtggatgtggcactgagggacgtggtttagtgctaagcctcggtaaatcaggttgatgattggactyggtgatcctgaagttgcttgccagcctagaggattctgtgttcctatgtgctttgattgaaacagctcagggggagacttgcaatgttaacagatttgcagaaaagctccacgaggcagacctgttagaggtgcatgttgcaacacggggccgccagtgtccccacacccactgctaagcccaggacagagagcaggacttgcacttatacaatccattatttgggggtgccttcaggagcagctcacagagtaggagcaatcaagtaatctgtccgatttctttcttcttcattatttt

SEQ ID NO: 23842 - DNA, 599 bp, Chicken  19866894237462_1
  misc_feature (1)..(108): n is any nucleotide
nnnnnnnnnnnnnnnnnnnnnnnnnnnnnnnnnnnnnnnnnnnnnnnnnnnnnnnnnnnnnnnnnnnnnnnnnnnnnnnnnnnnnnnnnnnnnnnnnnnnnnnnnnnnatggacatgagtgtttctttcccagccgtgctgttttggggatggaccaatgcagcgaactgcgtatctaaccagctctgtaactggtggctctggagacagaagcaccccaaatagcacaagtgttcagatcactgtggaggtgattgaggctatgcctagacctgccaggggctgccaggctgcctgcaygggtggctctgcacagagccagctcaagcctgcaaagcctcctgcatgcccagggctgcctgcgagtggctgagctagccctgcaagcagcaaagtctcattcaagagttttgtttctgaccaaagaggtctggcaaggcctgagctgctgatgtgaggccagctctgttgtctcgccacctgtggcacgattaacttgcaaccctggttcttcttggggtctcccaactacagccataccatctgccctctcagctcttggactctggaaaatgctgaataccatgtctgtctgtatg

SEQ ID NO: 23843 - DNA, 600 bp, Chicken  19866894237462_2
gcctgcgagtggctgagctagccctgcaagcagcaaagtctcattcaagagttttgtttctgaccaaagaggtctggcaaggcctgagctgctgatgtgaggccagctctgttgtctcgccacctgtggcacgattaacttgcaaccctggttcttcttggggtctcccaactacagccataccatctgccctctcagctcttggactctggaaaatgctgaataccatgtctgtctgtatgacccagcacaggcattttctgcagtcctgattaattgctctcgagggtcacaatcttrtttcatgaacaaraggccagtacttgtccctgccttttgttcatgacttatgttacctatttagaagtgctggtttttactccctgtggctgaggagaatccttccagctccaggccctcaggatggagcttgttgagggctgagaagatgaggagaaggatcctgactgagtggaagagggaatcccagcatcaaaaactgctttactatgttgacagtggttgggccaattccactgatctacagttagcaacagatctcagcaaaaactacaaactagcattttaaaagagtttgaa

SEQ ID NO: 23844 - DNA, 600 bp, Chicken  19866894237462_3
tgagctagccctgcaagcagcaaagtctcattcaagagttttgtttctgaccaaagaggtctggcaaggcctgagctgctgatgtgaggccagctctgttgtctcgccacctgtggcacgattaacttgcaaccctggttcttcttggggtctcccaactacagccataccatctgccctctcagctcttggactctggaaaatgctgaataccatgtctgtctgtatgacccagcacaggcattttctgcagtcctgattaattgctctcgagggtcacaatcttrtttcatgaacaaraggccagtacttgtccctgccttttgttcatgacttatgttacctatttagaagtgctggtttttactccctgtggctgaggagaatccttccagctccaggccctcaggatggagcttgttgagggctgagaagatgaggagaaggatcctgactgagtggaagagggaatcccagcatcaaaaactgctttactatgttgacagtggttgggccaattccactgatctacagttagcaacagatctcagcaaaaactacaaactagcattttaaaagagtttgaagcagcggtaggag

SEQ ID NO: 23845 - DNA, 600 bp, Chicken  19866894237466_1
ctgcacacctggcctgcctgctcctgctccatccttccctggagagaaccacggggttaatggcagccccaagcacaattgcacgaggagcccattaggctgccctgtgctatccatccgctccccctcgcgttcagaaatacattcttaatgctccatttgcttaaggcagcagcggcgtgccgcgttgtgctcaggatgctgaagtcagactaaggtggggggtacataaagtataagtcagggtgtgctgtttctccctgcgaggagctgcagctgccattggggtccctctgatcygggccctcagaccctcccccacctttgcagcacttctgggaatgctctccgatggttcagtgcccttctgactttttgtggggcccaaacccacacccagggatcgagatgctctcctatgaagacgggctgagggagctgggcttgttcagcctagtgaaaagaaggctgcggagtgacctcattgcagccttccaggacctaaagggagcccacaaacaggaggggaggcaactctttgagagggcagataagagcaggacaaggggaaatgggtttaagttgagggagggcagactg

SEQ ID NO: 23846 - DNA, 600 bp, Chicken  19866894237468_1
gaatgtgttgtacttgattgatcagataggagatagttttggatttgcgaagaacgcaagcctcatcctcctttgaatcccctggaccttgatgttgacaccactaaagtaggatcacaacaggaataaagatattccctaatgaaaggcactagatttttatcaatactagcatttttcttttttactttgttctttttatttccaagttttccaggagatccaaggctatattatatttgggactcaaggttagaggagaaaagtaattcttataaatccataggctaaaattagttygatactaataaattttcacttccgaagctaaatacacagaaatgaaaggaaaaaggacagatttgggctggaaggggaaagctctgttatctgtatgagtttctctgctacctagataaaaccttgcacacagaatattgaattacataatgtgccccctcttaccatgaagcagagcagtacgtacattggtatgtacattatgtatacgtaagtaaattaatttttatatcatatccttggrgagggaggaggaagctgagaaagttttgcatatacaaaaaaaaccaaacaaacata

SEQ ID NO: 23847 - DNA, 600 bp, Chicken  19866894237468_2
actcaaggttagaggagaaaagtaattcttataaatccataggctaaaattagttygatactaataaattttcacttccgaagctaaatacacagaaatgaaaggaaaaaggacagatttgggctggaaggggaaagctctgttatctgtatgagtttctctgctacctagataaaaccttgcacacagaatattgaattacataatgtgccccctcttaccatgaagcagagcagtacgtacattggtatgtacattatgtatacgtaagtaaattaatttttatatcatatccttggrgagggaggaggaagctgagaaagttttgcatatacaaaaaaaaccaaacaaacatattttgtgtctttgcagttatgagctgatggactcctctagtttttgagctaactgcaaaacacctttcaaatttccccccaggccttttgagaaaacaaaaaaaaagagagagacagtttttactctgaaaagctttaatgctcctttttgactgctaagaagcagagtgaatgaaagggcccaaactgcttgctcctgaagtgatccatttagctcaattcccagcccctccatccctttagt

SEQ ID NO: 23848 - DNA, 580 bp, Chicken  19866894237468_3
ggaaagctctgttatctgtatgagtttctctgctacctagataaaaccttgcacacagaatattgaattacataatgtgccccctcttaccatgaagcagagcagtacgtacattggtatgtacattatgtatacgtaagtaaattaatttttatatcatatccttggrgagggaggaggaagctgagaaagttttgcatatacaaaaaaaaccaaacaaacatattttgtgtctttgcagttatgagctgatggactcctctagtttttgagctaactgcaaaacacctttcaaatttrcccccaggccttttgagaaaacaaaaaaaaagagagagacagtttttactctgaaaagctttaatgctcctttttgactgctaagaagcagagtgaatgaaagggcccaaactgcttgctcctgaagtgatccatttagctcaattcccagcccctccatccctttagtgaattgctgtttagaaaggcatctttcagctgctgcagatgtgctgctctgtcaattatcaggcttaaatggtagggcttacacatttctgtctccggcaaattcaactat

SEQ ID NO: 23849 - DNA, 600 bp, Chicken  19866894237479_1
cagccaggggcattacaaggaaagtaggcatgatgaaaacatgcctttaaggcaaataccaaaatctgcaagcacgtgaatactgccaaagatttaaaaaaattggcagattttgaagtatttctattccagacaaactattttccaatatgaatttatgatatgttgccaaatgtgatttagtttccaatataactcctcaaacaaatagtgacttagcagtgatgacttcttacactttcaatggagaatgacttttcagaaagtcctaacacctaataccctttgaaaagcaagtawttcagtttggttccactgttgacttaggcataaaaaagcatgagttaactttgagcagttaggtcactaaatttaataagtggaaagtatactgacttaagaaaaagtaaaaattgacttargagacttggctcacatttaccaagtaagcagctgcatcagttcaagatgttacttgtctaactctgcagctgttggttattggccagaaatcatctgtcagagtcctgaatttttcaaaagtgagttgggagattgcaatcctgaatctctggggctttctaggtgtctcagacttcc

SEQ ID NO: 23850 - DNA, 600 bp, Chicken  19866894237479_2
tctattccagacaaactattttccaatatgaatttatgatatgttgccaaatgtgatttagtttccaatataactcctcaaacaaatagtgacttagcagtgatgacttcttacactttcaatggagaatgacttttcagaaagtcctaacacctaataccctttgaaaagcaagtawttcagtttggttccactgttgacttaggcataaaaaagcatgagttaactttgagcagttaggtcactaaatttaataagtggaaagtatactgacttaagaaaaagtaaaaattgacttargagacttggctcacatttaccaagtaagcagctgcatcagttcaagatgttacttgtctaactctgcagctgttggttattggccagaaatcatctgtcagagtcctgaatttttcaaaagtgagttgggagattgcaatcctgaatctctggggctttctaggtgtctcagacttcctgatttcttctggaataagatgtaaggtgagttagtgagtaactaagggctgctaagcattcyagccctggcacttctgattgtactttcgtatgctctcagttcagctgatcactasaggt

SEQ ID NO: 23851 - DNA, 394 bp, Chicken  19866894237479_3
tcactaaatttaataagtggaaagtatactgacttaagaaaaagtaaaaattgacttargagacttggctcacatttaccaagtaagcagctgcatcagttcaagatgttacttgtctaactctgcagctgttggttattggccagaaatcatctgtcagagtcctgaatttttcaaaagtgagttgggagattgcaatcctgaatctctggggctttctaggtgtctcagacttcctgatttcttctggaataagatgtaaggtgagttagtgagtaactaagggctgctaagcattcyagccctggcacttctgattgtactttcgtatgctctcagttcagctgatcactasaggtgttatgaatgagaatcttaataaaaacaagaatta

SEQ ID NO: 23852 - DNA, 339 bp, Chicken  19866894237479_4
ttargagacttggctcacatttaccaagtaagcagctgcatcagttcaagatgttacttgtctaactctgcagctgttggttattggccagaaatcatctgtcagagtcctgaatttttcaaaagtgagttgggagattgcaatcctgaatctctggggctttctaggtgtctcagacttcctgatttcttctggaataagatgtaaggtgagttagtgagtaactaagggctgctaagcattcyagccctggcacttctgattgtactttcgtatgctctcagttcagctgatcactasaggtgttatgaatgagaatcttaataaaaacaagaatta

SEQ ID NO: 23853 - DNA, 599 bp, Chicken  19866894237483_1
  misc_feature (1)..(222): n is any nucleotide
nnnnnnnnnnnnnnnnnnnnnnnnnnnnnnnnnnnnnnnnnnnnnnnnnnnnnnnnnnnnnnnnnnnnnnnnnnnnnnnnnnnnnnnnnnnnnnnnnnnnnnnnnnnnnnnnnnnnnnnnnnnnnnnnnnnnnnnnnnnnnnnnnnnnnnnnnnnnnnnnnnnnnnnnnnnnnnnnnnnnnnnnnnnnnnnnnnnnnnnnnnnnnnnnnnnnnnnnnnnnnnggtccagcaggctaattgacttttattggggctacagctgtagtgacaggagaccaaatccgcaggctgtgctgtggwgaggaggcctggaaagcagagaargaagcggggagcggcaggtccgtgtctccttgtgtaatgctggggtttgccagcagtaatcagtgccccgtggggttacatgcgtgaagtgaaatatcaaataagggatgtaaaaagccctgctgttgcccacaagttaaacrcttcccagaaagatggtggcaaagtggtgtttcagtggaagcagcaaagtgatagatgaaggaggtgagataaggcagcaaacaaaccctctgcagcccrgtgacatccacaagcaaagcaacacaaaagcc

SEQ ID NO: 23854 - DNA, 599 bp, Chicken  19866894237483_2
  misc_feature (1)..(198): n is any nucleotide
nnnnnnnnnnnnnnnnnnnnnnnnnnnnnnnnnnnnnnnnnnnnnnnnnnnnnnnnnnnnnnnnnnnnnnnnnnnnnnnnnnnnnnnnnnnnnnnnnnnnnnnnnnnnnnnnnnnnnnnnnnnnnnnnnnnnnnnnnnnnnnnnnnnnnnnnnnnnnnnnnnnnnnnnnnnnnnnnnnnnnnnnnnnnnnnnnnnnnnggtccagcaggctaattgacttttattggggctacagctgtagtgacaggagaccaaatccgcaggctgtgctgtggwgaggaggcctggaaagcagagaargaagcggggagcggcaggtccgtgtctccttgtgtaatgctggggtttgccagcagtaatcagtgccccgtggggttacatgcgtgaagtgaaatatcaaataagggatgtaaaaagccctgctgttgcccacaagttaaacrcttcccagaaagatggtggcaaagtggtgtttcagtggaagcagcaaagtgatagatgaaggaggtgagataaggcagcaaacaaaccctctgcagcccrgtgacatccacaagcaaagcaacacaaaagccacacgtgtgcaggtgtctgtggtg

SEQ ID NO: 23855 - DNA, 599 bp, Chicken  19866894237483_3
  misc_feature (1)..(55): n is any nucleotide
nnnnnnnnnnnnnnnnnnnnnnnnnnnnnnnnnnnnnnnnnnnnnnnnnnnnnnnggtccagcaggctaattgacttttattggggctacagctgtagtgacaggagaccaaatccgcaggctgtgctgtggwgaggaggcctggaaagcagagaargaagcggggagcggcaggtccgtgtctccttgtgtaatgctggggtttgccagcagtaatcagtgccccgtggggttacatgcgtgaagtgaaatatcaaataagggatgtaaaaagccctgctgttgcccacaagttaaacrcttcccagaaagatggtggcaaagtggtgtttcagtggaagcagcaaagtgatagatgaaggaggtgagataaggcagcaaacaaaccctctgcagcccrgtgacatccacaagcaaagcaacacaaaagccacacgtgtgcaggtgtctgtggtggctctggtgtcactacagcttcctgctcagtgagagccaccagagcgccgtgggtgacattaatatgtgggtgaaggacagatgaggagctgggagaggtttgatttcatctcacaagcctggaatgcaagcaaaaagaaaat

SEQ ID NO: 23856 - DNA, 600 bp, Chicken  19866894237483_4
acaggagaccaaatccgcaggctgtgctgtggwgaggaggcctggaaagcagagaargaagcggggagcggcaggtccgtgtctccttgtgtaatgctggggtttgccagcagtaatcagtgccccgtggggttacatgcgtgaagtgaaatatcaaataagggatgtaaaaagccctgctgttgcccacaagttaaacrcttcccagaaagatggtggcaaagtggtgtttcagtggaagcagcaaagtgatagatgaaggaggtgagataaggcagcaaacaaaccctctgcagcccrgtgacatccacaagcaaagcaacacaaaagccacacgtgtgcaggtgtctgtggtggctctggtgtcactacagcttcctgctcagtgagagccaccagagcgccgtgggtgacattaatatgtgggtgaaggacagatgaggagctgggagaggtttgatttcatctcacaagcctggaatgcaagcaaaaagaaaatctttacctaatacgttgctctggatgtacaatgtaagggcccatccaacctataaacgttctggatgcagcagaggtgatatttctgcaggtaaccctcac

SEQ ID NO: 23857 - DNA, 488 bp, Chicken  19866894237488_1
tctgcgtcacgttcccatccttcaggaaaccatactgctaatcataaacaaggtatttctactttctttgcatacaaagccattctgaagagagtgactactaaacaaaagttgtcactgaaaccatgcagatctgctgggagaaagcctttcctgagccatttttttaggagcatggaatggatcaagctctggagctatgtcaccaatagagccccagcaggagtgttacgcgctggcttagagggtgtcagcaggattggccctagctctttcctcccgctatatctgtacatcagkgcagcaagcctgaaattctgctgggggaagaaaaaacaacacaacttcaaagggaaatgagtgtttgattgattttgtttcctctgtaagtcatagacattagctatgttaaaataacataaatgctataagccagtaataaaaactcacagtccaaatgaagattacttcttttctgtcattttgtg

SEQ ID NO: 23858 - DNA, 600 bp, Chicken  19866894237496_1
gggacttggataagtgaagccttgcttttgcacatcttgtgtggttttatttatgcctaatatgttcagaacagccaaagtaacatgatcttgaagatatcctgtagtgcagctttagttgtttacataattaatgcaaatagagaaagcaaaggcttttaaagcacccagcttgacaggtggggattctgtgattattatttttttcctttggactttgtctaaactctcccattaataactattagaatttgtttctattcatcaccaatttaatttaagcttagctccaacttcctsttgtacttttggaaacatacttttttttgtgcttcaattccgcatctagaaaatgaaagtgctgtactattgcagtttctttgcgactcatttgtttattaccagagtgtaatacaaataataattatgctatttgttgttatacacartgcagcacttttatgatgcatcagaatttttaatacatttattttgctgtttaaaaagmaaaacatttaaaataaatatgctctattagttctattataggaggacaaaaacgtctcaatgtctttaagcctctgatggtgattttgaggt

SEQ ID NO: 23859 - DNA, 600 bp, Chicken  19866894237496_2
caaaggcttttaaagcacccagcttgacaggtggggattctgtgattattatttttttcctttggactttgtctaaactctcccattaataactattagaatttgtttctattcatcaccaatttaatttaagcttagctccaacttcctsttgtacttttggaaacatacttttttttgtgcttcaattccgcatctagaaaatgaaagtgctgtactattgcagtttctttgcgactcatttgtttattaccagagtgtaatacaaataataattatgctatttgttgttatacacartgcagcacttttatgatgcatcagaatttttaatacatttattttgctgtttaaaaagmaaaacatttaaaataaatatgctctattagttctattataggaggacaaaaacgtctcaatgtctttaagcctctgatggtgattttgaggtggactttttctttttttccaccaagaaattgtcagtggtacagaccccagctcacctgttcttgtccaatagctatttcaaccatctctcatattttcctgaacaaagttttcaagtgttctttcctcatgcatctataattaaagtct

SEQ ID NO: 23860 - DNA, 600 bp, Chicken  19866894237496_3
ctttggactttgtctaaactctcccattaataactattagaatttgtttctattcatcaccaatttaatttaagcttagctccaacttcctsttgtacttttggaaacatacttttttttgtgcttcaattccgcatctagaaaatgaaagtgctgtactattgcagtttctttgcgactcatttgtttattaccagagtgtaatacaaataataattatgctatttgttgttatacacartgcagcacttttatgatgcatcagaatttttaatacatttattttgctgtttaaaaagmaaaacatttaaaataaatatgctctattagttctattataggaggacaaaaacgtctcaatgtctttaagcctctgatggtgattttgaggtggactttttctttttttccaccaagaaattgtcagtggtacagaccccagctcacctgttcttgtccaatagctatttcaaccatctctcatattttcctgaacaaagttttcaagtgttctttcctcatgcatctataattaaagtctttattcattactgatatcctgaactgcccaatcrcaatgtgttggttttgtttgttttg

SEQ ID NO: 23861 - DNA, 389 bp, Chicken  19866894237496_4
acatttattttgctgtttaaaaagmaaaacatttaaaataaatatgctctattagttctattataggaggacaaaaacgtctcaatgtctttaagcctctgatggtgattttgaggtggactttttctttttttccaccaagaaattgtcagtggtacagaccccagctcacctgttcttgtccaatagctatttcaaccatctctcatattttcctgaacaaagttttcaagtgttctttcctcatgcatctataattaaagtctttattcattactgatatcctgaactgcccaatcrcaatgtgttggttttgtttgttttgttgtttttttgtcatattcattttctcttgtgtgacaatttctgcaggagacattacttagaaa

SEQ ID NO: 23862 - DNA, 600 bp, Chicken  19866894237498_1
tgagaaacatctatttaggacctggcccaagaagaaccagacataaaagaagaaatagttgatgagcctttgggtcagcccttgaagctacttccattttttaatagtcactcagagggaccatccaagacaagctcaagcctttatctgacagctactgtctgcctacaaaatatgcttgctcaaagatgcatcttattaataatgacaccctatcaaaacttcctatgctttaaatggtttaatgtcagtagatttttacagaggtctcatccattaatcagaacagaagaatgcccyagagtggtctgtattcctctaaaggagctgtaagtgcaggttattcaagaactcatttgccagttataaatgctctgaagtgtggagcaggagtagtgtcggtggagagcacattaggagctgatggcgcagctgtgtggatatatttcccttgacttgtgtggcatggggcttagaaagtataaagggtaggaagtgaggtggaactggaattcagaatgatcagggtctctctgcactgagagcacagtgaagaaacagctgagtacataaaacctcataaagaaaaccaaaacaatg

SEQ ID NO: 23863 - DNA, 600 bp, Chicken  19866894237503_1
tctccatgctgaaaaagaacaactctccctcagtcttccttcagaggagtggtgctcagataatctctgtggccctcctctggacctactccaagagctctgtatcttttttgtgctgagggctccaggtctggacatggtactctagatggggcctcatgagggcagaacagagaaggtaatctaaatctactctcttttagtttaaaaccttatcttaccaatacacactctggtaaagagtctctccctgtctttcttgcagggcttctttaggtactggaaggctatttggattgraaggaaccgtaaagattatctagttccaacctagtgcatgcagagttgccacccactagatcagactgacgagggccccatccaatgtggtcttgaaagcccccagggatgggtcatccacagcttctctaggcaacctactccagtgcctcaccaccctaaaaatacatagtcttgttccttttctctctcttctggtaggctttatccttcacagtagattgcagagcagtttttcatttcacattctacttctttccatgaagcrcactagagcaacaacattattcagctctccac

SEQ ID NO: 23864 - DNA, 600 bp, Chicken  19866894237503_2
ttctttaggtactggaaggctatttggattgraaggaaccgtaaagattatctagttccaacctagtgcatgcagagttgccacccactagatcagactgacgagggccccatccaatgtggtcttgaaagcccccagggatgggtcatccacagcttctctaggcaacctactccagtgcctcaccaccctaaaaatacatagtcttgttccttttctctctcttctggtaggctttatccttcacagtagattgcagagcagtttttcatttcacattctacttctttccatgaagcrcactagagcaacaacattattcagctctccacatttgaaactagatactttcaaaagcttgagagctttagcagccaatttccattttgaaatgggtattctccatatttccccctcagctgttctaaaagtcccacctcaagactgatgtgtgttaattctaattacttttttggcagcagatgaagcaattttagtcatcggattataaagagaatccaagagaagtaaaacagacagtctcattcacacttttgccctttgcaagtcacaaaatcttcaatcgtttatatgtcttgc

SEQ ID NO: 23865 - DNA, 523 bp, Chicken  19866894237503_3
ctgattcttaagtagctctgcaggtattacacagcataaatatagaaacttaatagtaaaagttaaatttactatatatcgagacaagcaacttcactgcaaagtagcaagagtctacaaaagtagcaagagtcatcaaaagtctcaagaaaagctctcatcatcttgtaggatttcctttgattttgggacatcttattttgagatctaagcaattacaaagatgagtaacaaagagacttgtcttcattgctaatcaacagatgttggctggtagtctactttatttaattttggggrgagacaggtgtggctggtgctgactgttatttagttttgttttaagacctctaaaaaccaatgaaaacatatggcaatgctatacacatattctttgacaataaaacacacattatgaactttcataacaattatttattaagttctttacttctccagccatatactacaaaaaataattcagtgaaatagaatgatgacaacaggccactagtttttgaca

SEQ ID NO: 23866 - DNA, 600 bp, Chicken  19866894237519_1
tcctttggataacgtgcaccagacatcttgttctgagtaagacagagctgctgctaagcagcagttattcattccagaacggggaagtgtgagagaaggcaagaggaactattttgttgccttctgaatattaggaaatatgtatggacatcagcatctagctgtaaatgagtctgtgctagaagagtaccctgttctttcaggttctggatatggctttcctggaaaacgtacgtgtgaactgtttaggttcttctctccactttccagctgtagaatctaaagaggttgcattttatrtctagtttcatgtctgggaagagaagttcctgagtatcaaaagcatggtctcttttgaacttgaggaaaaagggggcagagtaacccctcagtcactcagttcttcattgttttggaatggattcatgctggtggctccatgcttgcagagccgtgtagttaagagcagtaaagaagcctaggaagtaacaaatcttaatctgttgacactgcttttagcttgtatttcctaatgactaagtttcacattagggaatattttgagtagtgacagaaacagatttatctttgcagcttaac

SEQ ID NO: 23867 - DNA, 600 bp, Chicken  19866894237524_1
gttggtatatcattctcttgacaggagtctgggaagtagatattacctgaaccaataggatcactgctgacctaatgcctcagcttgtttgctttaaatttcttaaaatttgattgtttgatttattggtagttccttctcattatctataacattggagaaagaagtgacttgctcagataatgcccaatacagctgcactgaggaatacacatgctacttgttaaggtggattaaaaaaaaaatccaatgattgaatcttgtcctccttttggatttgaatctgcgaccttcagaacrtgtagtcagtgaaattcctgtaataatagcattcttgagaggctgagagttcagagctcatgaaaatttttgatcacacatatccatttatctaacaacagcagtcagctgggaataattcctttgcttctgtttgtcaagcttctggtataaagattcaataattgtctttatgacaaagaagatatatttttggacagtaagggctgcaagggctttgaggcactgaatatgtttatgaaaacctccaatatatgaagatgaaagcatcctctactgagaactctttaaatgcaaaat

SEQ ID NO: 23868 - DNA, 600 bp, Chicken  19866894237531_1
gtagagctttgtgaacacgatgcctggggtgcaggtgaccttgcgttcattaaggctgaggcagacttgcacagttattaattgatagcatgtgatattaatcaaaccacgtattttaagagccgagtgatgcatactggtatctttatgcatatgtgatgtggaactagaaagaggcatttggatgctgagaaatttggcttagatggttaatgacagattttgaattgttttttccttcttggtaaagatgtgataagacatgttgaagccttcctgtaccctgtggcactgagagamtttgtggtcataattgtcttatgagtttttacttgggatctggacttctgaaataatttcaaagtgaaattaatttccaaaacacttattacttaagtgaaatttttgtaaatgggcatattgcacagggctgcttatgagacctaaccaacagcgaattatgataccgtatgtattatctaagttctgtggattagcagtaattacggtgtagaaactatatatatataaatatatatatatatataaaatatttaagtatctttctmaaaatttctctccttgtttgaaaatttctta

SEQ ID NO: 23869 - DNA, 600 bp, Chicken  19866894237531_2
agccttcctgtaccctgtggcactgagagamtttgtggtcataattgtcttatgagtttttacttgggatctggacttctgaaataatttcaaagtgaaattaatttccaaaacacttattacttaagtgaaatttttgtaaatgggcatattgcacagggctgcttatgagacctaaccaacagcgaattatgataccgtatgtattatctaagttctgtggattagcagtaattacggtgtagaaactatatatatataaatatatatatatatataaaatatttaagtatctttctmaaaatttctctccttgtttgaaaatttcttacttctccaaaatctaaagcacacattcagtatgaaatacactgtctttgtttgcttgaaaactcatttttcaggataaacctacttctataaaatatatcatttttacttctatttttcagtcctccagaatccagccttgtaatttatttgtctcacgaaccctatccatctgtattcttggattcttactattttacattatgcaagctgtaggcaatgcagaactcctaacctcaaaccccagaagttttcctgttttcttcatat

SEQ ID NO: 23870 - DNA, 600 bp, Chicken  19866894237535_1
tattgcactcctgcacgctacattttagaacagattcacagcaacaaacccaggtgtgactggggcagggaaggcagaagaaagagctgctgaatgccatatgccaatcagcccacatctgctaatgacactgatgtgtttgaatgggacagcccagtttgcatttgtcacagaagtggaatattagcactgtgaatgctttgagggatggatgtatctcagcagggtggctacctcagtcacaaccagcttgtctgccagccctagccgtgctacctcaccctggagaagatgccacarggcaaagcagaaaagatgkactcttccaacaagcccatgccattccccacctgaaaactttcacctacatggaggccaagagagattgcatgacctgcaacaatatagttttcatttaaggactgagtttcctccctgctttgttgtcattttgtcagactgactattgaagctgaaaaattgttttctaagtatcccgggatgtctgcttctgatctctcttgcactgtgaattgtgtggcaattctcactggggcagattaacagcagtggtacagctttgacttttgtcctgtgaaa

SEQ ID NO: 23871 - DNA, 600 bp, Chicken  19866894237535_2
acattttagaacagattcacagcaacaaacccaggtgtgactggggcagggaaggcagaagaaagagctgctgaatgccatatgccaatcagcccacatctgctaatgacactgatgtgtttgaatgggacagcccagtttgcatttgtcacagaagtggaatattagcactgtgaatgctttgagggatggatgtatctcagcagggtggctacctcagtcacaaccagcttgtctgccagccctagccgtgctacctcaccctggagaagatgccacarggcaaagcagaaaagatgkactcttccaacaagcccatgccattccccacctgaaaactttcacctacatggaggccaagagagattgcatgacctgcaacaatatagttttcatttaaggactgagtttcctccctgctttgttgtcattttgtcagactgactattgaagctgaaaaattgttttctaagtatcccgggatgtctgcttctgatctctcttgcactgtgaattgtgtggcaattctcactggggcagattaacagcagtggtacagctttgacttttgtcctgtgaaatccccacattaacagtcta

SEQ ID NO: 23872 - DNA, 423 bp, Chicken  19866894237535_3
gcactgtgaattgtgtggcaattctcactggggcagattaacagcagtggtacagctttgacttttgtcctgtgaaatccccacattaacagtctacatcataacgagccagttcctaatgaacattgtttgctttttttgcccttttgtgtagttattgctgtttgtgttggggattatttattgtgacaagagtaattccatttctttttctactccttctgtggccaaaaagaattatttttaaatatgctgctatgactttaatgtgaattatgtaaaaaaaaggtcagaaggaargtgttgaaggaagtggtatgcttggttcttatttgtattttggatgaaaaaaataataattgcacaaggaagttaagaacaaaaatatcagttatctgtgcttgaccctcagtccttcccatt

SEQ ID NO: 23873 - DNA, 600 bp, Chicken  19866894237536_1
atgactgctacagtatctttatgtgctattgtatggctctgtgtaggcaccctttgacttacaagcttcacttctttcagtaaaattaatgcaacaacatgcagttactatggtgatttacactacctaactattttaggctactcccatactcacgtgtgagccagttctcgctgtccctgaagtttgttggcacctgaccataacaagattgcaagccaaaatataggcatggatgaataatcagggaatgtgaatacaactgaaatagggaattgtgctcttcagtagctttggacktatttgggtacccccttgtacctatatgctccatatgcgtacagaggacaatgaaaacaagctttggtcttaatgaagagaatagcgacgcaatcaatgtcttttgaactcgatgcttgtggacctgtgtatgctgctgtcattttgccaggctcctgccttagcacaggaggtaaaggtgcttctgtgctctgttctcaactataaaaggcaaagcttcagagtagatggaattcaccccaagataagagccctgaagtctctgaaatacctgggatactgaggcacttcatatctcca

SEQ ID NO: 23874 - DNA, 599 bp, Chicken  19866894237538_1
  misc_feature (1)..(138): n is any nucleotide
nnnnnnnnnnnnnnnnnnnnnnnnnnnnnnnnnnnnnnnnnnnnnnnnnnnnnnnnnnnnnnnnnnnnnnnnnnnnnnnnnnnnnnnnnnnnnnnnnnnnnnnnnnnnnnnnnnnnnnnnnnnnnnnnnnnnnnnnnntgctttcacatgaacattcacagtagcatgtattcaaaactggcatttacaggctgcctttgactccccccgccctacagagagcaagtaaacccccgtcccacagctacacacctctgctgtccttcagaacaaccatttgtgtcctccaaatattctgayaaccattctggtttcagcagcaggaaacctggaaatgctactgcgcctacaatgctgtactgtgcaaggtcctggtacaatgcaggattagctgctctgacaaagctttcgatggcccctttgttctcttacacaagagtccagtacaacagaactgcccacaccccttaacacatctttctatatgacctccatagagccttctgcatttttacataattacctattttgttggttgttttttttttcctattttaatttaaagcagctattaaaaacatcaccaaagcacaaatcta

SEQ ID NO: 23875 - DNA, 600 bp, Chicken  19866894237538_2
ctggtttcagcagcaggaaacctggaaatgctactgcgcctacaatgctgtactgtgcaaggtcctggtacaatgcaggattagctgctctgacaaagctttcgatggcccctttgttctcttacacaagagtccagtacaacagaactgcccacaccccttaacacatctttctatatgacctccatagagccttctgcatttttacataattacctattttgttggttgttttttttttcctattttaatttaaagcagctattaaaaacatcaccaaagcacaaatctatacatgaygctgaggtcatgcctcttctgtcagaaaaatccaacagaataggaaaaacactccaagagttgtcagcaatagaaacctccagataggtcaactkccrttttcagccttctgcagtcacaggctacaataygcttctagttcagaagagtccacagccctcaatatgcagcagctcaagagggttttcaggcttgcaagcaacctataaagtagaattaaaactgcaacaagaggccaacaaaccacaagtgcacaggaagagaactgtaaaaatatcaccagtgttcctgcagcagcta

SEQ ID NO: 23876 - DNA, 516 bp, Chicken  19866894237538_3
aagctttcgatggcccctttgttctcttacacaagagtccagtacaacagaactgcccacaccccttaacacatctttctatatgacctccatagagccttctgcatttttacataattacctattttgttggttgttttttttttcctattttaatttaaagcagctattaaaaacatcaccaaagcacaaatctatacatgaygctgaggtcatgcctcttctgtcagaaaaatccaacagaataggaaaaacactccaagagttgtcagcaatagaaacctccagataggtcaactkccrttttcagccttctgcagtcacaggctacaataygcttctagttcagaagagtccacagccctcaatatgcagcagctcaagagggttttcaggcttgcaagcaacctataaagtagaattaaaactgcaacaagaggccaacaaaccacaagtgcacaggaagagaactgtaaaaatatcaccagtgttcctgcagcagctatggatacgtca

SEQ ID NO: 23877 - DNA, 513 bp, Chicken  19866894237538_4
ctttcgatggcccctttgttctcttacacaagagtccagtacaacagaactgcccacaccccttaacacatctttctatatgacctccatagagccttctgcatttttacataattacctattttgttggttgttttttttttcctattttaatttaaagcagctattaaaaacatcaccaaagcacaaatctatacatgaygctgaggtcatgcctcttctgtcagaaaaatccaacagaataggaaaaacactccaagagttgtcagcaatagaaacctccagataggtcaactkccrttttcagccttctgcagtcacaggctacaataygcttctagttcagaagagtccacagccctcaatatgcagcagctcaagagggttttcaggcttgcaagcaacctataaagtagaattaaaactgcaacaagaggccaacaaaccacaagtgcacaggaagagaactgtaaaaatatcaccagtgttcctgcagcagctatggatacgtca

SEQ ID NO: 23878 - DNA, 480 bp, Chicken  19866894237538_5
gtccagtacaacagaactgcccacaccccttaacacatctttctatatgacctccatagagccttctgcatttttacataattacctattttgttggttgttttttttttcctattttaatttaaagcagctattaaaaacatcaccaaagcacaaatctatacatgaygctgaggtcatgcctcttctgtcagaaaaatccaacagaataggaaaaacactccaagagttgtcagcaatagaaacctccagataggtcaactkccrttttcagccttctgcagtcacaggctacaataygcttctagttcagaagagtccacagccctcaatatgcagcagctcaagagggttttcaggcttgcaagcaacctataaagtagaattaaaactgcaacaagaggccaacaaaccacaagtgcacaggaagagaactgtaaaaatatcaccagtgttcctgcagcagctatggatacgtca

SEQ ID NO: 23879 - DNA, 600 bp, Chicken  19866894237540_1
tcaaaaacataagtctgtattgagttcatttacttttgtatgcctgctttccatttttttgctttttccattattagattttggtcaattttgtgttaattcactgcattggaagtgaacaccaagaagtttagtcagaagaacgagtaggacagtacctacctacatagaaatctattgcttttttaaaaagcccttgacttcagtgtagcttcagtttacctctgttgtagcagagaccacaatatcaaggtgagggaagcagcatgtgagcaaaaacgatttaaaaaataaatgctswtattgattagcctgggttttctatgtatttgtgtacrtaggaagcctgagactccacatgataattctgttcccatgttctgttaatgctttccaggataggttttctgcaattccctatatttaaagcaagaacactagtcaacagtgagacctacaccgagaactgaaaaccatttggctgctagcacaaactgaacaaaagtgttttcctcgcatattgtggagagcttgctagcaacttcttttcattcagagtctatcaccctttttcataatggattgtgagaatattttaag

SEQ ID NO: 23880 - DNA, 600 bp, Chicken  19866894237540_2
caaaaacataagtctgtattgagttcatttacttttgtatgcctgctttccatttttttgctttttccattattagattttggtcaattttgtgttaattcactgcattggaagtgaacaccaagaagtttagtcagaagaacgagtaggacagtacctacctacatagaaatctattgcttttttaaaaagcccttgacttcagtgtagcttcagtttacctctgttgtagcagagaccacaatatcaaggtgagggaagcagcatgtgagcaaaaacgatttaaaaaataaatgctswtattgattagcctgggttttctatgtatttgtgtacrtaggaagcctgagactccacatgataattctgttcccatgttctgttaatgctttccaggataggttttctgcaattccctatatttaaagcaagaacactagtcaacagtgagacctacaccgagaactgaaaaccatttggctgctagcacaaactgaacaaaagtgttttcctcgcatattgtggagagcttgctagcaacttcttttcattcagagtctatcaccctttttcataatggattgtgagaatattttaagc

SEQ ID NO: 23881 - DNA, 600 bp, Chicken  19866894237540_3
tatgcctgctttccatttttttgctttttccattattagattttggtcaattttgtgttaattcactgcattggaagtgaacaccaagaagtttagtcagaagaacgagtaggacagtacctacctacatagaaatctattgcttttttaaaaagcccttgacttcagtgtagcttcagtttacctctgttgtagcagagaccacaatatcaaggtgagggaagcagcatgtgagcaaaaacgatttaaaaaataaatgctswtattgattagcctgggttttctatgtatttgtgtacrtaggaagcctgagactccacatgataattctgttcccatgttctgttaatgctttccaggataggttttctgcaattccctatatttaaagcaagaacactagtcaacagtgagacctacaccgagaactgaaaaccatttggctgctagcacaaactgaacaaaagtgttttcctcgcatattgtggagagcttgctagcaacttcttttcattcagagtctatcaccctttttcataatggattgtgagaatattttaagcatagattatatctgcacattttctatttccttctggg

SEQ ID NO: 23882 - DNA, 600 bp, Chicken  19866894237547_1
actatctttattcccttaactcatcagtggaaatttccttgcataaaaagatagttcccagtttgatcacatttgaagacagaactagaaagatctgaacaccaaaaaggttttgtcaatgtaggcattttaaagaattctaattgaaccatcgaggctgtataaattacataaggggaaaatttgtgtactgagatacaaaagtgatcagtgagaggtaaccaaggtgaaactcagtaccaaggggaaaccatggtgttagtggtcatgtctgtttagctgtcacatgccaggcagtcyctaatgtcccacagtamtattttccagaatttaaattggaaataagttgtatgcctgtaacacttagggcaayttcaacaagcttccaaaggaagcaataaatccattacaacttgaagtcctcacagaagtctgttcttatcttagtcacaaattgaactcacataataacttcatttcatcctagcagaaaataattcccttcacagtctgagttactgctattcaaagtgctatgctacacaggtcagacatgattcaagttttcctatctaaaaatctgattatttaaaaaaaaag

SEQ ID NO: 23883 - DNA, 600 bp, Chicken  19866894237547_2
aactcatcagtggaaatttccttgcataaaaagatagttcccagtttgatcacatttgaagacagaactagaaagatctgaacaccaaaaaggttttgtcaatgtaggcattttaaagaattctaattgaaccatcgaggctgtataaattacataaggggaaaatttgtgtactgagatacaaaagtgatcagtgagaggtaaccaaggtgaaactcagtaccaaggggaaaccatggtgttagtggtcatgtctgtttagctgtcacatgccaggcagtcyctaatgtcccacagtamtattttccagaatttaaattggaaataagttgtatgcctgtaacacttagggcaayttcaacaagcttccaaaggaagcaataaatccattacaacttgaagtcctcacagaagtctgttcttatcttagtcacaaattgaactcacataataacttcatttcatcctagcagaaaataattcccttcacagtctgagttactgctattcaaagtgctatgctacacaggtcagacatgattcaagttttcctatctaaaaatctgattatttaaaaaaaaagaaatcagcttttttttt

SEQ ID NO: 23884 - DNA, 600 bp, Chicken  19866894237547_3
tgaagacagaactagaaagatctgaacaccaaaaaggttttgtcaatgtaggcattttaaagaattctaattgaaccatcgaggctgtataaattacataaggggaaaatttgtgtactgagatacaaaagtgatcagtgagaggtaaccaaggtgaaactcagtaccaaggggaaaccatggtgttagtggtcatgtctgtttagctgtcacatgccaggcagtcyctaatgtcccacagtamtattttccagaatttaaattggaaataagttgtatgcctgtaacacttagggcaayttcaacaagcttccaaaggaagcaataaatccattacaacttgaagtcctcacagaagtctgttcttatcttagtcacaaattgaactcacataataacttcatttcatcctagcagaaaataattcccttcacagtctgagttactgctattcaaagtgctatgctacacaggtcagacatgattcaagttttcctatctaaaaatctgattatttaaaaaaaaagaaatcagcttttttttttttttttttggtcagagtctatattgcaacattaaaagagggcaaacacacaaatg

SEQ ID NO: 23885 - DNA, 600 bp, Chicken  19866894237560_1
tccttgtgcctggaggtttaccatcagggagggtaccctcccttagctatctggccctctcttccttcaccaacccaggaacccatacctagatagtagattttgaccatatgaatgttaattctcttgttttcagaacaaaacttgatgtttcccataatgaatccattgtctttgacctctttttagttcagagctaacatattcttaaatcctctataaagttgcatctcatggaaaacaggcttttctttgacatgcgtttggttctcagctttctgacggtttaccacagattayatatagttaaattatatgyraagactacaggataattcattcagcataggagggatctcaggaggtctccagtacaaccttctgctcagagcagagctggctatagggtcagatcagttgctcagggctttattaagttttggcccaaaagctacaagggttggtggctgtacggcctgttccaccatttgactctcctccttgtgaaaaagtttgccatataatcagcttgaaccattcatgcttctttctctgcctgttgaatgattctaatatctttatgatttgctatactatgcc

SEQ ID NO: 23886 - DNA, 600 bp, Chicken  19866894237560_2
accatcagggagggtaccctcccttagctatctggccctctcttccttcaccaacccaggaacccatacctagatagtagattttgaccatatgaatgttaattctcttgttttcagaacaaaacttgatgtttcccataatgaatccattgtctttgacctctttttagttcagagctaacatattcttaaatcctctataaagttgcatctcatggaaaacaggcttttctttgacatgcgtttggttctcagctttctgacggtttaccacagattayatatagttaaattatatgyraagactacaggataattcattcagcataggagggatctcaggaggtctccagtacaaccttctgctcagagcagagctggctatagggtcagatcagttgctcagggctttattaagttttggcccaaaagctacaagggttggtggctgtacggcctgttccaccatttgactctcctccttgtgaaaaagtttgccatataatcagcttgaaccattcatgcttctttctctgcctgttgaatgattctaatatctttatgatttgctatactatgccaagcagtattatctgaaac

SEQ ID NO: 23887 - DNA, 600 bp, Chicken  19866894237560_3
ccatcagggagggtaccctcccttagctatctggccctctcttccttcaccaacccaggaacccatacctagatagtagattttgaccatatgaatgttaattctcttgttttcagaacaaaacttgatgtttcccataatgaatccattgtctttgacctctttttagttcagagctaacatattcttaaatcctctataaagttgcatctcatggaaaacaggcttttctttgacatgcgtttggttctcagctttctgacggtttaccacagattayatatagttaaattatatgyraagactacaggataattcattcagcataggagggatctcaggaggtctccagtacaaccttctgctcagagcagagctggctatagggtcagatcagttgctcagggctttattaagttttggcccaaaagctacaagggttggtggctgtacggcctgttccaccatttgactctcctccttgtgaaaaagtttgccatataatcagcttgaaccattcatgcttctttctctgcctgttgaatgattctaatatctttatgatttgctatactatgccaagcagtattatctgaaact

SEQ ID NO: 23888 - DNA, 599 bp, Chicken  19866894237561_1
  misc_feature (1)..(15): n is any nucleotide
nnnnnnnnnnnnnnnatacataccagcacttttagtgcttttatgcaaaatatttaactcccccaatgtgggggatgctgctattactgataacaacttagcccatctacaaaagtttagacttgctcattacagttttagatttgttctttctttcctcctttgtaagcaatgaagacttctgtctccataaaacatttctgtcttctgctgttcatacagtagtggtcattctcttttgtgaataattttcccttaaatacgtacataggtatatgattccttccatagtataatcakrtttaccgtggtctcaatttttctacatcagtgaattgaataactcaattcacaaggctaataattatctccaaacaccacaacatttagtatttcagctaaatgaaatatatgaaaatccataaattgaaagaagtgataatgtacctccatgtcaaagacagagacttgcacagataaatacacccacaaagtctgtattctttgttctattgggtttatatctcaaagacattgagattattctgctgtaatacgtattatttgagcattactgtctgaggtatacaaagagtaaa

SEQ ID NO: 23889 - DNA, 599 bp, Chicken  19866894237561_2
  misc_feature (1)..(14): n is any nucleotide
nnnnnnnnnnnnnnatacataccagcacttttagtgcttttatgcaaaatatttaactcccccaatgtgggggatgctgctattactgataacaacttagcccatctacaaaagtttagacttgctcattacagttttagatttgttctttctttcctcctttgtaagcaatgaagacttctgtctccataaaacatttctgtcttctgctgttcatacagtagtggtcattctcttttgtgaataattttcccttaaatacgtacataggtatatgattccttccatagtataatcakrtttaccgtggtctcaatttttctacatcagtgaattgaataactcaattcacaaggctaataattatctccaaacaccacaacatttagtatttcagctaaatgaaatatatgaaaatccataaattgaaagaagtgataatgtacctccatgtcaaagacagagacttgcacagataaatacacccacaaagtctgtattctttgttctattgggtttatatctcaaagacattgagattattctgctgtaatacgtattatttgagcattactgtctgaggtatacaaagagtaaat

SEQ ID NO: 23890 - DNA, 599 bp, Chicken  19866894237573_1
  misc_feature (1)..(63): n is any nucleotide
nnnnnnnnnnnnnnnnnnnnnnnnnnnnnnnnnnnnnnnnnnnnnnnnnnnnnnnnnnnnnnnatcaatcagcccatgaagagtctttaagcaaaacaagagtatctttccaaaggagatactttgcaaacccttacaaactgatcataatgattccttcttagcctaaaataataatcttgcagcagtctaaaaacagtacatctgtggcaataggtagagttctaataggttctgattgaccataatattcccagtaacaacccaaatacttacagaagacttcacatgtatgctgaygtggcagagctgagccggttggtttgtcagataaaggcactgatgggtccaacttcagctgcagctcataagagccctcatccaattaacgtcccctattagcaatttagcccagctgaagagtaggggatgctctacatgagttcattatgtctcagtcatcattaactcagattagtgtttttttcatctgaattactgggattactcccatgtcttacaatatgcaagtcccatcatcttacctgctccaagtttgctcttcacgttgccagatagttcttgtagaagagtgacct

SEQ ID NO: 23891 - DNA, 600 bp, Chicken  19866894237577_1
acaccgtggcctgtctctgtagcacctggacagtcaggcaatatgtgatcaccatgatgatgagagggatgaagaatgccatgaaagacccaatgaggacaaagttctcatcattgaggacgcaggtcccattgatgaacactctggagtcatcctgcaaaccaatgactggaatgggcatagatatccctagaagaacgagaatgaaaaagagatggttactgggacagacagggctccaaagagggagcacagaaggtgcgtatcctgcatgcattcagcccactgcctaagactgcytgaaagagaagtcatcactaccacacagaaagtaaagcctcatataacaacactccacagagcgcaggtccaggtgacaagcacccttcactgggagcaattacaactttgctgtgctccacagcaacacagcaaaaccaacacaactgctctgtctagcacttttttctagtctgaagtgtggcttgttggtgtagaaaagacagtcatcccatcgctgtgtcacagtcagctaccactttggggccttttgaaatcacgggcacagagtagatattggtgaatattacaaaagaaaag

SEQ ID NO: 23892 - DNA, 600 bp, Chicken  19866894237592_1
gggaaaaattattaatgacaaagtttgatcacatgttgattatttcatttcctacttagccctgtgaaatggctttgtggtccaaggtccaagagattgtcagacaggctgaggatgtgcctccagttttgcagtggggaactaagtacagagctatttgtggatgcttctcccttccattatgcaaaactggtatgacaagcagcaggtctggaggtcacatctggtattcgttgtccaccctcttggcaggaaggcagtgaaaggcaagactgagtgctcagtgtcagtgggtatttraagcctctgcagattccttaaggatgccaaaatgtaggttaccgtgagctatataaacaagtcaacgtctggcttcaaacttctctgcatacctgcaaccaatttgctgagctgtaagctgaagtagactatgagaacttggttctttcctaaattcgctctcctgactgcatctttatggggaaaaaaagaaaaggtagaaatatttcatataagcatgcttcactaagagtggtttttgtttctttgctgtagcttgtcagtgtatctgtactgtggcaaggccctgggcttaactgc

SEQ ID NO: 23893 - DNA, 600 bp, Chicken  19866894237592_2
acaagtcaacgtctggcttcaaacttctctgcatacctgcaaccaatttgctgagctgtaagctgaagtagactatgagaacttggttctttcctaaattcgctctcctgactgcatctttatggggaaaaaaagaaaaggtagaaatatttcatataagcatgcttcactaagagtggtttttgtttctttgctgtagcttgtcagtgtatctgtactgtggcaaggccctgggcttaactgctgtgaaccttggcatggcggcctgtggtcctaacagtgctgtcctaagtgtttctragctttatcagtgactcccattgctttcatctcagtgaaaggagtacaaatagcatttgctgaagtgatgaaccaaggtctcaagagccatcagtgtgtgaactccttgcagttgccttcaagagtgccatttctagacaacgctgctctgttccaggtgttgggagcagcagtgcttggtcagtggcctctggcagccagcgctggagggcttggccttgtctgctgcggtctttgccttgccttcctgcctgcaaacagtgagcttttagttctgttttgtggtgagatcagatctta

SEQ ID NO: 23894 - DNA, 600 bp, Chicken  19866894237592_3
catttctagacaacgctgctctgttccaggtgttgggagcagcagtgcttggtcagtggcctctggcagccagcgctggagggcttggccttgtctgctgcggtctttgccttgccttcctgcctgcaaacagtgagcttttagttctgttttgtggtgagatcagatcttacagaaagtacaatggaatgatcaagttgcctaattagtagcatacaaagcagatgatataattgcatccaaaggtgaaaactacaggtgtgaatacttgggcatgctgtgtggtgttaattgtaaccyagtgtggggtcgtttttttttttttttcatgtactgcataaatagtgtgaataaatgtaagaaacccataaaatgtttcttgagcaacttctatcacgtggctctgtagaagagattgaaccaaagttcatctttcaaagaagaacamaacacatatggcatgggtctgggtttggggtaggttcaggcaggcatggtcaggttggctgcctggtgacaaggagcagcctgccagcagtctgctgctgctgaactccaaatggtatgggtacagattgggtgctgcttgaatgactcaga

SEQ ID NO: 23895 - DNA, 600 bp, Chicken  19866894237592_4
gttttgtggtgagatcagatcttacagaaagtacaatggaatgatcaagttgcctaattagtagcatacaaagcagatgatataattgcatccaaaggtgaaaactacaggtgtgaatacttgggcatgctgtgtggtgttaattgtaaccyagtgtggggtcgtttttttttttttttcatgtactgcataaatagtgtgaataaatgtaagaaacccataaaatgtttcttgagcaacttctatcacgtggctctgtagaagagattgaaccaaagttcatctttcaaagaagaacamaacacatatggcatgggtctgggtttggggtaggttcaggcaggcatggtcaggttggctgcctggtgacaaggagcagcctgccagcagtctgctgctgctgaactccaaatggtatgggtacagattgggtgctgcttgaatgactcagatattaatggttcccagatatgcacaaatgttgaacttctagttgttgctttttaaaatcttccatgttgggcaactttttgtctgtctttattgcatttggtattcaaacaaaagattcccagattggatttaaacactgtgtatgac

SEQ ID NO: 23896 - DNA, 600 bp, Chicken  19866894237593_1
aaaaaacacaaatggtaatcacaagaaccacagcttaaagccagtgttattaaaacctttctctccccttgcaaagcagaagagctgcagcacggagccacccaacgtgctgtaccaccttccagtgctctgtgacctctctgcagttctcattgctccaatgtcttcttgcacttcttaacacctacacagaactcacaaaggatggaaaactactccactgtgctcaactacactgtgttattttcagaacaagttaaggattgtttaacagtggattagaagacgccgatagcagaytgagcttcatttttaagcctcagttcttgcaaccaggcttgagcacgtggacwgtgtttgcagagctttcctgaaatcaatgaagcttcattcaaggcctaaagcatggcatcaataacaaaaaggaaccataattcatcgacaatatccattattaaagctaatgctggaagtacacagcttccaagaatcacttattagttcccataaaactaaagtatttgcaagcaagtgggtctaaaaggtgataggtactaagctaaagggaaagctgctggctggaaagaatttccagtaatt

SEQ ID NO: 23897 - DNA, 600 bp, Chicken  19866894237593_2
aacctttctctccccttgcaaagcagaagagctgcagcacggagccacccaacgtgctgtaccaccttccagtgctctgtgacctctctgcagttctcattgctccaatgtcttcttgcacttcttaacacctacacagaactcacaaaggatggaaaactactccactgtgctcaactacactgtgttattttcagaacaagttaaggattgtttaacagtggattagaagacgccgatagcagaytgagcttcatttttaagcctcagttcttgcaaccaggcttgagcacgtggacwgtgtttgcagagctttcctgaaatcaatgaagcttcattcaaggcctaaagcatggcatcaataacaaaaaggaaccataattcatcgacaatatccattattaaagctaatgctggaagtacacagcttccaagaatcacttattagttcccataaaactaaagtatttgcaagcaagtgggtctaaaaggtgataggtactaagctaaagggaaagctgctggctggaaagaatttccagtaatttaatgaatcatctgctgaacataaaaaggaaacctaaaaacatacccatcagc

SEQ ID NO: 23898 - DNA, 600 bp, Chicken  19866894237593_3
agggaaagctgctggctggaaagaatttccagtaatttaatgaatcatctgctgaacataaaaaggaaacctaaaaacatacccatcagctggaaagcacatcctgccattgccaaagcaaagctgacctacaacacctgctccatcactaccgtgagaagcatcctgccattggtcctccacggcctgctggaaaacgtggctcctctgcagcctgcttgctccgatcggggacaccagatctcccagcaatgccttcttctcttttgcttctttttagaagtttgcaagcagatcaargcatctgctatgctcaggttttcccctcaatctttagaaactgaactgatctagaaattagtttaccgtcccatcacaatacccaaatcaacacttccagttttatttgtcaacaaatttgtggcaagactggagtgcaatgtacacattcatccctccagccattaaatctttatggcatgctattaaaaatatctgctcccattgtgaatgtagacagcccaatgcatacagtaatctgacagataaacacgttactatggaaactaccaaaatgaatgccttcttttctaaacttgg

SEQ ID NO: 23899 - DNA, 600 bp, Chicken  19866894237596_1
gacttggattgttctaagtgctcgtgtctcatttccttccttgtacattcacgcacatctcagattacagtgtgctattaattataactggaaaatgcatcccattacttcccatttgccaacaagtgatctttgtgaataaactgatactgtggacaaattgttacatttggaagatctgggggacaaatgatctttctctgggttcaaaagttctaacactcatttttcctaagacttccagataaatcttttatcctgatttactgtcagagattatttcctttacatttacatccmaaaaaatttagaattaatgaatgtaacagaacactgtagaagtgccattgtagattagcacagctaaagattttataaaacacagtaagaaaaataaaaatggattcacttaagtaataaaatggctttgaacttaaaacttagacatcttcctttcaccaaatcattcggcaacttttctttagaaagaaaacccagcagcaaagatctcatgtggagcaatcactgctgtcttcctgcatttcatcttcccttcaatcacacacctatcagcctagccatccaaaaaggttttatttc

SEQ ID NO: 23900 - DNA, 600 bp, Chicken  19866894237599_1
gcaccgtggtgtcaccgtgtcaccaggccaccagtggccctgaggccagtgtaatggctgctaatgaggcctcattacggccagccaggggagacgggcgggtggctaaagattaacctcggcagatggcgatggctcagctccgaggtcggcggggctgcactatatatagctgcccctgcagaggttgcggctgggggcacgagttggggagacacaggaaggctgcggtaaagagggatgctgcccgcccggcactgccactgtgcactccacccaggaaggagatggggcttctcyaggagctgctgcgtgaccggactgcagggcgtcgggcgccctcctgtcccatcgaggggacctggagccctcccggccctgtcggctgctggggaggactgcgggtgcccgaggctgggcgaagccgcagccccgtgacgcagcaggcggccctggcagcccccgcaaggggaacttcccgcagccatgcgggcgcgcacatggtgaggcacgcacgtggcggggggagcacgcgtagcccccacattcggccccactcagtcccgacatcgccgcgagcatctcacgctccagcccgag

SEQ ID NO: 23901 - DNA, 600 bp, Chicken  19866894237608_1
agagagaagagagctgcagctctgtgcagatagtccaggcccatttgcaaaacatgagtgccacccctgcttgacacatcacctgacagtggcaataaaagtgcaacttcttcccctaaataagaattaccactctcaactccatcccagtggcttttgaactctttttttttccatttgatttacagtgattttatttacactggatattatgtgtgtccaagtgtgtataggtttgtatacactcaaaatgtccccttctgattaattcaagcaagtgttggatgtgccccagcttcrggagttcagtagaggaattgctgaggggatgacacttctaactgtaagcaaggacagtcaaattccaatgccagggacattagtgaagactttaagtatgacaggggcggaccattgggtttctggctgctgttcttgttttgtggtgcctaagtcccttgttagttactgggtagctcacctgtgtgatctttatgcttttctgtagtcttgcctagttgcacatacggctctccttgtgtggagggcacaacctgtgccaccagccactggcactggtgtgacaccatcagcgttggc

SEQ ID NO: 23902 - DNA, 600 bp, Chicken  19866894237613_1
agactaagtggctgagaagatttacattccattgctaactcagttattactctgctgaaaaccccatagcatcaatataatgaatccctcaacctctgctgctagcacaatttttcttcccaacctcattggctcccaactttctgcttgaccttttacaatctgtgtgcggcagaacttcattacaaccttttaatgatgcacaaatggcacacaacaccaaggtcacagcacatccccggtgagaacttctccaacaccttccgaacagacagcaagatttcatttaaagacacagtygagcaaagagacaaaacctgggatttagtaaagatcccatcggctaccaatccacaaaaactgtccatgtcgtaaaatgagcggctattcccattaaaacgttacatgaaacaaatcgatgcctcaagctgtcagcatccaaataaacaasaaagctcatttagagatctgtttaccactcagaaaagtaatagcacattttccatatagaagtattatttaaactttttaatacgtatctctgcatttttaaaatatgcattatgtaaatggtaaggggttagaaacattcatccatct

SEQ ID NO: 23903 - DNA, 600 bp, Chicken  19866894237613_2
ccttttacaatctgtgtgcggcagaacttcattacaaccttttaatgatgcacaaatggcacacaacaccaaggtcacagcacatccccggtgagaacttctccaacaccttccgaacagacagcaagatttcatttaaagacacagtygagcaaagagacaaaacctgggatttagtaaagatcccatcggctaccaatccacaaaaactgtccatgtcgtaaaatgagcggctattcccattaaaacgttacatgaaacaaatcgatgcctcaagctgtcagcatccaaataaacaasaaagctcatttagagatctgtttaccactcagaaaagtaatagcacattttccatatagaagtattatttaaactttttaatacgtatctctgcatttttaaaatatgcattatgtaaatggtaaggggttagaaacattcatccatctagaatgttagaagccttcctaatgtcacagcaatcaaccgagtgacagacaatgggtcttattctaagtaatatccaacttttgatataataacaaacaaattgttcaaattccactctgcatttttccaactaaaccacggcaataccaa

SEQ ID NO: 23904 - DNA, 599 bp, Chicken  19866894237614_1
  misc_feature (1)..(57): n is any nucleotide
nnnnnnnnnnnnnnnnnnnnnnnnnnnnnnnnnnnnnnnnnnnnnnnnnnnnnnnnnggctctgttttagaggggtctaagtaaatgttacccaacaagcaaccgaatatcagcattatggggtactgaaatggttgaaacaggctgagatgtgagctgagagcagataaatgccttgtacctgaagaaaacgaacataaggttggagtgagacaattcctcctagatcaacttgatggagctggctagaatgcagtgtcatgctctcttttgctcctagatgtttgggggtttgttaayggcagtaatagtctgcctagatctgcttctttcctgcaggtgtgtgacatatatctgaagtacaaactgccrttgctgataatgcctcctgctggagttttctacccagcattgctcagcatggattctgtcaacttaaatcagctctgctacatcatgtacaggtactacaaatggtgtgggctgtagggatttctcttgtcatttttgaaaatgaaattayttggatctataaatctgaartctatactttctctccttatgtaaggcaaagatgaaacattstagttgtgtccagc

SEQ ID NO: 23905 - DNA, 600 bp, Chicken  19866894237614_2
gggtctaagtaaatgttacccaacaagcaaccgaatatcagcattatggggtactgaaatggttgaaacaggctgagatgtgagctgagagcagataaatgccttgtacctgaagaaaacgaacataaggttggagtgagacaattcctcctagatcaacttgatggagctggctagaatgcagtgtcatgctctcttttgctcctagatgtttgggggtttgttaayggcagtaatagtctgcctagatctgcttctttcctgcaggtgtgtgacatatatctgaagtacaaactgccrttgctgataatgcctcctgctggagttttctacccagcattgctcagcatggattctgtcaacttaaatcagctctgctacatcatgtacaggtactacaaatggtgtgggctgtagggatttctcttgtcatttttgaaaatgaaattayttggatctataaatctgaartctatactttctctccttatgtaaggcaaagatgaaacattstagttgtgtccagctttcatggcaaaatattttatagctgtaacttgcattttgttccctgctctgttatcctaaatggcaacatcc

SEQ ID NO: 23906 - DNA, 600 bp, Chicken  19866894237614_3
tagatcaacttgatggagctggctagaatgcagtgtcatgctctcttttgctcctagatgtttgggggtttgttaayggcagtaatagtctgcctagatctgcttctttcctgcaggtgtgtgacatatatctgaagtacaaactgccrttgctgataatgcctcctgctggagttttctacccagcattgctcagcatggattctgtcaacttaaatcagctctgctacatcatgtacaggtactacaaatggtgtgggctgtagggatttctcttgtcatttttgaaaatgaaattayttggatctataaatctgaartctatactttctctccttatgtaaggcaaagatgaaacattstagttgtgtccagctttcatggcaaaatattttatagctgtaacttgcattttgttccctgctctgttatcctaaatggcaacatcctgacctttcctagtgctacttttatcrctaatatgtgaaggaaggagtttgatagttcttaaaggatttatgttgcctagcaacaaagagctgcaatcattagcagttaagcattaaatgtcttagtcctgtgctctgaccatcagatttg

SEQ ID NO: 23907 - DNA, 600 bp, Chicken  19866894237614_4
ggctagaatgcagtgtcatgctctcttttgctcctagatgtttgggggtttgttaayggcagtaatagtctgcctagatctgcttctttcctgcaggtgtgtgacatatatctgaagtacaaactgccrttgctgataatgcctcctgctggagttttctacccagcattgctcagcatggattctgtcaacttaaatcagctctgctacatcatgtacaggtactacaaatggtgtgggctgtagggatttctcttgtcatttttgaaaatgaaattayttggatctataaatctgaartctatactttctctccttatgtaaggcaaagatgaaacattstagttgtgtccagctttcatggcaaaatattttatagctgtaacttgcattttgttccctgctctgttatcctaaatggcaacatcctgacctttcctagtgctacttttatcrctaatatgtgaaggaaggagtttgatagttcttaaaggatttatgttgcctagcaacaaagagctgcaatcattagcagttaagcattaaatgtcttagtcctgtgctctgaccatcagatttgaattttttccttgcaaattc

SEQ ID NO: 23908 - DNA, 600 bp, Chicken  19866894237614_5
tgggggtttgttaayggcagtaatagtctgcctagatctgcttctttcctgcaggtgtgtgacatatatctgaagtacaaactgccrttgctgataatgcctcctgctggagttttctacccagcattgctcagcatggattctgtcaacttaaatcagctctgctacatcatgtacaggtactacaaatggtgtgggctgtagggatttctcttgtcatttttgaaaatgaaattayttggatctataaatctgaartctatactttctctccttatgtaaggcaaagatgaaacattstagttgtgtccagctttcatggcaaaatattttatagctgtaacttgcattttgttccctgctctgttatcctaaatggcaacatcctgacctttcctagtgctacttttatcrctaatatgtgaaggaaggagtttgatagttcttaaaggatttatgttgcctagcaacaaagagctgcaatcattagcagttaagcattaaatgtcttagtcctgtgctctgaccatcagatttgaattttttccttgcaaattccctactgggctgagtaggaagcactyttgccaccctgaaaat

SEQ ID NO: 23909 - DNA, 600 bp, Chicken  19866894237614_6
ttctacccagcattgctcagcatggattctgtcaacttaaatcagctctgctacatcatgtacaggtactacaaatggtgtgggctgtagggatttctcttgtcatttttgaaaatgaaattayttggatctataaatctgaartctatactttctctccttatgtaaggcaaagatgaaacattstagttgtgtccagctttcatggcaaaatattttatagctgtaacttgcattttgttccctgctctgttatcctaaatggcaacatcctgacctttcctagtgctacttttatcrctaatatgtgaaggaaggagtttgatagttcttaaaggatttatgttgcctagcaacaaagagctgcaatcattagcagttaagcattaaatgtcttagtcctgtgctctgaccatcagatttgaattttttccttgcaaattccctactgggctgagtaggaagcactyttgccaccctgaaaatgtgtgggaaatttaggtctgcctcgtgcctgcaggtccaacagcagcactgctttgctctgcaggatccacccctactgttcttggccctgttaattccagtggctgcatctga

SEQ ID NO: 23910 - DNA, 528 bp, Chicken  19866894237614_7
caaagatgaaacattstagttgtgtccagctttcatggcaaaatattttatagctgtaacttgcattttgttccctgctctgttatcctaaatggcaacatcctgacctttcctagtgctacttttatcrctaatatgtgaaggaaggagtttgatagttcttaaaggatttatgttgcctagcaacaaagagctgcaatcattagcagttaagcattaaatgtcttagtcctgtgctctgaccatcagatttgaattttttccttgcaaattccctactgggctgagtaggaagcactyttgccaccctgaaaatgtgtgggaaatttaggtctgcctcgtgcctgcaggtccaacagcagcactgctttgctctgcaggatccacccctactgttcttggccctgttaattccagtggctgcatctgagaagaagagtagccgattgctgacagctggcgtagggctctccatgtggcttttttctctaaggagtctgcagggtaattaacgtgacaggatgctct

SEQ ID NO: 23911 - DNA, 600 bp, Chicken  19866894237618_1
tatgagaaatatacactagtatttagttatcttatttaagttgggcttagttcagtaattttgtttccggggtgtaatttccagaagactgaactatttttcttctgattaaaaaacaacaacaacaacagcaacaaaacaattgtaaaggcaattggaatagcagtagatgtacttcctttaattacagaaatatccaccgagtgagggaaacatgtagccacacccttctcagatgtgtcaggacaagaaaactggcatgagttgcaactagaaaaactgcaatttagaaaaacatgsggggaaattacagcgaggtgtcgaaggggttgttgatgtacacaaatattgagagcttatggtagaaaataatttgcaaggaaaagaaaaggagagaaaagggtgtgggaggtggagagaaaagggggagggaagtgaaagagctctcccctatggccagacaagaagggaagtgacaatctctgaaacagatgtccagcctgggcatccagtgcagctggtgataattttcccatagtaaatatgtagttgtctacaagaccttcctgcttgataataatagtaatattgatacaatga

SEQ ID NO: 23912 - DNA, 600 bp, Chicken  19866894237620_1
ggggaagagaattcacagaatcaggaaagcaatttttcattttctttgacagtcagccctgaaaagttgttttacaaacaccgctcctccaccatcagatagacacactgccagctccctcagaaagagcaaaacgtgtactttcctgtgacgtccaataccagaacgtacgtacgcaacaactcggtcagaagtgctttgtcagtcctgtcggtgattccaatcagtgcgcacagatgtaatgatgagacaaacatctctcattacactgaattaacatcttaatggggatacacaacrtagggaagaaggagaagaagcaatccctgataaaccttatccatgcctcagacttaaaccagagcaacaaatacrcttaggaccctgcagacagttactccagattcagagtgacgcaacacagaatcacggtcttcttctyccaaacacgagcaaaaaaagaaaagccatcactcctaaatctaaggtgatatgttatttgaaacagactcgatatygaaatcatacacgtgggaataatacatctgtagaacactgtttggtacgtagggagctacttctgtcaaagcacacggcact

SEQ ID NO: 23913 - DNA, 600 bp, Chicken  19866894237620_2
aaacaccgctcctccaccatcagatagacacactgccagctccctcagaaagagcaaaacgtgtactttcctgtgacgtccaataccagaacgtacgtacgcaacaactcggtcagaagtgctttgtcagtcctgtcggtgattccaatcagtgcgcacagatgtaatgatgagacaaacatctctcattacactgaattaacatcttaatggggatacacaacrtagggaagaaggagaagaagcaatccctgataaaccttatccatgcctcagacttaaaccagagcaacaaatacrcttaggaccctgcagacagttactccagattcagagtgacgcaacacagaatcacggtcttcttctyccaaacacgagcaaaaaaagaaaagccatcactcctaaatctaaggtgatatgttatttgaaacagactcgatatygaaatcatacacgtgggaataatacatctgtagaacactgtttggtacgtagggagctacttctgtcaaagcacacggcactgcttagcaaacccatcacatgtagttataaagccctcatacttgttgctgaagctctccacagaaacacgaactg

SEQ ID NO: 23914 - DNA, 600 bp, Chicken  19866894237620_3
ttcctgtgacgtccaataccagaacgtacgtacgcaacaactcggtcagaagtgctttgtcagtcctgtcggtgattccaatcagtgcgcacagatgtaatgatgagacaaacatctctcattacactgaattaacatcttaatggggatacacaacrtagggaagaaggagaagaagcaatccctgataaaccttatccatgcctcagacttaaaccagagcaacaaatacrcttaggaccctgcagacagttactccagattcagagtgacgcaacacagaatcacggtcttcttctyccaaacacgagcaaaaaaagaaaagccatcactcctaaatctaaggtgatatgttatttgaaacagactcgatatygaaatcatacacgtgggaataatacatctgtagaacactgtttggtacgtagggagctacttctgtcaaagcacacggcactgcttagcaaacccatcacatgtagttataaagccctcatacttgttgctgaagctctccacagaaacacgaactgttcacacctccatctgaacgcatttagttaactctgcaatggccttgggcaacctcaccattcaaac

SEQ ID NO: 23915 - DNA, 600 bp, Chicken  19866894237620_4
tccaatcagtgcgcacagatgtaatgatgagacaaacatctctcattacactgaattaacatcttaatggggatacacaacrtagggaagaaggagaagaagcaatccctgataaaccttatccatgcctcagacttaaaccagagcaacaaatacrcttaggaccctgcagacagttactccagattcagagtgacgcaacacagaatcacggtcttcttctyccaaacacgagcaaaaaaagaaaagccatcactcctaaatctaaggtgatatgttatttgaaacagactcgatatygaaatcatacacgtgggaataatacatctgtagaacactgtttggtacgtagggagctacttctgtcaaagcacacggcactgcttagcaaacccatcacatgtagttataaagccctcatacttgttgctgaagctctccacagaaacacgaactgttcacacctccatctgaacgcatttagttaactctgcaatggccttgggcaacctcaccattcaaacgccttaattacacatctaaaactgaaaaccaggttttacaaaaggacagatgaagctgttaaatcaatacattccg

SEQ ID NO: 23916 - DNA, 599 bp, Chicken  19866894237627_1
  misc_feature (1)..(217): n is any nucleotide
nnnnnnnnnnnnnnnnnnnnnnnnnnnnnnnnnnnnnnnnnnnnnnnnnnnnnnnnnnnnnnnnnnnnnnnnnnnnnnnnnnnnnnnnnnnnnnnnnnnnnnnnnnnnnnnnnnnnnnnnnnnnnnnnnnnnnnnnnnnnnnnnnnnnnnnnnnnnnnnnnnnnnnnnnnnnnnnnnnnnnnnnnnnnnnnnnnnnnnnnnnnnnnnnnnnnnnnnncccctgctagagctggtccactttttaaacagtagaaggataccaacactgctgtttctgcttgaccctctctccttcaaccsctcctttaatccagtttcctcaaataagcaaatagcagtgatatctgacataattctgaacccattatgtatcatctacgcccagcccaagcacttcccctcagcaaaggccctgagtcacaattcctctctttccactgggagatttccagtgcaaagccaagcaacctgcccatctcagcaaagaaggagcaaaagtagatgtttagctgtatactaactagactaaattcccaatcagttgctgactgattaactgcaccttcaggtatctaacrtctgaaggaagacaagtcaaa

SEQ ID NO: 23917 - DNA, 600 bp, Chicken  19866894237627_2
ttgaccctctctccttcaaccsctcctttaatccagtttcctcaaataagcaaatagcagtgatatctgacataattctgaacccattatgtatcatctacgcccagcccaagcacttcccctcagcaaaggccctgagtcacaattcctctctttccactgggagatttccagtgcaaagccaagcaacctgcccatctcagcaaagaaggagcaaaagtagatgtttagctgtatactaactagactaaattcccaatcagttgctgactgattaactgcaccttcaggtatctaacrtctgaaggaagacaagtcaaaatgggtgaaattaaactttcttacgcatttaacaggaagagaaagaacaacacgatctaaatttggccacatattttactcctaaggtttcaaccaatattcatcttggatctgttctcctggaacataccatcagcaaagcaaaaataagccataatctcttcctctgaagtacaactccagctaactacacctgcagatagctcaaatatcagtttaatttaaggagaaaaatatgtttgcacttggatgcttttcaaggaacacacacacacatcc

SEQ ID NO: 23918 - DNA, 599 bp, Chicken  19866894237629_1
  misc_feature (1)..(90): n is any nucleotide
nnnnnnnnnnnnnnnnnnnnnnnnnnnnnnnnnnnnnnnnnnnnnnnnnnnnnnnnnnnnnnnnnnnnnnnnnnnnnnnnnnnnnnnnnnatgagaaagttacggagaagcgagttactgttgcgttatctggcgcatggctgccgttctctctagggctggctgcctgtggccgcagctgccggatctccctcggattgattaatcaggtgaagctgcaagtctgggcttgaacgtctgccctggtctctgagcctgtccaaatccatggcggggaaaagcatagctgtgcagtgggaraggtgagccccacgctgctgtggcggcctcaacaagtgtggtttggagcttgctcgggagctgctgaggctgcgtccgcctccatgatcccgcgcgacagctcctggtgtcagagagcagcaccgtgccttcctgagttaccaagggatgacaaatatctccggtctgacatacaaggtgacacctcaggagggctgaagctggaaggaagcccttgctgaaagtcagccagaacttcacagcctcagccatgccccgctgcccctgggaaggggccttgtaacctgcttggcctcgtg

SEQ ID NO: 23919 - DNA, 600 bp, Chicken  19866894237632_1
cacagcaactttagtacatcctcagctccttgtgcatcacaggtatttctcatctcattcgagcaacagctgatttcttctgatgtttgctggtatgacagctagaacaaaagtgttacatcccaattatgctttagaacacgatgaagaagtagatattctccaaagagcagccctgatgcagtgacttctggctgcacttagcataaacattgaacagttgtagtactctagactcccttgatttagtgaaaaaactgacctatgtgatcaggaaagcagattgtttacaaaggaaamggggggaaaaaaagttttatttcacagtcttgaaggtatactagtaatgaaaaccagtagctgttctttgtgtaatgaaactctccagtaggaagtatccgaacactgcaggcaaactgtttttccattatccaggcaaacttgaagatttgtgtaaatgcactcttyatctgaaaaagactaaattaacttggaaaagcaaaaacagaaacagtcattttcagttttgtatctgggttagttgattgactattaggtgattattattatttgcaaatttccataatactctctcaagtg

SEQ ID NO: 23920 - DNA, 600 bp, Chicken  19866894237632_2
agcagccctgatgcagtgacttctggctgcacttagcataaacattgaacagttgtagtactctagactcccttgatttagtgaaaaaactgacctatgtgatcaggaaagcagattgtttacaaaggaaamggggggaaaaaaagttttatttcacagtcttgaaggtatactagtaatgaaaaccagtagctgttctttgtgtaatgaaactctccagtaggaagtatccgaacactgcaggcaaactgtttttccattatccaggcaaacttgaagatttgtgtaaatgcactcttyatctgaaaaagactaaattaacttggaaaagcaaaaacagaaacagtcattttcagttttgtatctgggttagttgattgactattaggtgattattattatttgcaaatttccataatactctctcaagtgatcgtagaaggctgaaggtagtaaaatatgatggcaaaaatacagaaggaagctgagaacagctttagcatcttgtaaaattgtggggtttcagctttgctcctactagaaggatctgctgtgaatacttgagccatttggcttagcaagcgaagtctaggaatggtg

SEQ ID NO: 23921 - DNA, 600 bp, Chicken  19866894237638_1
actctggcatccataatcctaataatgagttgactgaaatgagaaaagagaggatttactctaaaataaatgtgaagaaacagaggcatatgtgcaaaaaaaacccaaacccattcttaattggtgtatccagaattactatttttgtctatttctacattcaaatttgaatcttgctaagatagataaaaagtgcaacttcacatttaaacttcacttctgataatacaactttgatacctgaatcctcctgggattcctgcttcctacctgggaacacgatgctttcttttaatcttrggttattttaagctattacacagctttggttgcttaacttcatagcttacattaaggagagaagttgatgtccagacacttttgcaactgctttttgagtacctgtgcacaggctggattgctcaggaaagctcaccttacagccttggagaaagagctctccagctagctagaaggtagtctcttttctctatagctttcttctgctggcaccattttcagcttcccttgacttgaaatagacaaccacatgattttggagttgctttgaaaaaggatggttgaagttactgccctaag

SEQ ID NO: 23922 - DNA, 600 bp, Chicken  19866894237645_1
gttgtagtctaaggtcacatgttctataagcaatgcaaaggggagttgagcatttataaggagtttacatttctgttgaggaatgatggggttcctcagctaagctatatgaactatgtatgttcacgggagatggagatttacagctatcctaaataatcagcttggttgagacaatagttaataatgcgagcactaagaagcatcagggtcaaatgagttttactgataaaactcatttatcagagctaaatgagagcagagtttggcattattgctgttgttattttgaatgcatgyacctgtatttttactatttgtgtgtatcgtgtctaaatgattatgaggctctgggccaaagtggaggtttatgaatcaaaaacacatttaatttaccaaagtgatttttcaatccctgtatttattgttgaacttgtctaagtttcattcatattgcttcttgagcaaatactgtatcaaaacacttaggattttatgtttcccaggttttgtgctatctgtcagcgctatgttagttctggcaaccaccactgtgaaatatgcaattcatgtacatcaaaagtaagtattttgccttta

SEQ ID NO: 23923 - DNA, 600 bp, Chicken  19866894237648_1
gtctacatgcacagaaagatacaaatccaccaacttcactggaaacaggaaaagcaattctgaaccccacatggtttgggccatcatataccaaacgcacggtgcagtgcgataccctgtgcaaagaggctgagtcttccttgaaatctgttacaaggagcaagaacattgtatctggaattatgacctaaataggcaagctatatttaaagaaacaagaagttactgtccctagagtctcaatattacgtctggaaattatttctgtattttacaatataattaaattcatttcttgcrtaggttttaaatgctggcctgggaaaaagtgtgaacatggataatgaaatgtgtgtagttgttattgaacttggaggatttctggtcctagccaaatttgcagaacccacagtcaaataaaaggaaatgaaaacaggcactctgaatattaaagaggatatgcacaacgtccttgaaaacatgagaagagccaggaacctggctctgaacactgtaccacatcaatcagtattactccagcataacagtacycatcacacttccttgtacgctgacttcttttgtgctttcattgatgaa

SEQ ID NO: 23924 - DNA, 492 bp, Chicken  19866894237648_2
tggaaattatttctgtattttacaatataattaaattcatttcttgcrtaggttttaaatgctggcctgggaaaaagtgtgaacatggataatgaaatgtgtgtagttgttattgaacttggaggatttctggtcctagccaaatttgcagaacccacagtcaaataaaaggaaatgaaaacaggcactctgaatattaaagaggatatgcacaacgtccttgaaaacatgagaagagccaggaacctggctctgaacactgtaccacatcaatcagtattactccagcataacagtacycatcacacttccttgtacgctgacttcttttgtgctttcattgatgaagaacagcagaactccagagactgctacacctgaatcactaaagggaaaataacatctttaatggaagcattaaccaacattctgtatgcacatctcaaagaaaaaggtccaataggaccaaagaatgagcaatcacgctcattt

SEQ ID NO: 23925 - DNA, 600 bp, Chicken  19866894237651_1
tctacaagtagaagaaaaaattaaagagaatgcagaatttatttttggaaatatgttattaacgtgttattttcctctttctagatgtgcctataagcacatgatgcccaggtcctgatgagtaagatcagattgcttttactcaaattcttatgccagccattaattttttttaaacagacgtacaggaacttacgaatgtaaatacacaatcacaaaaacttgggatctgagcaaggaaaagaaagggaggcatctgtattttgctccttacaaataagaaactgataggtaggtagkcagcacttgtattgagaggaaagatgaatcagaaactgtctgaaattcatattcacatttaaggacaattcagcttatattaagactggagaggagggaattttgaaaactgctaacagaacacttcatttgctaggtaggatggcacggcgtcaggcctcacatttgcagagccaaggaatgattctgtggtgccagagaaaatrtctttagaagcatctgaattttcagaatgtgacaggatgctaaaatacaattaatctttaagaagcttcaagactgaaacaatgggaattgtta

SEQ ID NO: 23926 - DNA, 600 bp, Chicken  19866894237651_2
acacaatcacaaaaacttgggatctgagcaaggaaaagaaagggaggcatctgtattttgctccttacaaataagaaactgataggtaggtagkcagcacttgtattgagaggaaagatgaatcagaaactgtctgaaattcatattcacatttaaggacaattcagcttatattaagactggagaggagggaattttgaaaactgctaacagaacacttcatttgctaggtaggatggcacggcgtcaggcctcacatttgcagagccaaggaatgattctgtggtgccagagaaaatrtctttagaagcatctgaattttcagaatgtgacaggatgctaaaatacaattaatctttaagaagcttcaagactgaaacaatgggaattgttaacttgaagaaaataaaaataaaaatagaaaaaaagcaataatctagatgttctttatttaactatgctgatcattgcttaactttcatatcgacttaccagacgtaaaagccaacagtactcatagtacttaccagtgctgctggaaagaaagtccttccacaaatcctacatggcaacagatctccagtttgcactgcaacctca

SEQ ID NO: 23927 - DNA, 600 bp, Chicken  19866894237653_1
ccctgtcaaattcactttgtctgcctcagttccctgctgctgtagactcgaagctattgccttttggcccagatccacccattctgatgctgaaacgaaggcctgactgaaggaaacattccaggaacagtttatcctttgctagttgatactgattctctaatacaggcatgtttttttgactcttttcttttcttttcttttggcaatgctgagggcaaatgtcttcccagccactctgaagtttcccagcagtttgctttcttcttgctagctgaggaactctgggaggtggccgtrtagactgagaagtgctgttatgtgcactgactcttgagccctgtacttcagtacctagtgaggttgactggtgagatctctccaagcttgaccttttcctggagtactgttattycagcattcttcatcctgtgtattgaatcacaaagtaccattttctctgcctgactaccaaaagcagtttttcttgcctcgtgtcttctggaacgtctgtttaaagggcagagggcttcaatgctgtccatgcttgcatcgtgctcctgtgctgtttatttcattacaggtatctaattagctacg

SEQ ID NO: 23928 - DNA, 600 bp, Chicken  19866894237653_2
acattccaggaacagtttatcctttgctagttgatactgattctctaatacaggcatgtttttttgactcttttcttttcttttcttttggcaatgctgagggcaaatgtcttcccagccactctgaagtttcccagcagtttgctttcttcttgctagctgaggaactctgggaggtggccgtrtagactgagaagtgctgttatgtgcactgactcttgagccctgtacttcagtacctagtgaggttgactggtgagatctctccaagcttgaccttttcctggagtactgttattycagcattcttcatcctgtgtattgaatcacaaagtaccattttctctgcctgactaccaaaagcagtttttcttgcctcgtgtcttctggaacgtctgtttaaagggcagagggcttcaatgctgtccatgcttgcatcgtgctcctgtgctgtttatttcattacaggtatctaattagctacgttaaatgctagttctcagtggtcagtttcactaaatcacttatttcacacacaggaaaagctgtagatacaacttagtgacagttagttcatgaccgccaaagggaagatataat

SEQ ID NO: 23929 - DNA, 600 bp, Chicken  19866894237663_1
gtctgcctttcagctgcaatcagtgagaaacaaccccactgaagtaagcctgaatgaaacatgaggctgtacatttaggtgaataatagctgaatttaggtttggattctagcacacggttttagtaaaaagggatgcatgctgtcactgcatcaaggtgctgaaaccatcagctcctggcacaagtgccgtagcatcgtcacaccatccccaggcagagagctgctgcagggcaggcagggatcatcctgcaggactgtacagaacgcacaccacatttatcatttaccttctggaaamcccaaagtaaatagataactaaaatccattagagaaacagactccctgcctttaaaactaatatcatttttttcggtatggcattgtctgcctactgtgctgactgtgaagcagagctcagctcccactctggtttgtatggagtgaattatgcgttggcggagcctgcccacggcacgcgtacaatgcctctgcactggactctgctagtgaatgagaaattaaaagagagttgtcatatagaaaattaaaaagtggctactgttacaaaaatatattctataatttatgctgcttcta

SEQ ID NO: 23930 - DNA, 600 bp, Chicken  19866894237663_2
catatagaaaattaaaaagtggctactgttacaaaaatatattctataatttatgctgcttctaagtccctgaaaagaaagtaatgaaaaagcttgagaaatcttgtgacagctctgaatgcccatcagtactaataatgatttgctgtgtgatttacatgcgcttaaacctccagaagcaaagcttgggcacagttcttcgaggcactaagtaccaatcactaagtaccagtacactgaccaatgcacaacatccttctcactcactcactgcttcttttctgttttgttttggttttkctgtttccattcctatgaagcggccactcatcgttcccgtgcttcacgaggacagtgcaagtgattttaaggacatctggaggctcacagctcatcttggtatacataggtgataaaggtgatgatttattcaaatatttaatttactgatcagcaaggaacagcttttgtgctccatcattccttctaaactaaaaaatatatactgaaggaaagttgttttcctacttatgccagctcatccgaaacagcaacctctcatacagtatccatctcctaggcccacagaggcactcacca

SEQ ID NO: 23931 - DNA, 600 bp, Chicken  19866894237670_1
actaagagctgcacgagaacgatggtgctggatgtggatggggtgtctaggctggacgctgacatagataggaaccccccacaaatttctgctgaggtgtttgtgggtctggacacctggggggagcaggtatcagttcatactcctcctcttggaataagcaaacttgagggcagtttctaatgaaacagggtaggtgcctgtccaggccctgcttacctcggataggctcagccaccccttgatctcaagagagatctccattaagaccatcttgtataaccatcaccattgatcacrcatatcagactacagcagatgaagattttggcgttctaagacctcttctttcctttgcagaccgggataatcacggatgccaggctgaaggaactaaccccggccatgcctgtcattttcatcaaagccattcctgctgacaagcaagatatccgtagtgtgtacccatgtcccgtatacaaaacacgccaaaggggaccaacttatgtgtggacttttaaccttaaaactcgagaaagcccgtgcaagtgggtgcttgctggtgtggcactgctgctacagatctaggctcaccagcag

SEQ ID NO: 23932 - DNA, 600 bp, Chicken  19866894237670_2
ctacagcagatgaagattttggcgttctaagacctcttctttcctttgcagaccgggataatcacggatgccaggctgaaggaactaaccccggccatgcctgtcattttcatcaaagccattcctgctgacaagcaagatatccgtagtgtgtacccatgtcccgtatacaaaacacgccaaaggggaccaacttatgtgtggacttttaaccttaaaactcgagaaagcccgtgcaagtgggtgcttgctggtgtggcactgctgctacagatctaggctcaccagcagagagcctcrattaacawccctaacgatatctttctcagttttggaaacaatgttctgaggccattcccagctccacctactggggcccttggcctgcgtagtgcctgtatgggagctgggagagggcagtggcatctagcccagattcttggctgctgtggatcagtgtcctgcagttcctgcactcaaagacccaaacccacaccccaatctgctgtatccagagagtgttaagctcaaatctgaattcaaagtttatttctctgttgtgattcaaaagtagttttaaagtccatggacttctccagt

SEQ ID NO: 23933 - DNA, 600 bp, Chicken  19866894237670_3
gatgaagattttggcgttctaagacctcttctttcctttgcagaccgggataatcacggatgccaggctgaaggaactaaccccggccatgcctgtcattttcatcaaagccattcctgctgacaagcaagatatccgtagtgtgtacccatgtcccgtatacaaaacacgccaaaggggaccaacttatgtgtggacttttaaccttaaaactcgagaaagcccgtgcaagtgggtgcttgctggtgtggcactgctgctacagatctaggctcaccagcagagagcctcrattaacawccctaacgatatctttctcagttttggaaacaatgttctgaggccattcccagctccacctactggggcccttggcctgcgtagtgcctgtatgggagctgggagagggcagtggcatctagcccagattcttggctgctgtggatcagtgtcctgcagttcctgcactcaaagacccaaacccacaccccaatctgctgtatccagagagtgttaagctcaaatctgaattcaaagtttatttctctgttgtgattcaaaagtagttttaaagtccatggacttctccagtatccatag

SEQ ID NO: 23934 - DNA, 600 bp, Chicken  19866894237671_1
aggccatgctgataactagaacagatacaatccataactctattgataggaagtaagtagttttatgtaacctctcaaggctgaagttatttacatgaatagtagtgtggcctactttgtagttttcacactgtgtttaaaagtactaggaagtactaggatttagaaatactaggaagatgttacctttggtccaggcacagctcttccaggagggcctggcattccaagacgtcctggtacaccaggctctccctgcagtgaaggaaggagagtgaaaacaattttttttttcccctmtgaaagtagcacaggcatcgcttggagaaaacatttgtgcatatttcattcaaattgtgttagaagttttaatattttatttatattctgtattatgtgaaatctaaccaytgaagaactgataagcagtatagttttgatttctcaatggaaatgatactcctctcagtccctgaatagatatgtattactagaaatgcttttcttagtatattctagacttggctcagcacatccagcactcaaagcctccttcccagctgtgtatcagtacaagaaacaaacgaattttttctgtca

SEQ ID NO: 23935 - DNA, 600 bp, Chicken  19866894237671_2
ctactttgtagttttcacactgtgtttaaaagtactaggaagtactaggatttagaaatactaggaagatgttacctttggtccaggcacagctcttccaggagggcctggcattccaagacgtcctggtacaccaggctctccctgcagtgaaggaaggagagtgaaaacaattttttttttcccctmtgaaagtagcacaggcatcgcttggagaaaacatttgtgcatatttcattcaaattgtgttagaagttttaatattttatttatattctgtattatgtgaaatctaaccaytgaagaactgataagcagtatagttttgatttctcaatggaaatgatactcctctcagtccctgaatagatatgtattactagaaatgcttttcttagtatattctagacttggctcagcacatccagcactcaaagcctccttcccagctgtgtatcagtacaagaaacaaacgaattttttctgtcacaacagatttttcctttcccaaatagtcctttcagtgtactttattacctttttagatttttttttttaatcttatgcagaaatactcactgggtgtataaattaatagca

SEQ ID NO: 23936 - DNA, 600 bp, Chicken  19866894237672_1
gcagctgcacctagcctcttgagactttgcaacttcaggagcagaaactccttccattcaagacccttttttgagcacttgatcccgtaccctttaccactactatccttttctctgcttctttctcttctcctcagtaacagcagaccctcctcctcatttctacattgagcaagcttgtgtcagtcaagaaactgaaagtatggtgaatgaagggctatgttaaagagccagagtggttccaggaaaatggtgtaagagataaaatcttattcccgaatttaactggagattttctgrttgcagagtggggaagactgctaaagggttcccaataattcaaatacctttgamtttgtttgttgtttcttaaatcatactaaattctactagtctccatgttctttgaagctcctcttgtttttttttcccagtttttcctcaccttcctagaaaatctgttgactcctctaagctctctctctgtgatcccaatttacataataatcctccataatgttcctcccagtcatgtcattcttcttttccagtcctttctctgctacttacactaaattcagtttctgagaaactaagaac

SEQ ID NO: 23937 - DNA, 600 bp, Chicken  19866894237672_2
cattcaagacccttttttgagcacttgatcccgtaccctttaccactactatccttttctctgcttctttctcttctcctcagtaacagcagaccctcctcctcatttctacattgagcaagcttgtgtcagtcaagaaactgaaagtatggtgaatgaagggctatgttaaagagccagagtggttccaggaaaatggtgtaagagataaaatcttattcccgaatttaactggagattttctgrttgcagagtggggaagactgctaaagggttcccaataattcaaatacctttgamtttgtttgttgtttcttaaatcatactaaattctactagtctccatgttctttgaagctcctcttgtttttttttcccagtttttcctcaccttcctagaaaatctgttgactcctctaagctctctctctgtgatcccaatttacataataatcctccataatgttcctcccagtcatgtcattcttcttttccagtcctttctctgctacttacactaaattcagtttctgagaaactaagaactctgatcctatcaccttcctcagggagacttataagaacgtataagcacctgag

SEQ ID NO: 23938 - DNA, 600 bp, Chicken  19866894237677_1
tgggcatcagcggggcccggaaagcacctctccaccccagtggtttgcagccaaagtccagttgttttttaattaatcacgcattaaatagaactacccagagtgctctacaactactgtgtttgtcttcagattgcttccccacctctgctgccagctgcctctccccacccactgggagcaccgtgctgcgtttccaaaccagtgatctgattcggtttctttttgccgggcctggttttcctttcgacaggaaaagcacaaaaacaaattgttccttcttcttcgagatagaacacrggcagggcagcccagcactccgaccaaataaaagaaatatacagatgaggttgcagcaaccacagtgactcaggttcccaccagagggcagygcatcatgcatgggcatgggcatgttccatcactaccaagctgctcatcatgtgtgggcatagagatgtwccatcactaccaagctgatctgccaggcagagtgtggcttgctttagaagaagctgtctgtgcactcctctgtctgagcagggagttattgagaggcagtgcaaaagccttggggaacaggaggagagctctgggcat

SEQ ID NO: 23939 - DNA, 600 bp, Chicken  19866894237677_2
actacccagagtgctctacaactactgtgtttgtcttcagattgcttccccacctctgctgccagctgcctctccccacccactgggagcaccgtgctgcgtttccaaaccagtgatctgattcggtttctttttgccgggcctggttttcctttcgacaggaaaagcacaaaaacaaattgttccttcttcttcgagatagaacacrggcagggcagcccagcactccgaccaaataaaagaaatatacagatgaggttgcagcaaccacagtgactcaggttcccaccagagggcagygcatcatgcatgggcatgggcatgttccatcactaccaagctgctcatcatgtgtgggcatagagatgtwccatcactaccaagctgatctgccaggcagagtgtggcttgctttagaagaagctgtctgtgcactcctctgtctgagcagggagttattgagaggcagtgcaaaagccttggggaacaggaggagagctctgggcatcccatcccattcctgcagcaatcagcacttatttccagtctcaaaaggagccttccccacatcccatgtgctcaagcctctatgacacctcc

SEQ ID NO: 23940 - DNA, 600 bp, Chicken  19866894237677_3
tctccccacccactgggagcaccgtgctgcgtttccaaaccagtgatctgattcggtttctttttgccgggcctggttttcctttcgacaggaaaagcacaaaaacaaattgttccttcttcttcgagatagaacacrggcagggcagcccagcactccgaccaaataaaagaaatatacagatgaggttgcagcaaccacagtgactcaggttcccaccagagggcagygcatcatgcatgggcatgggcatgttccatcactaccaagctgctcatcatgtgtgggcatagagatgtwccatcactaccaagctgatctgccaggcagagtgtggcttgctttagaagaagctgtctgtgcactcctctgtctgagcagggagttattgagaggcagtgcaaaagccttggggaacaggaggagagctctgggcatcccatcccattcctgcagcaatcagcacttatttccagtctcaaaaggagccttccccacatcccatgtgctcaagcctctatgacacctccagctgcaaccaagatgccctcttgcaatgcagcagtgcccttaccaggtccggcactcagcaagtcctgc

SEQ ID NO: 23941 - DNA, 600 bp, Chicken  19866894237677_4
caggaggagagctctgggcatcccatcccattcctgcagcaatcagcacttatttccagtctcaaaaggagccttccccacatcccatgtgctcaagcctctatgacacctccagctgcaaccaagatgccctcttgcaatgcagcagtgcccttaccaggtccggcactcagcaagtcctgcaaagagagaggaaaaattcccatgaggatgcagcagtcctagcactcccaatctgaaaacatcaggataggaaacctccctggctctgctgggtgctggcaccttctgaagtccacrgtgccatgcagactgggccacttttagccatcagtctctggtcctgcccccaattactgggacccctgagacctctgccagtgccccaccacgagctgagcaccaggccaggaaaggacacagggagggatgtggggaaagggtcctcaaacaacgtacctggtctgctgaagaacctgcaagagaaatgttgaaagtggctgttagtttatcaggcagcaaacccattccctgcttctcttgatgccatgaggatccataaagcagcatcgacacctgaccaaggaggggagtggggtc

SEQ ID NO: 23942 - DNA, 599 bp, Chicken  19866894237681_1
  misc_feature (1)..(135): n is any nucleotide
nnnnnnnnnnnnnnnnnnnnnnnnnnnnnnnnnnnnnnnnnnnnnnnnnnnnnnnnnnnnnnnnnnnnnnnnnnnnnnnnnnnnnnnnnnnnnnnnnnnnnnnnnnnnnnnnnnnnnnnnnnnnnnnnnnnnnnnctggccgcccacggcctcttctacgacatcgtgctgctgtgcaccgagccccaggagatggaggtcctggtgaaggacagtaacaagaccacagtctacaccgtacggcccacggacactgtgaaggggctgaagcagcagatctatgcccgccagcacgtgccygtggagcagcagcgcctgacctacgagaccaaggagctggagaaccacccacacgctggagcactaccacgtgcagccccgcagcaccatctacctcctgctgaggctgcggggtggcgcggggccgctgcccagacgctgcgtgccctcctgagctcctccaacccccagcctgcagccctgccccgtccccctgggaataaaagctgtgaactctgggctggtgtcgcctgcagggggagaaacggttcctgcgggatcctcccggggctcagaccgcgtgccagcccagcgagggg

SEQ ID NO: 23943 - DNA, 375 bp, Chicken  19866894237681_2
acggttcctgcgggatcctcccggggctcagaccgcgtgccagcccagcgaggggggtggcagcaatgggacagcgggcggctccaggtctccggaccagccgggcacgggggtgtcggtgccgctgcgggggacccggagctgtgcccgcagcgtcaggagccggccctgggctgggagcggggctggcctggcgtcaccgcgggttgcggtcatcgccggggctgagccgagccggggaagtgctgagatcgggtttcggttttgcaggaaacgaaagtgtagccgaggggcggggaraagcgcccggcgtcctacggggggggcgctcgtgggtgggcacacaccgctgggcagggctccgtgctgcctccc

SEQ ID NO: 23944 - DNA, 600 bp, Chicken  19866894237682_1
cctaggttcataaacataattagcattgctgtctgtctgagctgtaaatagtgcatcagggaagttctaagttggtattgtgaagtttcatttttctttctggcagacaaaatcacagtaagattgaaggctggctgagtttccagtactatccatcacaattcaggtcaccctccacagttcagacccagtgaactgactaattatgaatgtcttctacatactaatgtgtaattgggaactgaatgtactgtggtatgttcacgttaccttgcagtcctttcctgacaccagcatgtrttttgctaagctcaattattttgtggcttgatggtgtctatgagacaagtggaacatgggttttgatgcagttttgtgttatctttttttctcttccattgccttgtgtcattgggctagtaggactagtggtggcagcagatgtgtccttgaggacaacagggttttctaggacttgcatagcctgagaaaaggatgagagcagctgctggcttgctttggctcacttgtagtcatcaagaaatgtgtgtgcataagggatatacagaaggcccattaatattgaagatttatttgctt

SEQ ID NO: 23945 - DNA, 599 bp, Chicken  19866894237690_1
  misc_feature (1)..(65): n is any nucleotide
nnnnnnnnnnnnnnnnnnnnnnnnnnnnnnnnnnnnnnnnnnnnnnnnnnnnnnnnnnnnnnnnnttctggtttgacaaataaaggttgagcttctatatcaaatggcaatctttcaaactctagtaagaatagatacgtgtgtgttttttagttgacaactgagaaacacaatatcacacccatgtatctagtgacctccacattgtcttcaggaagaaaatatgtgacactgtgtgggaagtaatactaatctggcagcaattagcaatctccttgatgtaataatttagattatttrtgaattgcatgtttgcagatattgaattatgaatgaaactacaatattatccaatttataattttaaacacagtgattttactctttcctcgaattccacaatgattaaactttcatttcttatatgacagacaacatgtttaaaataaaaaccaaacaaaagatagaaattacattcctaaaggtctgaaaaagaaagaggaaaaactggagtttttttgattatgctcttaagatggaagattatctttccyctaaggaaaatataatagragtttccacagaattttatttcagat

SEQ ID NO: 23946 - DNA, 600 bp, Chicken  19866894237690_2
tggcagcaattagcaatctccttgatgtaataatttagattatttrtgaattgcatgtttgcagatattgaattatgaatgaaactacaatattatccaatttataattttaaacacagtgattttactctttcctcgaattccacaatgattaaactttcatttcttatatgacagacaacatgtttaaaataaaaaccaaacaaaagatagaaattacattcctaaaggtctgaaaaagaaagaggaaaaactggagtttttttgattatgctcttaagatggaagattatctttccyctaaggaaaatataatagragtttccacagaattttatttcagatattcaacattttctactagaaaacattcatttctggaaataaacatcagacatgcaccaagatatagaaactgagctagcacctggccatataagaaacctgtggcacacctggaaccaaaactttacttccacattcyaagccacttcattgagtactgatgctatttgcagctcattctctgtttaagatactataaaagcatcaaaatttaaaaatgcaaacacacttcttgctagcagtactagagcacat

SEQ ID NO: 23947 - DNA, 600 bp, Chicken  19866894237690_3
ccttgatgtaataatttagattatttrtgaattgcatgtttgcagatattgaattatgaatgaaactacaatattatccaatttataattttaaacacagtgattttactctttcctcgaattccacaatgattaaactttcatttcttatatgacagacaacatgtttaaaataaaaaccaaacaaaagatagaaattacattcctaaaggtctgaaaaagaaagaggaaaaactggagtttttttgattatgctcttaagatggaagattatctttccyctaaggaaaatataatagragtttccacagaattttatttcagatattcaacattttctactagaaaacattcatttctggaaataaacatcagacatgcaccaagatatagaaactgagctagcacctggccatataagaaacctgtggcacacctggaaccaaaactttacttccacattcyaagccacttcattgagtactgatgctatttgcagctcattctctgtttaagatactataaaagcatcaaaatttaaaaatgcaaacacacttcttgctagcagtactagagcacattttattaattttatttatt

SEQ ID NO: 23948 - DNA, 600 bp, Chicken  19866894237690_4
gtttaaaataaaaaccaaacaaaagatagaaattacattcctaaaggtctgaaaaagaaagaggaaaaactggagtttttttgattatgctcttaagatggaagattatctttccyctaaggaaaatataatagragtttccacagaattttatttcagatattcaacattttctactagaaaacattcatttctggaaataaacatcagacatgcaccaagatatagaaactgagctagcacctggccatataagaaacctgtggcacacctggaaccaaaactttacttccacattcyaagccacttcattgagtactgatgctatttgcagctcattctctgtttaagatactataaaagcatcaaaatttaaaaatgcaaacacacttcttgctagcagtactagagcacattttattaattttatttattcactgatatattcaaaattctgttatagaaaacatcatgtgcttatgaaactatttagtacaactatgacttaattcctaacagagtagaatgtaaattaattttctactaattaaagcactcgttttcttggacatcctcttgctctccagtacatgctccaac

SEQ ID NO: 23949 - DNA, 600 bp, Chicken  19866894237700_1
ttaattctcctcaaagacatttacatctaaatagcagtaagtgatctaatgaactcaaatttactgtgctacattgaatgtagattgcagaacaaagaatagttggaaaaaaaggattaatatttatacagtgtcatttttaaacaaagtcatccagaataactaagtgtgtgtgtgtgtgtgaaggggtttcagcaattagaaagcattcctgtagtacattttataccccagaatgcaatgaaaactattttaattgtattttaaactgcagtcttttctgttcaaaatataaaactrttgtttagttttacagataaaaataggatctcttcttattttcactgaaactgctgaartcttgtccactgacgtcaagagaacaggcttaggctcaaacaatggttgtcaaatgtaattggttcaatttgcagctatttctcataaacgcctgcgtattttctaaatgcagtaaacagtgtcatctagaggatatttttaagtactgcatgtcatctacaatatctctcccacaaagattttgacaagcaaagtgaaaacgtgaagataaatagttaccatagtaattgtcgtttaaaa

SEQ ID NO: 23950 - DNA, 600 bp, Chicken  19866894237700_2
tttactgtgctacattgaatgtagattgcagaacaaagaatagttggaaaaaaaggattaatatttatacagtgtcatttttaaacaaagtcatccagaataactaagtgtgtgtgtgtgtgtgaaggggtttcagcaattagaaagcattcctgtagtacattttataccccagaatgcaatgaaaactattttaattgtattttaaactgcagtcttttctgttcaaaatataaaactrttgtttagttttacagataaaaataggatctcttcttattttcactgaaactgctgaartcttgtccactgacgtcaagagaacaggcttaggctcaaacaatggttgtcaaatgtaattggttcaatttgcagctatttctcataaacgcctgcgtattttctaaatgcagtaaacagtgtcatctagaggatatttttaagtactgcatgtcatctacaatatctctcccacaaagattttgacaagcaaagtgaaaacgtgaagataaatagttaccatagtaattgtcgtttaaaacaacaacaacaataaaaaagtattaatgaataaaccctgcttttgggacaccagaaagc

SEQ ID NO: 23951 - DNA, 600 bp, Chicken  19866894237708_1
ctatgttctgagaatagtataaactcaatatacaaagtggaagaaaagtcacacttggtctgttctaagttagacactaggtagagggcttgcagggccaacatttggcactagacatcaatgtagcaatgttgtctattagcgaagatgtatttatttacagaacacatctttagttaccatgaagtctgaataatttttgtttctccacatctttagtttatatcacgtatgatttggattactttatctttcataatttttcattatatatgtaccatagttaaaaaaaaaaaagcrtattttaacagttcttattcaatcatgtagctatagtatgaaatacacataaacatattaaaatacttgaagttagattgttaagtttttaaggaaaaaatgtrggagttaagaaattcaggaattcagtttgcttcaattcatccacatattgtacctctgttaaaataaaatctttaattactgggccttgtgttttcattcccaagacccataactcatttggtgcactgcactggaagaacttgctgactgccttagatcaattcagtgacaagcataaccaagatattcaaagtt

SEQ ID NO: 23952 - DNA, 600 bp, Chicken  19866894237708_2
ttggcactagacatcaatgtagcaatgttgtctattagcgaagatgtatttatttacagaacacatctttagttaccatgaagtctgaataatttttgtttctccacatctttagtttatatcacgtatgatttggattactttatctttcataatttttcattatatatgtaccatagttaaaaaaaaaaaagcrtattttaacagttcttattcaatcatgtagctatagtatgaaatacacataaacatattaaaatacttgaagttagattgttaagtttttaaggaaaaaatgtrggagttaagaaattcaggaattcagtttgcttcaattcatccacatattgtacctctgttaaaataaaatctttaattactgggccttgtgttttcattcccaagacccataactcatttggtgcactgcactggaagaacttgctgactgccttagatcaattcagtgacaagcataaccaagatattcaaagttcagttttatctgtgttgattttggtctgagatattttgaaattttctgatagaaaggaaagattagcaaatattatcatttattagaatttcggtgcttgaaac

SEQ ID NO: 23953 - DNA, 600 bp, Chicken  19866894237708_3
gggtggaggccagtgacaagcagtgtcccccaaggctcggtcttgggactggtgctcttcatcatctttataaatgacactgaggatggaattgagtgcaccctcagcaagtttgcagataacaccaagctgagtggtgcagtcgacacactggagggaagggaggccatccagaggtgcctggacaggctggagaagcgggcccatgtgaacctaatgaggttcaacaagacaaagcgcagggtgttgcacatgggctggggcaatcccaggtatttatacagactgggggaagaaccygtggagagcagccctgctgagaaggacttgggaagccctagtgtatgagaagctagacagtagccagcagtgtgtgctggcagcccggaaggccaactatatcctgtgctgcattaaaagaatgccagtagggagagggaggtgattgctccgctctacttggctcttgttaggccccatctgtagtactgtgtccagacttgtacagactttccagcccccagtacaggaaagatgcagagctcttggaacaggtccagaggagggccactaagatgattagagggctggagcacctct

SEQ ID NO: 23954 - DNA, 600 bp, Chicken  19866894237709_1
ggctgagtgactgatagggtttggctgcttgcagaaggaggtgctcctgagagtgctgtttgggtgttgcagccttctggctttcccttggcagctttctgttcctttggaaagagcgggttttgttggatgatggttcacttgttctgctgggcgctgcctttgacgcgggggatggcaaagagcatcttttgggcgttgctgttgtttcactttggaagggcagcgggcgggcttggcggacaccattgggtttgaccaacccagagcagcatcgtggctctacaacaccctctctgsagggctgtgcatggggaggggtccttctcacctcctgtcccgctcttcccttgcaggggcacagaagcaccggcagcaccgcctcctccaccgcccatgggacgagcagggacgtctgcagggctgtgagacggtgggacctgcagcaccccgtcctgtacataacccgtgagctgtctgtaacaggttttcaccccttgtaatttcttttatttttggttttaatttttcttttcttttttctttttctttcttttttttttttttaatgccccttccctggtttgtcaattgtgttga

SEQ ID NO: 23955 - DNA, 599 bp, Chicken  19866894237714_1
  misc_feature (1)..(15): n is any nucleotide
nnnnnnnnnnnnnnntgggctgggtgctggggctgtataggggcccctctgcctctgcaagggctctttgtgtgaccgctttgtttggcatcgccttttcagacaggcatttttcagcccttagcattgttcaggttctacagcagagtcaaatgttaatcggtgtgttgtagtaaaatgttttatgggacaatttagcttgaactgtaccctctccctttccactgttttttctcaagaagcacaaggggctgtgtgatgctgtttgccaggtgtgagctctcctgaccactcaccatmctttcaatcagggaatgcatttggaatactaaagttggaactggtgtttctcctgtctgtgctgtgtggatgatcctgtttgcmtttgttggctttgagtgggaatcactgcatcccacacagatacccaagtgtgacaccccatccccatggacaagggccatgctcaggcaycttgttgtccaaaggggatcatgttttttgcccatctccttaagaaacccatcccatgttcaaccttccttgtcacaagtggcacagtgttgaacatggttccctttggaaatacatttctgcat

SEQ ID NO: 23956 - DNA, 600 bp, Chicken  19866894237714_2
ttggcatcgccttttcagacaggcatttttcagcccttagcattgttcaggttctacagcagagtcaaatgttaatcggtgtgttgtagtaaaatgttttatgggacaatttagcttgaactgtaccctctccctttccactgttttttctcaagaagcacaaggggctgtgtgatgctgtttgccaggtgtgagctctcctgaccactcaccatmctttcaatcagggaatgcatttggaatactaaagttggaactggtgtttctcctgtctgtgctgtgtggatgatcctgtttgcmtttgttggctttgagtgggaatcactgcatcccacacagatacccaagtgtgacaccccatccccatggacaagggccatgctcaggcaycttgttgtccaaaggggatcatgttttttgcccatctccttaagaaacccatcccatgttcaaccttccttgtcacaagtggcacagtgttgaacatggttccctttggaaatacatttctgcattacaaagatgaaaccgttgtgtccatggctaccatggacaagtgtgttctgagaagactgattcaagccagaggtaaagatgctg

SEQ ID NO: 23957 - DNA, 600 bp, Chicken  19866894237714_3
aaaatgttttatgggacaatttagcttgaactgtaccctctccctttccactgttttttctcaagaagcacaaggggctgtgtgatgctgtttgccaggtgtgagctctcctgaccactcaccatmctttcaatcagggaatgcatttggaatactaaagttggaactggtgtttctcctgtctgtgctgtgtggatgatcctgtttgcmtttgttggctttgagtgggaatcactgcatcccacacagatacccaagtgtgacaccccatccccatggacaagggccatgctcaggcaycttgttgtccaaaggggatcatgttttttgcccatctccttaagaaacccatcccatgttcaaccttccttgtcacaagtggcacagtgttgaacatggttccctttggaaatacatttctgcattacaaagatgaaaccgttgtgtccatggctaccatggacaagtgtgttctgagaagactgattcaagccagaggtaaagatgctgctcacacgtcagctgatctcaacagccatctaaaaaccctaccagagttataaaaagacacagctacaaaccaagatgttatttggacac

SEQ ID NO: 23958 - DNA, 600 bp, Chicken  19866894237714_4
atagtaaatagctggactgttttctactctgagtctcaaaggacctggatctgttcagggatttctcttttttttttcctcatttccaaaatgtttagtttttctgctttcttcttttggccttcacctgtttgatcttgtgggaacagccattaaagactgaggaggcccatcagtgaataattgctagcaccctgtaattagttgaaccaatcagagctggttaattgtgatgggaaaataagtgtagaagggccaccactgtggtttgcaggccagagatgaagctgctgaggtgaytgctggcagacaatgaatgagagatacttcagtttggattctcttccaagaaattaggtgactcaatctcgtagccctatatctaggcacctccaacctcaccatgacttactcctttctctatcttggattgcaatgtgccttggatggaaagctttgttgctgtcttctctcacctgttgtttatagaagtaggtgtgatctggaatgagaggtttgaaatcactaccctggtacttgaggggaatctctacaacctgattccttctctgcttggagaactctacaacttgagtactt

SEQ ID NO: 23959 - DNA, 600 bp, Chicken  19866894237715_1
cctgatgatgataaagaaaacttgctgagagtctcctttgtgatttttcagtccctaggcaacccacacattatgttcttgatgatctgctcttgtgtattctgctgtttccatactggcaatggaaccttttctcttattgaaaaaataatatttctacaactaatgcaaaaattaataagaactaattaaggacaggattcgtttttaatttttaatttttcaaaagcgtcgattgtttatcttgaagtgggaaaaattgcccagtctctttctgctgactggctgagacagacttgyagatgcctctttactacctcattctgcacacaggtgggagcttgtgtgactgcttggtgtgaaaggatcttcttgatggaagtatccaacttgtctttcatatgttagtgcatccttctttccaaagagcttgggccaaagcgccatgaataatccatagatggagaacagtactaggagatgatgggaaatatgcaggttatgagttacctctcgccactggctgtaagggagcctaaggctgtgctactgaagctcagcaacagaagtatcgtcatgctgggacgatcttttcatctg

SEQ ID NO: 23960 - DNA, 600 bp, Chicken  19866894237716_1
gtttgtttgtttaccttaccagtaaataaacttaccctgtcctcaggatctttccatgtaataggaggagctggaataagcagtcttagatgtctgtgcttccttccttctctgttactcagctgtactacacaggcccttgtgggctggtggagatctgggagtgttaagtcactctcttgcacatttcctgaccttgggcactcctgtagtcctttgccactgggacttgagtaatgaattatctgcacaagctgagcaacaaggccactggaggagattaagaaaaagcaatatgcwttaactgtgcctgcatagggcacgaatgaactgtatygaaggagtagaacaagatgtcaagaattctgccttttactattccacccttcaggacgtggagcaagaaaagaagagagattttctgaatggaagtgctggctttattttgaaagtgggttttgatcttgttgcctttttttctccttggcataattgatgtctctaatgyggtttctgtgtgccataccaacatttgtttatctaattaattctgcccttttgtgcatgtgaatttgcttaaatttctcatgggacctttcc

SEQ ID NO: 23961 - DNA, 600 bp, Chicken  19866894237716_2
tgtcctcaggatctttccatgtaataggaggagctggaataagcagtcttagatgtctgtgcttccttccttctctgttactcagctgtactacacaggcccttgtgggctggtggagatctgggagtgttaagtcactctcttgcacatttcctgaccttgggcactcctgtagtcctttgccactgggacttgagtaatgaattatctgcacaagctgagcaacaaggccactggaggagattaagaaaaagcaatatgcwttaactgtgcctgcatagggcacgaatgaactgtatygaaggagtagaacaagatgtcaagaattctgccttttactattccacccttcaggacgtggagcaagaaaagaagagagattttctgaatggaagtgctggctttattttgaaagtgggttttgatcttgttgcctttttttctccttggcataattgatgtctctaatgyggtttctgtgtgccataccaacatttgtttatctaattaattctgcccttttgtgcatgtgaatttgcttaaatttctcatgggacctttcccttgcctgtgttccaccaactggccttttcatgttgc

SEQ ID NO: 23962 - DNA, 600 bp, Chicken  19866894237716_3
gtagtcctttgccactgggacttgagtaatgaattatctgcacaagctgagcaacaaggccactggaggagattaagaaaaagcaatatgcwttaactgtgcctgcatagggcacgaatgaactgtatygaaggagtagaacaagatgtcaagaattctgccttttactattccacccttcaggacgtggagcaagaaaagaagagagattttctgaatggaagtgctggctttattttgaaagtgggttttgatcttgttgcctttttttctccttggcataattgatgtctctaatgyggtttctgtgtgccataccaacatttgtttatctaattaattctgcccttttgtgcatgtgaatttgcttaaatttctcatgggacctttcccttgcctgtgttccaccaactggccttttcatgttgctatttttcctaattatccctgacataatactggaaaacagcgaatttcttctcaggcaggaaaacaaaagtctccttgatcacaaacagcgcaataaatctggcctttatcattgatttattacagttaaaagctaccttcaataattcccaggaatgcaaattacataaa

SEQ ID NO: 23963 - DNA, 600 bp, Chicken  19866894237719_1
taaaggaaaggatatgttcctaatgtcattcttttgtaatgcagtgacaacttggagggttgagaaatgggatcagccccatgagatgagcactgccactgcctggctcagtgaatgaggttgcacctggtgtgccgtgccaaggggagcagtcagcatgcaatctgctgttttattcctcacttgtacagtgaattcaacttcagtagctctttggttgcgagcaggacactcagatacactttttgatattgaggggtgaataaactcaggaaacctaagctgcctgtatttcagcaytgtgtatttcccagaatttcaaagtcttgggcatatgtgctcactcatctcttttctgggaacacctcctctgatacacaagcataatttccctctgcatgcccagcacacagcttccttgcagccacactgaagcacacaacagcgctcagctctcagccccttccagccgcagtgcgagctgcgttagcagcctacggaccgcagcaccgagcagcagcagctgaaagccggcccggccccaggtgcccagaggaaggctccaggagccagagcgcgttacgcagcttccccgagcag

SEQ ID NO: 23964 - DNA, 600 bp, Chicken  19866894237727_1
gggctgaacattggcacagaatggagtactcgacttgcactgtactgggattgcattactggcaaggcaacagttgcaggtccagtgggctacaactgacattaaggatcatcaagttccaaccccctgctgcagtcagggttgctccacaccagatcaggctgcccagagccccatccaacctggccttgaaaacctccagagacggggcagctgcagcttctctgggccttctccagactgaacaagctcaactccttcagcctttctttgtaagaacatcttcatgactcatcttcmaatagctctacgtctttcttgtgctggggaccccagagctggaagcagtactccagatggggcctcatgagagaagagaagagaaatgcagtcacctccctcaccctgctggtcatgctgcttttgatgcagctcaggatacagttagctttctgggctgcaagtacacagttcatgttgagtttctcatcaaccagcacctccgggtccatatctgcaaggctaccctcaatccattttctgcccagcctgtatctgtgcttagaaatcagcaggtgtccatttcagattcctagctct

SEQ ID NO: 23965 - DNA, 600 bp, Chicken  19866894237729_1
cagtacatgcactttgctttctctgtcatgtggtgtaagaggctgagctctcattccctgtagaaccaaaaaaagtatctcatgttggaagggaccccaaggatcatcgagtccaactcttggagctttggttctttttgtgaaaattcaaatgcaattgttctgggtttacctagcttgtgttaaacagttaggcagtcttaaggaaaaggtcatcaatacttctggaggcccagagacgtgttacaaagggagagggagagatggtggttgtctgacttgtgaaaaaggacaggaacrattctctgccttttgagttaaaggcattgctgagggcagaggttagagatattacctgcgrtgttaacctgcatgcagggcttttaagctgctctggagaattaaaaacaaaaaaattataagcctgtcttttgtaaagatttgagatcaaggatcagagattgaatggttgttagcagatgagggtaatcccagtggtagatgttttttctgtcaatttagttgtctgaataagctgaatctgatactttgcagatcttcaatttcctctgcttagtagtgatggcatatggtgcattg

SEQ ID NO: 23966 - DNA, 584 bp, Chicken  19866894237729_2
agaaccaaaaaaagtatctcatgttggaagggaccccaaggatcatcgagtccaactcttggagctttggttctttttgtgaaaattcaaatgcaattgttctgggtttacctagcttgtgttaaacagttaggcagtcttaaggaaaaggtcatcaatacttctggaggcccagagacgtgttacaaagggagagggagagatggtggttgtctgacttgtgaaaaaggacaggaacrattctctgccttttgagttaaaggcattgctgagggcagaggttagagatattacctgcgrtgttaacctgcatgcagggcttttaagctgctctggagaattaaaaacaaaaaaattataagcctgtcttttgtaaagatttgagatcaaggatcagagattgaatggttgttagcagatgagggtaatcccagtggtagatgttttttctgtcaatttagttgtctgaataagctgaatctgatactttgcagatcttcaatttcctctgcttagtagtgatggcatatggtgcattgatcgaagtgcgtgtgaaagaactgtgtgttttggggattcttaaa

SEQ ID NO: 23967 - DNA, 600 bp, Chicken  19866894237736_1
ttgcagtgcttctgggactcctcctccactgtttgaaagtcatgtaatttaatttggtctgtcctttagtcacctgtaataataatgaagtgtaagaagaaaatatcttgctttctatgatatagactccatcagctgaaacatttcattaaggagaatgtgaccttgtttatcaggtgttgaggtaatgacctattgggtatacaaatcccgctgatccaaagagttgctaccaattctgcaaaccaccattactgtcttaccactaaacttactgtcaaccactgaaatttgtactgrtggattaaatgattcttgtctgtagccttaaatcctccacataaggatcgctgctgtaaatcagctgtgcagctgctctcctttctctcctcttggcataacaatttttgctatacctgcaattgttaatttgtttattatattctaattatgattttccatagtggaatggattatacagacaaacgtcaatgacaacaagctaaaagggaaatgcacttagggtgcagcagtgagtaaactacatgattaaatgtactgaaccctatgattcttgattaaggaatattatacctcagt

SEQ ID NO: 23968 - DNA, 600 bp, Chicken  19866894237738_1
ggacagagaaagcctaaatgcgtaaaattgtaggttaagcttgcaaagatggagagttatttattttctctttatttttaaacagcattacaatagatgacgtggtgttcgttatagatggtggaaaaatcaaggaaactcactttgatacacagaaccaacatccagcacaatggctgcagagtgggttagcaaagctaatgccaagcagaggaaaggtcgagcaggaaggtaaggatgagactggttaggaaacgtggtgatgttatctttcaattggccttgaagcacgtgtgtgcyggaggtactacctggttattcacaccttcagatgcaggcagtagcacagcgctcctgtcactgttatggaaagtgttatttcattgttctccataacttctgctgtgttttagtcaggagtttccttctttctcatagaataataaatcttgtgttgtgttatttattatattggtagcatttgccctcacttttgaggctatgatatattaaagctaaaaatgcctataaattaacactgtaccgaattattcgaagcttctgtgtttcagaattccttgtggagtattttctgtttgt

SEQ ID NO: 23969 - DNA, 597 bp, Chicken  19866894237742_1
agcggctggtagaaacatctgaacagtgctgctggattgcatttgttgattaataattgatttgtggattaagcatgcaagtaatgtgtcgagtcctggaagtacatctgccaaatacagcttgtctactctgaacacacgtgaaatgggcacaggaatcatgccatcatgcttgcagctgggagttggggactctgaaaatgctctgtgaatctcagatgaaataaaatgctttggaaggatacttactgctctaaagactttattttttattttggcttgccacaatcagatacatgraaaaggcaaaggtgaaggtgccaggtttgttctctccatttcaggagcttctccaggatcaggaaggtttatttgttctattctcaaggccaattctagtcctgactgagattctatctacttccaatcagttccaatttacatcactcatctttgaccctccaacagtaggtaaaaaatcctaaaagatgtttccagttgtgggagtgacaaatctctgtggaccttttctctttagcttcagtggaagtgtgggctggctgcagggagaagttgctcacataaaataatggcgaa

SEQ ID NO: 23970 - DNA, 600 bp, Chicken  19866894237752_1
tcttccccagttatcagcctctctctaaaaatattaatacagccgctgtatgacagagcatcgtttaatcagaagtataatagatgctctgaactttgaagaaagaccagagaggagctccagtctcaaaatagtgagatagcagcaggagatggggttaaatatggctttgagacgtggtgagcagttgcttttggtgaggccgtcttacatatttcaaagagaaatcaagtgctcaggcacagaagcagcgttagatgctcaagaagtagctaattaagctcccaaagatgcgcggtycccgttccatatggtctgtgtatgaaccacacgcagggacccggagttggttgtgtgctgggttagagaggctttatgagaacagaacagcccctgcaaggcgaattggctgctttgccatcctggtgcggcygacagcctggccagaaacattttggggcgaagcatgccatcgctcctgtgaaattcagttctgggaagcatttgagatttactttgttgggaaactggctatgaattcattttgatggctcttagtaataatccccatcccttttgctatggtgcatgcgcrccgct

SEQ ID NO: 23971 - DNA, 600 bp, Chicken  19866894237752_2
gtgagatagcagcaggagatggggttaaatatggctttgagacgtggtgagcagttgcttttggtgaggccgtcttacatatttcaaagagaaatcaagtgctcaggcacagaagcagcgttagatgctcaagaagtagctaattaagctcccaaagatgcgcggtycccgttccatatggtctgtgtatgaaccacacgcagggacccggagttggttgtgtgctgggttagagaggctttatgagaacagaacagcccctgcaaggcgaattggctgctttgccatcctggtgcggcygacagcctggccagaaacattttggggcgaagcatgccatcgctcctgtgaaattcagttctgggaagcatttgagatttactttgttgggaaactggctatgaattcattttgatggctcttagtaataatccccatcccttttgctatggtgcatgcgcrccgctcccatcggagaggttttgtcctgggcttcagggtggaaatatattttgttttgtgagaatgtttcccatacacagagactgtgcatgctattttctatatggtatatatactgcacgtactgtatctatctgt

SEQ ID NO: 23972 - DNA, 600 bp, Chicken  19866894237752_3
cggtycccgttccatatggtctgtgtatgaaccacacgcagggacccggagttggttgtgtgctgggttagagaggctttatgagaacagaacagcccctgcaaggcgaattggctgctttgccatcctggtgcggcygacagcctggccagaaacattttggggcgaagcatgccatcgctcctgtgaaattcagttctgggaagcatttgagatttactttgttgggaaactggctatgaattcattttgatggctcttagtaataatccccatcccttttgctatggtgcatgcgcrccgctcccatcggagaggttttgtcctgggcttcagggtggaaatatattttgttttgtgagaatgtttcccatacacagagactgtgcatgctattttctatatggtatatatactgcacgtactgtatctatctgtacctatgtgatattacagtgaaaggaataattcgtgagccttaagagaacccactggggtgccgggtcccatggatgcgaggggctcagcgcggcgctgcatccacggttccaaattccccgggttctgagcatttactgcatttgaatgcagttttctgtg

SEQ ID NO: 23973 - DNA, 467 bp, Chicken  19866894237754_1
cttggctctttaccctgcgggctgataagagtaagaatcatcacatctgatctactcacagctctgaatcaaatggcacttgtttgaggaacgctcctgggcagcgggcaatgaggacacagctgggcagggagggcacagcctctgaccccagctattctgtgctgtttcctaggaactggctcccccaaaaactaaaaacacatgggtaggtaagagctctacagcgactaacagaggagccacaaactcctaacctggaaaaagcatcttcggtttcatagctacagtgttttgaaytgcaagcttaaagtcaacctgaagatgctctggaacctccagctgtcctttccagagggcaagaagcctcaagctgctgtcagagtatagagatgtctagaaatgcacattcattttaaatttctgccaaattccaatcctgcttgttgcatgctgctttgcctttt

SEQ ID NO: 23974 - DNA, 599 bp, Chicken  19866894237757_1
  misc_feature (1)..(71): n is any nucleotide
nnnnnnnnnnnnnnnnnnnnnnnnnnnnnnnnnnnnnnnnnnnnnnnnnnnnnnnnnnnnnnnnnnnnnnnatgcagagcagttattaccagtgtgggcaaccatgtaatctttcatcaagaaataaagaaggaaaataaagtccttggcttagtagggttttataaacacatattgcacaactgccctctgtaactctgcagataaaagcaagtaaggaggacatctcacggaaggttttataaccaagcaagaaaatgctgtaagaaattatgtatgtcaagtgagaggtgcatgtgyttcctccagctctgccagcagctgaactgcagactgcttgggaggaagaggatgagggattgccattaaaaatacattggattgcaaggaagcaggagagttgtcatggggacacaggtttatgaaaacccacagccatgagcagcrtctcctcctattccctggctggtgatggaggtgtcgctcagcccttcaggggattacagaacaggaatgggaagcygtccttgctctgcttgccccttccgcccctccacaccgtggtttgcggtaatgctcaatacaataatcacaggtat

SEQ ID NO: 23975 - DNA, 600 bp, Chicken  19866894237757_2
ggcttagtagggttttataaacacatattgcacaactgccctctgtaactctgcagataaaagcaagtaaggaggacatctcacggaaggttttataaccaagcaagaaaatgctgtaagaaattatgtatgtcaagtgagaggtgcatgtgyttcctccagctctgccagcagctgaactgcagactgcttgggaggaagaggatgagggattgccattaaaaatacattggattgcaaggaagcaggagagttgtcatggggacacaggtttatgaaaacccacagccatgagcagcrtctcctcctattccctggctggtgatggaggtgtcgctcagcccttcaggggattacagaacaggaatgggaagcygtccttgctctgcttgccccttccgcccctccacaccgtggtttgcggtaatgctcaatacaataatcacaggtatttgttagcatgatgggaacttctggaatgctttgttttagctctctaargcaaatatgaacataatttctcattggatatcttctgcatgatccatgctgcatgaactcttttatgagccctgggatgacagtaccactgccagtgtc

SEQ ID NO: 23976 - DNA, 600 bp, Chicken  19866894237757_3
catctcacggaaggttttataaccaagcaagaaaatgctgtaagaaattatgtatgtcaagtgagaggtgcatgtgyttcctccagctctgccagcagctgaactgcagactgcttgggaggaagaggatgagggattgccattaaaaatacattggattgcaaggaagcaggagagttgtcatggggacacaggtttatgaaaacccacagccatgagcagcrtctcctcctattccctggctggtgatggaggtgtcgctcagcccttcaggggattacagaacaggaatgggaagcygtccttgctctgcttgccccttccgcccctccacaccgtggtttgcggtaatgctcaatacaataatcacaggtatttgttagcatgatgggaacttctggaatgctttgttttagctctctaargcaaatatgaacataatttctcattggatatcttctgcatgatccatgctgcatgaactcttttatgagccctgggatgacagtaccactgccagtgtctccagagtatatttaaaacttggttctttccagaatctcaaaggtgaaatgaagcattggagccatgtggatttta

SEQ ID NO: 23977 - DNA, 600 bp, Chicken  19866894237757_4
aggatgagggattgccattaaaaatacattggattgcaaggaagcaggagagttgtcatggggacacaggtttatgaaaacccacagccatgagcagcrtctcctcctattccctggctggtgatggaggtgtcgctcagcccttcaggggattacagaacaggaatgggaagcygtccttgctctgcttgccccttccgcccctccacaccgtggtttgcggtaatgctcaatacaataatcacaggtatttgttagcatgatgggaacttctggaatgctttgttttagctctctaargcaaatatgaacataatttctcattggatatcttctgcatgatccatgctgcatgaactcttttatgagccctgggatgacagtaccactgccagtgtctccagagtatatttaaaacttggttctttccagaatctcaaaggtgaaatgaagcattggagccatgtggattttaaagcactgtttcttctccagatcaactgcaatggaagtgatggagaaagaatccattagcagcaaactttgtgtctgccactgcaggagatggtgctggagctttgctggacccctgctgctctg

SEQ ID NO: 23978 - DNA, 599 bp, Chicken  19866894237758_1
  misc_feature (1)..(19): n is any nucleotide
nnnnnnnnnnnnnnnnnnnccttcctgtggctgaaatacctgccccaaaaactttcaatcacatttcaaataagacataaggaagaaacataacaaacaaatgagggaagccagatctaggctcacagaacactatacaaagctctaaacccaggttcaaggctccctttaaacctctctccatccttctgcccacgcttcactaactcttcacagcaacttgccagttttgttttcataatagaccgcagatgaaagttaaatctgaagccaaacttcggcttgccctggggttgcttrgttgggtgggttttattaagcctcaccctcatttattttttgtaaagctatcattcaccttgcacaatctaaacaagtatagattcatgtaggattgcctctgccctagaccacaccctttgctacctcaactagctgccacttgccctgccagcaagcaccactttcctaacgaagccacactaaatacagaatcacctaccaccaaggcttgygaatgatgaagacaatcagcctgtggcctgcctttcctctggcctacaagttgcagaggcagcaatgggctgcagctcctgtgc

SEQ ID NO: 23979 - DNA, 600 bp, Chicken  19866894237758_2
gcaacttgccagttttgttttcataatagaccgcagatgaaagttaaatctgaagccaaacttcggcttgccctggggttgcttrgttgggtgggttttattaagcctcaccctcatttattttttgtaaagctatcattcaccttgcacaatctaaacaagtatagattcatgtaggattgcctctgccctagaccacaccctttgctacctcaactagctgccacttgccctgccagcaagcaccactttcctaacgaagccacactaaatacagaatcacctaccaccaaggcttgygaatgatgaagacaatcagcctgtggcctgcctttcctctggcctacaagttgcagaggcagcaatgggctgcagctcctgtgctygtaacagtgggtaagagatgatacaaggccaagaaagaggcttgtgagagtcctcgagagcagagctactcccagccaagcactcagcaggatcagtctgatctcaatactgctggtgcctttccctctaaacatatggcaagcacacttgcagtttagcattcaaatctcattttggaagcaagacagctctttgctaatggcttacttcgct

SEQ ID NO: 23980 - DNA, 540 bp, Chicken  19866894237758_3
ttgggtgggttttattaagcctcaccctcatttattttttgtaaagctatcattcaccttgcacaatctaaacaagtatagattcatgtaggattgcctctgccctagaccacaccctttgctacctcaactagctgccacttgccctgccagcaagcaccactttcctaacgaagccacactaaatacagaatcacctaccaccaaggcttgygaatgatgaagacaatcagcctgtggcctgcctttcctctggcctacaagttgcagaggcagcaatgggctgcagctcctgtgctygtaacagtgggtaagagatgatacaaggccaagaaagaggcttgtgagagtcctcgagagcagagctactcccagccaagcactcagcaggatcagtctgatctcaatactgctggtgcctttccctctaaacatatggcaagcacacttgcagtttagcattcaaatctcattttggaagcaagacagctctttgctaatggcttacttcgctttcttgtatctggggggggttttcgt

SEQ ID NO: 23981 - DNA, 600 bp, Chicken  19866894237764_1
ttcatttttaacaaagctagcaagcataggaaatcgctgattcacaccgtagttccaactgtaatactaaaaactcttacacagctactcacaacacttacagagtggtaaaaatgggatagggatgctgaaatgttgaaagcatgtatcattttcacagtgaaatctccttgtcaatactagatgtagtcctgcaggacatgctgaagcatgggtggaaagctgtgatagctgcagctgcaaacagatctttgtagccagggcacactgtgagaaagaatatgggaagttatgaattgrcttggatagagcccagcctcgcttctgttggatacaatgtgagaaaatgtacatcctccaatttcacactaacagaagtctcattttttcacggcacatacagccataggctagaatgatattaatgatgtggaaaaagaccagcctgtcatttctgctgaaaatgataagagaaaacaatttcctgtaacagttgcaaacacagtgmggagattaaagactggtttgtcaacctggtgtcctctactgctgcaacagataatttacaacagtactctattgctgcatgaagagaaataa

SEQ ID NO: 23982 - DNA, 600 bp, Chicken  19866894237764_2
gcatgggtggaaagctgtgatagctgcagctgcaaacagatctttgtagccagggcacactgtgagaaagaatatgggaagttatgaattgrcttggatagagcccagcctcgcttctgttggatacaatgtgagaaaatgtacatcctccaatttcacactaacagaagtctcattttttcacggcacatacagccataggctagaatgatattaatgatgtggaaaaagaccagcctgtcatttctgctgaaaatgataagagaaaacaatttcctgtaacagttgcaaacacagtgmggagattaaagactggtttgtcaacctggtgtcctctactgctgcaacagataatttacaacagtactctattgctgcatgaagagaaataacgtcacctcaaagcctattcaactcaggggaggtttgtgctcttaagagatcaaggttaagctatgagttattattttggagtgaagcttctatctgtgagcaaagcaagtaactttatgctgataccaaactatctgtcagctttggctacgccaacaccttcaaaaaccagtttggctgctgctggcactgatggggctcagggta

SEQ ID NO: 23983 - DNA, 600 bp, Chicken  19866894237767_1
cagtgtggtgatgccagcagtatcccaccacctgtgcagacactgcatggcaacgcccagccctcagtgtggcactctcactgcctctcgagcttgtttcacacccccacccctctcaacggcctctgtttgaaagaagaaaaacaaaatgaaaaaagagcttcaaaaaaaaaggaaagaaaaaaaaaaaggggcacctatactgttcactctgtggtttgtggttcacaccaaacaaaacaattggacatagcaacgtctccaaaacagccctcaccttggtgatgtgcccaccctacrcaaaccccatcaaatggcattgcaggcgctggagtccaaaaatcccattgctgtgttgggatcgtgggaccatcgctgcatgccttgcctcccccacatcctttaccaaggtacagccacaccatcaccaagggcctgttttgtgcaggcagcaggacactgaagtgcagatggaagcatgtccaaaaagtgaccaaagtggggaaagacccagaaagctacttcttgccatgtgctttttgtgttgcttgcagagcagcccctctgctgctgctctgccatcccctccaggctgctggg

SEQ ID NO: 23984 - DNA, 599 bp, Chicken  19866894237768_1
  misc_feature (1)..(129): n is any nucleotide
nnnnnnnnnnnnnnnnnnnnnnnnnnnnnnnnnnnnnnnnnnnnnnnnnnnnnnnnnnnnnnnnnnnnnnnnnnnnnnnnnnnnnnnnnnnnnnnnnnnnnnnnnnnnnnnnnnnnnnnnnnnnnnnnnagccttgttttcttgctgcagcatgcagtgccattctcactgagccctccatgtgctagatattctagttatgccctactagctgagagcaattgcttgtaatggactacagtaattgcagagttcagttggataagttgcacaaatgatcgagcaaacagttgtcctagycttgacagtatactttgctttaggggaaatagtgatggcaggtgttctgctgtgacagaaacgattgacacatcaggtagaaaactaaaatgaaaatttgatcatttgctttaattagtacttttgtgtaatgactttgaggatctgctattttactatgcttatttttgatgggaattgagcttaacttgcacaatatagacctcttgtgatcttctagggttgcttattaagagaaccttcaaaggtagcctgtgccacgtcatgtttcagacatgggccaccatatcagygtgtgt

SEQ ID NO: 23985 - DNA, 555 bp, Chicken  19866894237768_2
tcctagycttgacagtatactttgctttaggggaaatagtgatggcaggtgttctgctgtgacagaaacgattgacacatcaggtagaaaactaaaatgaaaatttgatcatttgctttaattagtacttttgtgtaatgactttgaggatctgctattttactatgcttatttttgatgggaattgagcttaacttgcacaatatagacctcttgtgatcttctagggttgcttattaagagaaccttcaaaggtagcctgtgccacgtcatgtttcagacatgggccaccatatcagygtgtgtgaaactgggtaatgattggcaggaagagaaaatgtgttctgggagtctttcagaccttggaaaattaattggagttcagagtaggaaggtgataatctcatatgggtagaactttgatacctgtgaagtataaattcccacttaataagttatacatgcagaggcatcttctgtcagttcttgggagaaggtaacttttttcttgattttgagagaacacctatacaaactactctgtgtattctcttg

SEQ ID NO: 23986 - DNA, 599 bp, Chicken  19866894237772_1
  misc_feature (1)..(11): n is any nucleotide
nnnnnnnnnnngaagagagaatgaatgcattgggaagtagtctgggcaaacaaagacatgccaactgcacttgcaatgagcaagaacaaggcagagagagggatgaaggcatagttaaagtggtggactgagaatattactgttgtatcagctctccagatggatgggggagattttgccaaggtcagggatagcatggagctgggttccagtgaagaagctgggctgacccagatcagcctgttatctgtcagcatggccagcagagggactggaaaagaagactgcaaaggagcatgyggtttgctaaatgaagatctcttttgtcagccacaatggaactaagcacagcgcgtggcggaatggctaaaatcccaattgggatagatagatgggggagattgggaggagacacatctgggtcactgggacaaggatggaccagaatttgtatctgcaaataaggtttcccagaggcagayggggagtggtggagaggggaacgaaggactgagctgagttgagctttcacagaaagctgggaggggggaagatgatgaatatgtccccacagcagagaacagaactgctccacttgg

SEQ ID NO: 23987 - DNA, 600 bp, Chicken  19866894237772_2
ggtcagggatagcatggagctgggttccagtgaagaagctgggctgacccagatcagcctgttatctgtcagcatggccagcagagggactggaaaagaagactgcaaaggagcatgyggtttgctaaatgaagatctcttttgtcagccacaatggaactaagcacagcgcgtggcggaatggctaaaatcccaattgggatagatagatgggggagattgggaggagacacatctgggtcactgggacaaggatggaccagaatttgtatctgcaaataaggtttcccagaggcagayggggagtggtggagaggggaacgaaggactgagctgagttgagctttcacagaaagctgggaggggggaagatgatgaatatgtccccacagcagagaacagaactgctccacttgggaaagccaaaggaaaacgagattttagaagaagagtgtggctgatataccttggaataccaatgtgggatagtacttgagattggctggacagaacttgctacagctttggaagagccagattagggcgatgtgaagggcaggagctggacagaagacaccaggacagtgggacaccaggaca

SEQ ID NO: 23988 - DNA, 600 bp, Chicken  19866894237775_1
ctgatgatattcttattttgcttttggcaatatttgacttattaggaattgtcatttcattattggtatctttttcagtaaagcacattaagaatggtcttcagggcaagaagagagagtgccatgagtacataagagcttaacagtctctgaacaaaaaggaacagtatgaaagccgctttacaaagggatttatgtgcaagttaccaaaagcaagatcatgtcactctgattatcttaatactttttcttttaactgaatatagcattctaatattcctggactgccttgaagccatygatatagggctccaaaaagcaaaactgaaaaggctatgaattgacaccagagtacaggcgaggggagtgctgcatgaaaaagagctgtgggaggaaggaggaatgttgaagtcctgagacttttaaattattattagtagtaattactattattatttcattttttattacttaggagggacaaaagtaacattctggatctgtgcccaaaagtggctctgttctgcagtcagtggatcacttcccaacattgcactggggagtaagcgaaataatttttaatttggaagtataaaaatg

SEQ ID NO: 23989 - DNA, 600 bp, Chicken  19866894237781_1
attgtacagcaagccttacggtggcgtggcacctcagaaggaactgagacagcggggctcgtttccaaaacagccttcaagataaagcagcctgggccaaagagcatggtactgagtgcgtagatcacatccccttacatgcaccagcctctgagaaaatccagtgctaacagtacagctgttaaagactacactgagaggattgggagctgggacacacttttagcaaaagctacgtggttactcagcgctagaggatctcctagtccagctgacactggccaagcaaaactcttcaawagtgcagaaggagtgcacgtaacaaacacgctggggaagrtggcctgagttactcctgccctgggcaaaagcaaacccatccgtgggactgcttttgctcaaagacctgggtgtgcttggtgggtgatgcggcaggaaggggaagcccagtgtgcaccccaagggaatttgatgttgagtgagagcaggcagtgatctcaagtgtacgttgttaatccctatacaataccacgtgtcatcactaatacagttgttgcgggcttcatcaacattattaaagccagaatcaccccgaataat

SEQ ID NO: 23990 - DNA, 600 bp, Chicken  19866894237781_2
gaactgagacagcggggctcgtttccaaaacagccttcaagataaagcagcctgggccaaagagcatggtactgagtgcgtagatcacatccccttacatgcaccagcctctgagaaaatccagtgctaacagtacagctgttaaagactacactgagaggattgggagctgggacacacttttagcaaaagctacgtggttactcagcgctagaggatctcctagtccagctgacactggccaagcaaaactcttcaawagtgcagaaggagtgcacgtaacaaacacgctggggaagrtggcctgagttactcctgccctgggcaaaagcaaacccatccgtgggactgcttttgctcaaagacctgggtgtgcttggtgggtgatgcggcaggaaggggaagcccagtgtgcaccccaagggaatttgatgttgagtgagagcaggcagtgatctcaagtgtacgttgttaatccctatacaataccacgtgtcatcactaatacagttgttgcgggcttcatcaacattattaaagccagaatcaccccgaataatgaagaatgaattacgatggcttcagcatgcaacaatccaa

SEQ ID NO: 23991 - DNA, 600 bp, Chicken  19866894237784_1
tataaaaactgttaaattacttcaacaggtggagtggtgaactttgtccttcaatatctggggagtgacattgtttaaaagcaagcttcccagaagagtattttggtcattgatttagtgggttggcatttcccgcacagagctgggttggcagcagtacccaaagccaaggcaaatccccaggtgtctccacaacatttctcctgctggtccatctgcccaatgtgaggacttccataaatcataaaaccatggataacggtcctgaaggggccttggagaggccagctggtctgctcmcatggcctcatctggatcaattatgcttttgtacttctcctgtcctgtctactcttaaactaagacttctgatgttgaacagaatggcaaaatatcatagcacagaaagatgctccgtcactgttcttgaggctttcataagacactgttagattggagagcaaatgaactgagccctttctttgattcaattacagaatcatagaatcatttatgttggacaaaacctcaaagatcattgagtccaatcattaccctggcactgccaagtctaccactaagccccaaygtccccaagca

SEQ ID NO: 23992 - DNA, 600 bp, Chicken  19866894237784_2
tggtctgctcmcatggcctcatctggatcaattatgcttttgtacttctcctgtcctgtctactcttaaactaagacttctgatgttgaacagaatggcaaaatatcatagcacagaaagatgctccgtcactgttcttgaggctttcataagacactgttagattggagagcaaatgaactgagccctttctttgattcaattacagaatcatagaatcatttatgttggacaaaacctcaaagatcattgagtccaatcattaccctggcactgccaagtctaccactaagccccaaygtccccaagcaccgcgtccgcagatcttttaaatgtctccagggacggtggctcaactactcctctgggcastctcttccaattcttcacaaccttttccatggaaaaattcctcctgatagctaagataaacctcccctggcacaacttgaggccatcgcttctcatcactgtcaccccggagcagaggctgatgccccctcaccacagccttcttctgtagggagcgatgaggtctcccctagccccttttctgttgggcaatttccagccactcttccatcctgcagcatggcatgg

SEQ ID NO: 23993 - DNA, 592 bp, Chicken  19866894237784_3
aagacttctgatgttgaacagaatggcaaaatatcatagcacagaaagatgctccgtcactgttcttgaggctttcataagacactgttagattggagagcaaatgaactgagccctttctttgattcaattacagaatcatagaatcatttatgttggacaaaacctcaaagatcattgagtccaatcattaccctggcactgccaagtctaccactaagccccaaygtccccaagcaccgcgtccgcagatcttttaaatgtctccagggacggtggctcaactactcctctgggcastctcttccaattcttcacaaccttttccatggaaaaattcctcctgatagctaagataaacctcccctggcacaacttgaggccatcgcttctcatcactgtcaccccggagcagaggctgatgccccctcaccacagccttcttctgtagggagcgatgaggtctcccctagccccttttctgttgggcaatttccagccactcttccatcctgcagcatggcatgggcttggtggactcaagtgtaggacctgacactagcctggtaatcctcatacgccttggcccatt

SEQ ID NO: 23994 - DNA, 600 bp, Chicken  19866894237790_1
tttccgtgtcctgtatttctgtgctgttgaagggacaagaaagtgatcaaagggctgaagtacatctcctatgaagaaaggttgattgagctaggcttgttcggcttggagaagagaaggctccagggagacctcctgtggccttccagtacttgaagggagcttaaaagcaggaggatgaccgagtttttacacaggcagatagcaataggacaaagcagaatgattttacctgaagaaaggagatttagatcggatgttaggggattattttttttactcgggggtagtgaggcatcrgtacaggctactcagagaagctgcagctggccccatccctggatgtattcaaggccaggtttgatgggatcctaggcagccagacctggtgagtggtagccctgaccacagaagagggttggaactaggtgatctttaaggcctccctccaacctaactcattctacgattctatgtaaagaattacagatcttgtcctttgtgaggatttatttaaccacacagtatttatgaggaaattatgagatattacaaggaagttactgtaaacacttgaaattacaaacagaattacaaaaa

SEQ ID NO: 23995 - DNA, 599 bp, Chicken  19866894237792_1
  misc_feature (1)..(163): n is any nucleotide
nnnnnnnnnnnnnnnnnnnnnnnnnnnnnnnnnnnnnnnnnnnnnnnnnnnnnnnnnnnnnnnnnnnnnnnnnnnnnnnnnnnnnnnnnnnnnnnnnnnnnnnnnnnnnnnnnnnnnnnnnnnnnnnnnnnnnnnnnnnnnnnnnnnnnnnnnnnnnnnnnnnccttgcacgccatgcagcggggaaacagcagagctgtggtggaggtggctctggggtgcaaccagcccatggcacagcatggcacacacagtcaccctgtcacctgtccccagcttggctaccacatggagatcctrtaacaaggagcatgatgagcacagaagcacttgtaaggtgtcccaagcccagagacagctcacactgatcattggtgcttcctggtggagcagtgartccatcagaataaccctgtgagtggagatgagctgcatgccaagagctgctccctgcctgctgttgacctctaacactccagggaacatcatggtgcctcacagcaacaacccctcctgtaccccctgttgaactccatggaattccttcaccccatgcagcactggactgacaacaagaggcagtagtagtacttaaggtt

SEQ ID NO: 23996 - DNA, 599 bp, Chicken  19866894237792_2
  misc_feature (1)..(66): n is any nucleotide
nnnnnnnnnnnnnnnnnnnnnnnnnnnnnnnnnnnnnnnnnnnnnnnnnnnnnnnnnnnnnnnnnnccttgcacgccatgcagcggggaaacagcagagctgtggtggaggtggctctggggtgcaaccagcccatggcacagcatggcacacacagtcaccctgtcacctgtccccagcttggctaccacatggagatcctrtaacaaggagcatgatgagcacagaagcacttgtaaggtgtcccaagcccagagacagctcacactgatcattggtgcttcctggtggagcagtgartccatcagaataaccctgtgagtggagatgagctgcatgccaagagctgctccctgcctgctgttgacctctaacactccagggaacatcatggtgcctcacagcaacaacccctcctgtaccccctgttgaactccatggaattccttcaccccatgcagcactggactgacaacaagaggcagtagtagtacttaaggtttcattgtctgccggcacataccaggtgcactaactgccagaaggacaatccttggcccgtgttacaatcagaaagattaacatagaggaagggcaac

SEQ ID NO: 23997 - DNA, 600 bp, Chicken  19866894237797_1
aacttccttccaggtaattgggattaattcagagccattgaggtagcctttattgattatttccactgttcagaatccatacttctgtgtgaaaggaaaacaaatatggcatgaagaggcaaaatcacttgttcaggtacccaacagcagcgctatcattaagatttcaattttaattaagcctcttttttatcttaggaactcctcaggtgagaccttgagtcagtttctatttcccttaatatctctgtaagtaaccctgtcaattatgccaaactcacagagattcacttgaatccrtttctctcccagttctcttctttctacctctttgtcaccactgctcttgattatgttctactatttcagcaaaattctcataactgcaaggaaaaagtacttgagatcctgcctttgaatgacagaaaaagatataaaaaatattgcacctgtttagggataggaaagctcctatatagacccactgggtcagaacagcccgcaaaatcaggtgaaaacttaaggttcttcatgcgagttaatgaaagttatttaactgtgagcaagtcttgaatgtctgtaggacattaacttacatag

SEQ ID NO: 23998 - DNA, 600 bp, Chicken  19866894237797_2
aaagacggctgtgcgctttattgcttgcggatcgctttcctttgcaggtgatgtgggcccagaattacatcaccagtggagcagccaagagcatcctggtgccaggatgactgaagccgagaggaatgtattatcacagaccgcagagggactcgccagtgcattccttgctgggggtgctgtgatgggggaggcagagaggagatgattttacgcaaaggctgaaaggaaactttgtagaggaaagatctggggtcacagtcctgctgtctcctctaagcagatctaattatggctgtrtacttcaaaaagagggtttgactaaaaccagattgagcagggcactgctcagggggcacagaacgagtcctctcggctctgtctttgaggaaaacgcaaaatacctcagtgcactgggagtgcagacacttgggttgtaaagaaatacttgaagccacagaaggaggagcaagaaccaacttaaaattatcactgcttatgtgaacaagtgaccatatgtaatatcagtgcattcatacaaacagtgctaatgttagatacagatgtgcatttactgacagattgtgcgatgcagtagaa

SEQ ID NO: 23999 - DNA, 600 bp, Chicken  19866894237807_1
atagcagattttatacatcagtgagcgttcatctgttgctttcagtgaaaaacactgaatttcagaactgactgctccttggcagtttagtggtatgagtgctaatgcataaaacaccacaaaatccacctgtaatctcagctggcagaatggctttgtagttacctctctcctcatagtagttgggattttccctgtgtacttctattatgctgcatgtgcatagaaaaacaagtttgattagacatttttattgtgctggcagcatctttcttggtgcaatttttggtaaattactgyttgttccttaaaaattagttttacgccctaattttgaatagttaaagtccccaagcycttctttctgccagctttttccttgcgtgagtaggactggkatgcccacttacactttctcaggacctggcttcctcagttctacatytgttctgctaattccactataaaccatttcaagaaaagcttggtaaaaccagygatatatatgcaaataagataatgtaaaagaacatgcaagataaaaacagccttgtgatawtatcaagaaaatgatatagtaagtgtcataatggcagaaaa

SEQ ID NO: 24000 - DNA, 600 bp, Chicken  19866894237807_2
aatttcagaactgactgctccttggcagtttagtggtatgagtgctaatgcataaaacaccacaaaatccacctgtaatctcagctggcagaatggctttgtagttacctctctcctcatagtagttgggattttccctgtgtacttctattatgctgcatgtgcatagaaaaacaagtttgattagacatttttattgtgctggcagcatctttcttggtgcaatttttggtaaattactgyttgttccttaaaaattagttttacgccctaattttgaatagttaaagtccccaagcycttctttctgccagctttttccttgcgtgagtaggactggkatgcccacttacactttctcaggacctggcttcctcagttctacatytgttctgctaattccactataaaccatttcaagaaaagcttggtaaaaccagygatatatatgcaaataagataatgtaaaagaacatgcaagataaaaacagccttgtgatawtatcaagaaaatgatatagtaagtgtcataatggcagaaaatgttttgtgttttttttctttcaggtttaaaaatgtctgaccagaaaaatattatat

SEQ ID NO: 24001 - DNA, 600 bp, Chicken  19866894237807_3
gtgctaatgcataaaacaccacaaaatccacctgtaatctcagctggcagaatggctttgtagttacctctctcctcatagtagttgggattttccctgtgtacttctattatgctgcatgtgcatagaaaaacaagtttgattagacatttttattgtgctggcagcatctttcttggtgcaatttttggtaaattactgyttgttccttaaaaattagttttacgccctaattttgaatagttaaagtccccaagcycttctttctgccagctttttccttgcgtgagtaggactggkatgcccacttacactttctcaggacctggcttcctcagttctacatytgttctgctaattccactataaaccatttcaagaaaagcttggtaaaaccagygatatatatgcaaataagataatgtaaaagaacatgcaagataaaaacagccttgtgatawtatcaagaaaatgatatagtaagtgtcataatggcagaaaatgttttgtgttttttttctttcaggtttaaaaatgtctgaccagaaaaatattatatacagaatccactgtattgaaaaactactctctgagaacaat

SEQ ID NO: 24002 - DNA, 600 bp, Chicken  19866894237807_4
cagaatggctttgtagttacctctctcctcatagtagttgggattttccctgtgtacttctattatgctgcatgtgcatagaaaaacaagtttgattagacatttttattgtgctggcagcatctttcttggtgcaatttttggtaaattactgyttgttccttaaaaattagttttacgccctaattttgaatagttaaagtccccaagcycttctttctgccagctttttccttgcgtgagtaggactggkatgcccacttacactttctcaggacctggcttcctcagttctacatytgttctgctaattccactataaaccatttcaagaaaagcttggtaaaaccagygatatatatgcaaataagataatgtaaaagaacatgcaagataaaaacagccttgtgatawtatcaagaaaatgatatagtaagtgtcataatggcagaaaatgttttgtgttttttttctttcaggtttaaaaatgtctgaccagaaaaatattatatacagaatccactgtattgaaaaactactctctgagaacaatttccaagatatcgaggatcatcttaaagagcttgaagatgtcagtat

SEQ ID NO: 24003 - DNA, 600 bp, Chicken  19866894237807_5
gtacttctattatgctgcatgtgcatagaaaaacaagtttgattagacatttttattgtgctggcagcatctttcttggtgcaatttttggtaaattactgyttgttccttaaaaattagttttacgccctaattttgaatagttaaagtccccaagcycttctttctgccagctttttccttgcgtgagtaggactggkatgcccacttacactttctcaggacctggcttcctcagttctacatytgttctgctaattccactataaaccatttcaagaaaagcttggtaaaaccagygatatatatgcaaataagataatgtaaaagaacatgcaagataaaaacagccttgtgatawtatcaagaaaatgatatagtaagtgtcataatggcagaaaatgttttgtgttttttttctttcaggtttaaaaatgtctgaccagaaaaatattatatacagaatccactgtattgaaaaactactctctgagaacaatttccaagatatcgaggatcatcttaaagagcttgaagatgtcagtatgactgtagaatatcttcaggggactgaagttgccaaggttgtatacagaatac

SEQ ID NO: 24004 - DNA, 600 bp, Chicken  19866894237807_6
tggcagcatctttcttggtgcaatttttggtaaattactgyttgttccttaaaaattagttttacgccctaattttgaatagttaaagtccccaagcycttctttctgccagctttttccttgcgtgagtaggactggkatgcccacttacactttctcaggacctggcttcctcagttctacatytgttctgctaattccactataaaccatttcaagaaaagcttggtaaaaccagygatatatatgcaaataagataatgtaaaagaacatgcaagataaaaacagccttgtgatawtatcaagaaaatgatatagtaagtgtcataatggcagaaaatgttttgtgttttttttctttcaggtttaaaaatgtctgaccagaaaaatattatatacagaatccactgtattgaaaaactactctctgagaacaatttccaagatatcgaggatcatcttaaagagcttgaagatgtcagtatgactgtagaatatcttcaggggactgaagttgccaaggttgtatacagaatactcaagagctgcccttcagcagagctgaaaaagaaagcaaaacagctattatcaagatggga

SEQ ID NO: 24005 - DNA, 494 bp, Chicken  19866894237815_1
aggctgaggttggacttgatgatctttgaggtcttctccaacctgagcaattctatgattctattccacgtatagcagtgagatttctatgtgcatttaacaaagaagtggttttgtgcttccctgagagtttctgtgaagatcccaaaacctttttgtccttgtggaggtcttctgttgctttttctataatggctgggaaaacatctctgatatctcaacctgatatcaaataccaagaaagttcattgtgatgcttggagggtgactggctcatacaccagtttctttctggaaagyaggtttttgacagaagtaatttatattctatggagaaatgtatattttttctgtagtaacctttaatatattttcctttcccccaaacaaatcaaatatttgaacctccttaggctttcaaagaattgattgcaaagaaaaagcagaaatagaaggagaacacgccttttttctttaaattagaattacaagtg

SEQ ID NO: 24006 - DNA, 599 bp, Chicken  19866894237816_1
  misc_feature (1)..(42): n is any nucleotide
nnnnnnnnnnnnnnnnnnnnnnnnnnnnnnnnnnnnnnnnnncgctgtgtgcacggcacagcccagagctcacacggccctgcagctctcgcccagcccaggagcccctcggtgacctcagggactgcagtgatatttcctgggctgaaggttaagcaagaacctcaaatgccacgctgagtcacaaggagaggatttctctgtgctctcactgtcagttctctcgtcccagctggctctggcctcgtgcacacatcaggtttttaggcaaactcttaggatttgtgcagacgtggcatytatgggggatttctctacaaagtggagctccccaccagtgggtggtgggcacagaatgggctccccagggcagcgctcgcagccccaaatgtttggaggacgctctcagacatgggatttgaattttggctggtcctgtgtggagccatcagttggacttgacgatcrttatgggtccttccggtttggggtgctctgtagttctgtggtgtgagcagctcaccccgcggtccctgcagtaggaaagccgggccgagcagccagcaggtggaggcacccgtaaggcacagygggagctg

SEQ ID NO: 24007 - DNA, 600 bp, Chicken  19866894237816_2
atgccacgctgagtcacaaggagaggatttctctgtgctctcactgtcagttctctcgtcccagctggctctggcctcgtgcacacatcaggtttttaggcaaactcttaggatttgtgcagacgtggcatytatgggggatttctctacaaagtggagctccccaccagtgggtggtgggcacagaatgggctccccagggcagcgctcgcagccccaaatgtttggaggacgctctcagacatgggatttgaattttggctggtcctgtgtggagccatcagttggacttgacgatcrttatgggtccttccggtttggggtgctctgtagttctgtggtgtgagcagctcaccccgcggtccctgcagtaggaaagccgggccgagcagccagcaggtggaggcacccgtaaggcacagygggagctgcgatgctcagcatgcctgcccagacacgtggaaatttgggctgaaagctgagaccaaggaaaatctgaggaatggaactggaaaagtctgcgagcgcgaagtacacaaagggctaaaacttgagcagcagaagaggaggggcctgcagaatgtttggaatagcgaaaag

SEQ ID NO: 24008 - DNA, 526 bp, Chicken  19866894237816_3
cgtggcatytatgggggatttctctacaaagtggagctccccaccagtgggtggtgggcacagaatgggctccccagggcagcgctcgcagccccaaatgtttggaggacgctctcagacatgggatttgaattttggctggtcctgtgtggagccatcagttggacttgacgatcrttatgggtccttccggtttggggtgctctgtagttctgtggtgtgagcagctcaccccgcggtccctgcagtaggaaagccgggccgagcagccagcaggtggaggcacccgtaaggcacagygggagctgcgatgctcagcatgcctgcccagacacgtggaaatttgggctgaaagctgagaccaaggaaaatctgaggaatggaactggaaaagtctgcgagcgcgaagtacacaaagggctaaaacttgagcagcagaagaggaggggcctgcagaatgtttggaatagcgaaaagctggagcaatcctggcagcacgctgtggcacggctcccgaggcgcagtt

SEQ ID NO: 24009 - DNA, 600 bp, Chicken  19866894237834_1
gccaggtcaggcacaccatgatgggtgcaggacggaaggggctgtggggggagggctgcagggcctgctggagagacgccatcactgtgtgtgatcgctcagcaagtacagaagaaggcaggacgtgaaacaccaaccagagggcagagttcaccgcgccgcgctgtgccagaactgcaggccttgcagcaacagggaaccatcttgaccccatgagctacaccggcctcaaaacaaaaaatggatcaaacaataacaaacttcagtgtcaggttgtcttcacagaaatggacaagggtkcagggtgaaattcggagttagctgaaaatgcgctattttttgccatcaaaagacagtgattttatctcagctgtttgtcggcagctactgaactctcaagctccctgcagaatgccccatgtgtgccaaagacagaaaggagtcctgggaaacacagctgttgcagattaagtgtaagtgaaaggctacaggagcggccagccaggagcggccctgctgcccaccctggcacagcccatctgtgccaccaacccccagtgccagacccccccatccacaggaaggcctgacctgagcacc

SEQ ID NO: 24010 - DNA, 600 bp, Chicken  19866894237836_1
atcgggcagcacagaaagctcatcccagcaccaggacgcacagccaagctgcatccatcaaggcctttttgcctttattaaaaggagggtgagaaacctcacttcatcccaatacacattgctcaagggaatgggaaaatatccataacaagacctctgtgctgaactggccgtggtcttccctatgcttgcctgccttgggctgggcccacaccaaaaactgttggatgagtcccacagactcccagcagtgtctgtctttcctgcccacccccacagccccactgggagggaggacayattcccagcctccggctcccttacattatttaagctgtcggtggtaattatagtttcagcttgatgccttccaggggtccaaaccacactgagaagctgcagcagttcctaagagagtactttcggagcctctgctagaactgagagtgtctccagcagccagagctgagcccccccactgctccagctgctttccttctgctggaagaccctcatctgtgctcccttcccctacagaacacacctttctgctcatcagataggagccacagctttcctgcaaggagtggcaaattggct

SEQ ID NO: 24011 - DNA, 514 bp, Chicken  19866894237852_1
gaaaaggatggttggttctttcttgaagtggtgagaatgtatgcatcctcatcaaaagagccaactgcatgtaaatcagatccacaggacacagcaacacacaacttacacttttacaggacttaatgtgaacaccaaaaagaaaccaagaacaatctatgcaagaaaaataataattaggttaattatgttcacagtgactgtgtcacatgtccaaatattatttcctgtgtctcttctgatagtagatttgtaccatatttcccttggaatatgaacttacatcttttgcttctatasttaagtattaggcagtttcctatcattgccattctgtatctattagcatctgcaaagttaaactactctctggtaagacacaaacaggtttagacctaccgacactgactacgtttgacttgattagatatagttatgcaaatagtatataagttcagattttataaatgacagataaagaatttcagttttacattgatccttccagttttat

SEQ ID NO: 24012 - DNA, 600 bp, Chicken  19866894237862_1
cacgtctctcactattttgttactcataatctcacagatgttgtcttggtaggaattttcagatgcaaatgtcggtatcttaaaagtgttctgcacttctggcattctcgcatcagccgagtgccaaagtagcacacagtgttttacacttacgtaaggagataaagcttttgcctcgaggatatggtgttcctaagacagagataacatgctgggaaatgacaaggagctgtggagaagaggggtggggagaagaaaacaaaagagagaaatagagaagagaaaaggcaaggtactgtygcgggaggacaaactggatttttcatttctgtgtgagatgttttccccaggttatctgccttaacttatttttcttgatcatcctccacctccttagcagcatattttgcctcctctgcactcacaccacaactggtgggtctcacatgagtgaggtgcgacctctgaagtctggcccttaaagtgtaggactcagctcagtgcagcagaagatgaggttagtggtagaaactgcctcctcctcttctgatttggtttctgttattcagacctgcaaggtacagcatctctgagcaggaa

SEQ ID NO: 24013 - DNA, 600 bp, Chicken  19866894237863_1
aaggtcagcaattggttttgtgccatatgtacttaaagctgaatatccctatgaacacttgcacagattagcagggggaggggcaggtgcaggatctactgagagaaggtccagaagttgaggaaagcttgaattacatgctggccttcctagagcaaactgttaattaataagaattagcttagactaaaaattccacacgtgttggaagcaaaatcaaacagtgcagcccttcatctatcactcctgtaaaaacagttttgataaggaaaagaacaactgcagagatttcatctgaamgcagcgatgctctgaatgaatagatggggtactaaaaacacagttaaaataactgcgaaaaaacagactgctgtggatgcagcaaagggttaattactatattctgaggtgatagtccacccacatcacttttgtctgcgagtacttaacgtgatcttgtcgttacaggttcaaacacagtagcagttacagcacactgctggtatcttgcacacggctgtatatctgtcacacgaaaatctctaagttctgtaagccataaagaagattgatttatccgctcaggaattctcaagtgta

SEQ ID NO: 24014 - DNA, 600 bp, Chicken  19866894237871_1
cagaaagttaccatgtgaagacagctatcttttagcagaacatgtatccaggaatctctgatgtgaagctatttttgcttctccttaatctgtcctatgagttgtcactgaaataaaactgattttgttagaacctgcttcacatcatgctcagcttttacaggctaatgttcaacttcatctcccatgcagtgccaccaaattgtaaaaaccaaaaaaacaacatgctgatagatacaagagagaaaataacacagggatttaatgttaaatgtcaggagcaaaaaggcgaggaaggamaggaatgggatgattttactcccatttaatctgaagcctgctgtaactgtctgaataagtcatttaatctctcgtgcatgtcccctcctagagctaaagccaatacttctagaggactgtgtgaagcttcataatccatcatggctctaatctggcaagaagatgcttaatttcttacgtaacaatcaagtgcaaagcagggaaggtcccagtcatgactgttgtggggaacactgtgtcatccagtagctacactccagacgtacctggcctttgcactgactgggtccatcttacacc

SEQ ID NO: 24015 - DNA, 599 bp, Chicken  19866894237875_1
  misc_feature (1)..(31): n is any nucleotide
nnnnnnnnnnnnnnnnnnnnnnnnnnnnnnnaacatgatttttgaaaagttatttttaaagaccagaaaagtgccatcccccactgatgtttgtgaggatcattttgcacagcaagaccaaactgatttatatttatagtgctgtgaaatctattgaataagtcccttcttaactttaccactgcagtaatcccagtaggcacaattcatcgagaggtgatttccaagattttacgctcctgcccactgcctgtaacatcttttctcatgtagctcaaggcagtgttttacagctattgytagctctcacagtgcagtctgacagctaagaataacagtccaaaagctatcattgcctctataaaataaacaactctcataaagctgtttttgagactccaaagtcacctgcattaagtttagcagtgttaatatttctcctaggcaacacacttgcaaaaggcacagasaaattaaatgctttattaataggtcagaaaaaccattcaaaagccagaccccagtggaaratagccaggtcccaaagaagtgccttttacagcagtttctgtgcagtagcgctatcagtgcaaaatata

SEQ ID NO: 24016 - DNA, 600 bp, Chicken  19866894237875_2
taactttaccactgcagtaatcccagtaggcacaattcatcgagaggtgatttccaagattttacgctcctgcccactgcctgtaacatcttttctcatgtagctcaaggcagtgttttacagctattgytagctctcacagtgcagtctgacagctaagaataacagtccaaaagctatcattgcctctataaaataaacaactctcataaagctgtttttgagactccaaagtcacctgcattaagtttagcagtgttaatatttctcctaggcaacacacttgcaaaaggcacagasaaattaaatgctttattaataggtcagaaaaaccattcaaaagccagaccccagtggaaratagccaggtcccaaagaagtgccttttacagcagtttctgtgcagtagcgctatcagtgcaaaatataaagaaactttttacttaaagtatatcagcattttaaacagcaaataactaccaactccaatatttcaggtgacattttccactgtaaatggcacacaaarcttaaaataggaagagacaggaaaatactgctcctgagaaggctaggtccctgtgatttacacctcccatc

SEQ ID NO: 24017 - DNA, 600 bp, Chicken  19866894237875_3
tttacgctcctgcccactgcctgtaacatcttttctcatgtagctcaaggcagtgttttacagctattgytagctctcacagtgcagtctgacagctaagaataacagtccaaaagctatcattgcctctataaaataaacaactctcataaagctgtttttgagactccaaagtcacctgcattaagtttagcagtgttaatatttctcctaggcaacacacttgcaaaaggcacagasaaattaaatgctttattaataggtcagaaaaaccattcaaaagccagaccccagtggaaratagccaggtcccaaagaagtgccttttacagcagtttctgtgcagtagcgctatcagtgcaaaatataaagaaactttttacttaaagtatatcagcattttaaacagcaaataactaccaactccaatatttcaggtgacattttccactgtaaatggcacacaaarcttaaaataggaagagacaggaaaatactgctcctgagaaggctaggtccctgtgatttacacctcccatcagcctggcctggatttgcacatgaggcaaaggacagtgctgacctctaaataaggaagta

SEQ ID NO: 24018 - DNA, 600 bp, Chicken  19866894237875_4
caaagtcacctgcattaagtttagcagtgttaatatttctcctaggcaacacacttgcaaaaggcacagasaaattaaatgctttattaataggtcagaaaaaccattcaaaagccagaccccagtggaaratagccaggtcccaaagaagtgccttttacagcagtttctgtgcagtagcgctatcagtgcaaaatataaagaaactttttacttaaagtatatcagcattttaaacagcaaataactaccaactccaatatttcaggtgacattttccactgtaaatggcacacaaarcttaaaataggaagagacaggaaaatactgctcctgagaaggctaggtccctgtgatttacacctcccatcagcctggcctggatttgcacatgaggcaaaggacagtgctgacctctaaataaggaagtagatgagctagtaaaacacaagagcagagctccctggattcattgctggtttcagtgacaaacttgacttcactctagctgaaggtctggggtacttaaagcctttaaggactcgagttgtgcagcattgcaagccagttctactcttatattcttaggtgcaatttgac

SEQ ID NO: 24019 - DNA, 600 bp, Chicken  19866894237877_1
ctgttaattggggttttgccaccacgttgcaattggaaaatatggggtatacatattgtttgccatagaagctgagaaaggtgagataaaatacctggaaatagtacagtgtgagcaaatagagtctactttacagtccaatgcaaaatccatgtgctgcagtcctgagtgcaaccttattccatccaggttttgaactgctgtctgtgctaaaactatcaccactgttgtgttttatgatctaaaccaggttgcactcaggtttcctgaagacaaaatcctgtcacctagtaacagacrccgtcccactaggctgccttccartatttgagtctacaagacgcaccagttgaaatgagccagagacctgggtacggctctgggcctgtgctctggggactccgctgggccttgtctgcagcgtgcaccggtctgcagcaggtggcctttcagggatgacactgtcctctagctcagcgtgctgtggtgtctgttttggctctgcagacccaggaatggggtttacacagatgaggtttacagtcaacatttgagcgttacatttttctgtaaacatggtgcaactttaaggacttctac

SEQ ID NO: 24020 - DNA, 600 bp, Chicken  19866894237877_2
cgttgcaattggaaaatatggggtatacatattgtttgccatagaagctgagaaaggtgagataaaatacctggaaatagtacagtgtgagcaaatagagtctactttacagtccaatgcaaaatccatgtgctgcagtcctgagtgcaaccttattccatccaggttttgaactgctgtctgtgctaaaactatcaccactgttgtgttttatgatctaaaccaggttgcactcaggtttcctgaagacaaaatcctgtcacctagtaacagacrccgtcccactaggctgccttccartatttgagtctacaagacgcaccagttgaaatgagccagagacctgggtacggctctgggcctgtgctctggggactccgctgggccttgtctgcagcgtgcaccggtctgcagcaggtggcctttcagggatgacactgtcctctagctcagcgtgctgtggtgtctgttttggctctgcagacccaggaatggggtttacacagatgaggtttacagtcaacatttgagcgttacatttttctgtaaacatggtgcaactttaaggacttctacttgcatcagtatatgtattttctt

SEQ ID NO: 24021 - DNA, 600 bp, Chicken  19866894237877_3
ggtctgcagcaggtggcctttcagggatgacactgtcctctagctcagcgtgctgtggtgtctgttttggctctgcagacccaggaatggggtttacacagatgaggtttacagtcaacatttgagcgttacatttttctgtaaacatggtgcaactttaaggacttctacttgcatcagtatatgtattttcttagcctactttatactttcccacctctcaagtttcgtggtttttagttttgtttttagaatcataaaactcccaagttgaaagggactcacaagtatcatcaagtycaactcctggctccatgcaggaccacccaaaattcaaacctcatatctgagagcttcttgagttccagagcttgggggccgtgcccactgccctgggcaggctgttccatgcccactgccctctggtgcagaccctttctctgacccccagctgctcctcccctgacacagttccatgccgttccctcgggccctgttgctgtcacagagatcagagcactctgctccctgtgcggcgctgcagcctccatgaggcctctcctcacgctcctctgctctgggctgcacagactgaggggc

SEQ ID NO: 24022 - DNA, 600 bp, Chicken  19866894237880_1
tttctttctgtggggctttttgggtagaatacagggaatatatctggggctatggcattcagggactggtcttcagagttattagggaattaactgaaacagtggtagtagaccttcatgaccttgcagactgctcatcagaacctttgtaggcttgagaattctgatattcaagctgtatcttcgactgatgaggaaaaatggggctcataagatagaattccactattttgctgcatttttcctgttcacaattttattcactaatgtatattacactctcagaaattcagttaccakcttcactgtactctgattactaatgttaagcacacactggacaactttttccattggctttgtaaaataaaaacacaaaatgcaggcttgaagtctgattcatttggatgtgaatgatttccatggtagatatgaatgcagggaaaaactgaatttgtatcttttcttttacctatggaaaaggaagtgacattatttgtgatctgtaaaagctgccgccctacttctgtcaccaaagtgctttgtattcacagcctaactaatgacaagcagctttatttgcgtaacttgtatgtagaa

SEQ ID NO: 24023 - DNA, 600 bp, Chicken  19866894237881_1
ctttgggaatacctacatctaagctagcctggcccaattcagaaaatccttgatctactagaatgaactgtttctgacccatcacagacctacaggtccctccctgcctgctgcagcagaacgctgtttatatcccttactgacagtctgttcttgtaaaggcttgggagccctcagggagatccacggacatttccagggcttgtcaccctgctacaaaacagtacttgtctcacacgtgtgctgccttaagtaccccattgcactagtcttcataacactaagggcctgccatttgcrgctccaaaatcttctcctgaagtcattcagacagtgttttccagactccctttggcaatatttttctttaattgtttttatgctattgttcttgtgctgttattttcatgtccttgcacctgcaaatcctggcaaagttgtcaagacaggtcctcatgggaagtagcttccctgctgggggaattgacctcctctcccctctttttctttgccttttggtttgtaaatgctaatttgtattggagaaaaccaaacagtgcacaacaaagtaggcaatagtaattattattgccagtgttg

SEQ ID NO: 24024 - DNA, 600 bp, Chicken  19866894237881_2
taatttgtattggagaaaaccaaacagtgcacaacaaagtaggcaatagtaattattattgccagtgttgaaacatttgtgtttgattagcgcactctgatcggcaccaataccatcataaacaggaactctcaatgaagagtttgaatgggtcccaatggaaaataaagtctacaagaggaaaagcatcttgaaaatcattctcatgctcaccagctgctgctctggagagagtcccagaggatgactgtggtctgggaccttgatgctgcttttcccagctgactctgggcagagttytcctttaatcttttgtattttctctgtttttattttccctcagaagtagctgccacagctagaactgacatgtgtctggtggctrtgaggtctgggctggtcccattaccaccttagcccagctcttgttctaaaaatttgcttactcaagtycatcagcatttgtcaccaaatgatacattatcctgacakcatgtctaattaatgctgaagtaaaagactaacatagcaagggttgtaaacctaagcaaacccaattagatccagtcataactcatgcttcacactttaaccccaaat

SEQ ID NO: 24025 - DNA, 587 bp, Chicken  19866894237881_3
attagcgcactctgatcggcaccaataccatcataaacaggaactctcaatgaagagtttgaatgggtcccaatggaaaataaagtctacaagaggaaaagcatcttgaaaatcattctcatgctcaccagctgctgctctggagagagtcccagaggatgactgtggtctgggaccttgatgctgcttttcccagctgactctgggcagagttytcctttaatcttttgtattttctctgtttttattttccctcagaagtagctgccacagctagaactgacatgtgtctggtggctrtgaggtctgggctggtcccattaccaccttagcccagctcttgttctaaaaatttgcttactcaagtycatcagcatttgtcaccaaatgatacattatcctgacakcatgtctaattaatgctgaagtaaaagactaacatagcaagggttgtaaacctaagcaaacccaattagatccagtcataactcatgcttcacactttaaccccaaatccaaacctactatacaaaatagtagataaaaacggtcggctctgtcaggcttttcagtacatgcttccatca

SEQ ID NO: 24026 - DNA, 519 bp, Chicken  19866894237881_4
cccaatggaaaataaagtctacaagaggaaaagcatcttgaaaatcattctcatgctcaccagctgctgctctggagagagtcccagaggatgactgtggtctgggaccttgatgctgcttttcccagctgactctgggcagagttytcctttaatcttttgtattttctctgtttttattttccctcagaagtagctgccacagctagaactgacatgtgtctggtggctrtgaggtctgggctggtcccattaccaccttagcccagctcttgttctaaaaatttgcttactcaagtycatcagcatttgtcaccaaatgatacattatcctgacakcatgtctaattaatgctgaagtaaaagactaacatagcaagggttgtaaacctaagcaaacccaattagatccagtcataactcatgcttcacactttaaccccaaatccaaacctactatacaaaatagtagataaaaacggtcggctctgtcaggcttttcagtacatgcttccatca

SEQ ID NO: 24027 - DNA, 480 bp, Chicken  19866894237881_5
gaaaatcattctcatgctcaccagctgctgctctggagagagtcccagaggatgactgtggtctgggaccttgatgctgcttttcccagctgactctgggcagagttytcctttaatcttttgtattttctctgtttttattttccctcagaagtagctgccacagctagaactgacatgtgtctggtggctrtgaggtctgggctggtcccattaccaccttagcccagctcttgttctaaaaatttgcttactcaagtycatcagcatttgtcaccaaatgatacattatcctgacakcatgtctaattaatgctgaagtaaaagactaacatagcaagggttgtaaacctaagcaaacccaattagatccagtcataactcatgcttcacactttaaccccaaatccaaacctactatacaaaatagtagataaaaacggtcggctctgtcaggcttttcagtacatgcttccatca

SEQ ID NO: 24028 - DNA, 599 bp, Chicken  19866894237887_1
  misc_feature (1)..(73): n is any nucleotide
nnnnnnnnnnnnnnnnnnnnnnnnnnnnnnnnnnnnnnnnnnnnnnnnnnnnnnnnnnnnnnnnnnnnnnnnnttttctgcaaaggagcagattctgctttctaaatttatttcctgtgcattctgcttagcctgttctaaataattcactggtaatgaaatgtgtgaatgtaggtcagtgtaaatgccacactgctgacctgaatttgagctcatggctccagcagctccttgactccggccaagataaaatcagtatgattctttttttcattaataaagacagacctattttttttyccttctcctgagcaagcctttctcagttagtatccgtggttcaggagagggcaagagggtaaatatgtgaaaaaaatatataggtgcttatactgtctttcaactcctttattctgtgcaggttttagtataagcataaatttacttacagtctctgtggagttattctgtaggtttgattctatgaagtttaataccactcagaacttaacctaaatttgatggcattttgttgatatacaagatacgtcattatgctacagtcaattttctgtttgttcagctttctattcacatgc

SEQ ID NO: 24029 - DNA, 600 bp, Chicken  19866894237887_2
cattgtatttgagatgataacaaaatgaatgagagcaattgtgaaaattttccttcctattcaacctgtaaagctgcaccaatttcactgggaaactgtgtagatgcaagacattgcttgcagacatcaggattcaatggcagtatcacagtaacagaagatggtacaggaaaggaggcagtgaggtgaaggccaaattatttaagccaaatgaagatgcagtcatgcccagatacataaataacaaagatggcaaatgaatcagtgtatgagtctcagccaactaaacatatttaagaycaaataaataattgaggatctttaaatgtcagtgaaattggtttgtttcagtgaatagagacagattaggaaattcgctgtaagacactttacagagtgaatgatgtcatgattctgaagtacgttaacsactgaaatcaatgcacwtaggttgctctgaaagtaatgcctcctatttatttccatggaaactgcaacagatacaaaaaaaaaataacactatttgatagaaaaaaaatcacagctacaaaacactttcctacatagacaccaccgttagctatgtgtttctgtcaacaa

SEQ ID NO: 24030 - DNA, 600 bp, Chicken  19866894237887_3
gattcaatggcagtatcacagtaacagaagatggtacaggaaaggaggcagtgaggtgaaggccaaattatttaagccaaatgaagatgcagtcatgcccagatacataaataacaaagatggcaaatgaatcagtgtatgagtctcagccaactaaacatatttaagaycaaataaataattgaggatctttaaatgtcagtgaaattggtttgtttcagtgaatagagacagattaggaaattcgctgtaagacactttacagagtgaatgatgtcatgattctgaagtacgttaacsactgaaatcaatgcacwtaggttgctctgaaagtaatgcctcctatttatttccatggaaactgcaacagatacaaaaaaaaaataacactatttgatagaaaaaaaatcacagctacaaaacactttcctacatagacaccaccgttagctatgtgtttctgtcaacaatgaacaagaacctgcaagctggacttgtaaaaatctttaccagtgaaggtgacccactgtcaccacttctgaaatgcaccactcatcactcactgtgctcacatccactcttatataaataaaagcctcc

SEQ ID NO: 24031 - DNA, 600 bp, Chicken  19866894237887_4
acagtaacagaagatggtacaggaaaggaggcagtgaggtgaaggccaaattatttaagccaaatgaagatgcagtcatgcccagatacataaataacaaagatggcaaatgaatcagtgtatgagtctcagccaactaaacatatttaagaycaaataaataattgaggatctttaaatgtcagtgaaattggtttgtttcagtgaatagagacagattaggaaattcgctgtaagacactttacagagtgaatgatgtcatgattctgaagtacgttaacsactgaaatcaatgcacwtaggttgctctgaaagtaatgcctcctatttatttccatggaaactgcaacagatacaaaaaaaaaataacactatttgatagaaaaaaaatcacagctacaaaacactttcctacatagacaccaccgttagctatgtgtttctgtcaacaatgaacaagaacctgcaagctggacttgtaaaaatctttaccagtgaaggtgacccactgtcaccacttctgaaatgcaccactcatcactcactgtgctcacatccactcttatataaataaaagcctccataaatattcagcatgc

SEQ ID NO: 24032 - DNA, 600 bp, Chicken  19866894237888_1
tcttccatgttatattatttactgtgtataaggtgaacagaaacctactggaagagaatcccaccattttaacagcagcagatgagaaggatttatttttttttacagatggtaaaatatatgctttctatattttttatttgaacaaaacaaagcaaaaaatgagaggaaaaaaatacaaataaaaaatgaaaaagagaaagaattttattagaatcttatgaaaacattttgccatgcatattttgtttcaaaatacattaattgtagtctactaagatcaaataaaactacagcatwaaaaaagagtacatgttttccttgtgctgggtaggattattcagatttgttttttcatcaggcatcrttaacataataaattgcacatgttacactaactggccttttacaacattcctatattagtcttcaaaggaacatctaaatgatcttccactaaaaagggaagaaaatgctgaatgtacagtgcattaaaaataacagagcagcatcataaatgtccttatatatttgctttttcttgctcagtctacctagattcattggcaaggctctgtagaagcaaaccaatggaggtat

SEQ ID NO: 24033 - DNA, 559 bp, Chicken  19866894237888_2
tttaacagcagcagatgagaaggatttatttttttttacagatggtaaaatatatgctttctatattttttatttgaacaaaacaaagcaaaaaatgagaggaaaaaaatacaaataaaaaatgaaaaagagaaagaattttattagaatcttatgaaaacattttgccatgcatattttgtttcaaaatacattaattgtagtctactaagatcaaataaaactacagcataaaaaaagagtacatgttttccttgtgctgggtaggattattcagatttgttttttcatcaggcatcrttaacataataaattgcacatgttacactaactggccttttacaacattcctatattagtcttcaaaggaacatctaaatgatcttccactaaaaagggaagaaaatgctgaatgtacagtgcattaaaaataacagagcagcatcataaatgtccttatatatttgctttttcttgctcagtctacctagattcattggcaaggctctgtagaagcaaaccaatggaggtatatttgcattacttttaagcaactcag

SEQ ID NO: 24034 - DNA, 597 bp, Chicken  19866894237901_1
  misc_feature (1)..(29): n is any nucleotide
nnnnnnnnnnnnnnnnnnnnnnnnnnnnncagccccgacagcccggagctccgctgccaaaaggagttccttcccctggggatgccgggcagccgctcccggccgcatccctgcgctgccacagctggaggagctcagcccaattcacttccaaaacgggctgagccgacagcgggacgctgcagcccttccctcagcgtggctctgagtcatcctcccacgtcagcgcgtccccggctcaccctcccggcaccgcacggctctgacagcagcccttccaccccccccaaccccggcagyggcccacgagctccggcgcacaccaygaaggcgccgtccccacaaagccaccctcgggctctgcaggtgaactcagagggtcctggcagctttaaaycaaactgctgcagccctgctcagctctgcgggcggcttcgctgcctttggaccgaagcggtgcggtcggatcctgccttccacgggcgttatggcaataaacacaccgcgacccggaggctttatagcaacgccgcccccatggacccccagggggtgggggactgagcccaaggagggcagcgctctcagaaaggaaga

SEQ ID NO: 24035 - DNA, 571 bp, Chicken  19866894237901_2
  misc_feature (1)..(3): n is any nucleotide
nnncagccccgacagcccggagctccgctgccaaaaggagttccttcccctggggatgccgggcagccgctcccggccgcatccctgcgctgccacagctggaggagctcagcccaattcacttccaaaacgggctgagccgacagcgggacgctgcagcccttccctcagcgtggctctgagtcatcctcccacgtcagcgcgtccccggctcaccctcccggcaccgcacggctctgacagcagcccttccaccccccccaaccccggcagyggcccacgagctccggcgcacaccaygaaggcgccgtccccacaaagccaccctcgggctctgcaggtgaactcagagggtcctggcagctttaaaycaaactgctgcagccctgctcagctctgcgggcggcttcgctgcctttggaccgaagcggtgcggtcggatcctgccttccacgggcgttatggcaataaacacaccgcgacccggaggctttatagcaacgccgcccccatggacccccagggggtgggggactgagcccaaggagggcagcgctctcagaaaggaaga

SEQ ID NO: 24036 - DNA, 500 bp, Chicken  19866894237901_3
cagccccgacagcccggagctccgctgccaaaaggagttccttcccctggggatgccgggcagccgctcccggccgcatccctgcgctgccacagctggaggagctcagcccaattcacttccaaaacgggctgagccgacagcgggacgctgcagcccttccctcagcgtggctctgagtcatcctcccacgtcagcgcgtccccggctcaccctcccggcaccgcacggctctgacagcagcccttccaccccccccaaccccggcagyggcccacgagctccggcgcacaccaygaycaaactgctgcagccctgctcagctctgcgggcggcttcgctgcctttggaccgaagcggtgcggtcggatcctgccttccacgggcgttatggcaataaacacaccgcgacccggaggctttatagcaacgccgcccccatggacccccagggggtgggggactgagcccaaggagggcagcgctctcagaaaggaaga

SEQ ID NO: 24037 - DNA, 600 bp, Chicken  19866894237904_1
taacttggtaattctaaaagcaaagccaattattttggtgttcttctttccttttaagttttttcagtggcgtgtttttcattgacacacattagctgaagcaaaggttattatttcaaataaatatacttaactaattttgcatatactgagtgtataatgcagaataattccttcaaagtctttgttgtagaattaaattagttaaacataatgattggttgatagcctaatattcatttgttcttgaagtcttaaagtatcaacaaaaataataaaactaaaatcaatcgtatatasgaatatgcctacacggtctttactagatcttctaaaaagagcttcactttcagagttttaacactgtgatactgagacagtggactctcttggaagccagtgctttatgtttggacaagattaagcttatctatgtagatgtagttccaaatcccagcactattcagtgcctgcaacctttctgttagctcaggaggcagagagtttgtaggccaaaggagatatgtgtacactttgaagttggaaggcttcttatcatttgacaaatggacctgagaatgttaaagagaaagtttaagg

SEQ ID NO: 24038 - DNA, 600 bp, Chicken  19866894237910_1
ccacgaagggcacgatgttgtacttggtgggcgagtcggagacgaacacccgggctgacctccacgctgaagatatccaagaagttggcggcgaagtggtgggagaaggaggcctcggcgcccggcgtgtcgtagtgcgggttctccttcaggaactggcagaacttctgggcgaagtcgacggcggccgcctgggcgtgcagctcgcagaactcgcgccagtcggggagcggggaggagggctcctggcacagggcatcgccgttcatggctgccccattccacctggcggcgggctgygggsaaaggcacagcgtcagcgcggccgccacgttcccccgccggcggcgcgggcctgcagccccagcacgaagcgggaaacgctgtgggaatgtggttttgtgctccttcctctccctccgctgcactggaaccaaacgtggccctggcagcrgccataaatcatacttattttatgattatgacctgttcaaaagcggcattgatttctcataaaaccaccgaggagtccctgaccggagcagcccggggacctccaggcccaacaccgccatcagaccccagagcttcaacagaaag

SEQ ID NO: 24039 - DNA, 600 bp, Chicken  19866894237910_2
gaagggcacgatgttgtacttggtgggcgagtcggagacgaacacccgggctgacctccacgctgaagatatccaagaagttggcggcgaagtggtgggagaaggaggcctcggcgcccggcgtgtcgtagtgcgggttctccttcaggaactggcagaacttctgggcgaagtcgacggcggccgcctgggcgtgcagctcgcagaactcgcgccagtcggggagcggggaggagggctcctggcacagggcatcgccgttcatggctgccccattccacctggcggcgggctgygggsaaaggcacagcgtcagcgcggccgccacgttcccccgccggcggcgcgggcctgcagccccagcacgaagcgggaaacgctgtgggaatgtggttttgtgctccttcctctccctccgctgcactggaaccaaacgtggccctggcagcrgccataaatcatacttattttatgattatgacctgttcaaaagcggcattgatttctcataaaaccaccgaggagtccctgaccggagcagcccggggacctccaggcccaacaccgccatcagaccccagagcttcaacagaaagcccc

SEQ ID NO: 24040 - DNA, 600 bp, Chicken  19866894237910_3
actggcagaacttctgggcgaagtcgacggcggccgcctgggcgtgcagctcgcagaactcgcgccagtcggggagcggggaggagggctcctggcacagggcatcgccgttcatggctgccccattccacctggcggcgggctgygggsaaaggcacagcgtcagcgcggccgccacgttcccccgccggcggcgcgggcctgcagccccagcacgaagcgggaaacgctgtgggaatgtggttttgtgctccttcctctccctccgctgcactggaaccaaacgtggccctggcagcrgccataaatcatacttattttatgattatgacctgttcaaaagcggcattgatttctcataaaaccaccgaggagtccctgaccggagcagcccggggacctccaggcccaacaccgccatcagaccccagagcttcaacagaaagccccagggatcaacaagtccgtgggttaaagggaaagatcaaccaagaaggcagagctggagccagcaggagctgagcagaggtgaagaccaggcccacattgccatgggaggagcacccaacgtcaccaacctctgcccagactgtcgacagg

SEQ ID NO: 24041 - DNA, 600 bp, Chicken  19866894237916_1
tctcctaaataaagactgccacatgctacactgctaatcagcttgctttcggaataccttacattaactgtaattgttttcatagaaatgttctactagtcacttttgtattgaagaaatcatttctcccttggcttatcacttgatatatttggctttctacctaatatatagcttcataagcaataagcatacaaaaccgatggggtagcagatgactcactctttttctatcattagattaaaacttatcagacatttcatctcagtaaaggaggtgatatggagtaatttatcagkagcatttctttactttactcagactctcttacagaaaccttttcaccttaaatcagaatcagagagatagcaggtatgagaagatatagtctttgccagtcttctgctgtctgggaaatatgtttccccacaaaaagtactgctaagtggtctttgcatcctacgtcttcacagcagaatagaaaatagagtttttgctacagattgtttttggattgggttgttgttggtttttttttttacaagttttgacaagattgcctataaatgcccaaactaagcatctataatgctttgcgc

SEQ ID NO: 24042 - DNA, 600 bp, Chicken  19866894237918_1
tgattttcattcccatttaagatatcactgagatgctaatgtgacacagaaaacgttattgtcctctgttcagccctgctgcgaaaggatagagagtctggagtaattatctcaaaataatttggatctgaagaaaagaatcaagccaagtttcacccttagaatatgacacgacaatataaatatacttcctaatctgacttcggtaggagcttccctgtgaacattctgggaagaggtccacaggtgatgtgaatgaaaggaaatgggtgaagacctcatgagtcacacgttcacacratttcccctwggaaacactcttattgtaatacttctgcaatgctggagtgagaaccttcccaacacagaagaaggagagggaggcaaagggtttggaggccagcgatgggccattggrtctgtgctgtggcrggtggggrtgtctggatggattcatttgtgtagggaaggactgataaaggaaattacttcaggtaagtttggtttcccacaaatctgtaccaacacattttctccttgcagttttttggaactgctacatatatttcagcctgtaagactgtcattttttgaacatgg

SEQ ID NO: 24043 - DNA, 600 bp, Chicken  19866894237918_2
tcccatttaagatatcactgagatgctaatgtgacacagaaaacgttattgtcctctgttcagccctgctgcgaaaggatagagagtctggagtaattatctcaaaataatttggatctgaagaaaagaatcaagccaagtttcacccttagaatatgacacgacaatataaatatacttcctaatctgacttcggtaggagcttccctgtgaacattctgggaagaggtccacaggtgatgtgaatgaaaggaaatgggtgaagacctcatgagtcacacgttcacacratttcccctwggaaacactcttattgtaatacttctgcaatgctggagtgagaaccttcccaacacagaagaaggagagggaggcaaagggtttggaggccagcgatgggccattggrtctgtgctgtggcrggtggggrtgtctggatggattcatttgtgtagggaaggactgataaaggaaattacttcaggtaagtttggtttcccacaaatctgtaccaacacattttctccttgcagttttttggaactgctacatatatttcagcctgtaagactgtcattttttgaacatggaagggttatg

SEQ ID NO: 24044 - DNA, 600 bp, Chicken  19866894237918_3
aatttggatctgaagaaaagaatcaagccaagtttcacccttagaatatgacacgacaatataaatatacttcctaatctgacttcggtaggagcttccctgtgaacattctgggaagaggtccacaggtgatgtgaatgaaaggaaatgggtgaagacctcatgagtcacacgttcacacratttcccctwggaaacactcttattgtaatacttctgcaatgctggagtgagaaccttcccaacacagaagaaggagagggaggcaaagggtttggaggccagcgatgggccattggrtctgtgctgtggcrggtggggrtgtctggatggattcatttgtgtagggaaggactgataaaggaaattacttcaggtaagtttggtttcccacaaatctgtaccaacacattttctccttgcagttttttggaactgctacatatatttcagcctgtaagactgtcattttttgaacatggaagggttatgtgtgcttgtacgtgaaagaagcactgcaaataagttgtttctgcccttaacacagcctgaagcacaatcttgttgtttacagccaggttacagcagttcttctttatc

SEQ ID NO: 24045 - DNA, 600 bp, Chicken  19866894237918_4
gaaaagaatcaagccaagtttcacccttagaatatgacacgacaatataaatatacttcctaatctgacttcggtaggagcttccctgtgaacattctgggaagaggtccacaggtgatgtgaatgaaaggaaatgggtgaagacctcatgagtcacacgttcacacratttcccctwggaaacactcttattgtaatacttctgcaatgctggagtgagaaccttcccaacacagaagaaggagagggaggcaaagggtttggaggccagcgatgggccattggrtctgtgctgtggcrggtggggrtgtctggatggattcatttgtgtagggaaggactgataaaggaaattacttcaggtaagtttggtttcccacaaatctgtaccaacacattttctccttgcagttttttggaactgctacatatatttcagcctgtaagactgtcattttttgaacatggaagggttatgtgtgcttgtacgtgaaagaagcactgcaaataagttgtttctgcccttaacacagcctgaagcacaatcttgttgtttacagccaggttacagcagttcttctttatcagcttgtacacaca

SEQ ID NO: 24046 - DNA, 600 bp, Chicken  19866894237918_5
tcaagccaagtttcacccttagaatatgacacgacaatataaatatacttcctaatctgacttcggtaggagcttccctgtgaacattctgggaagaggtccacaggtgatgtgaatgaaaggaaatgggtgaagacctcatgagtcacacgttcacacratttcccctwggaaacactcttattgtaatacttctgcaatgctggagtgagaaccttcccaacacagaagaaggagagggaggcaaagggtttggaggccagcgatgggccattggrtctgtgctgtggcrggtggggrtgtctggatggattcatttgtgtagggaaggactgataaaggaaattacttcaggtaagtttggtttcccacaaatctgtaccaacacattttctccttgcagttttttggaactgctacatatatttcagcctgtaagactgtcattttttgaacatggaagggttatgtgtgcttgtacgtgaaagaagcactgcaaataagttgtttctgcccttaacacagcctgaagcacaatcttgttgtttacagccaggttacagcagttcttctttatcagcttgtacacacaggcatgtt

SEQ ID NO: 24047 - DNA, 599 bp, Chicken  19866894237923_1
  misc_feature (1)..(40): n is any nucleotide
nnnnnnnnnnnnnnnnnnnnnnnnnnnnnnnnnnnnnnnntggtgctgctgttgcagtattttgtacctgctgccttcagccaggccagcccaaaggcacaaggcatgcttctggataagctgtggtacagaaatgcccagaggtactccttcaggttcagacaccttgctttcaccttgcccatacgatactggagacaaacactaaatgtagtgtggaatgaatgattttacagtgcaatgattcctgcttggggcttctccaaatttgaaatgcatttactgcttcagtgagagaaraagtccaactcagaatactgtctttactgtacarttttcttctgcttgccaaagcaggaccaaataggaatatctgagagtaaaacctgtcttctggttgctrttgcacactctrtaactgcacagagtcattactttcscgctattttctctctaattggttttctcaagacgaagtttgtctctgaaaatattgatacaggagaggtgggaggacagtggagaacctgttcagagtgcccttctccacagcctgctctgctcacagtccaatgtttttctcacctcttccatctccc

SEQ ID NO: 24048 - DNA, 599 bp, Chicken  19866894237923_2
  misc_feature (1)..(6): n is any nucleotide
nnnnnntggtgctgctgttgcagtattttgtacctgctgccttcagccaggccagcccaaaggcacaaggcatgcttctggataagctgtggtacagaaatgcccagaggtactccttcaggttcagacaccttgctttcaccttgcccatacgatactggagacaaacactaaatgtagtgtggaatgaatgattttacagtgcaatgattcctgcttggggcttctccaaatttgaaatgcatttactgcttcagtgagagaaraagtccaactcagaatactgtctttactgtacarttttcttctgcttgccaaagcaggaccaaataggaatatctgagagtaaaacctgtcttctggttgctrttgcacactctrtaactgcacagagtcattactttcscgctattttctctctaattggttttctcaagacgaagtttgtctctgaaaatattgatacaggagaggtgggaggacagtggagaacctgttcagagtgcccttctccacagcctgctctgctcacagtccaatgtttttctcacctcttccatctcccctgacttgggctgagcagccctgcacctgctact

SEQ ID NO: 24049 - DNA, 600 bp, Chicken  19866894237923_3
gcatgcttctggataagctgtggtacagaaatgcccagaggtactccttcaggttcagacaccttgctttcaccttgcccatacgatactggagacaaacactaaatgtagtgtggaatgaatgattttacagtgcaatgattcctgcttggggcttctccaaatttgaaatgcatttactgcttcagtgagagaaraagtccaactcagaatactgtctttactgtacarttttcttctgcttgccaaagcaggaccaaataggaatatctgagagtaaaacctgtcttctggttgctrttgcacactctrtaactgcacagagtcattactttcscgctattttctctctaattggttttctcaagacgaagtttgtctctgaaaatattgatacaggagaggtgggaggacagtggagaacctgttcagagtgcccttctccacagcctgctctgctcacagtccaatgtttttctcacctcttccatctcccctgacttgggctgagcagccctgcacctgctactgcaggatactgctatctatggctttccaacacttcatattctgatgaatagttggcttcttgtcatttca

SEQ ID NO: 24050 - DNA, 600 bp, Chicken  19866894237923_4
ataagctgtggtacagaaatgcccagaggtactccttcaggttcagacaccttgctttcaccttgcccatacgatactggagacaaacactaaatgtagtgtggaatgaatgattttacagtgcaatgattcctgcttggggcttctccaaatttgaaatgcatttactgcttcagtgagagaaraagtccaactcagaatactgtctttactgtacarttttcttctgcttgccaaagcaggaccaaataggaatatctgagagtaaaacctgtcttctggttgctrttgcacactctrtaactgcacagagtcattactttcscgctattttctctctaattggttttctcaagacgaagtttgtctctgaaaatattgatacaggagaggtgggaggacagtggagaacctgttcagagtgcccttctccacagcctgctctgctcacagtccaatgtttttctcacctcttccatctcccctgacttgggctgagcagccctgcacctgctactgcaggatactgctatctatggctttccaacacttcatattctgatgaatagttggcttcttgtcatttcagagaaasgcccc

SEQ ID NO: 24051 - DNA, 600 bp, Chicken  19866894237923_5
gaggtactccttcaggttcagacaccttgctttcaccttgcccatacgatactggagacaaacactaaatgtagtgtggaatgaatgattttacagtgcaatgattcctgcttggggcttctccaaatttgaaatgcatttactgcttcagtgagagaaraagtccaactcagaatactgtctttactgtacarttttcttctgcttgccaaagcaggaccaaataggaatatctgagagtaaaacctgtcttctggttgctrttgcacactctrtaactgcacagagtcattactttcscgctattttctctctaattggttttctcaagacgaagtttgtctctgaaaatattgatacaggagaggtgggaggacagtggagaacctgttcagagtgcccttctccacagcctgctctgctcacagtccaatgtttttctcacctcttccatctcccctgacttgggctgagcagccctgcacctgctactgcaggatactgctatctatggctttccaacacttcatattctgatgaatagttggcttcttgtcatttcagagaaasgccccaactgttgctgaattttctttccaa

SEQ ID NO: 24052 - DNA, 600 bp, Chicken  19866894237923_6
ctctrtaactgcacagagtcattactttcscgctattttctctctaattggttttctcaagacgaagtttgtctctgaaaatattgatacaggagaggtgggaggacagtggagaacctgttcagagtgcccttctccacagcctgctctgctcacagtccaatgtttttctcacctcttccatctcccctgacttgggctgagcagccctgcacctgctactgcaggatactgctatctatggctttccaacacttcatattctgatgaatagttggcttcttgtcatttcagagaaasgccccaactgttgctgaattttctttccaagtccaaaacagaacagaaggagcctttatttaccttaatgggttctgaagattaacgcggcaaacagcctgaggtgcctggtctcctcttgctgatttctgcctttggtttcatgacttctggcacataaaggagaatttctgcccaaggtgctcagatctgtaaagcatgatgttcttggctaactgcagtgcctgcatattaagagatgccatggaataacaaactgtcccatgtcttatgttgatataatttacaaactctctcaat

SEQ ID NO: 24053 - DNA, 599 bp, Chicken  19866894237924_1
  misc_feature (1)..(198): n is any nucleotide
nnnnnnnnnnnnnnnnnnnnnnnnnnnnnnnnnnnnnnnnnnnnnnnnnnnnnnnnnnnnnnnnnnnnnnnnnnnnnnnnnnnnnnnnnnnnnnnnnnnnnnnnnnnnnnnnnnnnnnnnnnnnnnnnnnnnnnnnnnnnnnnnnnnnnnnnnnnnnnnnnnnnnnnnnnnnnnnnnnnnnnnnnnnnnnnnnnnnnntgaagaatagacggcagttcactcagaattattgtttaagcctttgaattattgtttatgcctttgaagtatgaggcatgtaccctttcattttatacccarctcctgcttccaatacttgctttgggattctgattttatttatttttttaaatatgacagacagctcagactacagtcaggtgtgaagttcctgtcataggagctgtgcaggactttgattatgaggaaatattgaacaaatcctttcaccccctgctttcatcaggaatttaaatgagtacagcaggcagacagtttgggccttgttttaccttgctagatttcagcctttctgtagcccaacagcaaagttagaatgtgttgaaatcttacttaaagtagagcaagagaagcacaga

SEQ ID NO: 24054 - DNA, 600 bp, Chicken  19866894237924_2
ttttatttatttttttaaatatgacagacagctcagactacagtcaggtgtgaagttcctgtcataggagctgtgcaggactttgattatgaggaaatattgaacaaatcctttcaccccctgctttcatcaggaatttaaatgagtacagcaggcagacagtttgggccttgttttaccttgctagatttcagcctttctgtagcccaacagcaaagttagaatgtgttgaaatcttacttaaagtagagcaagagaagcacagaacaatattatgccccagttcccttctgcaactcmtttgtgtttcatcagttagaagcaggatttctgtatgtactaaggtggttattccccacgacaggttgtctctaaacatgattcaaaagaagttagctattctgggggtagaaaggtgtaattatacaaatcaccytttcacgcaaggaagaagcaagtctgactatctgcccccagcctcctacacatgtacctctrctaatagccaaagcgctcaccaaatgttcagcaaacatttggacaaacagccaaggacctctctgaacatcaaatgattattaaatcttaaacggtactttc

SEQ ID NO: 24055 - DNA, 600 bp, Chicken  19866894237924_3
tttaaatgagtacagcaggcagacagtttgggccttgttttaccttgctagatttcagcctttctgtagcccaacagcaaagttagaatgtgttgaaatcttacttaaagtagagcaagagaagcacagaacaatattatgccccagttcccttctgcaactcmtttgtgtttcatcagttagaagcaggatttctgtatgtactaaggtggttattccccacgacaggttgtctctaaacatgattcaaaagaagttagctattctgggggtagaaaggtgtaattatacaaatcaccytttcacgcaaggaagaagcaagtctgactatctgcccccagcctcctacacatgtacctctrctaatagccaaagcgctcaccaaatgttcagcaaacatttggacaaacagccaaggacctctctgaacatcaaatgattattaaatcttaaacggtactttccaaaaataattttctgctgctgttgtttgtttgtttgaaagcagggtagtaaaatccacagatgtgtacagtcataaacctttagatgagactcaatttccttgatgtccaacgataaaatccactaataaatgtg

SEQ ID NO: 24056 - DNA, 600 bp, Chicken  19866894237924_4
tctgtagcccaacagcaaagttagaatgtgttgaaatcttacttaaagtagagcaagagaagcacagaacaatattatgccccagttcccttctgcaactcmtttgtgtttcatcagttagaagcaggatttctgtatgtactaaggtggttattccccacgacaggttgtctctaaacatgattcaaaagaagttagctattctgggggtagaaaggtgtaattatacaaatcaccytttcacgcaaggaagaagcaagtctgactatctgcccccagcctcctacacatgtacctctrctaatagccaaagcgctcaccaaatgttcagcaaacatttggacaaacagccaaggacctctctgaacatcaaatgattattaaatcttaaacggtactttccaaaaataattttctgctgctgttgtttgtttgtttgaaagcagggtagtaaaatccacagatgtgtacagtcataaacctttagatgagactcaatttccttgatgtccaacgataaaatccactaataaatgtgtacagatgcaaaaggcctatttgttgtcctgtcaagccaggccatgtggaacaaaaaaccta

SEQ ID NO: 24057 - DNA, 600 bp, Chicken  19866894237929_1
gatggctctctgcaatatagcttggcatcttgagaagtttgttgctttcagatgttaggttagagttcacatgtgtgatattttctctcgtactaatgcagaaattatgctcaagagattgaaggcaaaaatatgtagatagagcctgggtcaaaaattgttttcacatgctgaattatttataagctgccttgatcttttcgttaagcttcttgtgcccactagatgtcaccagcgtatgccgttctcattcaagtttctatcctcttatatgagattcgagttaacaggaagatttgwtaaaattggtggtgttttttgctaaatggacaggtaatagataaaaacgagtaagatgctgcaaggaacagaaattattattgttttgagtagaggaatgagatttctcacccaattagactctgccacacaccttgtaaatccttctgtttcttccctaattcttctccaagacattccccagttagcataatcagaactgtgacttcttgcacgttcctgatcatccagaactggctgaggcagcatatgtgcagttcaaaaacagttcacttacttaacttactgatttttactgtt

SEQ ID NO: 24058 - DNA, 600 bp, Chicken  19866894237941_1
acttaaggcactctgtaatgagatctaatcaatgctgaacatcctaaggggtgaaattttcccttttttcccacagatggacttttgttatactcccaggataatctctaatttgttattattaaatgagtgttgtcaacctaaactaatcaaaatgattgcaagtgctagaaataagtattatagagaaggttgaaacagcactttcatactgcaaatactgcaaactgctctttaaacaaacacataattctgaaatgtaaatggcaagtgacacttagccactagggtggatcctgyctggccacaggaagaaaggcctttcagtcacttacgaagggagtgtgggcaaatcatcccccrgtttctcatctgtaaagcataggctgtaactagccctggyttaaagcagtttgacatatatgaagagaaagaagtacacaagaacaacgcatgtagtattttctataaataccttttctactacctacgcgtgggaaagaacaattctgcatttacaaaatacagggtgcgtaggaaaargactgatggccaagatttgcgggaggaccttatgaagctgtgtagctgatgaacata

SEQ ID NO: 24059 - DNA, 600 bp, Chicken  19866894237941_2
ttttttcccacagatggacttttgttatactcccaggataatctctaatttgttattattaaatgagtgttgtcaacctaaactaatcaaaatgattgcaagtgctagaaataagtattatagagaaggttgaaacagcactttcatactgcaaatactgcaaactgctctttaaacaaacacataattctgaaatgtaaatggcaagtgacacttagccactagggtggatcctgyctggccacaggaagaaaggcctttcagtcacttacgaagggagtgtgggcaaatcatcccccrgtttctcatctgtaaagcataggctgtaactagccctggyttaaagcagtttgacatatatgaagagaaagaagtacacaagaacaacgcatgtagtattttctataaataccttttctactacctacgcgtgggaaagaacaattctgcatttacaaaatacagggtgcgtaggaaaargactgatggccaagatttgcgggaggaccttatgaagctgtgtagctgatgaacataaagatagacgaaattcagtatgaataaacaaagactgatgcacataggaaaaactcctaactt

SEQ ID NO: 24060 - DNA, 600 bp, Chicken  19866894237941_3
atctctaatttgttattattaaatgagtgttgtcaacctaaactaatcaaaatgattgcaagtgctagaaataagtattatagagaaggttgaaacagcactttcatactgcaaatactgcaaactgctctttaaacaaacacataattctgaaatgtaaatggcaagtgacacttagccactagggtggatcctgyctggccacaggaagaaaggcctttcagtcacttacgaagggagtgtgggcaaatcatcccccrgtttctcatctgtaaagcataggctgtaactagccctggyttaaagcagtttgacatatatgaagagaaagaagtacacaagaacaacgcatgtagtattttctataaataccttttctactacctacgcgtgggaaagaacaattctgcatttacaaaatacagggtgcgtaggaaaargactgatggccaagatttgcgggaggaccttatgaagctgtgtagctgatgaacataaagatagacgaaattcagtatgaataaacaaagactgatgcacataggaaaaactcctaacttcaaatacgaattaatattttctgaaccaataattgtgatt

SEQ ID NO: 24061 - DNA, 600 bp, Chicken  19866894237941_4
cacataattctgaaatgtaaatggcaagtgacacttagccactagggtggatcctgyctggccacaggaagaaaggcctttcagtcacttacgaagggagtgtgggcaaatcatcccccrgtttctcatctgtaaagcataggctgtaactagccctggyttaaagcagtttgacatatatgaagagaaagaagtacacaagaacaacgcatgtagtattttctataaataccttttctactacctacgcgtgggaaagaacaattctgcatttacaaaatacagggtgcgtaggaaaargactgatggccaagatttgcgggaggaccttatgaagctgtgtagctgatgaacataaagatagacgaaattcagtatgaataaacaaagactgatgcacataggaaaaactcctaacttcaaatacgaattaatattttctgaaccaataattgtgattcagcaataaaaatacatgctagacccaaggaagaattaggtcagtactcattatcagtcaaagcagcaaataaagttgcgtgaatttttaggaaggaatagtgagaaaccagaaaccaacagtatgcctttcaataaatc

SEQ ID NO: 24062 - DNA, 599 bp, Chicken  19866894237942_1
  misc_feature (1)..(124): n is any nucleotide
nnnnnnnnnnnnnnnnnnnnnnnnnnnnnnnnnnnnnnnnnnnnnnnnnnnnnnnnnnnnnnnnnnnnnnnnnnnnnnnnnnnnnnnnnnnnnnnnnnnnnnnnnnnnnnnnnnnnnnnnnnnncttgtagatgggagtacgcgggcaagcttccagccctctgggaccagagatgctgaaagatgatggaaagtggcttggaaataacctctgccagctccttcagtacccctggatggaccccatccagccccatagacttgtggcagtccaggtggaatagtagttctctaactgtytctacttgaatcgtgagggtttattttgctctccatccaagacttccaggccaggggtagagtacctggaaagtaactgatctgacttttaaagacaggtataaagaaggtattgagaacttcagcctccttcttattctcagtggtcacattccccactgtatccagtaaaggatggagattttccttagccctcttctcacagttaatatatttgtagaacagttttttgtttccttttactccagcagccaagctgaattctaactgggcttttgctttcctacttttcttcctgc

SEQ ID NO: 24063 - DNA, 600 bp, Chicken  19866894237943_1
aataaacctcaaacatatattaggaaagaacatgggctaatttactcttgctatatagaagaataagctatgcaagacgtttaaataccactgcttatattaagttgaatgtcattatatggggcagtggttagtgaattatttttgtgttaagcagaatttttttcagatttaagtaatcatatattgacctacagctttgaaaacgttttacatggagcatgttttaaagttagcagattgtagagataaggaattgattcagtcacagagctaatagctctcagctccaatttgtasttaggctggaaaaagtctaactccttctcccctcaataagcctagaagttcttctctttccagtcatttggctctaagtcttcagcagcaattagttacyacttcagtgaagctttactatacacagaccattagaactcggattctcataagccagtgcatttgctgtgaggtctaacagaatctattgatgtgatttagkaagttaaatgcactggggagaaccatattcctctaaccctccgaatgatcttggatgtgtatacctgttgattatgattccagtctgtaccacagtgg

SEQ ID NO: 24064 - DNA, 600 bp, Chicken  19866894237943_2
taagttgaatgtcattatatggggcagtggttagtgaattatttttgtgttaagcagaatttttttcagatttaagtaatcatatattgacctacagctttgaaaacgttttacatggagcatgttttaaagttagcagattgtagagataaggaattgattcagtcacagagctaatagctctcagctccaatttgtasttaggctggaaaaagtctaactccttctcccctcaataagcctagaagttcttctctttccagtcatttggctctaagtcttcagcagcaattagttacyacttcagtgaagctttactatacacagaccattagaactcggattctcataagccagtgcatttgctgtgaggtctaacagaatctattgatgtgatttagkaagttaaatgcactggggagaaccatattcctctaaccctccgaatgatcttggatgtgtatacctgttgattatgattccagtctgtaccacagtggacaaactgtgtgctaacacaagcacaaagtaccaatccagccttgctcctgtacttgctatttggtctattatatcctccatcactaatttttttcagta

SEQ ID NO: 24065 - DNA, 575 bp, Chicken  19866894237943_3
aaaacgttttacatggagcatgttttaaagttagcagattgtagagataaggaattgattcagtcacagagctaatagctctcagctccaatttgtasttaggctggaaaaagtctaactccttctcccctcaataagcctagaagttcttctctttccagtcatttggctctaagtcttcagcagcaattagttacyacttcagtgaagctttactatacacagaccattagaactcggattctcataagccagtgcatttgctgtgaggtctaacagaatctattgatgtgatttagkaagttaaatgcactggggagaaccatattcctctaaccctccgaatgatcttggatgtgtatacctgttgattatgattccagtctgtaccacagtggacaaactgtgtgctaacacaagcacaaagtaccaatccagccttgctcctgtacttgctatttggtctattatatcctccatcactaatttttttcagtacagcaagattacaaagtcagcagcatccagtattggtagggaggttatcattttgcagagcatgcaaacagacagat

SEQ ID NO: 24066 - DNA, 600 bp, Chicken  19866894237947_1
gcttacagaaataacataacaggcagcagcaagaggggggggggacgacaaagaaatgattccagtatatagatgagtaatagcaacacagggaaaaaaagggacttgtttaaaggcacacaaccagaaatggtgtgggtttggaaagtggctgtttagcagagctcaggccaagttttctctctagtgcatctttatcaagattaaatttaatcagctggaaaagcagtggaaaaacggcgtgtttctgtatttgctgcaagcaaaggagatttgggaagctgcagttttccattcccrtggtggacagcagaaaggaaaccccgggtgactgctcccaggttgtaagagccccttctsatgcacttctgctgctctgttccaaacctgacccgctgagagcacagcgcccatcagctgatggggcaaaggagccatcactccttcagagccagaattcagacttcattaagaacagactaaaaccaaagaagctgttggcacgagagcactgccagctctcaccctcactgctaacacaccgacctgggggttggtggtgatgttagaagccggacaccccggccttctccagggtgc

SEQ ID NO: 24067 - DNA, 600 bp, Chicken  19866894237947_2
tccagtatatagatgagtaatagcaacacagggaaaaaaagggacttgtttaaaggcacacaaccagaaatggtgtgggtttggaaagtggctgtttagcagagctcaggccaagttttctctctagtgcatctttatcaagattaaatttaatcagctggaaaagcagtggaaaaacggcgtgtttctgtatttgctgcaagcaaaggagatttgggaagctgcagttttccattcccrtggtggacagcagaaaggaaaccccgggtgactgctcccaggttgtaagagccccttctsatgcacttctgctgctctgttccaaacctgacccgctgagagcacagcgcccatcagctgatggggcaaaggagccatcactccttcagagccagaattcagacttcattaagaacagactaaaaccaaagaagctgttggcacgagagcactgccagctctcaccctcactgctaacacaccgacctgggggttggtggtgatgttagaagccggacaccccggccttctccagggtgctctgctggtcgatcactttctggtccagttccaagacgattttctcatccatcattcgct

SEQ ID NO: 24068 - DNA, 600 bp, Chicken  19866894237955_1
tgtagagaggggagaggccagaagagggaggaggggtgtcgtgaaggggagtggagaacagatatcagaagaggagcaaatactgtgtttgctttgggatctgaaagaccttttgctgacttacagagcaatatataaagttaatcactttcataatcaaatacaaggtagaacttggacaataacatgtattatcatatctgaaatagtgttcaaatccaagctctttttcaatacagattcagcacaaaacttgcatgcaatgagagtgcttttgtatctacatatttgggtttgatkaaatgattgaaaagtaatattacatttaatgtaggtagtgcttccttccttgccccatcctccgctcacccagcagaattaagaaggaaaagactttgtatgaaaatatcaatattctcctaacatattctctatgtatctagccctgcttttagcaatatatttctgtctgctatatgtggatagagactgtgagttggaatgggaagcagggcagcatcactggtctttcttctgttcagagtcaaataaagatctatttcagtgcttccctctcagggggaactgctcataagtaga

SEQ ID NO: 24069 - DNA, 600 bp, Chicken  19866894237955_2
atgattgaaaagtaatattacatttaatgtaggtagtgcttccttccttgccccatcctccgctcacccagcagaattaagaaggaaaagactttgtatgaaaatatcaatattctcctaacatattctctatgtatctagccctgcttttagcaatatatttctgtctgctatatgtggatagagactgtgagttggaatgggaagcagggcagcatcactggtctttcttctgttcagagtcaaataaagatctatttcagtgcttccctctcagggggaactgctcataagtagaakggagtctgtttttcctgttgtcttamaccacwgcagtcactcacctttggggatactctgtgtaaagcattaaattcttttaatgagctttatatccacgctggtgctgttaatgactgccagcagtgactgattatgacactgcatccatactccacctcttgctgcttctcatgtttttcagtctcattccattacagtcagcatttacatgctraagatagctcttcaaggcactctggaggcttggcagtgcaagtgttagcaggaagcagcataagaatttgtggtttagggcat

SEQ ID NO: 24070 - DNA, 600 bp, Chicken  19866894237955_3; identical to SEQ ID NO: 24069

SEQ ID NO: 24071 - DNA, 600 bp, Chicken  19866894237955_4
atgtaggtagtgcttccttccttgccccatcctccgctcacccagcagaattaagaaggaaaagactttgtatgaaaatatcaatattctcctaacatattctctatgtatctagccctgcttttagcaatatatttctgtctgctatatgtggatagagactgtgagttggaatgggaagcagggcagcatcactggtctttcttctgttcagagtcaaataaagatctatttcagtgcttccctctcagggggaactgctcataagtagaagggagtctgtttttcctgttgtcttamaccacwgcagtcactcacctttggggatactctgtgtaaagcattaaattcttttaatgagctttatatccacgctggtgctgttaatgactgccagcagtgactgattatgacactgcatccatactccacctcttgctgcttctcatgtttttcagtctcattccattacagtcagcatttacatgctraagatagctcttcaaggcactctggaggcttggcagtgcaagtgttagcaggaagcagcataagaatttgtggtttagggcataaatacatagtgtttaagccgtactg

SEQ ID NO: 24072 - DNA, 600 bp, Chicken  19866894237955_5
gtagtgcttccttccttgccccatcctccgctcacccagcagaattaagaaggaaaagactttgtatgaaaatatcaatattctcctaacatattctctatgtatctagccctgcttttagcaatatatttctgtctgctatatgtggatagagactgtgagttggaatgggaagcagggcagcatcactggtctttcttctgttcagagtcaaataaagatctatttcagtgcttccctctcagggggaactgctcataagtagaagggagtctgtttttcctgttgtcttamaccacwgcagtcactcacctttggggatactctgtgtaaagcattaaattcttttaatgagctttatatccacgctggtgctgttaatgactgccagcagtgactgattatgacactgcatccatactccacctcttgctgcttctcatgtttttcagtctcattccattacagtcagcatttacatgctraagatagctcttcaaggcactctggaggcttggcagtgcaagtgttagcaggaagcagcataagaatttgtggtttagggcataaatacatagtgtttaagccgtactgccaccc

SEQ ID NO: 24073 - DNA, 600 bp, Chicken  19866894237955_6
tcactggtctttcttctgttcagagtcaaataaagatctatttcagtgcttccctctcagggggaactgctcataagtagaagggagtctgtttttcctgttgtcttamaccacwgcagtcactcacctttggggatactctgtgtaaagcattaaattcttttaatgagctttatatccacgctggtgctgttaatgactgccagcagtgactgattatgacactgcatccatactccacctcttgctgcttctcatgtttttcagtctcattccattacagtcagcatttacatgctraagatagctcttcaaggcactctggaggcttggcagtgcaagtgttagcaggaagcagcataagaatttgtggtttagggcataaatacatagtgtttaagccgtactgccacccttatttctgcagacactaataaagaagtgtggacaaaaaaaatatgctgattatttctgtgctctgctatgaaagaaaacactgcataatattgccccagccatgtgtgcaaaatggctagtcaatggaagttctcccatagtcacatttcatacatgctttttctgctataaatctaattctgc

SEQ ID NO: 24074 - DNA, 600 bp, Chicken  19866894237955_7
actctggaggcttggcagtgcaagtgttagcaggaagcagcataagaatttgtggtttagggcataaatacatagtgtttaagccgtactgccacccttatttctgcagacactaataaagaagtgtggacaaaaaaaatatgctgattatttctgtgctctgctatgaaagaaaacactgcataatattgccccagccatgtgtgcaaaatggctagtcaatggaagttctcccatagtcacatttcatacatgctttttctgctataaatctaattctgcaaaatctaattttccttratgtcactctgctagtacgttatcacctacttctctgctcttttgcactgctcaaatgatgagagaaaggcacagtagcagggaattaggtatctcagagttttgtgagttgatggctggtgtcttaatcatcatgatggtctgctcttctgctttccagtaaaatgaagtccaagtaaacagaaaggggtgttgttgctttttctttcgagtatatgttttgtaacrytgtaggctttgctctaaacatttactaaggtcactgctacagagaggttctgctgagtcctcttacgtttg

SEQ ID NO: 24075 - DNA, 600 bp, Chicken  19866894237955_8
ttctcccatagtcacatttcatacatgctttttctgctataaatctaattctgcaaaatctaattttccttratgtcactctgctagtacgttatcacctacttctctgctcttttgcactgctcaaatgatgagagaaaggcacagtagcagggaattaggtatctcagagttttgtgagttgatggctggtgtcttaatcatcatgatggtctgctcttctgctttccagtaaaatgaagtccaagtaaacagaaaggggtgttgttgctttttctttcgagtatatgttttgtaacrytgtaggctttgctctaaacatttactaaggtcactgctacagagaggttctgctgagtcctcttacgtttgattctggattaaatgtgacaggaagttaaagaaacttcaccttggacttttcaaagtggtgtgcctacaactgtgatgctgtcagtgcttcatctgctgagatatttgattggctcagcaaacccaagtacctcatagttcagctgcattgctccttctcttgctatggtctcatctgcatggtcagcagagtactggaagatccatgtccttgggggcagttcaaat

SEQ ID NO: 24076 - DNA, 600 bp, Chicken  19866894237955_9
tctcccatagtcacatttcatacatgctttttctgctataaatctaattctgcaaaatctaattttccttratgtcactctgctagtacgttatcacctacttctctgctcttttgcactgctcaaatgatgagagaaaggcacagtagcagggaattaggtatctcagagttttgtgagttgatggctggtgtcttaatcatcatgatggtctgctcttctgctttccagtaaaatgaagtccaagtaaacagaaaggggtgttgttgctttttctttcgagtatatgttttgtaacrytgtaggctttgctctaaacatttactaaggtcactgctacagagaggttctgctgagtcctcttacgtttgattctggattaaatgtgacaggaagttaaagaaacttcaccttggacttttcaaagtggtgtgcctacaactgtgatgctgtcagtgcttcatctgctgagatatttgattggctcagcaaacccaagtacctcatagttcagctgcattgctccttctcttgctatggtctcatctgcatggtcagcagagtactggaagatccatgtccttgggggcagttcaaatc

SEQ ID NO: 24077 - DNA, 600 bp, Chicken  19866894237959_1
tgagtctctgctgcccctgggtcccagcaccttcatcccagcctgaccttggtgctgctgaaggtcgtgtatctctgcctgcctgccttgttgccagccagaagcggttgtaagcacaggtttcagaggctgcctcgctttttgaagatctaaaagtacatttatcttcttgagacatgcattaatctatcaactacaggtgaagataagggggatgagaagaggcttgggggggagagagaaaaaatacaataaaatataaaacaggagtaattttcatcaggaagaggaggttcatgrgctctttcttgctgccttaggcaaatgtcccacagagcagctggcttatcacagctccctgcacacccagcttgccccagcgctgtgtggtgacagctcacaatgtgaccgggtccctcactgtgccccaagccatgcagtggatctctttaatcgccacatctctgtgatgaggcaagaaagcagctcggctcccagcaaggcaaacccaaggcaggctgtctgagccctctgtgcctggcaagagcttccgttcctctggctgggagaggagcagagctggctcctgtccttctccat

SEQ ID NO: 24078 - DNA, 600 bp, Chicken  19866894237962_1
ttgggccataaaagaaaggaaagtcatctaagtgttttaacattttgttcctcatttttatttaagtaataaagcatttccagcaccgatcacacagcgttcgttggctgggacccagaattggtgcccaatccagtcctcgatccattcttctgctgagcttctttctgtgcatatataagtacgatcagcagtaagcaagaaccatttgtaatgaaacacaggagtcagcagtgttgttctgcagtgtctgggaccagaagtgctctgtgggctgtgtgcgttttgaggtagcgctgygcttcactcaaagttgttaccaccatcagaggtgcacagagatccattgagaggaatcgggaaatgagatcatttcatgccaaggcttaaaaatggatctgctttctttgaatcttttgactctaaattgtttgaggagcagtttctctcacccagcataggtactacatgtggcgtaacagaggtctctcttttggataagatgcaactctcattcaatattaatttggaagaaaaaagatttatcaagaaaaagatgtttaaaatgccagagtgtagaatatagaaagacataatcag

SEQ ID NO: 24079 - DNA, 600 bp, Chicken  19866894237970_1
agctactccatgctgctttcgtaggtgaaatgatgaactctttgttgagcccaagttggtagtctttccatttcctgcagtctgggttagttggcacttgtgcctgtagtatctttcttcttattttaataggaactgtcaccacttcactccttttcctgtttttttttctatttgacttgtcgaggttgggcctactgaaatcactcattctcattttgttcttgtcctctttccaaaggactgtgaactgttgaactcatggtcactcattcccgttcccacccgcgtccttgtagmtgacttccaaaatcacagccatgttttgaaactcataaaagtaaatgaaggcttgaagtgcrtatttgtagcgaaaaacgtttcccaacttgcgtgagatcactggtgcaaagtagagtagtcagtggccaaacagtttgaagtggttttgtactgcaccagtggttcacacgttcctggttgaggttgtacgttgctgactataamgacgtaataaaagtaaatgagaaatcttggggggcttctactactaatttcatcatgagagtgttactgaagtctgtataaatggttttagtc

SEQ ID NO: 24080 - DNA, 600 bp, Chicken  19866894237970_2
tctttccatttcctgcagtctgggttagttggcacttgtgcctgtagtatctttcttcttattttaataggaactgtcaccacttcactccttttcctgtttttttttctatttgacttgtcgaggttgggcctactgaaatcactcattctcattttgttcttgtcctctttccaaaggactgtgaactgttgaactcatggtcactcattcccgttcccacccgcgtccttgtagmtgacttccaaaatcacagccatgttttgaaactcataaaagtaaatgaaggcttgaagtgcrtatttgtagcgaaaaacgtttcccaacttgcgtgagatcactggtgcaaagtagagtagtcagtggccaaacagtttgaagtggttttgtactgcaccagtggttcacacgttcctggttgaggttgtacgttgctgactataamgacgtaataaaagtaaatgagaaatcttggggggcttctactactaatttcatcatgagagtgttactgaagtctgtataaatggttttagtcacctcttctttgatgttctttgtcaactactgcagctttttgtggtcctgccaagaggaaat

SEQ ID NO: 24081 - DNA, 600 bp, Chicken  19866894237970_3
tcattctcattttgttcttgtcctctttccaaaggactgtgaactgttgaactcatggtcactcattcccgttcccacccgcgtccttgtagmtgacttccaaaatcacagccatgttttgaaactcataaaagtaaatgaaggcttgaagtgcrtatttgtagcgaaaaacgtttcccaacttgcgtgagatcactggtgcaaagtagagtagtcagtggccaaacagtttgaagtggttttgtactgcaccagtggttcacacgttcctggttgaggttgtacgttgctgactataamgacgtaataaaagtaaatgagaaatcttggggggcttctactactaatttcatcatgagagtgttactgaagtctgtataaatggttttagtcacctcttctttgatgttctttgtcaactactgcagctttttgtggtcctgccaagaggaaataccgctgtgaaagcagtgtgaaaaatctagcagagcaggtagataatatatggaaatacatcacaggagttctgtattcagggctggcttgattgaaaacctgaggttgttggaatcctttctcagcctccaaaggaacgtgtgt

SEQ ID NO: 24082 - DNA, 600 bp, Chicken  19866894237970_4
gaaaacctgaggttgttggaatcctttctcagcctccaaaggaacgtgtgtgtaggtagctcttagaatatcttactggagtttaagttgctctttgaatatcttaaggatatcttaaggatgctctttgaatatcttaaggatgctttgggaaacgcttccagatacgcttagttcatggaactttggagagtatagatgccagaaagatggaatggatagtgagaggtggtctccataccatcacagtatgtgagaaaatcctcttaaggcccgaagaggtcgaccttgcttcagggracgagtcctgtgagtgttctgtcatgagttaatgyggatccatgactttactccctgactgctgggtgatgtcggagcgtggctgggaggaacgctgaccckgctggagtgygaagggaagagctsaggtctccatcctcactgagtgcttcgtgtgaatcttgatcacgtgggtgagaaacaaaaagctcagaaaaacttttatcgactcaaatggcttcttgcaagggtttgtatgaacttccccagtttcatagaggtttccttgcgtatggttttgttgtgtttttctttttcccc

SEQ ID NO: 24083 - DNA, 600 bp, Chicken  19866894237970_5
ccaaaggaacgtgtgtgtaggtagctcttagaatatcttactggagtttaagttgctctttgaatatcttaaggatatcttaaggatgctctttgaatatcttaaggatgctttgggaaacgcttccagatacgcttagttcatggaactttggagagtatagatgccagaaagatggaatggatagtgagaggtggtctccataccatcacagtatgtgagaaaatcctcttaaggcccgaagaggtcgaccttgcttcagggracgagtcctgtgagtgttctgtcatgagttaatgyggatccatgactttactccctgactgctgggtgatgtcggagcgtggctgggaggaacgctgaccckgctggagtgygaagggaagagctsaggtctccatcctcactgagtgcttcgtgtgaatcttgatcacgtgggtgagaaacaaaaagctcagaaaaacttttatcgactcaaatggcttcttgcaagggtttgtatgaacttccccagtttcatagaggtttccttgcgtatggttttgttgtgtttttctttttccccctgtcacaattatccggagttctcagggcaaggag

SEQ ID NO: 24084 - DNA, 580 bp, Chicken  19866894237970_6
cttaaggatatcttaaggatgctctttgaatatcttaaggatgctttgggaaacgcttccagatacgcttagttcatggaactttggagagtatagatgccagaaagatggaatggatagtgagaggtggtctccataccatcacagtatgtgagaaaatcctcttaaggcccgaagaggtcgaccttgcttcagggracgagtcctgtgagtgttctgtcatgagttaatgyggatccatgactttactccctgactgctgggtgatgtcggagcgtggctgggaggaacgctgaccckgctggagtgygaagggaagagctsaggtctccatcctcactgagtgcttcgtgtgaatcttgatcacgtgggtgagaaacaaaaagctcagaaaaacttttatcgactcaaatggcttcttgcaagggtttgtatgaacttccccagtttcatagaggtttccttgcgtatggttttgttgtgtttttctttttccccctgtcacaattatccggagttctcagggcaaggagaaatgggagtggggaagaagtgaggccgggttgatattaacagaaat

SEQ ID NO: 24085 - DNA, 570 bp, Chicken  19866894237970_7
tcttaaggatgctctttgaatatcttaaggatgctttgggaaacgcttccagatacgcttagttcatggaactttggagagtatagatgccagaaagatggaatggatagtgagaggtggtctccataccatcacagtatgtgagaaaatcctcttaaggcccgaagaggtcgaccttgcttcagggracgagtcctgtgagtgttctgtcatgagttaatgyggatccatgactttactccctgactgctgggtgatgtcggagcgtggctgggaggaacgctgaccckgctggagtgygaagggaagagctsaggtctccatcctcactgagtgcttcgtgtgaatcttgatcacgtgggtgagaaacaaaaagctcagaaaaacttttatcgactcaaatggcttcttgcaagggtttgtatgaacttccccagtttcatagaggtttccttgcgtatggttttgttgtgtttttctttttccccctgtcacaattatccggagttctcagggcaaggagaaatgggagtggggaagaagtgaggccgggttgatattaacagaaat

SEQ ID NO: 24086 - DNA, 556 bp, Chicken  19866894237970_8
tttgaatatcttaaggatgctttgggaaacgcttccagatacgcttagttcatggaactttggagagtatagatgccagaaagatggaatggatagtgagaggtggtctccataccatcacagtatgtgagaaaatcctcttaaggcccgaagaggtcgaccttgcttcagggracgagtcctgtgagtgttctgtcatgagttaatgyggatccatgactttactccctgactgctgggtgatgtcggagcgtggctgggaggaacgctgaccckgctggagtgygaagggaagagctsaggtctccatcctcactgagtgcttcgtgtgaatcttgatcacgtgggtgagaaacaaaaagctcagaaaaacttttatcgactcaaatggcttcttgcaagggtttgtatgaacttccccagtttcatagaggtttccttgcgtatggttttgttgtgtttttctttttccccctgtcacaattatccggagttctcagggcaaggagaaatgggagtggggaagaagtgaggccgggttgatattaacagaaat

SEQ ID NO: 24087 - DNA, 459 bp, Chicken  19866894237977_1
ggtgcaacattccactgaaattctgggaaatacccatctgatacaggtttctgcctcagtaaaaggactaaatcctgcacgggtgtcttagatacagtcttgtctgacttccatgtagtgaatacctaaatgtggtttccactttaaaattttatttatttttcctctcagtttatcatgcttcatattttggaagtgaatcactgacattcagaaaagtacaatttttactagcattgcttgaatcctagattgtcagctcaggtccacatgcactgagcaggcattacctttagaggyagtgctcagactctaaactcatcaaacaataatcctaggagttgtgcaaataaaaggcatagaaatatagataaataacatgtatgtgcattctcattattgtagactgggagcttctgtttattactgcaaacccaaaatgtacagggaaagactatg

SEQ ID NO: 24088 - DNA, 599 bp, Chicken  19866894237984_1
  misc_feature (1)..(209): n is any nucleotide
nnnnnnnnnnnnnnnnnnnnnnnnnnnnnnnnnnnnnnnnnnnnnnnnnnnnnnnnnnnnnnnnnnnnnnnnnnnnnnnnnnnnnnnnnnnnnnnnnnnnnnnnnnnnnnnnnnnnnnnnnnnnnnnnnnnnnnnnnnnnnnnnnnnnnnnnnnnnnnnnnnnnnnnnnnnnnnnnnnnnnnnnnnnnnnnnnnnnnnnnnnnnnnnnnttgctgttatctgatcttgcttgacttactgataaaaaaggttcaggaaacctcctgaggttagagttatgataccagcctgctccacttrgtccattttctacaaacccacatgcactatcaaggaaatcccaagtaattctttgtcataggaggacagaaagcattgcttgaagggagttgccagaagtggcttttctaatttaagggagtattaattcctacacctgggaatgcagtggcttttattcctgcagatgcttctccttatgtttttaccatgtgacaaagaattaccttgatactataaatctggtattttctgtctgaaactcgctgatacacaaaactctctaggtacacaatcatttaaaacagtggtatatagca

SEQ ID NO: 24089 - DNA, 600 bp, Chicken  19866894237984_2
ctaggtacacaatcatttaaaacagtggtatatagcaaagcccacagtcattcatgcatcccctggtgactgaatggactgggtacacccttttctgtttccattcttaatatggattggttgtgttctccgagatcaattcaacaaatccagtgaattaggacttcatgttcactctaatgcagaggacagtgatagatctcagccctgtgcccacacaggggtgaggggtgggatgtacccagaactggtgcctgctcctgcgtaatgtagtgcttgggcttcaggaatcacagctcrtcattacagcaatgcatctgggagagtcttcaaaactacagaacaacttgctcaaatgacattatgtatttccttattttataagcagtttcttcgtaagctgtgtcatggtgatgcatagaaaaaatactggttcagtataagttaatgtttattctcacaggtgtgcaggaggtacccttctgaatggaaagcatgatttatataacttaaaatacttccaaatgtgcagctttttcttacaagagatgctactgctgcttcctaggaggaagtgagtatttgctgtctcggtagtgc

SEQ ID NO: 24090 - DNA, 599 bp, Chicken  19866894237988_1
  misc_feature (1)..(251): n is any nucleotide
nnnnnnnnnnnnnnnnnnnnnnnnnnnnnnnnnnnnnnnnnnnnnnnnnnnnnnnnnnnnnnnnnnnnnnnnnnnnnnnnnnnnnnnnnnnnnnnnnnnnnnnnnnnnnnnnnnnnnnnnnnnnnnnnnnnnnnnnnnnnnnnnnnnnnnnnnnnnnnnnnnnnnnnnnnnnnnnnnnnnnnnnnnnnnnnnnnnnnnnnnnnnnnnnnnnnnnnnnnnnnnnnnnnnnnnnnnnnnnnnnnnnnnnnnnnttatataatacatttcagaatagaaatagatagaatttacagtttctayttttttgattatctgtatgaatatgaattaatcatttaagagattaatgaatggtaatctgtaggtaaatttattttccattatctctgaacagtttgtgttaatgtgtaatgtctcacattatgttgatttagattattaggatacgaataaagaattggaattatagttattcatatgaaataaaagaaaaagcagataaatttcagaacactgttctagcactgaagttgatgattacatttgaggttcagcttcacacaaaaattattgaagtcatcctataggcatgtcacagc

SEQ ID NO: 24091 - DNA, 583 bp, Chicken  19866894238012_1
gatttgcagctcaaggtacaagatagataactgtgacagttctgcatgttgcatgcacagtcacttccatatgcattttcacagtcaggatgattacctggcaatgaatgcttcctaacaatctgatctgcattaaaacaacaacaacaacaaaaagccaaaacaaaagctgtgaaaatttattttagtaattacaccttgctgcaacaatttgtgctatgctctttttcaaaagataattactactggaggtgtttatatctgtagctgattttaagcctaattatgaagtaaaattcragttcttgtgtattagacagggaccactgtggttctctttgacattttaaacggaaaaagttgtagccaactacatcatgccaccgaacaggtaaggcccttctggaaatgaactactgggaggacatgggggacatggaaaggtgagtgatcaaggctggatcatgcatctgcacaagaaacagactcctgaagccaaaacaatacaaacaccatgctcctgtgtttgcaggctgtggcgttcatttctttccatgtcctgtaactacaaaaaacttccagt

SEQ ID NO: 24092 - DNA, 600 bp, Chicken  19866894238014_1
ctttggcaattatgaactactcattagaaaatacatttaagaaactggggaaaggagaggaattacacttcaaatatataaaagtgcagcagatctgaaaaagtaaaattagagaaataatgtatttttttatgcctattctacggatttatttatttatttatttatttattctaaacagggaaaaccatggtataaattggggcacagaagcgtgaagtagaaacataataattctaaacttcactctaacgtgttatttcactgtcatttcctgagttatgaaccttcctttcctckctcttctcagttctgatggaaaggagataatgctgtaaagctttcagcactgaaaggactaattagttaatgtctgtaaaatgtgttgaaaaatgctgtgtgctgacaacattttagcatgttgttcacaaattaaggttacaggggaactgctgttaaccccctctccaaaccagcactgctttctagctcctgggtacttgcaggtggtttgcattacaactgcattggctgcatttatatttgtacccagagggcagtgctcagcccgttttgtctggttcagacctaggactgact

SEQ ID NO: 24093 - DNA, 572 bp, Chicken  19866894238017_1
tggaaaaccactctgaaagaagaatatgtcagcttttgacttttcatgacgtggatctgccaagcatgaaagttacaatacatcaacaaacaaaccgcctaaaaaataacctatggtatttttctctaaataaattattggagagagcaaggtgaaaaatttgagacatttcatatacgatagagaattcatttccatttatttgtagagcatactgctccatcaaagtctctgacatgttctacaaccaccacctctgaaaggaagataggttgttcctgaaaatccattcagtctctyttcttgttgctgaaactgccatacctgagatctgattgtgaaaatatggacatctatgtcattctgatgccataaattcagatacactgaaaacagtagtaatgtttttggaacaatctgaagtttattaagcccttttcctggaaaatraaaaaattaccttcagcatggccatatttaattcagcttcacagtcgatgagctgcatcactgtgtctctttgttcccgttgtctgaaattcttaacagcatcaactgtcaaatgcatttca

SEQ ID NO: 24094 - DNA, 422 bp, Chicken  19866894238017_2
ggtgaaaaatttgagacatttcatatacgatagagaattcatttccatttatttgtagagcatactgctccatcaaagtctctgacatgttctacaaccaccacctctgaaaggaagataggttgttcctgaaaatccattcagtctctyttcttgttgctgaaactgccatacctgagatctgattgtgaaaatatggacatctatgtcattctgatgccataaattcagatacactgaaaacagtagtaatgtttttggaacaatctgaagtttattaagcccttttcctggaaaatraaaaaattaccttcagcatggccatatttaattcagcttcacagtcgatgagctgcatcactgtgtctctttgttcccgttgtctgaaattcttaacagcatcaactgtcaaatgcatttca

SEQ ID NO: 24095 - DNA, 600 bp, Chicken  19866894238018_1
atcagtaattagcagagaagttcactggaaggctgaggctccaacccggagtctctgggagccgagccagaagctctttctccaggtatttcctccctccctgtccgaggaatccaaccacagcatgctttcgcttccatcaaagggctgccgaggcatcacgcctgctctgggctgtccctcttacagctgggtgtgctccccacatacccctaccaccaagttcctttgacaacctttatcaaagagcatagcaaatgcagaatggtgagagctgatgttggatgctgatgtgtcgtygtgctgtggtttggtaaacctggagctcttgcagttattcgttgggcaagaggggtgatttcttgttctggagagtctcccattaatttcagtcaaatctgctagtaaaattgcatacagactgagcgtgaaactcaaactatcattacaaaagcagtattttatgaaaacttgtctgcgtggaaatgtacattaatcagaaacaccttgacctgactttatgaacagcagaagggctctggagaggtgcaagctgaactcctggggtgcccataaggtattcagctctgggccttggca

SEQ ID NO: 24096 - DNA, 600 bp, Chicken  19866894238032_1
gctatgttcaaaattgaaacctacacactctaaggcaaaacatcctttgattttcagataagtacagctgcagatccctaaggcttcattgtagcacaacatttaggcatgtgtatataaatgatctcaagcctcatgtcaaaggcaataacaagtaagctctttcttttaacaggaatgagactaagactcttgaaaagcaagacagttgatgaagggaaagtatgttgctagagatgctgatatgaggtaccatccatcaccaattatatcaagctcacgtcagtgcagttacatccwtgcactgggaccctgcttttctttgaatgagaagtggagcgcctagaagatgcaactcttcccataacttatattcacagtgtacacatctctgtcagtgtaacagttacatgttcttcacgcagacctggcttcttgtatcagttaatcccctcttgctttgctatcagaaaattgtcatgtaggaacaaggaaagaggaatgctacaygcgctcagtgaagaggtcggtgactaaacatgttttaatgcagtttagactacatatctgagagtgaattatctcagtgctacaggatga

SEQ ID NO: 24097 - DNA, 600 bp, Chicken  19866894238032_2
gatgaagggaaagtatgttgctagagatgctgatatgaggtaccatccatcaccaattatatcaagctcacgtcagtgcagttacatccwtgcactgggaccctgcttttctttgaatgagaagtggagcgcctagaagatgcaactcttcccataacttatattcacagtgtacacatctctgtcagtgtaacagttacatgttcttcacgcagacctggcttcttgtatcagttaatcccctcttgctttgctatcagaaaattgtcatgtaggaacaaggaaagaggaatgctacaygcgctcagtgaagaggtcggtgactaaacatgttttaatgcagtttagactacatatctgagagtgaattatctcagtgctacaggatgagatcttccagagaagacagactgatttgctgaggtcactggaatgagcatttcctggaaggagacaactctgaaattcactccagtaatttctgtgaaccaaatttggaagtatactggcttgttttatttgccttgtcatttgcataaggcatgggaacgtattcagcgagcctaggcccagataagtaaaagaacaaattctaactta

SEQ ID NO: 24098 - DNA, 600 bp, Chicken  19866894238032_3
tcagtgaagaggtcggtgactaaacatgttttaatgcagtttagactacatatctgagagtgaattatctcagtgctacaggatgagatcttccagagaagacagactgatttgctgaggtcactggaatgagcatttcctggaaggagacaactctgaaattcactccagtaatttctgtgaaccaaatttggaagtatactggcttgttttatttgccttgtcatttgcataaggcatgggaacgtattcagcgagcctaggcccagataagtaaaagaacaaattctaacttacagytctcagaagataamagtccatatatagatgatgatacaacagattaaatagtggtaactaaatagtgtctgcagttaattaacttgcaatgtttgagatgtttcctgtaatagctttaaggaaacgagcccagaacagttgacattttatccttatgcataactaaattgtaacacaaattagagctctccctaccaggggaaaagtagcaataagccctagctgtgccaggaagctccaatggcctctgcctttgaacagaacactaaaaggactcttctgcaacaggagcctgaactc

SEQ ID NO: 24099 - DNA, 600 bp, Chicken  19866894238032_4
ggtgactaaacatgttttaatgcagtttagactacatatctgagagtgaattatctcagtgctacaggatgagatcttccagagaagacagactgatttgctgaggtcactggaatgagcatttcctggaaggagacaactctgaaattcactccagtaatttctgtgaaccaaatttggaagtatactggcttgttttatttgccttgtcatttgcataaggcatgggaacgtattcagcgagcctaggcccagataagtaaaagaacaaattctaacttacagytctcagaagataamagtccatatatagatgatgatacaacagattaaatagtggtaactaaatagtgtctgcagttaattaacttgcaatgtttgagatgtttcctgtaatagctttaaggaaacgagcccagaacagttgacattttatccttatgcataactaaattgtaacacaaattagagctctccctaccaggggaaaagtagcaataagccctagctgtgccaggaagctccaatggcctctgcctttgaacagaacactaaaaggactcttctgcaacaggagcctgaactctcatcttcagatga

SEQ ID NO: 24100 - DNA, 599 bp, Chicken  19866894238037_1
  misc_feature (1)..(16): n is any nucleotide
nnnnnnnnnnnnnnnnttatagcacactgtattaatttaaaatgtctgagaaaactgaattcaatctaaatgtgcaatcaagctttctgctatgaccatagcatccctcaaattggttattaagatgtttctaactagtcttactgtttccctaacaatgtgtagattcttgtcctccacgtacagatgtatttcatttggcttttgtttgttagtaggaagatcttgaataaatccattttagagtacttttacttctgagcttagagcaactgaacccatctctcaaacaggatacayctttattcaaataagaaatcctccctttttcgtccacctgccacctgtattcagaagtatgacatcttactgctctacaagatggaggtatatagagcaattacacttcccatagctttttaaaaatattggatagcatgataactcccattctgcctttaaaagtacatttgataaaatattaacaaattgttgaacaaggcccttccaatttctgatatatcttttctttattcttttggagaaactgaaacacagagcattacagagtcttgcctgaagagagaaagcaagtccaa

SEQ ID NO: 24101 - DNA, 600 bp, Chicken  19866894238037_2
ataggaagttattgataatgatgatgatgatgattttggatccaacagttactgttgcaatcatcagactctttttcaaagtatggaatctgagataaagatctcaaatagacacccagtagagagagtgggaacagtgtgatagaagtaactgtaagagaaacaacactgtggatacataagtgatattggatctaattctagggtagcctgtctttggaaaagattgttcatttatttattcacaaggtttagatttgatggtctatcttttgggttcatgggaataagtatgagagyaagccctgcgatgcagaacaattttttatgcagaaatctgtattaacctcagcttattaattttttgctatacacaaagcacttaggaaaagacagtttgtaatttctgcaataacagtgaaggcacatccaatccatctcattatttcttccagttaagggtaattcatgcaaactaatgggccagtctagcacccatgagcatcttagtgtggatctaggcatacgagttaccaagagacttcaggaaatttttgcaagagaggctccccaacagaacaagcattctccagtgttttc

SEQ ID NO: 24102 - DNA, 600 bp, Chicken  19866894238039_1
gcttaaagtgatgccagactgtatgatgtgtgtcccattctttgggattaatgagcagctaccattacattttaatcacttatgggttggcacatatacagcaaaatgaaaatgctggggaagaaatacagcttaaaacaagtgctatttactaaagagataattgcttacatgcagcctcaggtggaggtactacggcggctgtttttaatcagttgttcatacatatgttctcctcctgatgcatctatgggaccatcttgctgtgaccatgactgattacacacaccaaccatgcaytgcttttcattataaaccagctacagagcaaagaaatgctgatagagtgaaggctggagttctgcagggctctgagtctgtcaaagtagcgcagctgaagtctcccatctcgtttagacctactgaactttaacttcctctgtagcaccttcttcagtggtgggtgcctccatggaccaggtactsrtgtctttgtttttcaccttctgtgctccctctgggtttgttctttgtttccagtgctcaggctttggatctggggttgcttaaggcagacatttgcatctgttagaatatatg

SEQ ID NO: 24103 - DNA, 600 bp, Chicken  19866894238039_2
gaggtactacggcggctgtttttaatcagttgttcatacatatgttctcctcctgatgcatctatgggaccatcttgctgtgaccatgactgattacacacaccaaccatgcaytgcttttcattataaaccagctacagagcaaagaaatgctgatagagtgaaggctggagttctgcagggctctgagtctgtcaaagtagcgcagctgaagtctcccatctcgtttagacctactgaactttaacttcctctgtagcaccttcttcagtggtgggtgcctccatggaccaggtactsrtgtctttgtttttcaccttctgtgctccctctgggtttgttctttgtttccagtgctcaggctttggatctggggttgcttaaggcagacatttgcatctgttagaatatatgtgtgcatatggctttggcaagatcaagacccaaagcacaaaatttcagtgaagagtgatggttttggggttcacttaatgttttttttttaacagatctgctttgtgaaaataggcctaagactgtgagaggtgttttatgtacatgcacagcactctctgttgccatacatgcagtaagtactga

SEQ ID NO: 24104 - DNA, 600 bp, Chicken  19866894238039_3
aggtactacggcggctgtttttaatcagttgttcatacatatgttctcctcctgatgcatctatgggaccatcttgctgtgaccatgactgattacacacaccaaccatgcaytgcttttcattataaaccagctacagagcaaagaaatgctgatagagtgaaggctggagttctgcagggctctgagtctgtcaaagtagcgcagctgaagtctcccatctcgtttagacctactgaactttaacttcctctgtagcaccttcttcagtggtgggtgcctccatggaccaggtactsrtgtctttgtttttcaccttctgtgctccctctgggtttgttctttgtttccagtgctcaggctttggatctggggttgcttaaggcagacatttgcatctgttagaatatatgtgtgcatatggctttggcaagatcaagacccaaagcacaaaatttcagtgaagagtgatggttttggggttcacttaatgttttttttttaacagatctgctttgtgaaaataggcctaagactgtgagaggtgttttatgtacatgcacagcactctctgttgccatacatgcagtaagtactgaa

SEQ ID NO: 24105 - DNA, 600 bp, Chicken  19866894238052_1
gaccccgatagtgaaatctttattgttattagtcccaaggataaagtcctttgcacctcattgtatgcactaggccttgggcataatcactaggctgggtggagatgggacaaggagcgcagcatcacacctacaaaagctagtttaacagatgaggagtaaatgagtctcactggatctccatgcagcttttggttcctgaatagttcatctgcagcacagatattcactaagtgactcgggagtttgtgttgcatttttaaatttgcttcaggcacttcagcaactcagtctaattgmaagacaatgggatttgatattgcaagtgttgaagtactttaaaaactcaatctgatacatatttcaaattcatccttaaaaaagcctcctcaaaagacttaaaaatgtaaaactttctctaatagatttgggttactgtttaaattttctaacttgaagtgttttttagcctttggcacaagaatatgaacatgaatatgatggctgaaagtcaaaggaactccaaacggaattgaaattgaacttgtcagaataaagaggactgaatgaaaacattcaaaacacagagagtataaagag

SEQ ID NO: 24106 - DNA, 600 bp, Chicken  19866894238053_1
aaacagttaatttcagaatacactgaggttatgacgaggatgacatgggagctcagcttttccttggagaaatttgcatgcactccgaatttacgggaaagtcattgatgtcatggaagtagggcacattcataatttgctgaattacacatcttggttcatgtcctttcattaaccaaatgacatttttccatatgctataaaaagcatatatttaattttgttcaggaagtaggactcatttttgaaacactaaaggagtaatctttcctcttttctttttttgccacctgagaacarccctgtctgaaaatcaggtgcttagaacgagctttcaaaattgactttcaaagtcttraattactttatgaaagttaatatgtattgatgcatgtcagatgattttgatttcactttaagaataaagatctaattagggagagagtaagcttagtagtgtttgtgtagtgtgtgtaaggaacagctgttggtcagccccaataatctgtccttctgcattaggaatgcagttgcaaatgatgaatttgaggaatggttataattttctatctcaattcatctgttctaacctcagtcaga

SEQ ID NO: 24107 - DNA, 600 bp, Chicken  19866894238053_2
tttccttggagaaatttgcatgcactccgaatttacgggaaagtcattgatgtcatggaagtagggcacattcataatttgctgaattacacatcttggttcatgtcctttcattaaccaaatgacatttttccatatgctataaaaagcatatatttaattttgttcaggaagtaggactcatttttgaaacactaaaggagtaatctttcctcttttctttttttgccacctgagaacarccctgtctgaaaatcaggtgcttagaacgagctttcaaaattgactttcaaagtcttraattactttatgaaagttaatatgtattgatgcatgtcagatgattttgatttcactttaagaataaagatctaattagggagagagtaagcttagtagtgtttgtgtagtgtgtgtaaggaacagctgttggtcagccccaataatctgtccttctgcattaggaatgcagttgcaaatgatgaatttgaggaatggttataattttctatctcaattcatctgttctaacctcagtcagagaccaaagtagtaattgttgttattcctagtcgaatgatagagattgctgtgctcaat

SEQ ID NO: 24108 - DNA, 600 bp, Chicken  19866894238056_1
tttctgaacttaagcagtgctagactgaaagacagacgaaacctctctgccctccttgactcatgcccccaaagcattgctccccataactggactgggtttgtaaggatattttccatcggcattattttcaagagacaaatgacagctatccaacaagctgggtaaaacagtcactgtttgagttgactttctttctgcgtgtttcttcataaaacatagatgtatttcttttttttccatgtccaggatgaaacattagctaagatcctacagctgttactggggatacatccaccrttgttgagaacgcatactcccatgacatttattaatgttgctgatatcatcaaggcatgtgagcaataggaaagtgggcagacgagataggaaaccrgcatggctcggcaaggacctgctgggcacactgagggcgaagaaaggtgcgtacaagctctggaaacaagggcgtgtcacctcggaagagtacagggatgctgtccggacttacaaatgtaggatcaggaaagcaaaggcgcaggtagaactgaacttggcgagggatgtgaaaaacaataagacattctacaggtacattgg

SEQ ID NO: 24109 - DNA, 600 bp, Chicken  19866894238056_2
ggtttgtaaggatattttccatcggcattattttcaagagacaaatgacagctatccaacaagctgggtaaaacagtcactgtttgagttgactttctttctgcgtgtttcttcataaaacatagatgtatttcttttttttccatgtccaggatgaaacattagctaagatcctacagctgttactggggatacatccaccrttgttgagaacgcatactcccatgacatttattaatgttgctgatatcatcaaggcatgtgagcaataggaaagtgggcagacgagataggaaaccrgcatggctcggcaaggacctgctgggcacactgagggcgaagaaaggtgcgtacaagctctggaaacaagggcgtgtcacctcggaagagtacagggatgctgtccggacttacaaatgtaggatcaggaaagcaaaggcgcaggtagaactgaacttggcgagggatgtgaaaaacaataagacattctacaggtacattggccagaagagacaggccaaaacaggtgtaccttctttagtaaatttaaaaggagaactggcttcaacagacaaagagaaagctgaggtactgaatgag

SEQ ID NO: 24110 - DNA, 600 bp, Chicken  19866894238056_3
aagggcgtgtcacctcggaagagtacagggatgctgtccggacttacaaatgtaggatcaggaaagcaaaggcgcaggtagaactgaacttggcgagggatgtgaaaaacaataagacattctacaggtacattggccagaagagacaggccaaaacaggtgtaccttctttagtaaatttaaaaggagaactggcttcaacagacaaagagaaagctgaggtactgaatgagttctttgccttggtcttcactggtggccaggattccagtctttctcacgtccctgagctctgcaccyccaagcctccaggtggggaccaggggggtaaatctccccccactgtwagggcagagcaagtccgagaccgcctcatgagactggatgagtacaagtcttcagggccggatggygtgcatcccagggttctgaaggagctggctgaggtggttgctgagccactctccatcatatttgagaagtcatggctgtcaggcgaggtcccagatgactggaggaagggttacgtcactcccatttacaagaaagggagcaaggaggacccagggaactacaggccggtgagtctcacctctgtgc

SEQ ID NO: 24111 - DNA, 600 bp, Chicken  19866894238056_4
aaatgtaggatcaggaaagcaaaggcgcaggtagaactgaacttggcgagggatgtgaaaaacaataagacattctacaggtacattggccagaagagacaggccaaaacaggtgtaccttctttagtaaatttaaaaggagaactggcttcaacagacaaagagaaagctgaggtactgaatgagttctttgccttggtcttcactggtggccaggattccagtctttctcacgtccctgagctctgcaccyccaagcctccaggtggggaccaggggggtaaatctccccccactgtwagggcagagcaagtccgagaccgcctcatgagactggatgagtacaagtcttcagggccggatggygtgcatcccagggttctgaaggagctggctgaggtggttgctgagccactctccatcatatttgagaagtcatggctgtcaggcgaggtcccagatgactggaggaagggttacgtcactcccatttacaagaaagggagcaaggaggacccagggaactacaggccggtgagtctcacctctgtgcctgggaagatcatggaacagatcctcctggatgacatgctcgatcac

SEQ ID NO: 24112 - DNA, 600 bp, Chicken  19866894238056_5
aagacattctacaggtacattggccagaagagacaggccaaaacaggtgtaccttctttagtaaatttaaaaggagaactggcttcaacagacaaagagaaagctgaggtactgaatgagttctttgccttggtcttcactggtggccaggattccagtctttctcacgtccctgagctctgcaccyccaagcctccaggtggggaccaggggggtaaatctccccccactgtwagggcagagcaagtccgagaccgcctcatgagactggatgagtacaagtcttcagggccggatggygtgcatcccagggttctgaaggagctggctgaggtggttgctgagccactctccatcatatttgagaagtcatggctgtcaggcgaggtcccagatgactggaggaagggttacgtcactcccatttacaagaaagggagcaaggaggacccagggaactacaggccggtgagtctcacctctgtgcctgggaagatcatggaacagatcctcctggatgacatgctcgatcacatgaggaatgagcgtgtgatctgagacagccagcatggcttcaccaggggaaggtcatgcttaacc

SEQ ID NO: 24113 - DNA, 600 bp, Chicken  19866894238066_1
cgctttccttgcacgttaacccctggcagctttccagcattgttctctgagaggatagagcagtgctttcactgctaattctgcagagatttgagtgatagcgctggtagaggttagggactgcagctggagcagcttcaggttgcagtgcctttccattaacatacatattccttgcttgctgaaggtaactgctgccagtgttggccatcacggttcaggatctccgttctgattcacttctctgttgtacaactgctgctgaaatgtgagtgctgaaaccctagcaaaaattccctstgttgtcagcactacgcagatgattctaactgtgtaatgcaaaggctccaggtaaattcaccattaaagccctgaccagccaacattgtccaccagcacatttctgacaagcatcacagtgtaccttcgtatccagactcttccttctctttgcttatcatctaacttttgctattgtaatgctgggttttcataggatttcccaaagttggcttcatgtgctgtaagagctatggttgagctgtgctgttggatctgcgatctgaattgtgttgctgtgcaacgacttgtgatactgga

SEQ ID NO: 24114 - DNA, 600 bp, Chicken  19866894238069_1
cacatcattgcaagacatcatgccaaagtcgtaaatcacagcttaatttcattttacaaatctcagttcatctctttcctgacgctcaattttccattacgtttgtagcagccttcacactgccacatcccagcggaccccaacagcgtagcagttgacatgtatcaaagacagctctgccacacgttacagatcacagtcacagattctaacgccacattttactattgaataattttcattcagacaagcatactgtattctctaaaaaatactcccgaaaaaacaacagatttcgcrctgcaagaccttaagttttggttcagaaataagtatttcaaccagcaaagactacgaagtctattaagactcaacctctaayaaaaggttctagcaaaggcatctgatcacagtcttttaaatctactckaggaagaaaaaggctcagcaagcaagcacatttacaagaacacgactgccctatctgttcaaatggcagatattctatcaaggcaaaattattcaaaatgaaaatactgtatgctgtgcgaggcacggtcagcagatcttccatccactgcataaaacagttgggatgtg

SEQ ID NO: 24115 - DNA, 600 bp, Chicken  19866894238069_2
cgctcaattttccattacgtttgtagcagccttcacactgccacatcccagcggaccccaacagcgtagcagttgacatgtatcaaagacagctctgccacacgttacagatcacagtcacagattctaacgccacattttactattgaataattttcattcagacaagcatactgtattctctaaaaaatactcccgaaaaaacaacagatttcgcrctgcaagaccttaagttttggttcagaaataagtatttcaaccagcaaagactacgaagtctattaagactcaacctctaayaaaaggttctagcaaaggcatctgatcacagtcttttaaatctactckaggaagaaaaaggctcagcaagcaagcacatttacaagaacacgactgccctatctgttcaaatggcagatattctatcaaggcaaaattattcaaaatgaaaatactgtatgctgtgcgaggcacggtcagcagatcttccatccactgcataaaacagttgggatgtgaggatccatccaacatcacacaaaaagagagcaaagatgagaaaggtaatgaaaccaaatctgtgatgaaaccaaacacctg

SEQ ID NO: 24116 - DNA, 600 bp, Chicken  19866894238069_3
cagcggaccccaacagcgtagcagttgacatgtatcaaagacagctctgccacacgttacagatcacagtcacagattctaacgccacattttactattgaataattttcattcagacaagcatactgtattctctaaaaaatactcccgaaaaaacaacagatttcgcrctgcaagaccttaagttttggttcagaaataagtatttcaaccagcaaagactacgaagtctattaagactcaacctctaayaaaaggttctagcaaaggcatctgatcacagtcttttaaatctactckaggaagaaaaaggctcagcaagcaagcacatttacaagaacacgactgccctatctgttcaaatggcagatattctatcaaggcaaaattattcaaaatgaaaatactgtatgctgtgcgaggcacggtcagcagatcttccatccactgcataaaacagttgggatgtgaggatccatccaacatcacacaaaaagagagcaaagatgagaaaggtaatgaaaccaaatctgtgatgaaaccaaacacctgctagcagatggctgggatctcaaccaaaaaataagtatgctcaaatta

SEQ ID NO: 24117 - DNA, 600 bp, Chicken  19866894238070_1
ttttcatttatcaatattgaattttttctgcattggctttgacctagattattaagctgtttgataaatccttattgttatctcaggactaaagaagccttaataactttaattctctgtaaatttaagtaccttatttaatttgaatttattaagcataccaagcatgagattttgtcatctttggacatcatcactgctttgtcagaataaaaaatccgaacaaatttgaagattttagaatagaattataagaaaaatctcaattctttcatatctcttctaccaaagcacaatctsctgtggtatttggacacatgcatttggggactaaatgaatggccgttttctggcattatacttatgagatcctaagatggactttccagyctggtttggtgaatttagagtggtcttgtcagcagtcatccactgctatgattttcaatgaagtgatcttagtgtgggtttcacctctgaactgtaagtaacataaatgagtcatgataacagagatttattccatgttctctcgtatcattttttttttccagactgactgacaaatattattcagaaaccctagagagcagatttgga

SEQ ID NO: 24118 - DNA, 600 bp, Chicken  19866894238070_2
aaagaagccttaataactttaattctctgtaaatttaagtaccttatttaatttgaatttattaagcataccaagcatgagattttgtcatctttggacatcatcactgctttgtcagaataaaaaatccgaacaaatttgaagattttagaatagaattataagaaaaatctcaattctttcatatctcttctaccaaagcacaatctsctgtggtatttggacacatgcatttggggactaaatgaatggccgttttctggcattatacttatgagatcctaagatggactttccagyctggtttggtgaatttagagtggtcttgtcagcagtcatccactgctatgattttcaatgaagtgatcttagtgtgggtttcacctctgaactgtaagtaacataaatgagtcatgataacagagatttattccatgttctctcgtatcattttttttttccagactgactgacaaatattattcagaaaccctagagagcagatttggacatttttttgttgagctttgagtgggtgctgattaagggctctgcctgagccctacattcttttgcagttgcttttgaaatgccaggaaa

SEQ ID NO: 24119 - DNA, 580 bp, Chicken  19866894238071_1
attttcatccttaagaagtctggttagtaattctgacacctctcaatatttttctttcacttggaaagtcttctggaaatagttgtagaaaattggacataagtacttggttctgaccagagccaatattctgtccagaatattgaagcatgtaagcatatctatttaaggaattattggatgggactgtctgagaaccagtcttcggggagacaggaatggaagagagctggcagctctttaaggacagctttctgagagaacaagcatctccatccctaagcataagagatcaagtgraggagtcaggaaatcagcatgattgagcgagtacctgctggtcaaattgaaggaaaaaaaggaaatttataggcagtggaagcagagatggtgtggcctgtgaagaatatagggatactgtttagacatgtaaagatgaaaccatgaaaggcaaggtgcagataaagctgaacttggcaaaggatgtgaaaaataataagggattctacaggtacactggttagaagagacatactaaggcaggctgtgccccctttgataaatgaaaagggagaactgt

SEQ ID NO: 24120 - DNA, 600 bp, Chicken  19866894238073_1
tctataccagccttctcttcttgcaaatgaagacggcttttgtcatcccaaatacctgaagtgttcttaataataataatgagatccctggatgccaaggagagattcttttctttttgcttccaaatcaaagggcctactctgcttgcaaagagcatttcagattaacatacccaaactgtatttccgatacgtgaacttccaatgtttattccttctctagtaagcatctcaaaaagaaaacaaataactgggagcagacagcatctgctgcaatacccaaaactgagttccatgagygtayacaagtaccgtgtttcatgttgatgagggctgatttaaagccctgcaatgggcacctgcagcagacctggtttcctgcagcatagggccgttcgtcctgcgtgagccccagctcctctcagccagcccctgattatcaccagacaaaaataaagcactgctctggcagacaggcactgcctcagctggctggggccgtggagctgggtttgggcagctccttcgagctgtgccccgcaagaggcagccacacagggataactttacccagctcccccagcctgcaccaaagtcatg

SEQ ID NO: 24121 - DNA, 600 bp, Chicken  19866894238073_2
taccagccttctcttcttgcaaatgaagacggcttttgtcatcccaaatacctgaagtgttcttaataataataatgagatccctggatgccaaggagagattcttttctttttgcttccaaatcaaagggcctactctgcttgcaaagagcatttcagattaacatacccaaactgtatttccgatacgtgaacttccaatgtttattccttctctagtaagcatctcaaaaagaaaacaaataactgggagcagacagcatctgctgcaatacccaaaactgagttccatgagygtayacaagtaccgtgtttcatgttgatgagggctgatttaaagccctgcaatgggcacctgcagcagacctggtttcctgcagcatagggccgttcgtcctgcgtgagccccagctcctctcagccagcccctgattatcaccagacaaaaataaagcactgctctggcagacaggcactgcctcagctggctggggccgtggagctgggtttgggcagctccttcgagctgtgccccgcaagaggcagccacacagggataactttacccagctcccccagcctgcaccaaagtcatgggat

SEQ ID NO: 24122 - DNA, 599 bp, Chicken  19866894238075_1
  misc_feature (1)..(51): n is any nucleotide
nnnnnnnnnnnnnnnnnnnnnnnnnnnnnnnnnnnnnnnnnnnnnnnnnnnccatccgctatgcattttcatcagccatgaacaagacatgtttgtaaaatctgtaccagcagaggtgactccccgttgctgtcaccgtggctacacagaaccaccaaccattcactgtgctgatatccactgtttggtccccataaacattcagcaggcgtcagtgaatgtcaatgggtgccattttttcagcatggaagaattcagtgacatgcctattttttcatactcgctttcacatcagatgcytttctgtcagactgtccctctactgccatctgtctcactgcaacaaaatgtaacagaatactgttaggaaggttcagcctctgctgctatgccaccaacatttgcctttgatgctgtgggcctacatagtgaaacaggaggcaytactttcagagcagcttttgtaacacatgcgtgttctaaaggtaagtttctgttgtgtgtgaataagaaaactatcttggaaatggtattctaaggcacaaaactgagttcaaagttggtcgacataattctgaggttaggacttaacttctgaa

SEQ ID NO: 24123 - DNA, 600 bp, Chicken  19866894238075_2
cacagaaccaccaaccattcactgtgctgatatccactgtttggtccccataaacattcagcaggcgtcagtgaatgtcaatgggtgccattttttcagcatggaagaattcagtgacatgcctattttttcatactcgctttcacatcagatgcytttctgtcagactgtccctctactgccatctgtctcactgcaacaaaatgtaacagaatactgttaggaaggttcagcctctgctgctatgccaccaacatttgcctttgatgctgtgggcctacatagtgaaacaggaggcaytactttcagagcagcttttgtaacacatgcgtgttctaaaggtaagtttctgttgtgtgtgaataagaaaactatcttggaaatggtattctaaggcacaaaactgagttcaaagttggtcgacataattctgaggttaggacttaacttctgaatttagaatggtttgtggtgctgaagaacacttacacaggtaagaatttttgctgctattttgaaaataagctatgctaaaaatctgaagaattgagtgccataaaaaactcatattcatttaatttattacaaatgcatatcatc

SEQ ID NO: 24124 - DNA, 599 bp, Chicken  19866894238078_1
  misc_feature (1)..(5): n is any nucleotide
nnnnnaagcataggaattctttatttgtagatcaagtctggcagaagggctgtgttattatttcatatcttgcagactaaagcacgtacagtatgcgcgagtgaaatttattttccttttctccactgtcatttgtgtcacaataaactttagtttctcctctaaattatttccttctctataatttccctgggtgactcctggactctgaagtgctcctagctgcaaaactaccaataagagtattttgaactctacttattcacaagaaacttgcaatcctcacatcccacaaacgcygtatgtgctgtaagatgaaaggagcttactctgctttcatcatgtcctgctcatttcctcaaactagaatttctcctcattcaagtgtgtctccatttctttcttgcccactccagaaatgaaaagaatttcacatggccacatactgaactgaacggtaattctgcagcagaatttgatcactacaggaacaagggaatgaaaacacacaacggtggaaaaaacctttgcatcacaaaatgttacagcttttgtagataaatggtatgaaaggcttcggcactgtactccttaaaaaa

SEQ ID NO: 24125 - DNA, 600 bp, Chicken  19866894238078_2
caaactagaatttctcctcattcaagtgtgtctccatttctttcttgcccactccagaaatgaaaagaatttcacatggccacatactgaactgaacggtaattctgcagcagaatttgatcactacaggaacaagggaatgaaaacacacaacggtggaaaaaacctttgcatcacaaaatgttacagcttttgtagataaatggtatgaaaggcttcggcactgtactccttaaaaaattcatcacagctttgctgtagagcattaaatagcaacgtgaggcataccagcaacgcgtrggatgatcagcacttcatggatggatttcagttttgcactggaaaccaaaaaaaaagtaaaataaaaacaacaaaaaaagtaaaataaaaaaaaggagaggacgtgggaatagactatgctttcacatgtagtaaacatgggtattctgtcctatattgaaaatgtcagcacaagattttcttttgttataaatacccgatagcctagaatgcctttcataaattttgctagaaatttattaagtgtctgctgtagttgtagcgttctctagcatcatgtgttggatttcccaaaaatac

SEQ ID NO: 24126 - DNA, 600 bp, Chicken  19866894238080_1
cacataattaaagtccagaggaatcatcagaagactagggaaaccaaggaatatgccagcctctaggacatgatgatgggttgccattggtctgaacaatttactccatccatgctttatctttgtcctaaattcatgttgctatatggaatctaaatgcaaaaaaaagtgaggatacttagatgtggctgcaggagagaagtactggggagaaatggagaggacggaaaggaagtgagaatgaagacacttgcaagcagcatctcaaacaaagagcttttggatgaaattctgtaagasacttgttagctgaggtagcatagttcttagtagcatagtttttagacttcaaaaaactcatcattctaactacagattaattatacaggtggagcctgacagcaggaacttgacagcttgacaaagactgggacatgatgaaatgaatgtgatataatcaaaaaaaagaaaaaaatggaatctaatacgcatctttttcccctacttccccaattgaaggatggcttgagacrtctcaaaaatattttactaaactgaacacaaagccacgggcagcaccatccatgtttgaaggagaaa

SEQ ID NO: 24127 - DNA, 600 bp, Chicken  19866894238080_2
agtgagaatgaagacacttgcaagcagcatctcaaacaaagagcttttggatgaaattctgtaagasacttgttagctgaggtagcatagttcttagtagcatagtttttagacttcaaaaaactcatcattctaactacagattaattatacaggtggagcctgacagcaggaacttgacagcttgacaaagactgggacatgatgaaatgaatgtgatataatcaaaaaaaagaaaaaaatggaatctaatacgcatctttttcccctacttccccaattgaaggatggcttgagacrtctcaaaaatattttactaaactgaacacaaagccacgggcagcaccatccatgtttgaaggagaaacctataacatgtttacaacacagttttctagaacacacttcaaacttttctaaattttcaggactgattaattgcagccataattctctgtcttcctacagagtatataacttgtcttacataaaaaaaaattataccatggtaaatacaatcccatgtataatccacagtgttttaaaacatgtccagaatgcaaccttctgctttatagtacatactcacaaaaacaaagg

SEQ ID NO: 24128 - DNA, 600 bp, Chicken  19866894238081_1
atacactgaagatgcatctctgatcaggagcaatgaccgattacagtatgtccagtactgatatttactgctgttgtttgctttgttgtttgaaatttgaaaatgggcagctgtacacctacatcaggactttttccattttcctacaacccatcagagattcaaatgctggactggctgtcaccaaccagtgacagaatttgcaccagaaatactgaagtggagcttgtaagtgaccgcttgtggcagtaccgtggagaacagcatcacagagcagagtcagaccaggtaagattttcraatctaactttgtaaagaatggaagggaaacagtgctctttcagcaaaacaggaaagtgaaataaaataagaagtctctctcctaccacacggtaacttatgccccttccacctgctacagaacctaacctgtaactaagagtgattttagaaaaccagtgccttgagcagaaagcggtaataagtgggaactgcattaactgactgctttcctctattcttggcaattatttatagtgctcaaactatttagagagtatcgttaacattcctagtaatgtttttttcttaatatgcttt

SEQ ID NO: 24129 - DNA, 600 bp, Chicken  19866894238089_1
cagaacagacaaacatagataagtcagactacaaaatgagttgtcaagtatgacttttttttttttaaaggcgtatggcctagcaaatacattttaaggtgctgcacagagaagaaacaaaatggatgaaatatgaacttctgaaaatcaagaatgtataacaacttgcctcaaacaatccttatctttggaacattatatctgtacagataaaccaaaaatttcaataaataaatagttccttcaagcagtgttaacttgatcatgttttaacagcaactatgatatccaattaagcawttccattcagaggtattatcaggctttatatcactggtatacaatagacctgcaaggtatgtgtctttagttacaacctaggttctgaaagattcactgcaagtctccaatataaaatacaagagaaaatgaacaatttagaacatcaaggaatagcaaaatgtgaacaggctattaggctatcactggataacacattttactactgatttgttttttcacagaatgcatatccatamggaaagaaaatgacttcaatagctctcttcaaaaggcggcctgaatttaactttgtgcaac

SEQ ID NO: 24130 - DNA, 600 bp, Chicken  19866894238089_2
tccttcaagcagtgttaacttgatcatgttttaacagcaactatgatatccaattaagcawttccattcagaggtattatcaggctttatatcactggtatacaatagacctgcaaggtatgtgtctttagttacaacctaggttctgaaagattcactgcaagtctccaatataaaatacaagagaaaatgaacaatttagaacatcaaggaatagcaaaatgtgaacaggctattaggctatcactggataacacattttactactgatttgttttttcacagaatgcatatccatamggaaagaaaatgacttcaatagctctcttcaaaaggcggcctgaatttaactttgtgcaacagagtaaatttaaagataggtgatttcacctcagttttgtgaagtttttggtaatttccattccaagatattaactttcggtcttttccacctcctgacactagtgtgccatctcgcagcatgcagagtgcaaatattccaccctcatgtgccccttgaactgcatggcttattctgttggtgcctggatataaggagaagagacacagcactagtgaaacattcagcttaatagctcc

SEQ ID NO: 24131 - DNA, 600 bp, Chicken  19866894238091_1
aacataccacaacatgtcattcaaatctttagacattatccacgccagatcaaacatcaccatcgcagactacatgaaaggaaagcaaaaagagagggtaaatgaatacaaagctttcacttcattatgcaaccagaaaacttaaatttgccaattcaggcactacaagtcacacttgagtgtgacaatctaccagcatctaactttaaaacatcaagtaaacagaaaagtattttataaagctctgcaagtctgcatttcatttgtaacatctgaaatattctgacacattcaaaactkagaaaggcaaacaagctccccatgtcttaaagtctttttgcaaaagtattcttgtgcatagagatacttttaccaaaatctaaaaaaaaataaaaaaaatccactattagattttctatactaggattaaaggtatcaagcaacaaaagtgttaatagttctgctccaacctttttctcccactgttaacactgtattactctaccgtgcagttggcaatacctccccagtctactgggatgtttctgggacatctctaattcattaacaggaaaaacagatgtacgcaaccagaaaact

SEQ ID NO: 24132 - DNA, 600 bp, Chicken  19866894238091_2
tgatacttaccgaggtcccatggtactcgtattgctcgtaatcaaaaagaatttcacgtctaaaagtggaagaaataagtgtgactaagtgaaaaaccagacttatccaattcaaaatataaacctgagctgtgaaataatttcatttcattttagcaataagaaaaacatataattggaaaaaaatattagatccttgattcctcacattgtttttttttcctgatcatttcatttaaaaatactgagattacaaagaaagaggttcaaatttcatcctaagatagacaagctaatagygctgcttaacagtgaagctctgcaccttttgctcttcttgtttataaacaattatttacaattattgtccatataaacgttttagtttttggtgtatatatatagtaaatacatccttcaattttctgaaaaagataaaactaaaacatattgcaaacaaaggactgtagtactaaaacgtacaaagaaaaggacagacatacacaacacaaagagaccccgcagctcacctgcgtgcctcccattctcgtctttgccgccttctcattgttctctctattacctcctgcaaattaattt

SEQ ID NO: 24133 - DNA, 599 bp, Chicken  19866894238113_1
  misc_feature (1)..(78): n is any nucleotide
nnnnnnnnnnnnnnnnnnnnnnnnnnnnnnnnnnnnnnnnnnnnnnnnnnnnnnnnnnnnnnnnnnnnnnnnnnnnnntcaacaactattcgtttgaaacaagaattttctctttttaagtaagtctttcaatatcactgcagagctaaactttccctgacagtaaatttctgcaatatggtcactgatgttaaaactgacagttgaagctgctttctcatattttacactgctcatttttagctttccaaaactttactatgtaacttcacatcttacttcctgaggatgtacaaaacwttaccattctgcttctgctttcccaaatgttacctcctgaataatacaaatgaacatttgtttcatttgtgtcttaagaaaaaaaaatctgtgaaacaactctctgcctggaggaagaagaagaggtctttaagtgtggttgaaaaggaattgtcttcctttcacaggagacagatatatacttcataattattataaaggatgtagacccagaaagttttgctgtggatcagtatttaaargaatagcttgcaagacaagattcctcgcttacaaacatagtctatctgtagctctta

SEQ ID NO: 24134 - DNA, 600 bp, Chicken  19866894238113_2
gctttccaaaactttactatgtaacttcacatcttacttcctgaggatgtacaaaacwttaccattctgcttctgctttcccaaatgttacctcctgaataatacaaatgaacatttgtttcatttgtgtcttaagaaaaaaaaatctgtgaaacaactctctgcctggaggaagaagaagaggtctttaagtgtggttgaaaaggaattgtcttcctttcacaggagacagatatatacttcataattattataaaggatgtagacccagaaagttttgctgtggatcagtatttaaargaatagcttgcaagacaagattcctcgcttacaaacatagtctatctgtagctcttatgttagcagaaaatcagctcttttggggcccaatttcagcatcttttaaagagaatttatgctaacataactcagttgattctgatacagccactttcatgttacatcagtgaaagtgaaatcaggatataattgcagccttggttaaccaagttgattcaatctattgattagggctaggggagaagttacagctagagtwtttaatgtattttgctaaacaaacaaacaaacaaacaaaca

SEQ ID NO: 24135 - DNA, 600 bp, Chicken  19866894238113_3
atgtagacccagaaagttttgctgtggatcagtatttaaargaatagcttgcaagacaagattcctcgcttacaaacatagtctatctgtagctcttatgttagcagaaaatcagctcttttggggcccaatttcagcatcttttaaagagaatttatgctaacataactcagttgattctgatacagccactttcatgttacatcagtgaaagtgaaatcaggatataattgcagccttggttaaccaagttgattcaatctattgattagggctaggggagaagttacagctagagtwtttaatgtattttgctaaacaaacaaacaaacaaacaaacaaaaacaaacagttttttaactgaagaaaatataggaattttgtcactgctgttagttgacagggcttgacttaaagagaaatgtgttggactcctggactgatagaatacatcattttgaattcagttgtgcattcacaatgcatcattttgagacattgtgtcttcaagctacatgccattctatcacctgaaggcaacttaatttgagtctacttccttgattgtagacctcagaggctcctgtgatactgagaaaa

SEQ ID NO: 24136 - DNA, 600 bp, Chicken  19866894238117_1
aacaatgaatgttaaccgtacacgaatattttgaagatatgttattctttaaaaaattgtgggaatattctgaaatgttcaaactgaaattgaaatgtttctaaaaaagtgatactggaaggagccatttcttgaactgttccatttcgttatagaaatgaaaactgtaaagaatcttgaaagcctcgtgctccaaacacagccctacagagagggaatttctgcagatgtgcaatttgtgtatgtgaacaagcttccctttttctttatagcacatcgcatcagccatgggcatcctgsaataggatgtgataatgtgctgaataaatagattcagtagagaaacttgatatgcagaatcagaggttggatataagtaatgcagtatccttacctaagaattattttttttaggtactctgaaagaggaagggggaaaaatgtgttagcacagaggagtttgtgacttgtctttcactggatagaacgacccagatgttcaattctgtgagcatttttatgctctgtattttaccttctgtgtaggacaatgtaggtgtaagaagaattcctccaggcgtttgtcttcctgactctcag

SEQ ID NO: 24137 - DNA, 600 bp, Chicken  19866894238117_2
ttttaggtactctgaaagaggaagggggaaaaatgtgttagcacagaggagtttgtgacttgtctttcactggatagaacgacccagatgttcaattctgtgagcatttttatgctctgtattttaccttctgtgtaggacaatgtaggtgtaagaagaattcctccaggcgtttgtcttcctgactctcagtgttgaatgtaaacatactccagtaaaaaaaaaaaaccctcgtaggcacttaagaagagattcctcctgaaagtcctccatgtaacttgtcaagtgtccttccactgytgtgttaaaactacaggattgctgataatccatcctaatgttttccttaagtgtttttaaaatgtaaatcttcatagtttaattttacagtcccttagaatttctatgatttagtgcaatggattcattttatataggagcagcaacagaagttgttggttagtgtatgaaggaggaggagagaatattctatattcagattatggagttggtggttagagagaatacttgatacaaaaacaaaacagaataaaagcccagaaccttgaatgaggtgagaactgttcattggaagagaga

SEQ ID NO: 24138 - DNA, 600 bp, Chicken  19866894238117_3
attatggagttggtggttagagagaatacttgatacaaaaacaaaacagaataaaagcccagaaccttgaatgaggtgagaactgttcattggaagagagaattcaggagatacggaaggatgagagccagcagtaaaaccttagcaggaggcaggaggctgctggcgctggaccagtacacagatcgaccattcagaaactgagcaggccgaaaattttcagacatgaatgttgagttcttcccttcgaagtgaactgttgagaaatgggaaacctgcagatattgggggaaaaaaaaycataaaattccttttttttttttccrtggaacactggaaatgataacatcctatagctgcaatgccttattctgtggctttgttttgatctgtagggatgcactgaatcttacaggaaacactgtgatggaggctactgctggaggtcacccactgatttcagtctcggaaatcacatgggcttcctgtgtgagctgaatgctttttgtccagcccaaagactttgttagatcagaccttgacacatgtccttgtctgtcacatcacagggatacaacgtaagaggactgggtgtatgtg

SEQ ID NO: 24139 - DNA, 600 bp, Chicken  19866894238117_4
tacttgatacaaaaacaaaacagaataaaagcccagaaccttgaatgaggtgagaactgttcattggaagagagaattcaggagatacggaaggatgagagccagcagtaaaaccttagcaggaggcaggaggctgctggcgctggaccagtacacagatcgaccattcagaaactgagcaggccgaaaattttcagacatgaatgttgagttcttcccttcgaagtgaactgttgagaaatgggaaacctgcagatattgggggaaaaaaaaccataaaattccttttttttttttccrtggaacactggaaatgataacatcctatagctgcaatgccttattctgtggctttgttttgatctgtagggatgcactgaatcttacaggaaacactgtgatggaggctactgctggaggtcacccactgatttcagtctcggaaatcacatgggcttcctgtgtgagctgaatgctttttgtccagcccaaagactttgttagatcagaccttgacacatgtccttgtctgtcacatcacagggatacaacgtaagaggactgggtgtatgtgcctcatttctttgtttgcttagaaat

SEQ ID NO: 24140 - DNA, 600 bp, Chicken  19866894238119_1
ttcagtgataataaatatttgacttctcaactctggatacttttatagtttcattcttccattgactttaaagacaaataaaacaacctttgagttttgccactgattggtccaagaattactggaggggttcatattaaatctgtattgctctcttcttcctctatatttttccacaaataaaattgtatgagatgtgcaactgctctaattttctaagaacacacttgagaacaagaccacataagatcccaacattaaaaataatctggcctttttttcttttttgaaaaaaaaaakaaaatttaaatttaaagtaaatttttgaagtaaatttaagcatagcaagacacaattaatgtaatttctcctattcaagcatgcatacaaaactaattatgttcaaacagaattttgtgatttatccctaaatttaaaacataaatttaaaaaaaagtataattgtaccaggcatttagatgcagaaagaatactcttaaagagcatgttggcccaaatccacataaaatattgtcctatatgataggactttttctatgtgcatytgttgcacatgctaaaattgaaacactgcagcaa

SEQ ID NO: 24141 - DNA, 600 bp, Chicken  19866894238119_2
atctggcctttttttcttttttgaaaaaaaaaakaaaatttaaatttaaagtaaatttttgaagtaaatttaagcatagcaagacacaattaatgtaatttctcctattcaagcatgcatacaaaactaattatgttcaaacagaattttgtgatttatccctaaatttaaaacataaatttaaaaaaaagtataattgtaccaggcatttagatgcagaaagaatactcttaaagagcatgttggcccaaatccacataaaatattgtcctatatgataggactttttctatgtgcatytgttgcacatgctaaaattgaaacactgcagcaagtattattcctgtaacctactcactgaagtgattgcctgtgcgtatctaagaatagttaataatggagagccttgtcttcaaggaaacctrtaatttgaatgctccatatctgaaggagtgtcatcttaccctgtaaggagaaggatgatccacttactggtggaagcgctcaaaccacgtttcagaggtagagcggaaaaaaaaaggcatttactgagattatcatcccaacaacatgatgttctttatcttgtgaggagcarga

SEQ ID NO: 24142 - DNA, 600 bp, Chicken  19866894238119_3
actaattatgttcaaacagaattttgtgatttatccctaaatttaaaacataaatttaaaaaaaagtataattgtaccaggcatttagatgcagaaagaatactcttaaagagcatgttggcccaaatccacataaaatattgtcctatatgataggactttttctatgtgcatytgttgcacatgctaaaattgaaacactgcagcaagtattattcctgtaacctactcactgaagtgattgcctgtgcgtatctaagaatagttaataatggagagccttgtcttcaaggaaacctrtaatttgaatgctccatatctgaaggagtgtcatcttaccctgtaaggagaaggatgatccacttactggtggaagcgctcaaaccacgtttcagaggtagagcggaaaaaaaaaggcatttactgagattatcatcccaacaacatgatgttctttatcttgtgaggagcargagtggattttttaagcttgaagatctgaagccttatattcctagacacaaaaacaggtcacagtgaatgctgaaggaggttatactacatgcatgctataaatggctgctgaaattgaaggtatat

SEQ ID NO: 24143 - DNA, 600 bp, Chicken  19866894238119_4
tytgttgcacatgctaaaattgaaacactgcagcaagtattattcctgtaacctactcactgaagtgattgcctgtgcgtatctaagaatagttaataatggagagccttgtcttcaaggaaacctrtaatttgaatgctccatatctgaaggagtgtcatcttaccctgtaaggagaaggatgatccacttactggtggaagcgctcaaaccacgtttcagaggtagagcggaaaaaaaaaggcatttactgagattatcatcccaacaacatgatgttctttatcttgtgaggagcargagtggattttttaagcttgaagatctgaagccttatattcctagacacaaaaacaggtcacagtgaatgctgaaggaggttatactacatgcatgctataaatggctgctgaaattgaaggtatatccatggtgggaggctatcaaatgtgtacataggtcacagtctaattatttatttatttttttttcagtcatagagggcatgggagcatgagaacatttgaactgtgcctctcaccaaggtgttctattagatttgtagcccccccaaaacatgggatgcattgatgctgcatt

SEQ ID NO: 24144 - DNA, 600 bp, Chicken  19866894238130_1
gacttcaaaaagagttttttcatgttcttctgaaccacaaaatgctcagaaagcagtttaccacctacatatgatcatgtatcatcctgcttgctcccaaacacagattagaagcatgccacctcaactgctactagcacttaatttgttcctgatatacttaaaaaaacccacttcctgtctttggtcttgccatctctggatagcatatgatatcttcagcttcatttatcaattgcttaattagacaggaatcacaaaacatatttccatctgtttgtttctcttatttctaaactrtttcctcttgttgcctttaagtgtcaaattgacttttaactaaaactgtcttttttttttcctttctttttttcccccattatctgatatcttcataaataaaatgcaattgttactcctgatggcacctagtgttctttctttagtgcatttttggttgcaaaacacaagcttaaaggaaagtccattgcttctatttccaggaagcaatgaacaaatgataagaagagtttgaaactttagcaggagtgtcctaatatgtagacagacttacctgtgggtatcaaataaagaagtaaa

SEQ ID NO: 24145 - DNA, 600 bp, Chicken  19866894238130_2
taaaactgtcttttttttttcctttctttttttcccccattatctgatatcttcataaataaaatgcaattgttactcctgatggcacctagtgttctttctttagtgcatttttggttgcaaaacacaagcttaaaggaaagtccattgcttctatttccaggaagcaatgaacaaatgataagaagagtttgaaactttagcaggagtgtcctaatatgtagacagacttacctgtgggtatcaaataaagaagtaaaaagggaattaaaaaaaaaagtccaattaatgaactgacartgttgataaggcaccttctagatgctacaagagcaggacacaaggccacagattgattactggaagaattaggctgattactcctaccacgtgtccactctcaccttcttcctctctatttgtcctttgaatagtcaacagtaagaaaatctataggaaatatcacagagtcatagacccgttaaggtgtgaaagaccactaagaccatctggtccagctgtggacccattcccaccatgctcactgatcacatccctcagtgccacatctacacttctcttgaaaacccccaggggatg

SEQ ID NO: 24146 - DNA, 600 bp, Chicken  19866894238132_1
ggggatctcctggagagagtccagcagaaggcctgaagatgatcgagggcctggagcatctcccctgtgtggaaaggctgggggacctgggtctgttcagccttgaggaaaggaagactgagaggggatcttattaatgtttctaaacatctgaagcgtgggagtccaaaggacatggccagccttttttcagtggtctgtggggtcaggagaggggagaattggccataaactggagtacaggaagttctgcaccaacgtgagaaggaacttgttcacagtgaggtgacggagcactgsaacargctgcccagggaggctgtggattctccttccctggagatactccagacccagctggatgcccacctgtgcagcctgctgtatggagcctgtttagcagggggggttggactcaatgatctctagaggtcccttccarcccctacagttctgtgattctgcaattctgcgtccatagcattactgaatgacatttcggggtctaggttagacaggaacttccrgtcagtagcaaaggctgagcgaactgacccatttttgcccttaaccatttggatggagaactcagttcagtaa

SEQ ID NO: 24147 - DNA, 600 bp, Chicken  19866894238132_2
tctcctggagagagtccagcagaaggcctgaagatgatcgagggcctggagcatctcccctgtgtggaaaggctgggggacctgggtctgttcagccttgaggaaaggaagactgagaggggatcttattaatgtttctaaacatctgaagcgtgggagtccaaaggacatggccagccttttttcagtggtctgtggggtcaggagaggggagaattggccataaactggagtacaggaagttctgcaccaacgtgagaaggaacttgttcacagtgaggtgacggagcactgsaacargctgcccagggaggctgtggattctccttccctggagatactccagacccagctggatgcccacctgtgcagcctgctgtatggagcctgtttagcagggggggttggactcaatgatctctagaggtcccttccarcccctacagttctgtgattctgcaattctgcgtccatagcattactgaatgacatttcggggtctaggttagacaggaacttccrgtcagtagcaaaggctgagcgaactgacccatttttgcccttaaccatttggatggagaactcagttcagtaagacag

SEQ ID NO: 24148 - DNA, 600 bp, Chicken  19866894238132_3
ctaaacatctgaagcgtgggagtccaaaggacatggccagccttttttcagtggtctgtggggtcaggagaggggagaattggccataaactggagtacaggaagttctgcaccaacgtgagaaggaacttgttcacagtgaggtgacggagcactgsaacargctgcccagggaggctgtggattctccttccctggagatactccagacccagctggatgcccacctgtgcagcctgctgtatggagcctgtttagcagggggggttggactcaatgatctctagaggtcccttccarcccctacagttctgtgattctgcaattctgcgtccatagcattactgaatgacatttcggggtctaggttagacaggaacttccrgtcagtagcaaaggctgagcgaactgacccatttttgcccttaaccatttggatggagaactcagttcagtaagacagagacagtagtctgcactgctgctggggaagccactcctgctgttcaagcagcaactccatgaatgcaaatcaggtcaggatagccgatgaaggaacactgcatcggtctgcttcatgtccatggacacaggtgggac

SEQ ID NO: 24149 - DNA, 600 bp, Chicken  19866894238132_4
ataaactggagtacaggaagttctgcaccaacgtgagaaggaacttgttcacagtgaggtgacggagcactgsaacargctgcccagggaggctgtggattctccttccctggagatactccagacccagctggatgcccacctgtgcagcctgctgtatggagcctgtttagcagggggggttggactcaatgatctctagaggtcccttccarcccctacagttctgtgattctgcaattctgcgtccatagcattactgaatgacatttcggggtctaggttagacaggaacttccrgtcagtagcaaaggctgagcgaactgacccatttttgcccttaaccatttggatggagaactcagttcagtaagacagagacagtagtctgcactgctgctggggaagccactcctgctgttcaagcagcaactccatgaatgcaaatcaggtcaggatagccgatgaaggaacactgcatcggtctgcttcatgtccatggacacaggtgggactttatagctatctagactaaaagaatttgcatgaaatcatgcaagtgagaaatatccccgaagcgcggtgaagccaaagcctggt

SEQ ID NO: 24150 - DNA, 600 bp, Chicken  19866894238137_1
ttttaagtcttataaaaaatcagaatcactacttctgtgaggcttcctggccactactccagtgcaaaaagtgcttggcctgaatgtaattagccagtctgcattatggcctcagacaggaggaaactccttccctggttataaacacagcaaaaacaacccctttgcagtagaaagaatgcaaaacagagtcatgctgtgccaaaccactactgctgtaaagtccagcttgttgcataaatggcagtaaatcctgggctgcccccactgtctgtggggctatgctagttcaggatccarctacagttagtccctcccttccccacccttttggtcatggaacagagccaggctgagaagtgatctctttgtttgggcacttatgcagttgaaattaatgtttgcatggaaataacaagcagttttgaacgtgtacatactgcttaaaatacagaaagcttactgtgtgcaggaaagccacgggggaatggggtctggttcttagtttggaatggaacaagtgagctgccctgccctgatcacatcctttagccgggaagctcaggagtgttttttcctactcctcctctcctctccctt

SEQ ID NO: 24151 - DNA, 600 bp, Chicken  19866894238137_2
aggacagttattaacttcttggtggtgatttcacctacacaaattctcttgtgttcaaggatcatttataacaaaattttagtgatataagccaccagctaatgtggagctatgctaggagattctgccgttagccaaagagatgttgctcaaggctttcgtctttcttgcttttattgtattcaaagagcacattgtggttggatgtggtaagtaaatagtcagacataaattgtgttgcctttatttgctaatcagtagtccagctgtgcaaataattgacttctttgttttgttttrctggtttgatcaagggtgttttaggtcaaacttttgatttcattttaaatttattgttgactaaaaagtaaaatgttttcaaaaccttttgagaatagaatcttaatattctcttctggaaatcttaaaatgaaatattggcctttagagaatgtttttgtctatgagaacctgatgagcttgatgtstatttgtgataattttgggtaatccaaatttatattttaagggcagacaacaactgaaatgcctccattatctctagctgctacttcacattgtataatactttcaaataaa

SEQ ID NO: 24152 - DNA, 600 bp, Chicken  19866894238137_3
agcacattgtggttggatgtggtaagtaaatagtcagacataaattgtgttgcctttatttgctaatcagtagtccagctgtgcaaataattgacttctttgttttgttttrctggtttgatcaagggtgttttaggtcaaacttttgatttcattttaaatttattgttgactaaaaagtaaaatgttttcaaaaccttttgagaatagaatcttaatattctcttctggaaatcttaaaatgaaatattggcctttagagaatgtttttgtctatgagaacctgatgagcttgatgtstatttgtgataattttgggtaatccaaatttatattttaagggcagacaacaactgaaatgcctccattatctctagctgctacttcacattgtataatactttcaaataaatcctttgcccactktctactttatgaaaatgtatcaaatctataccctcaacacagtgtttgttaaagctttccttttcacctttttttttaaactgtttgaaagtacttctgctaatatttttcagggttggcactaaagctaaaacagctgtccagaatctctctgcttgtttttgtgttcatctc

SEQ ID NO: 24153 - DNA, 600 bp, Chicken  19866894238137_4
ggtgttttaggtcaaacttttgatttcattttaaatttattgttgactaaaaagtaaaatgttttcaaaaccttttgagaatagaatcttaatattctcttctggaaatcttaaaatgaaatattggcctttagagaatgtttttgtctatgagaacctgatgagcttgatgtstatttgtgataattttgggtaatccaaatttatattttaagggcagacaacaactgaaatgcctccattatctctagctgctacttcacattgtataatactttcaaataaatcctttgcccactktctactttatgaaaatgtatcaaatctataccctcaacacagtgtttgttaaagctttccttttcacctttttttttaaactgtttgaaagtacttctgctaatatttttcagggttggcactaaagctaaaacagctgtccagaatctctctgcttgtttttgtgttcatctctgcactccgttacacagggcagctggagcagccagtagctgaacatccgaccacttgctgagatccatctttcatttattttatcttcttgcctgcgtctacgtctaatgacgtggtaggctgaag

SEQ ID NO: 24154 - DNA, 600 bp, Chicken  19866894238144_1
acttttcctgtattattgttgtagacagtgttaagatcctatctgattgagtttattgatttctgagtgatctcttgagtgttatttcacattcacgttctgtcagcattgcttagagtgcctgtgttagactgttttgtatttattatacatgaaactactgctctgcagatttccaatttcaaggcactgaatggatgcaggaacacaagggacaacatgcacaatatttctacaagctactttttatttgaaaatttcagaaattaaaaaatatatatatacaagtaataaaatttkctggatacattcagggtagatttatttcttattttctacagtaacgaagtcatatctgagagcatagccacatactgggctggaggactctccttactgtctattccagctgcctgctggagataacacctctcagagaagacaatggtcaaaatatggctgtgtatgctcagagtaaagtctgcagcttttatgtgctctgtcaaatggcttcttgatgatacttatctatttcttaatggtgttactggaatttaataaaatgaatttttgtgaagtgcttcagagcacttatttgga

SEQ ID NO: 24155 - DNA, 599 bp, Chicken  19866894238154_1
  misc_feature (1)..(138): n is any nucleotide
nnnnnnnnnnnnnnnnnnnnnnnnnnnnnnnnnnnnnnnnnnnnnnnnnnnnnnnnnnnnnnnnnnnnnnnnnnnnnnnnnnnnnnnnnnnnnnnnnnnnnnnnnnnnnnnnnnnnnnnnnnnnnnnnnnnnnnnnnnaaaacagtcagcctctgtgaaacaaaatctcacattattaggcttccccccaaccctacaaaaaagtccatttgtgagctagttacgtaccatggcagtaaaggaatctggcagaagcaggtcacacacttatattttcaggttccctactggtcaattatraatcatgcaacatgctgttagtattctgaagattgaaastagaagccaaaagctactcttcagcagtagagcaagtcaccaggtagacaaagcacacaccctactgtaagttggactaccttgttctttagagcacagagcgttcctgcttcagccttgtgcctgtatttcaaactatatgtaacctagcaatgggtgcttcctggggctagcacttgcaccctctgtcatttagctctcccacccaggctgaagggtatcttttattgcaaacccttaagttatactccctccaccac

SEQ ID NO: 24156 - DNA, 599 bp, Chicken  19866894238154_2
  misc_feature (1)..(99): n is any nucleotide
nnnnnnnnnnnnnnnnnnnnnnnnnnnnnnnnnnnnnnnnnnnnnnnnnnnnnnnnnnnnnnnnnnnnnnnnnnnnnnnnnnnnnnnnnnnnnnnnnnnaaaacagtcagcctctgtgaaacaaaatctcacattattaggcttccccccaaccctacaaaaaagtccatttgtgagctagttacgtaccatggcagtaaaggaatctggcagaagcaggtcacacacttatattttcaggttccctactggtcaattatraatcatgcaacatgctgttagtattctgaagattgaaastagaagccaaaagctactcttcagcagtagagcaagtcaccaggtagacaaagcacacaccctactgtaagttggactaccttgttctttagagcacagagcgttcctgcttcagccttgtgcctgtatttcaaactatatgtaacctagcaatgggtgcttcctggggctagcacttgcaccctctgtcatttagctctcccacccaggctgaagggtatcttttattgcaaacccttaagttatactccctccaccacagatttgctgcatgacatctgcacatgtgtttggagcca

SEQ ID NO: 24157 - DNA, 600 bp, Chicken  19866894238155_1
aaggataaggagacattcataaagcagagatcattgagactgtgagcatgcagtactgagatgccgcgagcccaagctgtattccaggtaatcatataacaccgtacttagaccttacaaaggaccgagtgcaggtgaggaagaaaagaaagctgagcagtgtgcttttcagccctaatattaatgcatcaagccactgcggcgcacacatttattttgtcagactgtcaaaaacagcacctgagtggttttatataaagaggtattaggatagaaaacacttcagagctaaaatatacrtacatagatatataacactccatttctgggattgaataggactgaaaagyccagcaaagggctggctgctttgatacagcaacacagactttctggaaattcaatttcaccttgggaaaacttctctgagcagcaccacagcaagccctgcagcagcacacgtaggctggaggtgagggaaatagctgaatattcagagagaaatgtattttacatgctgtcatgttaggcctcggtgagcaggagacgaggggtaattcaaaacatttctccagcagtgcctgccgtgtctgtgccaaa

SEQ ID NO: 24158 - DNA, 586 bp, Chicken  19866894238155_2
cagtactgagatgccgcgagcccaagctgtattccaggtaatcatataacaccgtacttagaccttacaaaggaccgagtgcaggtgaggaagaaaagaaagctgagcagtgtgcttttcagccctaatattaatgcatcaagccactgcggcgcacacatttattttgtcagactgtcaaaaacagcacctgagtggttttatataaagaggtattaggatagaaaacacttcagagctaaaatatacrtacatagatatataacactccatttctgggattgaataggactgaaaagyccagcaaagggctggctgctttgatacagcaacacagactttctggaaattcaatttcaccttgggaaaacttctctgagcagcaccacagcaagccctgcagcagcacacgtaggctggaggtgagggaaatagctgaatattcagagagaaatgtattttacatgctgtcatgttaggcctcggtgagcaggagacgaggggtaattcaaaacatttctccagcagtgcctgccgtgtctgtgccaaaggtggcatctccctccccggccccatcccaagctca

SEQ ID NO: 24159 - DNA, 599 bp, Chicken  19866894238162_1
  misc_feature (1)..(36): n is any nucleotide
nnnnnnnnnnnnnnnnnnnnnnnnnnnnnnnnnnnncgcagtaatgctatgcatatagtttaattacactaaataatcatgctcgaatatctgatgctgttttacttatatttgtctagatagcagcagcagcaaagcaaggaaggcagaaatacttgagaggaattaatttaagagaggtgagagtattttcactatcaagctagcattggattttcaaaatagatatggaaaatgaaaactctcccttctctattgcacgttggaagaacatacaatacagaaaataactccttttayaaagaatctttgaatgtgtaaacaatgtgaagtgtaagtgatactgcatggcaccaacttctgatttgccactggcattaaaaagagagagaaaaaaaatcccggttctgcaaattttcactgcaaaacagaagagatttttacatgcatctcgctaattgcctcactctaaaataggaaattcctttctgctaaagactgaacgaagctatactcaatggctagaccagatggtgaggttaaaagttttgtgctgcatcataacttcaagtatgctctgtgctgtactgtcacagcac

SEQ ID NO: 24160 - DNA, 600 bp, Chicken  19866894238167_1
ggaaatgtgaatgacatgatggacaatctgtattgtgcaaatgagcagaaatgataaaaagagcattagtaggcacctgaataaatacaatatactggggaagaatcaacataggttgataggcccatctcacaaacctattaagaatatcataaagcgttgaacaagcatggggtcaagatgatgctactaatattgtccattgattgatactatctcactacctaaaccttttaaaaagaaaaaacaggtatggttaaagagggaatagataaatgaccagctaaagataggaaataragcttgagtctaagtggttaatactcgtgatggaaaacagttaccactggagttccacagccatggattatatgcataagtgacctgggaaagcgatgttggtagtcaacatgccaatttgcttgtaacgctatgctatgctagagcccacggtaatgaacgctcaatagatcttatgagactcaacaatcagacaatgaaatggaaaattaattttacttagatacacataaagcaatacatctaacatcatttttttctaagcctcagttactcagaaatgagctctaacacaattac

SEQ ID NO: 24161 - DNA, 600 bp, Chicken  19866894238176_1
tcctgccttcttttcaaattttacctcacgtacaattggactctttggtacaagcacacagtaggaacatactcagaacctgattcaagaatcatcaataaaataatggtcatttggtcagttactaaaaatacagaccgtattcattggttggaaaaacagatggcataccaacctgtgcacatcatctcatcagtaaagagaggttttaggattaaaatgctaagtccttacttttaatgccacattttaagaaacagatacagtgtggagctaaaagtatttatctatttctctttygaagctgtgtcattacttaagcatttttttcacagtcactgagaaatgctttcttcatcctcacatttccaaaatcatggtatacaagctttatttggatattggttgtcttttaaaatagtctaagaattctctttctctgagattatgccaattgcatcttcagcatgaaaatgtgtaaattaactcatattcatagagacagtctgatcagcctgagtcttcaggaaggaaagtgacgtgctcagctttgatttcagcaactgctttgtgatggggatgataacttaagggaaactc

SEQ ID NO: 24162 - DNA, 564 bp, Chicken  19866894238180_1
agaactacattaaaattgtaggctcccactccactctgaccgttcacaaagtacgacatatctggtcttgctaataaagaaatagtaaataaatagtatcattaaagttggaaaagaccacttagataagggaacatttctgtcatgtctctttgtgtattcaaagcaagccattgcttttctttttgtctgtgatctgacaaacatctatgacagatattcttagttgttcattctgcctagacagctccaaaagaatgggcaggagcgaatatattgctttctaagacataggcaaaraagacaggtgagaaaatattataatttcaagtactgtcataatgctaatgcataacacacactaatttgtgggtgcaaactctgctgtactacaaaacttctagataaaacctagcagaaactcattatttttaccatggacttcccaccttgacttcaagccatgggtgggttctttttccaccttatatcttgaatgactttctactggggtctttgtctatatgttccagagtcaaagtgctcagatgccctagacacctt

SEQ ID NO: 24163 - DNA, 599 bp, Chicken  19866894238182_1
  misc_feature (1)..(24): n is any nucleotide
nnnnnnnnnnnnnnnnnnnnnnnncatcacggcaaaagagctcccacatggccagcacctatatagaagtgaatgcactccatagactgcatgagaatttgcctgaagtagtaaccagcagcaccgattcctttactggaaatagttctattcctttcccccatatctttgcttcctcccttattaagagcacaaggtgttctggacacagacctgtttctgctgtgcacagctaccagggtctcagatagtggcacagccatcctgctcggggctttcacgtgcctctataataacatktggttgaaagaagctgtgtcccaaggagctgtaatcccatctgtctccacaggcattcacagatctctgccctcttctttgtacactccacagctggctgcatacttcctaagtagatactggtacacgaagtgggccctagagctttttggaggcgggaataaaggggaaaagacagaaactatcrttttcaagaagataacccaggcatgaaagaataaaatcttacagttctttgccagatatttgcagctttagctcgtgggaagtgaatggccaggaaatgtcaaatacctcca

SEQ ID NO: 24164 - DNA, 600 bp, Chicken  19866894238182_2
gagcacaaggtgttctggacacagacctgtttctgctgtgcacagctaccagggtctcagatagtggcacagccatcctgctcggggctttcacgtgcctctataataacatktggttgaaagaagctgtgtcccaaggagctgtaatcccatctgtctccacaggcattcacagatctctgccctcttctttgtacactccacagctggctgcatacttcctaagtagatactggtacacgaagtgggccctagagctttttggaggcgggaataaaggggaaaagacagaaactatcrttttcaagaagataacccaggcatgaaagaataaaatcttacagttctttgccagatatttgcagctttagctcgtgggaagtgaatggccaggaaatgtcaaatacctccagtttgcttatgctgttatgcagtatataaaataaatcagtcaatgaataaataacaactgagaaagctggaaagagagatacagcattccttttggaagtattgcttctttttgttcctttgaagagccagaaacaccaagaacacctcaaagaagtgccctcctttctctgatctgggttaaacata

SEQ ID NO: 24165 - DNA, 599 bp, Chicken  19866894238183_1
  misc_feature (1)..(225): n is any nucleotide
nnnnnnnnnnnnnnnnnnnnnnnnnnnnnnnnnnnnnnnnnnnnnnnnnnnnnnnnnnnnnnnnnnnnnnnnnnnnnnnnnnnnnnnnnnnnnnnnnnnnnnnnnnnnnnnnnnnnnnnnnnnnnnnnnnnnnnnnnnnnnnnnnnnnnnnnnnnnnnnnnnnnnnnnnnnnnnnnnnnnnnnnnnnnnnnnnnnnnnnnnnnnnnnnnnnnnnnnnnnnnnnnncaacaaccgtatatcctgacctgcctattacaaaatgatcgatatacatctgttactttggaagttattttatgktttttttttattattgttgcatgtaatgctcattttgatagtccagaattatttttgccctcatgaaaatattgagacttctctctgaactctgttcacattacacattattcaaatgttaccgcagatgtcaccaagaacgttctcattttaatcagtttctaagttctcatcttctgatcaacagacacagcaaaacagtgacactcatttgtctcaaatataatctcactaaccagaggacacaaaaagggacttgtctcatgagacaaataagtgactagtgttattcactgccc

SEQ ID NO: 24166 - DNA, 600 bp, Chicken  19866894238185_1
gacttattccaattattctaccattataataaatttcgtggaatcctgttgtgttctatcctttttgctgagagatgtagaatggaatagatattgctgactgttgagctaccaactgcatctctattatcattacaaatgtttttattctctcttcctatgctgttctataaagactgatgccttcaaaagaatatgacagttaggtattcagcttgcaaagctgtgggagtgaaatgagatcatttatgcttttaaatatttgtctttttaggatatctaaatgggtatcccactggraatgttattaataagatttccttaaaagcctagtacctccaaaggtgtttttatagctataatcttctagcactatttttaattgcttctagtgtaagatctgttagatcctcttacactgaagttcttccagtaaaaccacatcaaacccacagatatggctatttttcaagccgatgcatatgctaaagcatctaatagggccatgtggttctctctcatgtaggcacacatttgaattgcctttattgattgtgagtgctccaaatttaaacatgggtaactaattctccttcaact

SEQ ID NO: 24167 - DNA, 600 bp, Chicken  19866894238185_2
ctagtacctccaaaggtgtttttatagctataatcttctagcactatttttaattgcttctagtgtaagatctgttagatcctcttacactgaagttcttccagtaaaaccacatcaaacccacagatatggctatttttcaagccgatgcatatgctaaagcatctaatagggccatgtggttctctctcatgtaggcacacatttgaattgcctttattgattgtgagtgctccaaatttaaacatgggtaactaattctccttcaactattaccagaataatatgccccagattctygtctcatgtaaaattctctgctttcccggtggatttaagtagtggtgacttactttgcagagcaggcaagaagtatcagtactaaagcagaaccaatacaaagcactggagctttggtttcaagtcagcattgcgtgctggtgctstcaggtctgtgaacacagaagctataacacattagaaaatattaagaaagcaaacttttaaaaagtcatagacatttgttgatgtctctaaaagaaactgtagagtgggaagcttcaatactgagtacaacttcatgagatttttccaaaatct

SEQ ID NO: 24168 - DNA, 600 bp, Chicken  19866894238185_3
gatgcatatgctaaagcatctaatagggccatgtggttctctctcatgtaggcacacatttgaattgcctttattgattgtgagtgctccaaatttaaacatgggtaactaattctccttcaactattaccagaataatatgccccagattctygtctcatgtaaaattctctgctttcccggtggatttaagtagtggtgacttactttgcagagcaggcaagaagtatcagtactaaagcagaaccaatacaaagcactggagctttggtttcaagtcagcattgcgtgctggtgctstcaggtctgtgaacacagaagctataacacattagaaaatattaagaaagcaaacttttaaaaagtcatagacatttgttgatgtctctaaaagaaactgtagagtgggaagcttcaatactgagtacaacttcatgagatttttccaaaatcttgagcttaattcagtgtgtaactcatttctttgacactacaattctgtaggaaaataatgggattgcaacaagcagagctggaggtacagagcaatcacttttatcttcttcctgtcttttaaaatgaccagtgtcaacttttggt

SEQ ID NO: 24169 - DNA, 600 bp, Chicken  19866894238190_1
gggctgcgagaaggaggaagaggaaaagaccagccgcggcccaggtaagctccttcctctctcgtgcctggggaacagcagtggggtctgcaccacgggctctgtggggagggactccccattgctcagcatgcactgtgctggggagggaagtgtgcccatgcccaccctggctctgtcccctgtgcacccgactgccatggaaccagctgcagctcgtcatccctctccccatctgcttccctgcacctgggcagggtggcagttaggcagttaacttggcaacacctgcgtgcctgygcacagtgcaagaatgaggtttgtctctgctccgacctttccaggctggagcttgcctctggtgggccaggattacctggagatcctctctgcctggtactgcaattttggcaagtgctgcaagacaggagactgccggatcatcaacaacatcacaggtgggtgctgcagtctcctctgctgttgtcgttcttctaaaaagcctattttagcaagtgatgcatgtaaaaggcatttctggggggaggaggggctgagccacgtcctgcttctcatcactcatttgcagttcttggactg

SEQ ID NO: 24170 - DNA, 600 bp, Chicken  19866894238190_2
tgggccaggattacctggagatcctctctgcctggtactgcaattttggcaagtgctgcaagacaggagactgccggatcatcaacaacatcacaggtgggtgctgcagtctcctctgctgttgtcgttcttctaaaaagcctattttagcaagtgatgcatgtaaaaggcatttctggggggaggaggggctgagccacgtcctgcttctcatcactcatttgcagttcttggactgcaagaaagcatgctcagtgcactgctgtggtttgcaccagccctgccttcacctgacagttycatgtgcacagggatctatttggccccaggtgtcccaggacccgtgtgcaagcccatgcaggtgtcactcatttgccatccctgaaacttctgctttccatacagtctgctgggtggtacgtggagctcaggaaatactacagaaagcaytggggcttcagtgccctgtgtagtcatcaagtgcttcctcctatttccaaagggaaaaaggagtcagcggaagatctgtgtctttttgcagtcagtggcaaatatgagcagggcacaggatttgtgagcatcctgccttgttaacactgc

SEQ ID NO: 24171 - DNA, 600 bp, Chicken  19866894238190_3
caagtgatgcatgtaaaaggcatttctggggggaggaggggctgagccacgtcctgcttctcatcactcatttgcagttcttggactgcaagaaagcatgctcagtgcactgctgtggtttgcaccagccctgccttcacctgacagttycatgtgcacagggatctatttggccccaggtgtcccaggacccgtgtgcaagcccatgcaggtgtcactcatttgccatccctgaaacttctgctttccatacagtctgctgggtggtacgtggagctcaggaaatactacagaaagcaytggggcttcagtgccctgtgtagtcatcaagtgcttcctcctatttccaaagggaaaaaggagtcagcggaagatctgtgtctttttgcagtcagtggcaaatatgagcagggcacaggatttgtgagcatcctgccttgttaacactgcaccagctcaaggctcctcttggacacgagtcccatcagcagggctgtgtgggcttggtgctgtgcaacatcttatattcccagcagcagcaactgggcttctaggttaaggctgagtttttgctgtattcccttcagggctagaactgga

SEQ ID NO: 24172 - DNA, 600 bp, Chicken  19866894238200_1
cctgtttcttttcaagcctatgaatccctcaaggatgaagttcagacttggtttaatcacatgtagctcaagcaagacacagatctcatatctcttctgtatttgcccctcaacctgtattttgactgtgctatcttcaaacacagcactcaacctgaccaccaccatctgctgttccaccgaaatcagccctttccctggtttcaacctacttctgccatgccatatgctgttgttccactcgtctttgctttaaatgtctgtagtgttcacctgtatgtaagttcctatcatgaaacyatgcatctgcatttcagcayttcctccagaccatcaycattttatttcttgctgaaatcaccctaatgactccaattctctcatccgcagaaatgaatggttctccaagaaaggcctaatgcctccctaatctgtcacgtggtgcttctccaacacgtggcccaaattggtccttttgtacagcctcatatctaatttgcagcccgctatctctctgtctctttcagcctcatggcttttacagcttgtgctcccatgtatgtctgcatttcagattatatttctttggatgcattagcc

SEQ ID NO: 24173 - DNA, 600 bp, Chicken  19866894238200_2
tgaatccctcaaggatgaagttcagacttggtttaatcacatgtagctcaagcaagacacagatctcatatctcttctgtatttgcccctcaacctgtattttgactgtgctatcttcaaacacagcactcaacctgaccaccaccatctgctgttccaccgaaatcagccctttccctggtttcaacctacttctgccatgccatatgctgttgttccactcgtctttgctttaaatgtctgtagtgttcacctgtatgtaagttcctatcatgaaacyatgcatctgcatttcagcayttcctccagaccatcaycattttatttcttgctgaaatcaccctaatgactccaattctctcatccgcagaaatgaatggttctccaagaaaggcctaatgcctccctaatctgtcacgtggtgcttctccaacacgtggcccaaattggtccttttgtacagcctcatatctaatttgcagcccgctatctctctgtctctttcagcctcatggcttttacagcttgtgctcccatgtatgtctgcatttcagattatatttctttggatgcattagcctggattttttccaagatgct

SEQ ID NO: 24174 - DNA, 600 bp, Chicken  19866894238200_3
aagttcagacttggtttaatcacatgtagctcaagcaagacacagatctcatatctcttctgtatttgcccctcaacctgtattttgactgtgctatcttcaaacacagcactcaacctgaccaccaccatctgctgttccaccgaaatcagccctttccctggtttcaacctacttctgccatgccatatgctgttgttccactcgtctttgctttaaatgtctgtagtgttcacctgtatgtaagttcctatcatgaaacyatgcatctgcatttcagcayttcctccagaccatcaycattttatttcttgctgaaatcaccctaatgactccaattctctcatccgcagaaatgaatggttctccaagaaaggcctaatgcctccctaatctgtcacgtggtgcttctccaacacgtggcccaaattggtccttttgtacagcctcatatctaatttgcagcccgctatctctctgtctctttcagcctcatggcttttacagcttgtgctcccatgtatgtctgcatttcagattatatttctttggatgcattagcctggattttttccaagatgctctttttatttcctgctc

SEQ ID NO: 24175 - DNA, 600 bp, Chicken  19866894238206_1
atgttcatgccattttgagtagattggatgagagttatccagaggttgggctgtttctttctcatctgaattttgtattttcagggagaactcattgtggacttccaatacttgaagggagcgtataaacagaaggaggaacggctgtttatgaaggtggacagcgataggacaagggggaatggttttaaactgagaaaggggaggtttaggttggatatgagaaggaagattttcacccagagggtggtgacgcactgaacaggttgcccaaggaggctgtggatgccccatccctgsaggcattcaaggccaggctggatgtggctccgggcagcctggtctgctggttggcgaccctgcacatagcagggggctggaatgagatgatcattgtggttcttttctacccacgccactctaagattcatgctatcatcctatgattcttactgagcttttgagcaaaacactttgctttcctctacttgcacaaattcctgcacaacagtcacttccttctgtttggattaggctcccctatctactgctaaaccaaaattaaaatttgtatcaaaaacattgtgtcagcaaaacaga

SEQ ID NO: 24176 - DNA, 600 bp, Chicken  19866894238206_2
ctacccacgccactctaagattcatgctatcatcctatgattcttactgagcttttgagcaaaacactttgctttcctctacttgcacaaattcctgcacaacagtcacttccttctgtttggattaggctcccctatctactgctaaaccaaaattaaaatttgtatcaaaaacattgtgtcagcaaaacagaagggcaggaacataatccttgagcactctgcagtagaaaaaagatgtgggtggagccaacaaaagttgaccacaccactgagctgccacaaccataactcacacarctgccaccatcagactccacggtgtctctcaatcacaaggaagagcaagcaacacttaacatagagtaaaagaaatggaagttctctcctttacgccagcaactccactgtgcactgaacaaggcatatgacaagacaaaacttgctaactccttcagtaaggatgaacaagcacatgaaaataatgggaccctttgcaacaactaatctaggctgatgaatggcagttgtgtgtaaaacgagtggagcaaggttgctggggtttcttttgatacaacttgaatgaaaatcagcttctat

SEQ ID NO: 24177 - DNA, 600 bp, Chicken  19866894238210_1
cagctgcatgtttcctccttggattttaccaaagctcttgtacacatacactcttatcaccttttccatctctgtgcacactgtttggacttggatgtaagaggtttggactgatcggtttatttttccaaagccgggctcggcatccttcgctgaatacatctctaatgccttccttgcctgcttctctagtttctctcttctgaagtgttcagctttagtaaatttgcctgttaaggcgcttctgtagtttatggcacacatttatctaaactgtcactgctacctccagtgtgaacscactccctgatgcctccatgataactgtcctcaaagttgttgtgtaatatgctgtttatctgagctggaatattaggaagtgttaaacccaagctttgtccctaccatttttcagccaccttactatctatgtatggccatattcaccacaacattttttcctttacttttttatcagaatttttccatgacgctattggaaatttccctcatatgttgtggattaaaatatatatatacgttcatgatttctatcctacaggaaacctgcataacattcatcagcaattttttcttttc

SEQ ID NO: 24178 - DNA, 600 bp, Chicken  19866894238212_1
tgctggatatcactggatttcactattactcagttttcttaaaatgtagacattggtcctgtgctttagcagttgattaagaaatattctaatccgtcacagattatgaagaaactaatggcatgtgaagtattttagtctttaagatctactgtaaatgatatgaaaaatagtgtcatttggctgatgcttaaatacatccatttcttttatgatatactgtcactaccctttcttgttcctttttttcatctcttctttcattcttagaggtttttttttcttgttgttgtttttttkttgttgttgttgttgttgtttttttgtaaaacatatgtatgcacacattagaaatttgatacttcctctccgatactgtcgcatcagagaagtggcacatttgtrtatgatgtgttgttgctagttcagtttgggaccacacatttcaatagataaggactgatgaaccaactggcttctttaagatatgaagaagtgaagcatttggaaccatgtctggatagaagcataatatggaaagtaaaacacctttttaactagccagatactcgatttgtcttgctccagtatatatgagag

SEQ ID NO: 24179 - DNA, 600 bp, Chicken  19866894238212_2
tcactattactcagttttcttaaaatgtagacattggtcctgtgctttagcagttgattaagaaatattctaatccgtcacagattatgaagaaactaatggcatgtgaagtattttagtctttaagatctactgtaaatgatatgaaaaatagtgtcatttggctgatgcttaaatacatccatttcttttatgatatactgtcactaccctttcttgttcctttttttcatctcttctttcattcttagaggtttttttttcttgttgttgtttttttkttgttgttgttgttgttgkttttttgtaaaacatatgtatgcacacattagaaatttgatacttcctctccgatactgtcgcatcagagaagtggcacatttgtrtatgatgtgttgttgctagttcagtttgggaccacacatttcaatagataaggactgatgaaccaactggcttctttaagatatgaagaagtgaagcatttggaaccatgtctggatagaagcataatatggaaagtaaaacacctttttaactagccagatactcgatttgtcttgctccagtatatatgagagagcaaattatagttattaa

SEQ ID NO: 24180 - DNA, 600 bp, Chicken  19866894238212_3
atgaagaaactaatggcatgtgaagtattttagtctttaagatctactgtaaatgatatgaaaaatagtgtcatttggctgatgcttaaatacatccatttcttttatgatatactgtcactaccctttcttgttcctttttttcatctcttctttcattcttagaggtttttttttcttgttgttgtttttttkttgttgttgttgttgttgtttttttgtaaaacatatgtatgcacacattagaaatttgatacttcctctccgatactgtcgcatcagagaagtggcacatttgtrtatgatgtgttgttgctagttcagtttgggaccacacatttcaatagataaggactgatgaaccaactggcttctttaagatatgaagaagtgaagcatttggaaccatgtctggatagaagcataatatggaaagtaaaacacctttttaactagccagatactcgatttgtcttgctccagtatatatgagagagcaaattatagttattaatacacatttgaaaaggaaatgaaataggtaacacacattttctatctgtagctttgtggcttactaaatttgtgttgcaaaatttg

SEQ ID NO: 24181 - DNA, 600 bp, Chicken  19866894238216_1
atcagtatacagttatctgttatttttaattgtactgtgtgtggttccagaacttctggtactgtataattttcaaaccttgctatgattagaaatttgcctttgttccttaatgtatttttaagcatcaggttttctcagtctttgtgacaaaaggaaccctgtctgtgactccccaaaccttctgcagaaacattttctatgagctctccttgccagccctttgctgggctgctgggttttgtctcaggagctgcagaaccccggggtccttgctgcaagaagattctttcatcaagragagagtgagagcaatggctcttcatgagaactgtaggaagtggaaggtttgtgggtctaggcatcttgctttttcttttcctctttcctttttccatttttcttggtatctagcttcccatggagccatttttatcataccccagcttcctgcgcacctcttgtcccatccctctgtcatgtaggtytgccttgtctttatttkctttccttctygtttaagtaatttctgatgtctgctagtttcttttccaagttcactatccattcttgcgcagtatcattcttccttagtttcat

SEQ ID NO: 24182 - DNA, 600 bp, Chicken  19866894238216_2
agaaacattttctatgagctctccttgccagccctttgctgggctgctgggttttgtctcaggagctgcagaaccccggggtccttgctgcaagaagattctttcatcaagragagagtgagagcaatggctcttcatgagaactgtaggaagtggaaggtttgtgggtctaggcatcttgctttttcttttcctctttcctttttccatttttcttggtatctagcttcccatggagccatttttatcataccccagcttcctgcgcacctcttgtcccatccctctgtcatgtaggtytgccttgtctttatttkctttccttctygtttaagtaatttctgatgtctgctagtttcttttccaagttcactatccattcttgcgcagtatcattcttccttagtttcatatactttcccagattacaataccattctggctccggatttgcacccctgcttccccatggcaygtccacgcaggtggacactgacagtggtgtatctcctgcccctggtgctgttctggaaagtttcatgcagccctgggacagcaggcaaccgtctgccaaattgcatcctttctggagtgccttta

SEQ ID NO: 24183 - DNA, 600 bp, Chicken  19866894238216_3
gctctccttgccagccctttgctgggctgctgggttttgtctcaggagctgcagaaccccggggtccttgctgcaagaagattctttcatcaagragagagtgagagcaatggctcttcatgagaactgtaggaagtggaaggtttgtgggtctaggcatcttgctttttcttttcctctttcctttttccatttttcttggtatctagcttcccatggagccatttttatcataccccagcttcctgcgcacctcttgtcccatccctctgtcatgtaggtytgccttgtctttatttkctttccttctygtttaagtaatttctgatgtctgctagtttcttttccaagttcactatccattcttgcgcagtatcattcttccttagtttcatatactttcccagattacaataccattctggctccggatttgcacccctgcttccccatggcaygtccacgcaggtggacactgacagtggtgtatctcctgcccctggtgctgttctggaaagtttcatgcagccctgggacagcaggcaaccgtctgccaaattgcatcctttctggagtgcctttatgcattgaaattgtaca

SEQ ID NO: 24184 - DNA, 600 bp, Chicken  19866894238216_4
cagccctttgctgggctgctgggttttgtctcaggagctgcagaaccccggggtccttgctgcaagaagattctttcatcaagragagagtgagagcaatggctcttcatgagaactgtaggaagtggaaggtttgtgggtctaggcatcttgctttttcttttcctctttcctttttccatttttcttggtatctagcttcccatggagccatttttatcataccccagcttcctgcgcacctcttgtcccatccctctgtcatgtaggtytgccttgtctttatttkctttccttctygtttaagtaatttctgatgtctgctagtttcttttccaagttcactatccattcttgcgcagtatcattcttccttagtttcatatactttcccagattacaataccattctggctccggatttgcacccctgcttccccatggcaygtccacgcaggtggacactgacagtggtgtatctcctgcccctggtgctgttctggaaagtttcatgcagccctgggacagcaggcaaccgtctgccaaattgcatcctttctggagtgcctttatgcattgaaattgtacatttcaagaact

SEQ ID NO: 24185 - DNA, 600 bp, Chicken  19866894238216_5
atcttgctttttcttttcctctttcctttttccatttttcttggtatctagcttcccatggagccatttttatcataccccagcttcctgcgcacctcttgtcccatccctctgtcatgtaggtytgccttgtctttatttkctttccttctygtttaagtaatttctgatgtctgctagtttcttttccaagttcactatccattcttgcgcagtatcattcttccttagtttcatatactttcccagattacaataccattctggctccggatttgcacccctgcttccccatggcaygtccacgcaggtggacactgacagtggtgtatctcctgcccctggtgctgttctggaaagtttcatgcagccctgggacagcaggcaaccgtctgccaaattgcatcctttctggagtgcctttatgcattgaaattgtacatttcaagaactgtatgtttcaaacagcttaaattgcgtagtagaagacagtctggaatttatgagcgtttttagtgcacatatcrtggtgttagcatgaacactggattttctcatccataaaccgagatggcacttattgatttgtgctatttattt

SEQ ID NO: 24186 - DNA, 600 bp, Chicken  19866894238216_6
ttagtttcatatactttcccagattacaataccattctggctccggatttgcacccctgcttccccatggcaygtccacgcaggtggacactgacagtggtgtatctcctgcccctggtgctgttctggaaagtttcatgcagccctgggacagcaggcaaccgtctgccaaattgcatcctttctggagtgcctttatgcattgaaattgtacatttcaagaactgtatgtttcaaacagcttaaattgcgtagtagaagacagtctggaatttatgagcgtttttagtgcacatatcrtggtgttagcatgaacactggattttctcatccataaaccgagatggcacttattgatttgtgctatttatttcaacatgtgaaagaaaccagaattacacgttacaagtcctcaatttttttttattgttaatcacatagaagggagcaaaaatgtatcatgagaaatacagcattaataaaatagactggttatgcaagcttcagaagtatgagtgaggcttacatctgttccttgggttttatctttttaaacagtacgtggaaaattctagtagctcgatagaattttatattgtg

SEQ ID NO: 24187 - DNA, 599 bp, Chicken  19866894238220_1
  misc_feature (1)..(70): n is any nucleotide
nnnnnnnnnnnnnnnnnnnnnnnnnnnnnnnnnnnnnnnnnnnnnnnnnnnnnnnnnnnnnnnnnnnnnntttatcttggtttctctgctttggctgagagatgcgcacagagaacttggaagatgcgggagggttggaccagacaggagcttcccctcctctccttcccaggacctctttctcccacttcgacctgatggttttgagctatcaggcttagataccacactggtgaaaatgagctctttccagaataagacttgttgcccctgggtcctctgctaccacagtgagatacygataataggcttcttgccttgggttcagcagcaaaaaactggaaaaggatatatgtctgagttcatctccaggacggagaatcaggaatgcttttttagctagaaaaggttttaatggaaattttattcagtgtaaagcaatcttccagaagaaaaacagctttgacacactaactgcccgtgtcttttttccatcacaaaatgtattattttgatatgaacaccaattttcatacctgtaattggtgttcttattcaytcaagggacatacttgttgctttatttgtgcaattcagtc

SEQ ID NO: 24188 - DNA, 600 bp, Chicken  19866894238220_2
acttgttgcccctgggtcctctgctaccacagtgagatacygataataggcttcttgccttgggttcagcagcaaaaaactggaaaaggatatatgtctgagttcatctccaggacggagaatcaggaatgcttttttagctagaaaaggttttaatggaaattttattcagtgtaaagcaatcttccagaagaaaaacagctttgacacactaactgcccgtgtcttttttccatcacaaaatgtattattttgatatgaacaccaattttcatacctgtaattggtgttcttattcaytcaagggacatacttgttgctttatttgtgcaattcagtcacaacaacgtaaaactaagcttatggtgcaagggtgcaggggttttccttgcctgtgttcggttctgcttcctgatatggaagtctctgtacctgacaggtatgtatgaaaagtgccgctatggaatattcagtttgttgaaaagcatagccattgatttgtgactcttttcttctgccgtagtctcatccattgtattaatgcaaatcaaatcactttcatactgaaacaatagctttcgtacacgtgtatggcattac

SEQ ID NO: 24189 - DNA, 600 bp, Chicken  19866894238220_3
atgtatgaaaagtgccgctatggaatattcagtttgttgaaaagcatagccattgatttgtgactcttttcttctgccgtagtctcatccattgtattaatgcaaatcaaatcactttcatactgaaacaatagctttcgtacacgtgtatggcattactacagctgcatttcacagaaagtatggatttactttaggaattcatcttccacgcttttttttttcttgagtaatgaagagtttagccccaaacaaatatttttcaaactaatttttgttaaccctgaatagcttaagtgwtagatagtgagaaatttttgttcacaggagcacttctgccagtgatggtggcatttggtatgggtcattgggaaactcggagggaagctgttggtgatatcagtatgtaaatagatgtactagggaattaattaaaatagactcrttcctatagtttggtgtaaattccaaatttataaagcttcgctttcaaaaaatatcctccttgctgttcaatgactgccagcccccaaatccctctcctttaggctggctccaaagtttccatgacacccgattacagtaccagaagaagaatgc

SEQ ID NO: 24190 - DNA, 600 bp, Chicken  19866894238220_4
gtgtatggcattactacagctgcatttcacagaaagtatggatttactttaggaattcatcttccacgcttttttttttcttgagtaatgaagagtttagccccaaacaaatatttttcaaactaatttttgttaaccctgaatagcttaagtgwtagatagtgagaaatttttgttcacaggagcacttctgccagtgatggtggcatttggtatgggtcattgggaaactcggagggaagctgttggtgatatcagtatgtaaatagatgtactagggaattaattaaaatagactcrttcctatagtttggtgtaaattccaaatttataaagcttcgctttcaaaaaatatcctccttgctgttcaatgactgccagcccccaaatccctctcctttaggctggctccaaagtttccatgacacccgattacagtaccagaagaagaatgccttgcagattcaattaaagcgtgagggaagaaaggtgaataagatgggaacttgcagccgccaagagaaaagcttcsgtgtttaaagagaatccagaataatatacttagcaaaggaagatttttaccataaatacaaaataaat

SEQ ID NO: 24191 - DNA, 600 bp, Chicken  19866894238220_5
cggagggaagctgttggtgatatcagtatgtaaatagatgtactagggaattaattaaaatagactcrttcctatagtttggtgtaaattccaaatttataaagcttcgctttcaaaaaatatcctccttgctgttcaatgactgccagcccccaaatccctctcctttaggctggctccaaagtttccatgacacccgattacagtaccagaagaagaatgccttgcagattcaattaaagcgtgagggaagaaaggtgaataagatgggaacttgcagccgccaagagaaaagcttcsgtgtttaaagagaatccagaataatatacttagcaaaggaagatttttaccataaatacaaaataaataaaaaatgaaatggaatagcagttgactgagaacgaagtcattgtgtattctcttctgtgtgtcatttctatagagtgtatctttttcagaagccgggtagagctgagatgataatttgcatgtcaagcaaactgtcttaatttcctcattcttgcttcacttttaagatgtctgtggcgggtatgtgttctaacaaacatgtttgtcaatgaagaaatcacagcaaatgct

SEQ ID NO: 24192 - DNA, 600 bp, Chicken  19866894238221_1
aagattatttatttataacagctgtgccttttgcaacaagaagctccaaatagaaaaggaaaagcaactttccttttggtgtaacgctctaattcttttgcaaggaaggggtagggtccataaacttcctgaaatttagcaaaagtgataaagattctatttttgtttctttttaattcttgcttcatataacatcttcatgttttgaagtgatctttgtgaggactttcatccacatcttaaagaattgacaatgttgcagactcgttatggttgtgcctttggactaagttcctaatwcccttaaaagtgggatggcaaccagattgttacaggaagtcaacatgtgcttagactgcttcttacaagcaggtggttagaatggtattacatctcagcacacactgcagttaactctatcctgaagctctgcatttttttttatcaaaatagcaacataattaaagaagacacgaagacataactgcagtgaaaatgctaagtcatggcctgaaccagtgattgagcacctggtgggaaggcagggccagcccaggtgcaatgcagtgcacctgagtgactgaaaggggcggaaccagg

SEQ ID NO: 24193 - DNA, 600 bp, Chicken  19866894238225_1
catgggtctgatggcctgacaaaagtgccctgcagcctgttctgtgatgtctgcaggaaaggatctctatttggtattagtcccggtcttgtcattgcaggtctgttaaaactctctggtattcctggccttggagttgctggttgctgagaataaggatcattcagaactggccttggtgttccaggaggttgagcatatggatcagaatgtctctgatttgttggagactgagcaaacaaatctgctggctgtgcaggtcttggtgtgggtggttgctgcatatacggatcaactgcrgcgggccgaggagttcctggaggttgggcataaggatcagcaactggccgaggagtacctggaggctgggaataagggtcctgagaagctggccttgaaatgggtccagactgagggaaagactcactctgttgccgcacgatccggggtggatgggcaaaagattcctttattgctggatggggagtaaggggaggctggctgtatggatcattaggctgattatgggaaaagttatccaccggcctcggtgtcagtgcaggcctttcatatggatcaacagcaacgcgccttggtgta

SEQ ID NO: 24194 - DNA, 600 bp, Chicken  19866894238238_1
taaaatgtaacaccactgagatatcgatactgatgcatcatttatagtagcagcagatggatgggaagcagcaaacataacccacatcttaaaagaacgctgaagaaaagtacatgcaatagaaatcttttactttctactaaagagggatttatactgccagtctgtgaagaggaagaagagtggcattcacactgaagtaatcgagctgatacatgctatgcctgaagtttcgaacggcgccagaaatcaagtttccacgacataagaggaaaagtcctcttgttaattattgtcaarttaagygaagggacacagaatataaaacatggtaaattctcatactggtgagataggatccccaaggtatctatactaaaactcacattacgtgattggcagaaacagatacctttgtacaggtggaaaacttaatcctcctgctattaagactggtaaatcatgaattatatgttggtgggtttttttgtttgtttgtttgtttgttttttaaatggaatttaaatattctccatgaagtgatccatctacaaaagaaggggagccagataaaaatagttacagttaaatggtggagag

SEQ ID NO: 24195 - DNA, 600 bp, Chicken  19866894238238_2
gtaacaccactgagatatcgatactgatgcatcatttatagtagcagcagatggatgggaagcagcaaacataacccacatcttaaaagaacgctgaagaaaagtacatgcaatagaaatcttttactttctactaaagagggatttatactgccagtctgtgaagaggaagaagagtggcattcacactgaagtaatcgagctgatacatgctatgcctgaagtttcgaacggcgccagaaatcaagtttccacgacataagaggaaaagtcctcttgttaattattgtcaarttaagygaagggacacagaatataaaacatggtaaattctcatactggtgagataggatccccaaggtatctatactaaaactcacattacgtgattggcagaaacagatacctttgtacaggtggaaaacttaatcctcctgctattaagactggtaaatcatgaattatatgttggtgggtttttttgtttgtttgtttgtttgttttttaaatggaatttaaatattctccatgaagtgatccatctacaaaagaaggggagccagataaaaatagttacagttaaatggtggagagtgtcta

SEQ ID NO: 24196 - DNA, 600 bp, Chicken  19866894238239_1
tttaaataaagtggactcctctttttgtagaataaaatgtaactctctgatatcacagaccacgtgtacaaataatgcatatttctactttaataaatattagcagaactagtaacatttcctgattgagctctgattttcctaacggacttgaagttttccaaagcctttctaattttctttcatgaagttaatcaccggtttacacagttcaaaaatatttatggaaataaagaaagtttcaaaacttttttaaagtaccatctaaataggatcaactatgaagggtattttcatatyataaaggaaaaaagtttgtagctatatccccatgaattccaaatattcctcattttatcatagctagatcactgctcaatttccctgataatgttaataaaactggcagctcagatttctgatcctaccaaacagaaaggacctgtgaaatgatgcaaattgcaagaaaacacagacagaaaaagccttatttagaagcatttcaataaaatatggagagctctggattgagctaactggactctttcctgctagggagattttaagcaccttctgctcacacagccatgaagtgaaaag

SEQ ID NO: 24197 - DNA, 600 bp, Chicken  19866894238240_1
gataatgaatcagagagaaaagttagagtgttcaatttccttttcctccatgccctgcacagaaatcactgaaaatcccaggagaaggctgaaaagaagcaagggcttcccacatcccaccattctttttctgatgactccaatagacagcagagcaggataaactctatttccctctcacataacccttaacccttcatgcaggaagcctattagacactgacagtgtgtagcccatcagtggaataatctcagatatccttcctgcttgggggtgggcagcagcctcccctgttcctsactcagctgggaagggagaccctggaaatgagaacaggcaggaaacagtgacacacaggtgacatacagagccattaccagactgctgagggcatcaaccaaggctggagcaatcatcagctacctggatggggctggaatagcttggaagtgatactgctccttatcagatccagcaaataaccatctgrattgcttcagagccctgatcagatgagctctgggctttctttgctctgtcctcatgcaaactctgcacacctccaccggccccacacaggctctgccccccacaaccac

SEQ ID NO: 24198 - DNA, 600 bp, Chicken  19866894238240_2
acccttcatgcaggaagcctattagacactgacagtgtgtagcccatcagtggaataatctcagatatccttcctgcttgggggtgggcagcagcctcccctgttcctsactcagctgggaagggagaccctggaaatgagaacaggcaggaaacagtgacacacaggtgacatacagagccattaccagactgctgagggcatcaaccaaggctggagcaatcatcagctacctggatggggctggaatagcttggaagtgatactgctccttatcagatccagcaaataaccatctgrattgcttcagagccctgatcagatgagctctgggctttctttgctctgtcctcatgcaaactctgcacacctccaccggccccacacaggctctgccccccacaaccacggatgctgtggaagagcagcagccaacacacagctgtgttctacatttctatggtatttaggtgagaaaaaaaaaaaaacaacacaagttcctgctgcacaaatatcagctcaccccttggccaggaaggaaaggttcgcaccaggcagcttcaccacacactcaggactctcagcatcccctccacgctc

SEQ ID NO: 24199 - DNA, 600 bp, Chicken  19866894238244_1
atttgagtgcatgtctgcaggtagttataagatcagttgaatgtaaatagcattaacctcttaactagttttgctgtggatcttctgtttgtttgctttaaacaaatcctactatttgaagcagagctgctgtattgctgtcacactgaagattttgcttactagagggcaacactatttgtttatgactagctatgattataagctgctgataacttgctgattataagctgtagttccctgtgctgccatgtaaaaagaccaggtgaaaacatgaggttcttgctgagatctgcctartctctggctgtatgattgagatatgtatgtgaagtgtttttatattctgtactgtacttatatttatttgtacattctttgagaatgtttttatatactgataattatgaattagtcacaaccagcactgagaagcctttagatgcttcatttctatgcctggagtctttctgaatgtggaagttcataccatagttgcaatataaaatgaaaccagatcactgggttttacagtgttccctcaggaaagagaggacaccaggctaaaaagaattccctggtagcagaggaactaagttt

SEQ ID NO: 24200 - DNA, 600 bp, Chicken  19866894238244_2
ttgagtgcatgtctgcaggtagttataagatcagttgaatgtaaatagcattaacctcttaactagttttgctgtggatcttctgtttgtttgctttaaacaaatcctactatttgaagcagagctgctgtattgctgtcacactgaagattttgcttactagagggcaacactatttgtttatgactagctatgattataagctgctgataacttgctgattataagctgtagttccctgtgctgccatgtaaaaagaccaggtgaaaacatgaggttcttgctgagatctgcctattrtctggctgtatgattgagatatgtatgtgaagtgtttttatattctgtactgtacttatatttatttgtacattctttgagaatgtttttatatactgataattatgaattagtcacaaccagcactgagaagcctttagatgcttcatttctatgcctggagtctttctgaatgtggaagttcataccatagttgcaatataaaatgaaaccagatcactgggttttacagtgttccctcaggaaagagaggacaccaggctaaaaagaattccctggtagcagaggaactaagttttg

SEQ ID NO: 24201 - DNA, 599 bp, Chicken  19866894238250_1
  misc_feature (1)..(172): n is any nucleotide
nnnnnnnnnnnnnnnnnnnnnnnnnnnnnnnnnnnnnnnnnnnnnnnnnnnnnnnnnnnnnnnnnnnnnnnnnnnnnnnnnnnnnnnnnnnnnnnnnnnnnnnnnnnnnnnnnnnnnnnnnnnnnnnnnnnnnnnnnnnnnnnnnnnnnnnnnnnnnnnnnnnnnnnnnnnnaagcccttgggggcattgagcttctcatgggagtaacgcacagcccggcggagaatccgtctcagcacatacctatggaacacaatcacagaaggtttgggttggaatggacctcaaagatcatctaktttcaatccctctgccacgagcagggttgccaaccaccgtatcaggctgcccagggccccatccaacctggcctcgaacacctccagggatggrgcatccacaccatctgtgggcagcccrtgtcagggcctcactgccctctcagtgataaaacagcagagcccctcaatgcaagtgtcacacctctgactggttctcaggggatgcaccagggatcctgcccagtcctcagccccacggctcagatttgctgtgtgcttaagagtcagtcccragtccagcagtacccgcagcacaa

SEQ ID NO: 24202 - DNA, 599 bp, Chicken  19866894238250_2
  misc_feature (1)..(78): n is any nucleotide
nnnnnnnnnnnnnnnnnnnnnnnnnnnnnnnnnnnnnnnnnnnnnnnnnnnnnnnnnnnnnnnnnnnnnnnnnnnnnnaagcccttgggggcattgagcttctcatgggagtaacgcacagcccggcggagaatccgtctcagcacatacctatggaacacaatcacagaaggtttgggttggaatggacctcaaagatcatctaktttcaatccctctgccacgagcagggttgccaaccaccgtatcaggctgcccagggccccatccaacctggcctcgaacacctccagggatggrgcatccacaccatctgtgggcagcccrtgtcagggcctcactgccctctcagtgataaaacagcagagcccctcaatgcaagtgtcacacctctgactggttctcaggggatgcaccagggatcctgcccagtcctcagccccacggctcagatttgctgtgtgcttaagagtcagtcccragtccagcagtacccgcagcacaacccctcagcccaaatttcattgcttttatgacagcagaactgcaccaaacaggcttatyaggcctatcagtccacagcagtcctcyctgtggga

SEQ ID NO: 24203 - DNA, 599 bp, Chicken  19866894238250_3
  misc_feature (1)..(51): n is any nucleotide
nnnnnnnnnnnnnnnnnnnnnnnnnnnnnnnnnnnnnnnnnnnnnnnnnnnaagcccttgggggcattgagcttctcatgggagtaacgcacagcccggcggagaatccgtctcagcacatacctatggaacacaatcacagaaggtttgggttggaatggacctcaaagatcatctaktttcaatccctctgccacgagcagggttgccaaccaccgtatcaggctgcccagggccccatccaacctggcctcgaacacctccagggatggrgcatccacaccatctgtgggcagcccrtgtcagggcctcactgccctctcagtgataaaacagcagagcccctcaatgcaagtgtcacacctctgactggttctcaggggatgcaccagggatcctgcccagtcctcagccccacggctcagatttgctgtgtgcttaagagtcagtcccragtccagcagtacccgcagcacaacccctcagcccaaatttcattgcttttatgacagcagaactgcaccaaacaggcttatyaggcctatcagtccacagcagtcctcyctgtgggagtcccaagaatrctcagacttgtgtgt

SEQ ID NO: 24204 - DNA, 600 bp, Chicken  19866894238250_4
ggaatggacctcaaagatcatctaktttcaatccctctgccacgagcagggttgccaaccaccgtatcaggctgcccagggccccatccaacctggcctcgaacacctccagggatggrgcatccacaccatctgtgggcagcccrtgtcagggcctcactgccctctcagtgataaaacagcagagcccctcaatgcaagtgtcacacctctgactggttctcaggggatgcaccagggatcctgcccagtcctcagccccacggctcagatttgctgtgtgcttaagagtcagtcccragtccagcagtacccgcagcacaacccctcagcccaaatttcattgcttttatgacagcagaactgcaccaaacaggcttatyaggcctatcagtccacagcagtcctcyctgtgggagtcccaagaatrctcagacttgtgtgtcctgtttttttggctggcccttgccacaagattcaaatacactgaactaacgctctgttacccgttggattcagacctcccagagacacaccagatcccgtgctgaacagaacggacacagcagcactgcagcagctccctccttaccctctgcc

SEQ ID NO: 24205 - DNA, 600 bp, Chicken  19866894238250_5
ccatccaacctggcctcgaacacctccagggatggrgcatccacaccatctgtgggcagcccrtgtcagggcctcactgccctctcagtgataaaacagcagagcccctcaatgcaagtgtcacacctctgactggttctcaggggatgcaccagggatcctgcccagtcctcagccccacggctcagatttgctgtgtgcttaagagtcagtcccragtccagcagtacccgcagcacaacccctcagcccaaatttcattgcttttatgacagcagaactgcaccaaacaggcttatyaggcctatcagtccacagcagtcctcyctgtgggagtcccaagaatrctcagacttgtgtgtcctgtttttttggctggcccttgccacaagattcaaatacactgaactaacgctctgttacccgttggattcagacctcccagagacacaccagatcccgtgctgaacagaacggacacagcagcactgcagcagctccctccttaccctctgccagtgttgtcaggtctgccaccgtcagagagggccagcgtgatggtccgtgcgtggtctgccagcacacggtatgccatgtcta

SEQ ID NO: 24206 - DNA, 600 bp, Chicken  19866894238250_6
agggatggrgcatccacaccatctgtgggcagcccrtgtcagggcctcactgccctctcagtgataaaacagcagagcccctcaatgcaagtgtcacacctctgactggttctcaggggatgcaccagggatcctgcccagtcctcagccccacggctcagatttgctgtgtgcttaagagtcagtcccragtccagcagtacccgcagcacaacccctcagcccaaatttcattgcttttatgacagcagaactgcaccaaacaggcttatyaggcctatcagtccacagcagtcctcyctgtgggagtcccaagaatrctcagacttgtgtgtcctgtttttttggctggcccttgccacaagattcaaatacactgaactaacgctctgttacccgttggattcagacctcccagagacacaccagatcccgtgctgaacagaacggacacagcagcactgcagcagctccctccttaccctctgccagtgttgtcaggtctgccaccgtcagagagggccagcgtgatggtccgtgcgtggtctgccagcacacggtatgccatgtctatgccatccgcatcctcagcaccaacct

SEQ ID NO: 24207 - DNA, 600 bp, Chicken  19866894238250_7
atctgtgggcagcccrtgtcagggcctcactgccctctcagtgataaaacagcagagcccctcaatgcaagtgtcacacctctgactggttctcaggggatgcaccagggatcctgcccagtcctcagccccacggctcagatttgctgtgtgcttaagagtcagtcccragtccagcagtacccgcagcacaacccctcagcccaaatttcattgcttttatgacagcagaactgcaccaaacaggcttatyaggcctatcagtccacagcagtcctcyctgtgggagtcccaagaatrctcagacttgtgtgtcctgtttttttggctggcccttgccacaagattcaaatacactgaactaacgctctgttacccgttggattcagacctcccagagacacaccagatcccgtgctgaacagaacggacacagcagcactgcagcagctccctccttaccctctgccagtgttgtcaggtctgccaccgtcagagagggccagcgtgatggtccgtgcgtggtctgccagcacacggtatgccatgtctatgccatccgcatcctcagcaccaacctgccccatgtacggcctggca

SEQ ID NO: 24208 - DNA, 600 bp, Chicken  19866894238252_1
ttttttagccccaaaactagcagtgatctacaaaccattgcaccttactttaaatttaaaaaaccttaaattttaagacatcatcttttctatgactttggtgttaaatcagaatatttctaatatagactctcagaatggattaaagttcaagaattgcactgtgatgagattaaagcaggaatgaaattactttttacaagtaaatacatgctttgtcaatcgcagtgttcctcttttctgagaattttgtcaaggatgttgtgcaggctcactacatcacaagaagcctttatagargacctgagctatttcaccattgctacagcattcagtaataagtggcagatgtaacagaagagacgggcaatgcaattagggtttgaatagtggatgccccattcttggagacacataaggtcaggctggacagggctctgagcaccctgatcaagctgtaggtgtccctcttcattgcaggggagttggactagatggcctttaagagtcccttccaactcaaaccatcctgcaactctatggttctatgaatgttagaatggaatttgaggaaagtgtcttgcaaaattcttcctttaa

SEQ ID NO: 24209 - DNA, 600 bp, Chicken  19866894238254_1
ttgtcgttaaagctgtctaataatttccatttccttttacagatgcctctggatatgaagtttatatgagttaaatctttgtttgctaattctgaaacagactctctattgatttgacttcctgtgctgtaaaaccctgctgcttccatgcacatgcttctgggccaactgggggtcaacagatacttcccaggaaagaacttgacggcttttcctttcttcacttgaaatgcaaagtcctctctctttgaacgttatagaaaagtgcagtaatggcaaagctacaggggaaatggatcyataaatttaaaaggtaacagtcgggagtaatctctctctgttctggtatggggtacacacagctggccaaccrytgggtgtttctggaatgcactgcaacaccagcagaggctcgttctttgtctcccagttttaacttgacaagatcctcaagtgtatatttatggtttccttcctgacctgctcccagagataagtactttcttgaagtagatggcaggccagtactggctgggagaaagtttctctttacattgtctaacggaagctacagaatttgctcctgattcctctgttaaa

SEQ ID NO: 24210 - DNA, 600 bp, Chicken  19866894238254_2
aatctttgtttgctaattctgaaacagactctctattgatttgacttcctgtgctgtaaaaccctgctgcttccatgcacatgcttctgggccaactgggggtcaacagatacttcccaggaaagaacttgacggcttttcctttcttcacttgaaatgcaaagtcctctctctttgaacgttatagaaaagtgcagtaatggcaaagctacaggggaaatggatcyataaatttaaaaggtaacagtcgggagtaatctctctctgttctggtatggggtacacacagctggccaaccrytgggtgtttctggaatgcactgcaacaccagcagaggctcgttctttgtctcccagttttaacttgacaagatcctcaagtgtatatttatggtttccttcctgacctgctcccagagataagtactttcttgaagtagatggcaggccagtactggctgggagaaagtttctctttacattgtctaacggaagctacagaatttgctcctgattcctctgttaaaccaccacagccaaaggacaragcatttctagctgatgtacatttggttaccctgaaagtgatataaagaaatt

SEQ ID NO: 24211 - DNA, 600 bp, Chicken  19866894238254_3
atctttgtttgctaattctgaaacagactctctattgatttgacttcctgtgctgtaaaaccctgctgcttccatgcacatgcttctgggccaactgggggtcaacagatacttcccaggaaagaacttgacggcttttcctttcttcacttgaaatgcaaagtcctctctctttgaacgttatagaaaagtgcagtaatggcaaagctacaggggaaatggatcyataaatttaaaaggtaacagtcgggagtaatctctctctgttctggtatggggtacacacagctggccaaccrytgggtgtttctggaatgcactgcaacaccagcagaggctcgttctttgtctcccagttttaacttgacaagatcctcaagtgtatatttatggtttccttcctgacctgctcccagagataagtactttcttgaagtagatggcaggccagtactggctgggagaaagtttctctttacattgtctaacggaagctacagaatttgctcctgattcctctgttaaaccaccacagccaaaggacaragcatttctagctgatgtacatttggttaccctgaaagtgatataaagaaattt

SEQ ID NO: 24212 - DNA, 600 bp, Chicken  19866894238254_4
tcgggagtaatctctctctgttctggtatggggtacacacagctggccaaccrytgggtgtttctggaatgcactgcaacaccagcagaggctcgttctttgtctcccagttttaacttgacaagatcctcaagtgtatatttatggtttccttcctgacctgctcccagagataagtactttcttgaagtagatggcaggccagtactggctgggagaaagtttctctttacattgtctaacggaagctacagaatttgctcctgattcctctgttaaaccaccacagccaaaggacaragcatttctagctgatgtacatttggttaccctgaaagtgatataaagaaatttaaaaactcctatgcagtatagcattcgatcgtgtactttttcayggactttgatgaagagaggtggattacaaactgtgaaaatgttcttcatttcacatgggacagcattttctgtttcatttattatactgagttttcctacatggatatccctaatacaagtctgctgtgcccctgggttctctttcatattcacgtcactgaagattgactttttttggaccccaactattctgatacattt

SEQ ID NO: 24213 - DNA, 600 bp, Chicken  19866894238254_5
tttgtctcccagttttaacttgacaagatcctcaagtgtatatttatggtttccttcctgacctgctcccagagataagtactttcttgaagtagatggcaggccagtactggctgggagaaagtttctctttacattgtctaacggaagctacagaatttgctcctgattcctctgttaaaccaccacagccaaaggacaragcatttctagctgatgtacatttggttaccctgaaagtgatataaagaaatttaaaaactcctatgcagtatagcattcgatcgtgtactttttcayggactttgatgaagagaggtggattacaaactgtgaaaatgttcttcatttcacatgggacagcattttctgtttcatttattatactgagttttcctacatggatatccctaatacaagtctgctgtgcccctgggttctctttcatattcacgtcactgaagattgactttttttggaccccaactattctgatacatttaaaaattattccttcaacagcaatactttagaaagtaaagtaggaatatccactcaggaaaactcagtatgctaaaaagtgktttgctattttattta

SEQ ID NO: 24214 - DNA, 600 bp, Chicken  19866894238254_6
tcgtgtactttttcayggactttgatgaagagaggtggattacaaactgtgaaaatgttcttcatttcacatgggacagcattttctgtttcatttattatactgagttttcctacatggatatccctaatacaagtctgctgtgcccctgggttctctttcatattcacgtcactgaagattgactttttttggaccccaactattctgatacatttaaaaattattccttcaacagcaatactttagaaagtaaagtaggaatatccactcaggaaaactcagtatgctaaaaagtgktttgctattttatttaccytgggaaacggggaatgataaataacaactgctgttttagaaacagcagaaagcagtagattctgcaaactcaycatgcatctacagctgcattcagggctcacacaacctttggtgcaggtctgcttctctttctgctcctggcctgctatcctgcaccataaagggcatgaatgatgccaaaggtcaatagctgaattcgaggttctgatgggggcacatgtctattgataaggcaagatgcaatagttacaaataggtgataaagtagcttggtcacag

SEQ ID NO: 24215 - DNA, 600 bp, Chicken  19866894238254_7
ctttgatgaagagaggtggattacaaactgtgaaaatgttcttcatttcacatgggacagcattttctgtttcatttattatactgagttttcctacatggatatccctaatacaagtctgctgtgcccctgggttctctttcatattcacgtcactgaagattgactttttttggaccccaactattctgatacatttaaaaattattccttcaacagcaatactttagaaagtaaagtaggaatatccactcaggaaaactcagtatgctaaaaagtgktttgctattttatttaccytgggaaacggggaatgataaataacaactgctgttttagaaacagcagaaagcagtagattctgcaaactcaycatgcatctacagctgcattcagggctcacacaacctttggtgcaggtctgcttctctttctgctcctggcctgctatcctgcaccataaagggcatgaatgatgccaaaggtcaatagctgaattcgaggttctgatgggggcacatgtctattgataaggcaagatgcaatagttacaaataggtgataaagtagcttggtcacagtgtcctaatatttacccta

SEQ ID NO: 24216 - DNA, 600 bp, Chicken  19866894238254_8
atttattatactgagttttcctacatggatatccctaatacaagtctgctgtgcccctgggttctctttcatattcacgtcactgaagattgactttttttggaccccaactattctgatacatttaaaaattattccttcaacagcaatactttagaaagtaaagtaggaatatccactcaggaaaactcagtatgctaaaaagtgktttgctattttatttaccytgggaaacggggaatgataaataacaactgctgttttagaaacagcagaaagcagtagattctgcaaactcaycatgcatctacagctgcattcagggctcacacaacctttggtgcaggtctgcttctctttctgctcctggcctgctatcctgcaccataaagggcatgaatgatgccaaaggtcaatagctgaattcgaggttctgatgggggcacatgtctattgataaggcaagatgcaatagttacaaataggtgataaagtagcttggtcacagtgtcctaatatttaccctacagagggcaaataggtggtggagcagctgctccttcaggagctctgggagaggacaatggtgagggaccactc

SEQ ID NO: 24217 - DNA, 600 bp, Chicken  19866894238257_1
aatgaagtataataatctaaaaataaaataataaggcttaccttccttttgtcctatattttcttttcatcccaacatccatctaggaggccaatcttcagctacagtgtccttaaaacctatttgattgaggtaggagaatttatcttaatttagctaagattaatgtagtcgcagtagtgatggagatgatgggcacatatcagttatgtcctaagtattttggaaccatgacagaatattgtatgccagaagcataaaagtaccttaagagttgcataagcagcgtgatgtttattytttttattaatcatgaaagatattagtaacaattattaaaagataccaacttgtgtagacattaaaagaatgcattttgccatggtcctaaacacaatggtatgtctagtggctatttacaccagccatgcatgtagaagctggtttatcatcagaaaagtgcaataatagacagggtagcaaaggaacagtaaagctgtataccgtattatgagacatgtcgagtttagatacagcagacaatatgttacaacttggttttgtaatattcaggttatcaaaacatactttgaaactgtg

SEQ ID NO: 24218 - DNA, 600 bp, Chicken  19866894238257_2
tttgccatggtcctaaacacaatggtatgtctagtggctatttacaccagccatgcatgtagaagctggtttatcatcagaaaagtgcaataatagacagggtagcaaaggaacagtaaagctgtataccgtattatgagacatgtcgagtttagatacagcagacaatatgttacaacttggttttgtaatattcaggttatcaaaacatactttgaaactgtgaatatttagtataatcaatagaaatcatttgaaagaaaaaggtgaagcagaggtcagttgggggttgccattcaygggctgcccttaactgtttattgcttccccttttcccagcaaatcctctatttaagaaggattgtaaggcctgtgtaatcattgaggatttacttcytttggtgccacagagctgcattcagcagcaatgctactgtttcttctttcttttttttaaatgtacacgacacttctaaaaaggtgcagatgaatgttaccaggaagtgtttttgatagcacacagttataaattgtttgaaatttgaaatgtagatagtcttatgttcaaattctgcccttatgctgacaaaagrcgcagta

SEQ ID NO: 24219 - DNA, 600 bp, Chicken  19866894238257_3
cagggtagcaaaggaacagtaaagctgtataccgtattatgagacatgtcgagtttagatacagcagacaatatgttacaacttggttttgtaatattcaggttatcaaaacatactttgaaactgtgaatatttagtataatcaatagaaatcatttgaaagaaaaaggtgaagcagaggtcagttgggggttgccattcaygggctgcccttaactgtttattgcttccccttttcccagcaaatcctctatttaagaaggattgtaaggcctgtgtaatcattgaggatttacttcytttggtgccacagagctgcattcagcagcaatgctactgtttcttctttcttttttttaaatgtacacgacacttctaaaaaggtgcagatgaatgttaccaggaagtgtttttgatagcacacagttataaattgtttgaaatttgaaatgtagatagtcttatgttcaaattctgcccttatgctgacaaaagrcgcagtagttctgcagaatcttaggtgcagatgatgtaaatgggaattctggctaatgaggtcaagagttttttatttttttaacatgtgctggtacaaaatct

SEQ ID NO: 24220 - DNA, 539 bp, Chicken  19866894238257_4
cattcaygggctgcccttaactgtttattgcttccccttttcccagcaaatcctctatttaagaaggattgtaaggcctgtgtaatcattgaggatttacttcytttggtgccacagagctgcattcagcagcaatgctactgtttcttctttcttttttttaaatgtacacgacacttctaaaaaggtgcagatgaatgttaccaggaagtgtttttgatagcacacagttataaattgtttgaaatttgaaatgtagatagtcttatgttcaaattctgcccttatgctgacaaaagrcgcagtagttctgcagaatcttaggtgcagatgatgtaaatgggaattctggctaatgaggtcaagagttttttatttttttaacatgtgctggtacaaaatcttcttgattctcagttctgttttaaaatatagaggaagtctaaatatttaatagttagggtgaaggctaagtcaccacttccttcactgtctgtgttgaacagagaacataatgcttcaagaaaactgcatgatat

SEQ ID NO: 24221 - DNA, 600 bp, Chicken  19866894238267_1
aaggataaaataacatctgttaaaaaaaaaaaaaagaaaaggaaagaaacaaagaaaaaagcctgttgaatacccatccaattagggcttccaaccgatcctcattaaacatccgctcctgacatttgacagtggagtttagatgagagctgtgaaaaatccccttgaaaaggctgactgacgtttcgcagagaagtgttttcataggaacactattagtttacaaaacccaagctttcagccaaccacgacaaaaccccttctgggcacggcaatggggtaaggtgaccaactccttgyggtgatgagcgcaggcagcccccggccgtggctcctcccacgtagggtctttgaaaaggagcatttaataagatacagaagttggattttttttttggctgagctgaatatggaatcgccatggcaacctttcttcggaggtgatcccagtcaggtagcaacagcagcgatgagcaaaaggtcagccccgcagacgaagatgggcactgatgaagagctttaacaagtcccggaggaggtggcatctcagagccacccaaagggctcggacacatcctggaaggtggagaattctgagtg

SEQ ID NO: 24222 - DNA, 600 bp, Chicken  19866894238267_2
cttccaaccgatcctcattaaacatccgctcctgacatttgacagtggagtttagatgagagctgtgaaaaatccccttgaaaaggctgactgacgtttcgcagagaagtgttttcataggaacactattagtttacaaaacccaagctttcagccaaccacgacaaaaccccttctgggcacggcaatggggtaaggtgaccaactccttgyggtgatgagcgcaggcagcccccggccgtggctcctcccacgtagggtctttgaaaaggagcatttaataagatacagaagttggaytttttttttggctgagctgaatatggaatcgccatggcaacctttcttcggaggtgatcccagtcaggtagcaacagcagcgatgagcaaaaggtcagccccgcagacgaagatgggcactgatgaagagctttaacaagtcccggaggaggtggcatctcagagccacccaaagggctcggacacatcctggaaggtggagaattctgagtgcagcactcatgggatgctcccagccaagaaggagacagggcccagcagtgtcactcctgcaagggcatagggagccgtgagaccgtg

SEQ ID NO: 24223 - DNA, 464 bp, Chicken  19866894238267_3
gcactgatgaagagctttaacaagtcccggaggaggtggcatctcagagccacccaaagggctcggacacatcctggaaggtggagaattctgagtgcagcactcatgggatgctcccagccaagaaggagacagggcccagcagtgtcactcctgcaagggcatagggagccgtgagaccgtggggatccaccactgggcaccctgtgctgctggggaggagctgggaaatcctttgcaaatactcctgtacccaagggaaagcaataggtgtgggaagaaaaccatctgaagtatcakctaaaggccaattacaaactgatccgggatttgcacttcctgacgccccgaggttctccaaggaacatcctcatacgaagggctcggtgtgatttatgacaacgccccactgctgttatcctcacacctcagacaaaggaaagaggtggagaggttttgccatc

SEQ ID NO: 24224 - DNA, 600 bp, Chicken  19866894238268_1
ttggcaaactactgaaaactgaaaatttatggaattctgttctttgccaacaaaatagacataaagaatttatatttaacacatggctgtaaggacaacacagaaaggactcagatgtttaaacttctttctttcttcaaatgaatgctcaggagccctggtccacagtgagaatcttgtcattctgtgcatcactgcattgtgagttaatttttgtcactgatttttaaaactataatgtttacatttgttttcttcagtggcctggcatcatacaacttattaaattgatctagactmagtgcattgtctaaatcttctttcattagtggaaatggcaaaattttggcaaaaagatgaacgtgagaaaygtgttgattttgaagagaaaataaaaatatatcyaaattgctatgccacatgagaatttggagaaatttactctcctgaggtatacatcaggtcaaaccagctctctgcagcacaacacattcctctgttgcaaagtggggctgatcactccagcatataaactagctccttcacctgaatatttttttattaattataatttsggtaaaatgatggtaataacagaaa

SEQ ID NO: 24225 - DNA, 600 bp, Chicken  19866894238268_2
atatttaacacatggctgtaaggacaacacagaaaggactcagatgtttaaacttctttctttcttcaaatgaatgctcaggagccctggtccacagtgagaatcttgtcattctgtgcatcactgcattgtgagttaatttttgtcactgatttttaaaactataatgtttacatttgttttcttcagtggcctggcatcatacaacttattaaattgatctagactmagtgcattgtctaaatcttctttcattagtggaaatggcaaaattttggcaaaaagatgaacgtgagaaaygtgttgattttgaagagaaaataaaaatatatcyaaattgctatgccacatgagaatttggagaaatttactctcctgaggtatacatcaggtcaaaccagctctctgcagcacaacacattcctctgttgcaaagtggggctgatcactccagcatataaactagctccttcacctgaatatttttttattaattataatttsggtaaaatgatggtaataacagaaacaggaaaggggaaagtaagcaaaattctgaaagatagaaaatcttaaaatattcatgtgatacaggtgtcc

SEQ ID NO: 24226 - DNA, 600 bp, Chicken  19866894238268_3
aggactcagatgtttaaacttctttctttcttcaaatgaatgctcaggagccctggtccacagtgagaatcttgtcattctgtgcatcactgcattgtgagttaatttttgtcactgatttttaaaactataatgtttacatttgttttcttcagtggcctggcatcatacaacttattaaattgatctagactmagtgcattgtctaaatcttctttcattagtggaaatggcaaaattttggcaaaaagatgaacgtgagaaaygtgttgattttgaagagaaaataaaaatatatcyaaattgctatgccacatgagaatttggagaaatttactctcctgaggtatacatcaggtcaaaccagctctctgcagcacaacacattcctctgttgcaaagtggggctgatcactccagcatataaactagctccttcacctgaatatttttttattaattataatttsggtaaaatgatggtaataacagaaacaggaaaggggaaagtaagcaaaattctgaaagatagaaaatcttaaaatattcatgtgatacaggtgtccaaaaaccagaaagatgcataaaattttcttgcag

SEQ ID NO: 24227 - DNA, 591 bp, Chicken  19866894238268_4
caacttattaaattgatctagactmagtgcattgtctaaatcttctttcattagtggaaatggcaaaattttggcaaaaagatgaacgtgagaaaygtgttgattttgaagagaaaataaaaatatatcyaaattgctatgccacatgagaatttggagaaatttactctcctgaggtatacatcaggtcaaaccagctctctgcagcacaacacattcctctgttgcaaagtggggctgatcactccagcatataaactagctccttcacctgaatatttttttattaattataatttsggtaaaatgatggtaataacagaaacaggaaaggggaaagtaagcaaaattctgaaagatagaaaatcttaaaatattcatgtgatacaggtgtccaaaaaccagaaagatgcataaaattttcttgcaggagcaaaatgcatacagcatcttgggtgtattgccataaaaataatagcaaacacatttagccgtaagcagggaaaatgaatgctaacacctgtgatccaaagtattttctctagcaggtggattcaaagtgttaatcctttttgatgcagtggcaacaaa

SEQ ID NO: 24228 - DNA, 600 bp, Chicken  19866894238273_1
cttcatactttgaagctgtatatcaccgtcttgcagagtcattttgcacacagctaaaggtatccaaagaaaagcacccaaaaaataatgattacatctctaatttgaggaagagagaacagaactgacattttgaacaaatgatgttctagccacatggttttctctggaaaacagatatttaggttcctatgaaatgttggctttgaaatgaactgagatatgctcacaaaaacatgctattggaaactcttcagcttcctgatttgtacctttggaaagtaggcacgatgtgaaaasgaaaaatgcaatctgccatgtgaaagtcaaataaatggatgcaaaaaggaagcttagtaaagctgtctttgtgtcccacagcccaaggraaagcccagatcttctcaaaggtcctcactcagcatcaaattgctgcagatgtacctgagctaaaccgatgtacagctacaactgctctgacaacacgagtctgcagactgagcatcaccaccacacttctgtgactctgtcaaccttgccaacaccgacatatttttttcctagtgttaaactgagaagtagactcatttcagaggctcc

SEQ ID NO: 24229 - DNA, 600 bp, Chicken  19866894238273_2
gattacatctctaatttgaggaagagagaacagaactgacattttgaacaaatgatgttctagccacatggttttctctggaaaacagatatttaggttcctatgaaatgttggctttgaaatgaactgagatatgctcacaaaaacatgctattggaaactcttcagcttcctgatttgtacctttggaaagtaggcacgatgtgaaaasgaaaaatgcaatctgccatgtgaaagtcaaataaatggatgcaaaaaggaagcttagtaaagctgtctttgtgtcccacagcccaaggraaagcccagatcttctcaaaggtcctcactcagcatcaaattgctgcagatgtacctgagctaaaccgatgtacagctacaactgctctgacaacacgagtctgcagactgagcatcaccaccacacttctgtgactctgtcaaccttgccaacaccgacatatttttttcctagtgttaaactgagaagtagactcatttcagaggctcctttatctgtagatctgcctgtctcactggtgcacactcatagcatctctgggtatgtgcacaaattccctctctgcatgagctctcccg

SEQ ID NO: 24230 - DNA, 600 bp, Chicken  19866894238273_3
tcaccaccacacttctgtgactctgtcaaccttgccaacaccgacatatttttttcctagtgttaaactgagaagtagactcatttcagaggctcctttatctgtagatctgcctgtctcactggtgcacactcatagcatctctgggtatgtgcacaaattccctctctgcatgagctctcccgccccccacccccaaaaatgataacatatctcaaagaatagtggcattatttttctaagcggaacactcaacacaggatattaaatacagcactgatttcgaccttataaagcacragtgaaatgagctgtagctgttacaaggcaagaaaggtccgggtgaccaaactcagagaaggaagaagcrtatgtctggagattggtttgcgccccaaaactgtctccttttccacgtcagtctaagaaagccaccagccacaacctttttctatatggaagcaatgcttgtgaacaatatggaacatctatgggccgtggcacagcagagcaatgactgcagcgagcgaatgctctsctcctattgagggactgacagcacagcagtgagacagctcacgatggccacagccctgagcc

SEQ ID NO: 24231 - DNA, 600 bp, Chicken  19866894238273_4
agaagtagactcatttcagaggctcctttatctgtagatctgcctgtctcactggtgcacactcatagcatctctgggtatgtgcacaaattccctctctgcatgagctctcccgccccccacccccaaaaatgataacatatctcaaagaatagtggcattatttttctaagcggaacactcaacacaggatattaaatacagcactgatttcgaccttataaagcacragtgaaatgagctgtagctgttacaaggcaagaaaggtccgggtgaccaaactcagagaaggaagaagcrtatgtctggagattggtttgcgccccaaaactgtctccttttccacgtcagtctaagaaagccaccagccacaacctttttctatatggaagcaatgcttgtgaacaatatggaacatctatgggccgtggcacagcagagcaatgactgcagcgagcgaatgctctsctcctattgagggactgacagcacagcagtgagacagctcacgatggccacagccctgagcccatcttgagttctgctgcagagctctgcaagatttcctgtaagcttcccttgcccaagggcagaatttgt

SEQ ID NO: 24232 - DNA, 600 bp, Chicken  19866894238273_5
ctaagcggaacactcaacacaggatattaaatacagcactgatttcgaccttataaagcacragtgaaatgagctgtagctgttacaaggcaagaaaggtccgggtgaccaaactcagagaaggaagaagcrtatgtctggagattggtttgcgccccaaaactgtctccttttccacgtcagtctaagaaagccaccagccacaacctttttctatatggaagcaatgcttgtgaacaatatggaacatctatgggccgtggcacagcagagcaatgactgcagcgagcgaatgctctsctcctattgagggactgacagcacagcagtgagacagctcacgatggccacagccctgagcccatcttgagttctgctgcagagctctgcaagatttcctgtaagcttcccttgcccaagggcagaatttgttcttcagctggagatgtaaaagaccaacctctttccttgcacattatatcgcaccaaacgcatttccacccacgaaacaacacccacattgtttggaaggagaatgaactgagaggcatcttctcgagctttttgaagagaagctattgtagctgcggcggtcttgtt

SEQ ID NO: 24233 - DNA, 600 bp, Chicken  19866894238298_1
gcaacatagaaattctctaggtgcgttttatagtcatctttaaaggtattattttgctgcttagagaactgtattcttcattaggcagccaatgttactcacaaaatgacctctaaaatcatactatttttttccttcatatctcactcatatggatccaaaaaattctctgctaccagctcagaaaatgaagtcaacacccaacttgttacccagctgctgatttgagaaggctacggtggatctactgaaaagacagaagtatgtgttaaaaaaataaagccaactaaacgcatagtraagtgatacgtgaacaaacataacattctacattataaaatctactgcgtgtttggctctggatgatctctacyttaaatgaaaataaaaagtgtatgttacaaacatttgaactgaggagatcaatagactgatcagatgtatctaaagtcggaacaatgaggtacgctcttcaatatgactgagtcacaaaaatcccagatataaaggaatgcattaaatcaggtaatagctgatgctcgcttaacaacaatattggtaatggtaaataaagcttgttcagtgatagcataaaatacg

SEQ ID NO: 24234 - DNA, 600 bp, Chicken  19866894238298_2
tcttcattaggcagccaatgttactcacaaaatgacctctaaaatcatactatttttttccttcatatctcactcatatggatccaaaaaattctctgctaccagctcagaaaatgaagtcaacacccaacttgttacccagctgctgatttgagaaggctacggtggatctactgaaaagacagaagtatgtgttaaaaaaataaagccaactaaacgcatagtraagtgatacgtgaacaaacataacattctacattataaaatctactgcgtgtttggctctggatgatctctacyttaaatgaaaataaaaagtgtatgttacaaacatttgaactgaggagatcaatagactgatcagatgtatctaaagtcggaacaatgaggtacgctcttcaatatgactgagtcacaaaaatcccagatataaaggaatgcattaaatcaggtaatagctgatgctcgcttaacaacaatattggtaatggtaaataaagcttgttcagtgatagcataaaatacgagagggacaattaataggttgttttgcttttccctgtatggcaagacgtgcaagttttggaaaggactatctag

SEQ ID NO: 24235 - DNA, 599 bp, Chicken  19866894238301_1
  misc_feature (1)..(106): n is any nucleotide
nnnnnnnnnnnnnnnnnnnnnnnnnnnnnnnnnnnnnnnnnnnnnnnnnnnnnnnnnnnnnnnnnnnnnnnnnnnnnnnnnnnnnnnnnnnnnnnnnnnnnnnnnncaatgagaatgaaaaagatttaaatgtgtaggtaatgagttagaggttttcttataaataatatttttcctcctctttgaaagcaatttagtgtacagttcaagtacagagaatctgcttgggaaattatcagtcttattgaagatgtttctttcttatatgcatagtttaatattgttaatatagatcttttrcatggtaattagcagctactaaagacttaaaagctgtacacaatggaaataaaatatgtttctaccaatcacatcattttcttattatctctgtagtgttactatagcyacataaaaccttaagtaatagcaaaaatctttatatgatctatcaacttgttaaatataaatacagttgcaattaatagtggtcaggctttttgatgagggctatgaagtattctggagaaacaaattgcattgccatttcattaacgtaaggtggcagatggaagtcttgtactgaaaatgaccactat

SEQ ID NO: 24236 - DNA, 600 bp, Chicken  19866894238301_2
tgagaatgaaaaagatttaaatgtgtaggtaatgagttagaggttttcttataaataatatttttcctcctctttgaaagcaatttagtgtacagttcaagtacagagaatctgcttgggaaattatcagtcttattgaagatgtttctttcttatatgcatagtttaatattgttaatatagatcttttrcatggtaattagcagctactaaagacttaaaagctgtacacaatggaaataaaatatgtttctaccaatcacatcattttcttattatctctgtagtgttactatagcyacataaaaccttaagtaatagcaaaaatctttatatgatctatcaacttgttaaatataaatacagttgcaattaatagtggtcaggctttttgatgagggctatgaagtattctggagaaacaaattgcattgccatttcattaacgtaaggtggcagatggaagtcttgtactgaaaatgaccactatattttgagaaagcattaacataggtgatgcacagtaatttgtaatgtaggtaatattttccctttctgaaaatgcctatttaaaattttgaggaattagacttttgctcc

SEQ ID NO: 24237 - DNA, 600 bp, Chicken  19866894238301_3
taaaaccttaagtaatagcaaaaatctttatatgatctatcaacttgttaaatataaatacagttgcaattaatagtggtcaggctttttgatgagggctatgaagtattctggagaaacaaattgcattgccatttcattaacgtaaggtggcagatggaagtcttgtactgaaaatgaccactatattttgagaaagcattaacataggtgatgcacagtaatttgtaatgtaggtaatattttccctttctgaaaatgcctatttaaaattttgaggaattagacttttgctccagyttcttaggagtggagaccttcttattgagtggagagcaagctagagattaacaagtaactttttgcttttgctggcacagcttccttttatgtttctgcaaaaccaaacaaaagactgctgctaatgttttgctcatcagctagtaagtggaggccatttatggcagacatgtgaagcttatctccagctgctgttctaatgttgcagaaagcttttgctgcagttcattaaattcaacttcaggcagtcacaaaactgccagctgattatttttttttctttcctttgctgatcgaaac

SEQ ID NO: 24238 - DNA, 600 bp, Chicken  19866894238308_1
aaaagatcaaacaaactgcctctcaagtttctgatgctgttttcagacagacaatttctgcatctaaaagagagaatttcaccttcactctttcaagtcagctcatgcagccttcaccctgcatgtactcaaatccagacttcaaagtgacttccagggcactgaagatgatggccatgagtttgaacctatggtttcaagtggtcaatgatatttcatttttatctaccctgaatctgcagatatgctcagctaacacaaaagcctccctgaacatacagatgctacacaaaaggccaygtgggagactaaaatgctacttaggaactaagtagttcaagcccatgattcaggtktgatattaaatgctactcttccagacccaggctcacttctgcatggagactcaccctgctgtcaccctcattgtgtcccacagtgtttcaggacacagtgatatatgctattccaatttagtattttgttttgtatgcagctagaattctttagatgcattgtcctttaaggaggacagatttcatctgcgcttaggttcatcattccagagccagcacaatgcctcaagacttgagcatcaat

SEQ ID NO: 24239 - DNA, 600 bp, Chicken  19866894238308_2
tctgcatctaaaagagagaatttcaccttcactctttcaagtcagctcatgcagccttcaccctgcatgtactcaaatccagacttcaaagtgacttccagggcactgaagatgatggccatgagtttgaacctatggtttcaagtggtcaatgatatttcatttttatctaccctgaatctgcagatatgctcagctaacacaaaagcctccctgaacatacagatgctacacaaaaggccaygtgggagactaaaatgctacttaggaactaagtagttcaagcccatgattcaggtktgatattaaatgctactcttccagacccaggctcacttctgcatggagactcaccctgctgtcaccctcattgtgtcccacagtgtttcaggacacagtgatatatgctattccaatttagtattttgttttgtatgcagctagaattctttagatgcattgtcctttaaggaggacagatttcatctgcgcttaggttcatcattccagagccagcacaatgcctcaagacttgagcatcaattcatgaaggtgtttgcttacacttgtcagacagtacatgtgcctgtcagtgtcagg

SEQ ID NO: 24240 - DNA, 600 bp, Chicken  19866894238323_1
ttacagccttgcccaactgttctaaatgttttccccacagctgctatctccagataacctggagagattagaaacctgaataaacacatttatgctacagttttgggcaaaaaagaaaaatcacaataccataaatgtgacaatttgtattttcggagttgtttattttacaccccaagtagcatccttttatttggacagttgatagataccattccatgcctcttaagggcaaaaccaaatttccttccgtataccaatagcaaacttcttcccccacccccttcctcccctgcaatkatcaaacgaaccccatacttttatcacagacatttgctactggacactgccttactatgttagctgacaatagctaaatccactaacctaactaagtcaatggatggacttcttctcttgcagagagggcttcctcacagagtgcacttggagaagaacagatatggagcccaatactgtctttggacatgccaacagaaatgggagcatcagaaataaggctgctttgatctttgatccttagtgttgatgcagtccttatgcaagtacaggagcaggataccagtttctggcttctaa

SEQ ID NO: 24241 - DNA, 599 bp, Chicken  19866894238324_1
  misc_feature (1)..(36): n is any nucleotide
nnnnnnnnnnnnnnnnnnnnnnnnnnnnnnnnnnnntattgaaattgggtatgaaattggcccttttaaggctcccctgaatacgaccagcatacaagcacctgtgtagccccctgtcagctttggcagacctaggcactgtgagcaggacagctgagcttgagcacctcaggctgctcccagcccaagcttcagctgtggtaggagctgacaaatgagcttgacttattgagacaatggtcacggctgcaaatcaaatgtattttggattcacacttttacaagtttaaaaatgtaggkttttttttttttttttttaacttgagtcataagtcttttaaagggctgcgtaagaccccactgcctcatgcaaaagtcagtgcagaataactcccctggagacattagaacctctcctgacctcactactaaaatatttgaggcagtgaacgaagtgagagaaaaaaagccattctgcggacatgctgcagcatctctttatcttcagagcctaaagagggtggagcacaattagctcatccatgagaaatctgggcaggcaaggagatttgagcagctcgggttcggttctggacctg

SEQ ID NO: 24242 - DNA, 516 bp, Chicken  19866894238329_1
tcatgggagcagcggtgtggagatgcgtccttctgtgcactcggatgctctgtgatgctcaggctcccacagcacgggaaggtcctttgggtgctgctgtccataatcagcacaaccacatcggtgctttcccacatcgaagagcttcagcctggcccaggagcatgatctcagaagggctggcaggagaaatgtgtgcatgaagagggtttgaagcacgtagggtgcgtctgcctggtgagaatgcagtcagcaccttcgcctgcttggtgcatggcagcactgcctggaggggctgcrtggaaccgtatgtgctggagctgtctggtccctcagggctggggctggactagtggtgggggactgctgtgctgcgatgagcggagcgtgctgtgctgagcatatcaagtgctttaagtgatgcagttgggcatcctgggggcgaagctcccaaatgcctccctgtgcctggtgcatggtgatgggagcagtgcccgtgccgtgttttaaacccat

SEQ ID NO: 24243 - DNA, 600 bp, Chicken  19866894238330_1
aaataaattgccaaccaccaaaaaccaaacaccaaccaataaattcaggagcagcacagatttggtcacaaaatgcctcagctgagagagtgagccctgtgactaagaagatgcagcctagctgtctgagtttccaatatgggtacctctgaaattgccactgtgtcttctgggttaaatttggtgctcttcagactccagaggctcagaaaaaaagtgaaaaatatgctctatttgttgtgttcctccctaggaaattctgcaaaaacttctgcccttttttatcatgatgtgctcccrgtgacacattgaggacaaggctcagaactattcttgttagcaaaatatcaaatgtggatctcattactgcaactcaactaaaatataccatttaaacagagaggagaaaatacagctatggaaatgtgttcttttaagacaatttgtttcgagttgagacttcatctggcaagttttagcctagagctcatttttacagtgtggttataaaccttcggaaatggaaatgctgtgactataacagctctaataggggcttctacaatagcctgtgaaatcaactattctaactaaagtcac

SEQ ID NO: 24244 - DNA, 600 bp, Chicken  19866894238330_2
attttccattcattttattatcaaaaataattgtgccgaaggccaatatgattttattttaaaaggtgtaatatgttgaagttcactgtatgtttaaacacatttaataaaactgggatctgaaaatatttagtccaattcagaacagtaacatcagtgaaactattaatttgcttaacaaaacacagaagtatacgccccagttaaaagatctccctagctcacaaacaaggccacctcactatggaatggcagtgaccttttctctctttaggactttctgttgcaaggatggcaggyagcttattaggcagctgttgaatttgaaagagccagaatccaggaccgtggattcagcgctgatatgttttaatgaattgtattttttgcacgagttccagtattaactgcacacatttttaggacaaatgcagcaaactatacacttttttatgcaaaaattaattagagaagcattaaacttgcatgttcggcaaagatcagattctgacagcatgcttggatgaaaagagctttctctcccgtgatgctgaaagttgttccctctatgctacagtgcaattttcttactggcatcat

SEQ ID NO: 24245 - DNA, 600 bp, Chicken  19866894238332_1
gacttttgcaccttctgaagcctttcaaaatatggaataagccagccatggagctggagaatttcaaataaagaaaatatcccctttacacctgtaaagaactcttaaaaactgtcagaagttggtttattactgcagacatctggacacgagcttctgttaacttccaacttaaataaaaacgttaaaaagcctcatgccacgattatggtatgtttgcaactgctgaggtgttacttgaaacttcctgaccattttccaatggaaactggaactgattttggctacagaaagcctccyttcctccccttggatttgcaagcgttcagtttgatcgggatgctcctagcttagttttgatttgcgagcrgaatgttgggagtatagaacgacgctgcttcatgaacttcaaaattagtaggtttggcctttctgtgatccatacaacagcaacaaagcaatcgagccttgttcttattggcagtcagaggtgaatttgccctctctttatactttcgtggaatagtttttctatatgagaaaccatcagcgtgcgtccgtctgtgctgcagtttgtgagcgtatagaaaagttggtctt

SEQ ID NO: 24246 - DNA, 600 bp, Chicken  19866894238332_2
aagaaaatatcccctttacacctgtaaagaactcttaaaaactgtcagaagttggtttattactgcagacatctggacacgagcttctgttaacttccaacttaaataaaaacgttaaaaagcctcatgccacgattatggtatgtttgcaactgctgaggtgttacttgaaacttcctgaccattttccaatggaaactggaactgattttggctacagaaagcctccyttcctccccttggatttgcaagcgttcagtttgatcgggatgctcctagcttagttttgatttgcgagcrgaatgttgggagtatagaacgacgctgcttcatgaacttcaaaattagtaggtttggcctttctgtgatccatacaacagcaacaaagcaatcgagccttgttcttattggcagtcagaggtgaatttgccctctctttatactttcgtggaatagtttttctatatgagaaaccatcagcgtgcgtccgtctgtgctgcagtttgtgagcgtatagaaaagttggtcttgctttgcaagtgccttcatttctgggaggcagaggatgggctatctggcttaagaattaagtgctgcacc

SEQ ID NO: 24247 - DNA, 600 bp, Chicken  19866894238341_1
cggggacagccagcgtccagccccgggcagcacagtgcagatgggacagagcccagctcagggcccggagcagagcactgcgggcggaagggtggaaggaggaaacagagctcaggaagtggttattacaaaagcaagaacatgaagagcggagcccacactgtcactgccccggctgggtgcgtttcctggagggctgtcgcccagcgctgcagggatggacacagggagcctcagggccgggctgcagggccgtgcttacagctgcactgtgctcacacacagacgtttgcagcgcakctcattgctatccacacttcttgcagcggcacagaactgccagctatcagcacagctgagggacacagaactaaccattagcacagctttagaaatcccttacctgggcttcccagcaccctccgctgatcaggctgaactcttgactgtcagcacatggcacagtaattgcaaccctcagtgcagatggctgattgtgaatcactcagtctttgcaagaagcaggcaacagaggcgtccccggccatcactgtgggttttgccatccagcagccatcccagtgcaggtcccacctgggc

SEQ ID NO: 24248 - DNA, 600 bp, Chicken  19866894238350_1
gagttcaacctgtgctttgcagacaggacaccccacaggggtgctgggaccctcctgttcagcagtgtcacctgcaaaacccatctagccaatgggagcacctgggtggtttatcagaactgattttataaggctgcgggatggatatttccagagcctgaatactgtttggaaaagatggagagccattcagagtgtgctctacagaaaggcagacacacaagcaaatggatatttaaaacagctgtgcagactggtaggaaacatttggctaaaaggaaacagatataaaataacttygcagaaggttcraaatcagtgagttggtaacgccctgcttaagggaaaaagtgtttcttcggcttatagaggctaataaattatagcaagaaaccccgtcatcttgattaaatctattattacatcttttatttccattcacgctgtaaaacaatccctttttcaatggaatggacaccaccaaccccttcccctccacctctggatgcctcttccactcctctcagcatctccaggacaaagcaggcttggaaccccatagccatgaaatygctgggctccagctggtagctgtatgtc

SEQ ID NO: 24249 - DNA, 600 bp, Chicken  19866894238350_2
tgctttgcagacaggacaccccacaggggtgctgggaccctcctgttcagcagtgtcacctgcaaaacccatctagccaatgggagcacctgggtggtttatcagaactgattttataaggctgcgggatggatatttccagagcctgaatactgtttggaaaagatggagagccattcagagtgtgctctacagaaaggcagacacacaagcaaatggatatttaaaacagctgtgcagactggtaggaaacatttggctaaaaggaaacagatataaaataacttygcagaaggttcraaatcagtgagttggtaacgccctgcttaagggaaaaagtgtttcttcggcttatagaggctaataaattatagcaagaaaccccgtcatcttgattaaatctattattacatcttttatttccattcacgctgtaaaacaatccctttttcaatggaatggacaccaccaaccccttcccctccacctctggatgcctcttccactcctctcagcatctccaggacaaagcaggcttggaaccccatagccatgaaatygctgggctccagctggtagctgtatgtcctgtgccccatc

SEQ ID NO: 24250 - DNA, 600 bp, Chicken  19866894238350_3
taaaaggaaacagatataaaataacttygcagaaggttcraaatcagtgagttggtaacgccctgcttaagggaaaaagtgtttcttcggcttatagaggctaataaattatagcaagaaaccccgtcatcttgattaaatctattattacatcttttatttccattcacgctgtaaaacaatccctttttcaatggaatggacaccaccaaccccttcccctccacctctggatgcctcttccactcctctcagcatctccaggacaaagcaggcttggaaccccatagccatgaaatygctgggctccagctggtagctgtatgtcctgtgccccatccaccaytccctcaggcatgccccaaaaaagtgcttccaggaaaggtgttaaagaggaaggcttggcattccaacctaatctgaaagtgcagtcagctaaatcttgcctttttctatagatagtgttctttagggaaaatattgagcttttgccccgatcctgcatctgtttgccccgctctgcagcagggcaataggatttatggccatttgttgcagctaaaaacctcgggaggaatctgaaagcaaagcaaagcaaag

SEQ ID NO: 24251 - DNA, 600 bp, Chicken  19866894238350_4
gtgagttggtaacgccctgcttaagggaaaaagtgtttcttcggcttatagaggctaataaattatagcaagaaaccccgtcatcttgattaaatctattattacatcttttatttccattcacgctgtaaaacaatccctttttcaatggaatggacaccaccaaccccttcccctccacctctggatgcctcttccactcctctcagcatctccaggacaaagcaggcttggaaccccatagccatgaaatygctgggctccagctggtagctgtatgtcctgtgccccatccaccaytccctcaggcatgccccaaaaaagtgcttccaggaaaggtgttaaagaggaaggcttggcattccaacctaatctgaaagtgcagtcagctaaatcttgcctttttctatagatagtgttctttagggaaaatattgagcttttgccccgatcctgcatctgtttgccccgctctgcagcagggcaataggatttatggccatttgttgcagctaaaaacctcgggaggaatctgaaagcaaagcaaagcaaagcaaagccttccctcgcgcggtgtcacactaacctctggatggcctc

SEQ ID NO: 24252 - DNA, 599 bp, Chicken  19866894238356_1
  misc_feature (1)..(117): n is any nucleotide
nnnnnnnnnnnnnnnnnnnnnnnnnnnnnnnnnnnnnnnnnnnnnnnnnnnnnnnnnnnnnnnnnnnnnnnnnnnnnnnnnnnnnnnnnnnnnnnnnnnnnnnnnnnnnnnnnnnnnggtgggtatgaaaatatgctgtgttctgtcactgatagcggggttaagccctaaatatcccctcctagtgagtttctttcagtctggtgactcataactgcactatctcagcagtgttagcagaaatcagcttgcttgcttcttgttctttgcaaggaggatgcttaacagcatctgggggayttttttttttgatcacaaaaacaatgtgatctttagaccaaactgaagggagggttgagcacatctttgttgaaaggtgtgactggatgcttactcttcatagcaaaaccactctgtcaggtaaaacattycttttggaaaggagggttagctgacctatatatactttttttaactacttgagcaggcatgttactcaaaattgttctgcaagcttactgtagcacctgcargttatggtgaatttcttagttttggatagagtcaggagaagtgtaaggtactgtcttgatgttcwt

SEQ ID NO: 24253 - DNA, 600 bp, Chicken  19866894238356_2
tatgctgtgttctgtcactgatagcggggttaagccctaaatatcccctcctagtgagtttctttcagtctggtgactcataactgcactatctcagcagtgttagcagaaatcagcttgcttgcttcttgttctttgcaaggaggatgcttaacagcatctgggggatttttttttttgatcacaaaaacaatgtgatctttagaccaaactgaagggagggttgagcacatctttgttgaaaggtgtgactggatgcttactcttcatagcaaaaccactctgtcaggtaaaacattycttttggaaaggagggttagctgacctatatatactttttttaactacttgagcaggcatgttactcaaaattgttctgcaagcttactgtagcacctgcargttatggtgaatttcttagttttggatagagtcaggagaagtgtaaggtactgtcttgatgttcwttatctygaggatttaagagatggtcatgctttacamgtgaaagactcgaaaggtcaagaattsgaagtgcacagtaattgacttgctgcttattaaagaaatttaagctcctgttgtcctgattactggagc

SEQ ID NO: 24254 - DNA, 600 bp, Chicken  19866894238356_3
ttagcagaaatcagcttgcttgcttcttgttctttgcaaggaggatgcttaacagcatctgggggatttttttttttgatcacaaaaacaatgtgatctttagaccaaactgaagggagggttgagcacatctttgttgaaaggtgtgactggatgcttactcttcatagcaaaaccactctgtcaggtaaaacattycttttggaaaggagggttagctgacctatatatactttttttaactacttgagcaggcatgttactcaaaattgttctgcaagcttactgtagcacctgcargttatggtgaatttcttagttttggatagagtcaggagaagtgtaaggtactgtcttgatgttcwttatctygaggatttaagagatggtcatgctttacamgtgaaagactcgaaaggtcaagaattsgaagtgcacagtaattgacttgctgcttattaaagaaatttaagctcctgttgtcctgattactggagcaaataactcattcagtccagcaatgttgaatcttggagctgagagacagctatagcaatttctctgtttagctgtgtagcagaatactttgggagcttgcat

SEQ ID NO: 24255 - DNA, 600 bp, Chicken  19866894238356_4
atttttttttttgatcacaaaaacaatgtgatctttagaccaaactgaagggagggttgagcacatctttgttgaaaggtgtgactggatgcttactcttcatagcaaaaccactctgtcaggtaaaacattycttttggaaaggagggttagctgacctatatatactttttttaactacttgagcaggcatgttactcaaaattgttctgcaagcttactgtagcacctgcargttatggtgaatttcttagttttggatagagtcaggagaagtgtaaggtactgtcttgatgttcwttatctygaggatttaagagatggtcatgctttacamgtgaaagactcgaaaggtcaagaattsgaagtgcacagtaattgacttgctgcttattaaagaaatttaagctcctgttgtcctgattactggagcaaataactcattcagtccagcaatgttgaatcttggagctgagagacagctatagcaatttctctgtttagctgtgtagcagaatactttgggagcttgcatctatcatgtatcaaaaatctagtttcattttattctctttggacaatgttactctcagaaatttt

SEQ ID NO: 24256 - DNA, 600 bp, Chicken  19866894238356_5
tttttgatcacaaaaacaatgtgatctttagaccaaactgaagggagggttgagcacatctttgttgaaaggtgtgactggatgcttactcttcatagcaaaaccactctgtcaggtaaaacattycttttggaaaggagggttagctgacctatatatactttttttaactacttgagcaggcatgttactcaaaattgttctgcaagcttactgtagcacctgcargttatggtgaatttcttagttttggatagagtcaggagaagtgtaaggtactgtcttgatgttcwttatctygaggatttaagagatggtcatgctttacamgtgaaagactcgaaaggtcaagaattsgaagtgcacagtaattgacttgctgcttattaaagaaatttaagctcctgttgtcctgattactggagcaaataactcattcagtccagcaatgttgaatcttggagctgagagacagctatagcaatttctctgtttagctgtgtagcagaatactttgggagcttgcatctatcatgtatcaaaaatctagtttcattttattctctttggacaatgttactctcagaaattttcaaactc

SEQ ID NO: 24257 - DNA, 600 bp, Chicken  19866894238356_6
gaccaaactgaagggagggttgagcacatctttgttgaaaggtgtgactggatgcttactcttcatagcaaaaccactctgtcaggtaaaacattycttttggaaaggagggttagctgacctatatatactttttttaactacttgagcaggcatgttactcaaaattgttctgcaagcttactgtagcacctgcargttatggtgaatttcttagttttggatagagtcaggagaagtgtaaggtactgtcttgatgttcwttatctygaggatttaagagatggtcatgctttacamgtgaaagactcgaaaggtcaagaattsgaagtgcacagtaattgacttgctgcttattaaagaaatttaagctcctgttgtcctgattactggagcaaataactcattcagtccagcaatgttgaatcttggagctgagagacagctatagcaatttctctgtttagctgtgtagcagaatactttgggagcttgcatctatcatgtatcaaaaatctagtttcattttattctctttggacaatgttactctcagaaattttcaaactcaactgctttgcattggtcagtgttctcgga

SEQ ID NO: 24258 - DNA, 600 bp, Chicken  19866894238356_7
atctttgttgaaaggtgtgactggatgcttactcttcatagcaaaaccactctgtcaggtaaaacattycttttggaaaggagggttagctgacctatatatactttttttaactacttgagcaggcatgttactcaaaattgttctgcaagcttactgtagcacctgcargttatggtgaatttcttagttttggatagagtcaggagaagtgtaaggtactgtcttgatgttcwttatctygaggatttaagagatggtcatgctttacamgtgaaagactcgaaaggtcaagaattsgaagtgcacagtaattgacttgctgcttattaaagaaatttaagctcctgttgtcctgattactggagcaaataactcattcagtccagcaatgttgaatcttggagctgagagacagctatagcaatttctctgtttagctgtgtagcagaatactttgggagcttgcatctatcatgtatcaaaaatctagtttcattttattctctttggacaatgttactctcagaaattttcaaactcaactgctttgcattggtcagtgttctcggagaacctcattttccagcccaccttatg

SEQ ID NO: 24259 - DNA, 599 bp, Chicken  19866894238362_1
  misc_feature (1)..(17): n is any nucleotide
nnnnnnnnnnnnnnnnnttcttacgggtcaggctccttgttaaccccatgatcctcctattgatgtcccagttttttaaagcctcagttatgcctctcaggctgccatcttccattttcttcggcacatttctttcttcgttgagcctgaccattaacaaaacctgaaggcagtcagtcctcaggaggcaaggagtaagttcacgagaacgctgctcgatgctccctttacagcaaaaccattcacatctttctctccatttggcagctcatcctgcttggttcaccatcacccccagtytcagtactgatttctcaacatgccaggtgctttgctgaaattctggtaggttgcattaatttgaatttctttctctcaatggtgattttgttcaagagaactcaatctaactgacacagtcgtactcaatacatattgtttcctcagtgcatattgtttcctgtttatgtgttttattttgttcccagcttacattagaagtcttgagtgttgctgtagctggactatacggaatgtgttgttgcttgtatctctattttaatgtcttcagtccagtaaagatatttgctgttttccag

SEQ ID NO: 24260 - DNA, 599 bp, Chicken  19866894238364_1
  misc_feature (1)..(34): n is any nucleotide
nnnnnnnnnnnnnnnnnnnnnnnnnnnnnnnnnnccccaccgggaggactgagggagatgaaggagagcacatgccctccctccagcccagaggggaggggacagcaggggtccccccaggacatttgccagccctgcttgggctctgcatgcctgatgtggagctccagggcattgctgtgctgtgacactgctgctgctctatgtgtttgtcccagagtctcagagcttgcccatcctgatggtgtgatggggaaggcactgtgatgcctgtccagagccactggcaggggtgacttygcaagccacctgtctctcttacctccacctgccgggagcacaaagatctgatgtgtgtgaaggcagtggggctctgtctgtatgacggctgtagcttcagtggatgctttccagagagccgaaatctcttcataagagtgagaaaatactyagaaagaaaagattgaatttyattaggaactagagcaaagttgtagygagcaaagttgtagtgagcaggagttcctgcagggcttgtacagaaaagccatcaagctgaaaacatcgcctgtcacgacacaacctstggagttacagtc

SEQ ID NO: 24261 - DNA, 585 bp, Chicken  19866894238364_2
gcctgatgtggagctccagggcattgctgtgctgtgacactgctgctgctctatgtgtttgtcccagagtctcagagcttgcccatcctgatggtgtgatggggaaggcactgtgatgcctgtccagagccactggcaggggtgacttygcaagccacctgtctctcttacctccacctgccgggagcacaaagatctgatgtgtgtgaaggcagtggggctctgtctgtatgacggctgtagcttcagtggatgctttccagagagccgaaatctcttcataagagtgagaaaatactyagaaagaaaagattgaatttyattaggaactagagcaaagttgtagygagcaaagttgtagtgagcaggagttcctgcagggcttgtacagaaaagccatcaagctgaaaacatcgcctgtcacgacacaacctstggagttacagtcacctcagtgctttatcttggaaagggactggatgtaaagcagtggaggacaggtaaacacagcaaagaacaattgacagtcctgttcaagtgggacacacaataaggtaggcagagagaccaaggagaaatgcaaat

SEQ ID NO: 24262 - DNA, 564 bp, Chicken  19866894238364_3
cattgctgtgctgtgacactgctgctgctctatgtgtttgtcccagagtctcagagcttgcccatcctgatggtgtgatggggaaggcactgtgatgcctgtccagagccactggcaggggtgacttygcaagccacctgtctctcttacctccacctgccgggagcacaaagatctgatgtgtgtgaaggcagtggggctctgtctgtatgacggctgtagcttcagtggatgctttccagagagccgaaatctcttcataagagtgagaaaatactyagaaagaaaagattgaatttyattaggaactagagcaaagttgtagygagcaaagttgtagtgagcaggagttcctgcagggcttgtacagaaaagccatcaagctgaaaacatcgcctgtcacgacacaacctstggagttacagtcacctcagtgctttatcttggaaagggactggatgtaaagcagtggaggacaggtaaacacagcaaagaacaattgacagtcctgttcaagtgggacacacaataaggtaggcagagagaccaaggagaaatgcaaat

SEQ ID NO: 24263 - DNA, 538 bp, Chicken  19866894238364_4
gctctatgtgtttgtcccagagtctcagagcttgcccatcctgatggtgtgatggggaaggcactgtgatgcctgtccagagccactggcaggggtgacttygcaagccacctgtctctcttacctccacctgccgggagcacaaagatctgatgtgtgtgaaggcagtggggctctgtctgtatgacggctgtagcttcagtggatgctttccagagagccgaaatctcttcataagagtgagaaaatactyagaaagaaaagattgaatttyattaggaactagagcaaagttgtagygagcaaagttgtagtgagcaggagttcctgcagggcttgtacagaaaagccatcaagctgaaaacatcgcctgtcacgacacaacctstggagttacagtcacctcagtgctttatcttggaaagggactggatgtaaagcagtggaggacaggtaaacacagcaaagaacaattgacagtcctgttcaagtgggacacacaataaggtaggcagagagaccaaggagaaatgcaaat

SEQ ID NO: 24264 - DNA, 450 bp, Chicken  19866894238364_5
gcaggggtgacttygcaagccacctgtctctcttacctccacctgccgggagcacaaagatctgatgtgtgtgaaggcagtggggctctgtctgtatgacggctgtagcttcagtggatgctttccagagagccgaaatctcttcataagagtgagaaaatactyagaaagaaaagattgaatttyattaggaactagagcaaagttgtagygagcaaagttgtagtgagcaggagttcctgcagggcttgtacagaaaagccatcaagctgaaaacatcgcctgtcacgacacaacctstggagttacagtcacctcagtgctttatcttggaaagggactggatgtaaagcagtggaggacaggtaaacacagcaaagaacaattgacagtcctgttcaagtgggacacacaataaggtaggcagagagaccaaggagaaatgcaaat

SEQ ID NO: 24265 - DNA, 600 bp, Chicken  19866894238366_1
aggtactcatgcaacagtagttagaatagcacaaataaggaggaaataaggagaacgtggatactaaaaagctctgcagaaattgttatgttgttaaaatatacagaaaataacttacattttctagaggtcttcattaagaaaatgaataaaattccaatgatgtgattattaagaacgccatttgtttttcatgtacaaataaataatctggaatatttacctttaaaatcttttttttcttgctactcaagaagtgcctagaagtaaaggtaatacagtcaccatactggaaaaaaktcacctctgacactgaagtttcagaaattttacctaaactgcaagctttttttttttccctataatattaccaatttcaaaaaagagagacatactgataatgaatgtgcttcttcaaccacgacaacagtattgctactttattctcataatgttatgggaccccaggcagctcaaaacttcatcctgaaatgatggcatatttcatgattatgtccaactctggcagataagagcatttatatgctaataccagcaatatgggtaactctagaattttaccatatgtgatgaagcttt

SEQ ID NO: 24266 - DNA, 493 bp, Chicken  19866894238366_2
gaattgggttattaatatgatgtgggttatgcataatatattcaaatcactggagaaaatgaaagctgtgtcatggcaactaggtgttgtttgggaaaaaggagaatcaaaagtactctaagaagccactaaattatctttccaggggaagcattagtttacagtccacaattggaatttatgctgactttaaaggaatgaaattctgcttaacacttagccatgttacctgtaaaagttgcttggcctgtttataccagcaaccatatgttgtatgtgtatgcctttttatagttgacwacrttgtgtatccaggtggtctcactgtttcaattatacgttcagttaggtcccatctggaacagaaacttgcttgtaattctgccatcacattgttgaagtctaacttcacagcacaatagcaattcaagcttcttatcaccagggttaaggacaatggtttgcactggggaaaataaaaagaagaaaaaga

SEQ ID NO: 24267 - DNA, 490 bp, Chicken  19866894238366_3
ttgggttattaatatgatgtgggttatgcataatatattcaaatcactggagaaaatgaaagctgtgtcatggcaactaggtgttgtttgggaaaaaggagaatcaaaagtactctaagaagccactaaattatctttccaggggaagcattagtttacagtccacaattggaatttatgctgactttaaaggaatgaaattctgcttaacacttagccatgttacctgtaaaagttgcttggcctgtttataccagcaaccatatgttgtatgtgtatgcctttttatagttgacwacrttgtgtatccaggtggtctcactgtttcaattatacgttcagttaggtcccatctggaacagaaacttgcttgtaattctgccatcacattgttgaagtctaacttcacagcacaatagcaattcaagcttcttatcaccagggttaaggacaatggtttgcactggggaaaataaaaagaagaaaaaga

SEQ ID NO: 24268 - DNA, 600 bp, Chicken  19866894238387_1
gaagtttagttcaactttacggcaagaaactggttctgctccagacttcatgcatgaaattcgaaaattagtctctcagtggagatttctaagatttaagcaattccctaacctgcaaggacatgtgctgtgtttgaagtccaagatttagacactatcagagaaacctggtaatatttagcagatatgtaaggctcttaaaaacaaacaaaacaaaacaaaacaaaacaaaacaaaacaaaacaaacccctgaatatataaaacctagtacatatggttaaaaaaacacacacgttcaraagaaaaaaacaacaaaagcaacagtttttctcagtgtcatttcatcaaacctaagtgatgtcatttcagatgatggccttgacatcagaactccaaaatctgagaatatcacctttatttccttgcttacctaagaccagactaagggaatatccgataggtgcctgagcccaagctagaccgtagcctgggacatacacagcttctgctgtcccattgatgtaacctcctccaacccatgtggctgaaaaagaagaggtaaaaaagccattaatgcacacagagaacaaaaaccttcc

SEQ ID NO: 24269 - DNA, 599 bp, Chicken  19866894238390_1
  misc_feature (1)..(62): n is any nucleotide
nnnnnnnnnnnnnnnnnnnnnnnnnnnnnnnnnnnnnnnnnnnnnnnnnnnnnnnnnnnnnntgtatgtgtgtatatagatgtgcagagaatgatttctgtatgtttgccagtgggtagaggcagtatccaaaagataaaatttaaggaagcataaagaggcataacggtaacttctgtctgtctctaacattaatgaactttctttgtttttttacaatatgacataaagctctctaatgcattgaactgcaagttatctggtggcatagtaacaagggcatgttttctgcctttcagwtttagctgttttggtacaagctgctcarttttgtttttcattcagtatgttatttgtttgcaatatttctgtttgcactgaaaattctgtttgcgctgaaattgatctaatttcttcctaatgttttcagagtgggatctggagcatacgaacaggtrgtgataaaacgctaggctagaacgacttgsccggaagaggaaggcacagaactctcacagcaacattctgattcatggttcttcaactgcaagagatgtgaaagccaggatgaagtttgtatgaacttgttttgggaaaag

SEQ ID NO: 24270 - DNA, 599 bp, Chicken  19866894238390_2
  misc_feature (1)..(34): n is any nucleotide
nnnnnnnnnnnnnnnnnnnnnnnnnnnnnnnnnntgtatgtgtgtatatagatgtgcagagaatgatttctgtatgtttgccagtgggtagaggcagtatccaaaagataaaatttaaggaagcataaagaggcataacggtaacttctgtctgtctctaacattaatgaactttctttgtttttttacaatatgacataaagctctctaatgcattgaactgcaagttatctggtggcatagtaacaagggcatgttttctgcctttcagwtttagctgttttggtacaagctgctcarttttgtttttcattcagtatgttatttgtttgcaatatttctgtttgcactgaaaattctgtttgcgctgaaattgatctaatttcttcctaatgttttcagagtgggatctggagcatacgaacaggtrgtgataaaacgctaggctagaacgacttgsccggaagaggaaggcacagaactctcacagcaacattctgattcatggttcttcaactgcaagagatgtgaaagccaggatgaagtttgtatgaacttgttttgggaaaagtaatggaatgcctcttgctcggagagct

SEQ ID NO: 24271 - DNA, 600 bp, Chicken  19866894238390_3
aggcataacggtaacttctgtctgtctctaacattaatgaactttctttgtttttttacaatatgacataaagctctctaatgcattgaactgcaagttatctggtggcatagtaacaagggcatgttttctgcctttcagwtttagctgttttggtacaagctgctcarttttgtttttcattcagtatgttatttgtttgcaatatttctgtttgcactgaaaattctgtttgcgctgaaattgatctaatttcttcctaatgttttcagagtgggatctggagcatacgaacaggtrgtgataaaacgctaggctagaacgacttgsccggaagaggaaggcacagaactctcacagcaacattctgattcatggttcttcaactgcaagagatgtgaaagccaggatgaagtttgtatgaacttgttttgggaaaagtaatggaatgcctcttgctcggagagctccatcttctacaatatcaaggcaatatctagatgtccacatgctgtgcaagtacttggactgtttctataagctgtacctgatgttgaagtgaattactttgaagttgtcccataaatgtttagcagcatg

SEQ ID NO: 24272 - DNA, 600 bp, Chicken  19866894238390_4
acattaatgaactttctttgtttttttacaatatgacataaagctctctaatgcattgaactgcaagttatctggtggcatagtaacaagggcatgttttctgcctttcagwtttagctgttttggtacaagctgctcarttttgtttttcattcagtatgttatttgtttgcaatatttctgtttgcactgaaaattctgtttgcgctgaaattgatctaatttcttcctaatgttttcagagtgggatctggagcatacgaacaggtrgtgataaaacgctaggctagaacgacttgsccggaagaggaaggcacagaactctcacagcaacattctgattcatggttcttcaactgcaagagatgtgaaagccaggatgaagtttgtatgaacttgttttgggaaaagtaatggaatgcctcttgctcggagagctccatcttctacaatatcaaggcaatatctagatgtccacatgctgtgcaagtacttggactgtttctataagctgtacctgatgttgaagtgaattactttgaagttgtcccataaatgtttagcagcatgattaagtgggtcctatttccatgttttaca

SEQ ID NO: 24273 - DNA, 600 bp, Chicken  19866894238390_5
aagtttgtatgaacttgttttgggaaaagtaatggaatgcctcttgctcggagagctccatcttctacaatatcaaggcaatatctagatgtccacatgctgtgcaagtacttggactgtttctataagctgtacctgatgttgaagtgaattactttgaagttgtcccataaatgtttagcagcatgattaagtgggtcctatttccatgttttacatagcaggtcacatgcagttatgtgccctgcagcttcttttctaaactaacttcaggaagtcataaatgagcccgtagaaacraactaagactagatttcattctacctgccactaaagccttagaaaagctacctctttctattaagtcgaagctcctatcatgtgaaggttatggcttccmcagagctctgttttaaacagcaaaagtattgtcttaaaagtcttcagcatcatttccttttaaggtcacgtgtttagaaaagactctgtagacacatatcagccagtaataggatgtgttagttgtagttgatatctagacgcttacatgtagcaaatgcactgtgcaagggacaaagtaggatacgcaatgcacagcag

SEQ ID NO: 24274 - DNA, 600 bp, Chicken  19866894238390_6
tgtgcaagtacttggactgtttctataagctgtacctgatgttgaagtgaattactttgaagttgtcccataaatgtttagcagcatgattaagtgggtcctatttccatgttttacatagcaggtcacatgcagttatgtgccctgcagcttcttttctaaactaacttcaggaagtcataaatgagcccgtagaaacraactaagactagatttcattctacctgccactaaagccttagaaaagctacctctttctattaagtcgaagctcctatcatgtgaaggttatggcttccmcagagctctgttttaaacagcaaaagtattgtcttaaaagtcttcagcatcatttccttttaaggtcacgtgtttagaaaagactctgtagacacatatcagccagtaataggatgtgttagttgtagttgatatctagacgcttacatgtagcaaatgcactgtgcaagggacaaagtaggatacgcaatgcacagcagtcgttatgaagaacgctggttgtttcccttaggattggtaaggatggagttcagaagccccttatgcagaaacttgcttctgtgcacaaacccagagatt

SEQ ID NO: 24275 - DNA, 600 bp, Chicken  19866894238393_1
atgagataagcaggtggtgctgaattacagagctcatgctagatacaacttccaaaacacaggggaattgcactagtattgcttgcaccattactgtggtaaagcagagaccagcaggtgctctgaaaggcttttcactgcacagatgcacacatattttctctaagtagatcagaatcagctgtggtgaagggtcctgaagccctccagggatgtcctgcatgaggcctctgtctgaagaggactgagcagggcctccttccctctcctcactggcaactgaaacagagacttaaccckctccattgcataattctggaataatctggcctgttcaagcaatgcaaccctagacagcttggcccctctgggaaaagtggggagagaaaagggatactgcaaagactcttctttctagcataccttcaaagaggctaagctgtagatgtgggtaaagagtttgtggcaatgatggctctcttagcttctcaaaaaatcttctacagaagacaaaagtgtacgtctcacacttgagataactcatgataaatgaaatcccacatagcgttcctaaaattgtagtctttccttaaaagagaa

SEQ ID NO: 24276 - DNA, 600 bp, Chicken  19866894238393_2
tcacgtttggcagcattcatcagtacacatcagtatatcagcacttaagccagtgcttgctaaagcaagtgaagtaatgaaatacagtctgatccaccagcattgctgcataggtcagcataggcagatgcagaatatcaatttgacctgggatgctgtcccaaaagacctggggagggctttcacagaatgattccagtaattctagaaaggcctcgggctatttgcacagcacagcagatgcagagatagaagatattcctcttaggtacagaatggactgcctctgctggaaatgcmacaagctgtcagaggagaaacagaatgaaatccaggctatctttccccatctccccaaggctgcagtgcatgtcctgggatgggcttctctgcctttgataatgaagggttcaaaatcacagtctggatcacagcctgaatctacagtcacagcttaggatctaggacaggaagaaggaatccgcttgaaagaaagctgtagtgctcccttttggtgttcctttctcaggtacaaagcctgaatacttggaaaggctgcttattccactcaggacaaagaaaaagtgcttttacagaaca

SEQ ID NO: 24277 - DNA, 600 bp, Chicken  19866894238398_1
aaaaaatacccttatagccatactttaaattatcagcctctcctatcttctcaggcaagcatattcaagtgaatccaaggttgttgctgtttcctatccacacctgacagccgctcatcccaatgtgcgggcgcctgcagacagactgccctccctctgtccctcccccgtactgaggccctcctcctggagaagctcattagtgcagttatttgcccatcacacagaggtgaagctggactgggaccactctgcagaactcagctgagcccagagaagacaaaaagctgtgcagtgggwtttaaggagctgctgtcagcatttccaatgcaccagggcctgggaattcatttgtcttttaagaaatgatggaaaaaaagagaagccrttgcacagacaaaactaattacacaagagcagaagcatccctcgcagcaattgttcttgaatttgcattaaaaaagtaaattctaaaacaaacaaaacatctgtaaaaaaaaaaaaaagtagaaaattgggactggaagaaaagaacagtttcagaatagaatggcacttcatcactgagctaaagttaacctttgggcacggccagcactg

SEQ ID NO: 24278 - DNA, 600 bp, Chicken  19866894238398_2
gtttcctatccacacctgacagccgctcatcccaatgtgcgggcgcctgcagacagactgccctccctctgtccctcccccgtactgaggccctcctcctggagaagctcattagtgcagttatttgcccatcacacagaggtgaagctggactgggaccactctgcagaactcagctgagcccagagaagacaaaaagctgtgcagtgggwtttaaggagctgctgtcagcatttccaatgcaccagggcctgggaattcatttgtcttttaagaaatgatggaaaaaaagagaagccrttgcacagacaaaactaattacacaagagcagaagcatccctcgcagcaattgttcttgaatttgcattaaaaaagtaaattctaaaacaaacaaaacatctgtaaaaaaaaaaaaaagtagaaaattgggactggaagaaaagaacagtttcagaatagaatggcacttcatcactgagctaaagttaacctttgggcacggccagcactgctccgggtgcggaggtgactcaacctcttctttccaatgagccagccaactgcattcccatccttattatccatttaaaatgaaaatg

SEQ ID NO: 24279 - DNA, 600 bp, Chicken  19866894238398_3
gaacagtttcagaatagaatggcacttcatcactgagctaaagttaacctttgggcacggccagcactgctccgggtgcggaggtgactcaacctcttctttccaatgagccagccaactgcattcccatccttattatccatttaaaatgaaaatggtgcattccacagcagtgaattcccacaggttgagatggagccatgcactgcattcaccatgtcaggacctggatgcaaagccatggtctgagtctgagcaccgcacgtcttccacctgcagcaatgccagcacacagctccrggcacagcrctgcattcaggagagccagagcagctcagctcatctggtcccattccctgcagtgaacagggacacccacagctccgagctcctgaccctgggggtctccgcacacacaaatgctgctgagttgaactgctgagcaaccgttgtgcttatttacagaccacagaaatctcatctgtttcagctcagtgccactaacgaactccccggtgtcactgcactgtgtgtattttctggatgagatctgtgcttctgcaatgcagaggttcccgtgctacggtgatccttccacca

SEQ ID NO: 24280 - DNA, 600 bp, Chicken  19866894238398_4
cagaatagaatggcacttcatcactgagctaaagttaacctttgggcacggccagcactgctccgggtgcggaggtgactcaacctcttctttccaatgagccagccaactgcattcccatccttattatccatttaaaatgaaaatggtgcattccacagcagtgaattcccacaggttgagatggagccatgcactgcattcaccatgtcaggacctggatgcaaagccatggtctgagtctgagcaccgcacgtcttccacctgcagcaatgccagcacacagctccrggcacagcrctgcattcaggagagccagagcagctcagctcatctggtcccattccctgcagtgaacagggacacccacagctccgagctcctgaccctgggggtctccgcacacacaaatgctgctgagttgaactgctgagcaaccgttgtgcttatttacagaccacagaaatctcatctgtttcagctcagtgccactaacgaactccccggtgtcactgcactgtgtgtattttctggatgagatctgtgcttctgcaatgcagaggttcccgtgctacggtgatccttccaccagatctgatg

SEQ ID NO: 24281 - DNA, 600 bp, Chicken  19866894238399_1
tggtgcttatttatcacaaaagatttctctgccacttttgagaatggaggtggctgcattgatttcaagattggaactcagtgcctgtggtggaagtcaaataagatctgtattttttaatctactatctcaggctttttgtgcaaatcaagtaaacatttagactcaagaacctggggtctttctgttctataatctgcaaagatttactgagcatgattacttttattgctgattagcccagaaatggttggggttttttgatacctattttgtgacaagtggataaatatgtacttygcytaggtgaggaaggaaccggttattttacctgcacagtatctcaaaggatctttccaatagtactttcttctgcccacaatgttattccagtttgtgtttgaaaggaaggtctcagaaaagccagaaaagcttttagagagaatttgtgtcaagaaaacaattttggtctcagtatgcaatggatcctaactgcactgcagggggagggcgttctttctgatacctccacttcacaaatgaggagactgaaatgaagagttcaggggtttacccagtgtgccacagtctgtctctagc

SEQ ID NO: 24282 - DNA, 600 bp, Chicken  19866894238399_2
tgcttatttatcacaaaagatttctctgccacttttgagaatggaggtggctgcattgatttcaagattggaactcagtgcctgtggtggaagtcaaataagatctgtattttttaatctactatctcaggctttttgtgcaaatcaagtaaacatttagactcaagaacctggggtctttctgttctataatctgcaaagatttactgagcatgattacttttattgctgattagcccagaaatggttggggttttttgatacctattttgtgacaagtggataaatatgtacttygcytaggtgaggaaggaaccggttattttacctgcacagtatctcaaaggatctttccaatagtactttcttctgcccacaatgttattccagtttgtgtttgaaaggaaggtctcagaaaagccagaaaagcttttagagagaatttgtgtcaagaaaacaattttggtctcagtatgcaatggatcctaactgcactgcagggggagggcgttctttctgatacctccacttcacaaatgaggagactgaaatgaagagttcaggggtttacccagtgtgccacagtctgtctctagcaga

SEQ ID NO: 24283 - DNA, 600 bp, Chicken  19866894238402_1
agaaaagtagggagattaagcaacaggttaagcagtacgtaaactgagaaattacacaacaccaattataatgaataattccatttgatacactgagcattcaacattcacaatttcctttgcaaaatggtgtccatatgcaatttttacttgtactgggcagaaaatgtgttaatagaagaattatcttattgtattttaatgacataaataacaagtgaattcaaaaaagaacttcctgtagccagaactgtgcagcacatctttgtgcactggagaacctaaggccataggtgcttmtaaatccgatatgatgtgtgcttaccaaagagaggccagaactaagaggactaacatctacaccaacctcgtgttgctctcttatgcccaaggaaggaagaatagattaacatatccacaatttactttgaagatgttgcattttactctctcacacaaagtgcagcctcggcatattttttctacatgtgttataagatataggctctgaaatactgagcattgctagagcgagtatctctcagattgttaagaaaattacttgaaaagagacatttgattttaagtctaaaawataat

SEQ ID NO: 24284 - DNA, 600 bp, Chicken  19866894238402_2
gcttmtaaatccgatatgatgtgtgcttaccaaagagaggccagaactaagaggactaacatctacaccaacctcgtgttgctctcttatgcccaaggaaggaagaatagattaacatatccacaatttactttgaagatgttgcattttactctctcacacaaagtgcagcctcggcatattttttctacatgtgttataagatataggctctgaaatactgagcattgctagagcgagtatctctcagattgttaagaaaattacttgaaaagagacatttgattttaagtctaaaawataatgtagggttgctttattctgctttttcgtaccattaaaaaagaatgctggtacatgatttattttctgtactgacagaactcctacaattgtacttagtgattcactaggactactttgcgcacagtacctctgcaaaaatgcctcctaggcacctaaaatagtttatacaccatgctttggaaggcaattttaaaatgcaaacccatgactatagtatgatcagagccctaaagaaaacatgtttttttttgtgtgtgtgtcttttttttctccaatccgttagagaaatgaaaa

SEQ ID NO: 24285 - DNA, 600 bp, Chicken  19866894238402_3
tgctcctacataccagtaccactatgtgtgggatgcatttttcttaccccacaggaagaggttgcccagactcttcccaatgcacttgttaatgctgaagttccatatgtgtctctaagtaaccattactccaactgcccctagtgcagggctttagaattagctgggatgcataggatgtaaacactcaacaaatgaatggatgggtaaatctcttaaaaatgtacactgcttgtaactgcatacatattaggagaaacactgctgtttcttaactcgaactaagcaaagcaagacttrtttgtaagctacaaagctgccaaatgtcccacacttacatgacgccttattaatagaacactcacttctctggaagcagcaaatattaacaaggttctttgtgtgcatgtgtgggatgagggcaacaaaccatgggaagcaygtcctctggtagattgtctyctactcaycgtgcatgacatcagttttaatggccattcagggaaagttatgcctgagtcatgcaaggataagtaacagaagcagtcaaattaggtaacacattcagaagtattcttactctgtgtcaaacctatcctc

SEQ ID NO: 24286 - DNA, 600 bp, Chicken  19866894238402_4
agtgcagggctttagaattagctgggatgcataggatgtaaacactcaacaaatgaatggatgggtaaatctcttaaaaatgtacactgcttgtaactgcatacatattaggagaaacactgctgtttcttaactcgaactaagcaaagcaagacttrtttgtaagctacaaagctgccaaatgtcccacacttacatgacgccttattaatagaacactcacttctctggaagcagcaaatattaacaaggttctttgtgtgcatgtgtgggatgagggcaacaaaccatgggaagcaygtcctctggtagattgtctyctactcaycgtgcatgacatcagttttaatggccattcagggaaagttatgcctgagtcatgcaaggataagtaacagaagcagtcaaattaggtaacacattcagaagtattcttactctgtgtcaaacctatcctctaaatcaayaacataccttataactgtcttctggcagcagtttcaacacacccagcagtattttggctgtttcttttcttctttagcatctgttttccttcttttttttttcttttttctttttcccatcccagggttactc

SEQ ID NO: 24287 - DNA, 600 bp, Chicken  19866894238402_5
gctgggatgcataggatgtaaacactcaacaaatgaatggatgggtaaatctcttaaaaatgtacactgcttgtaactgcatacatattaggagaaacactgctgtttcttaactcgaactaagcaaagcaagacttrtttgtaagctacaaagctgccaaatgtcccacacttacatgacgccttattaatagaacactcacttctctggaagcagcaaatattaacaaggttctttgtgtgcatgtgtgggatgagggcaacaaaccatgggaagcaygtcctctggtagattgtctyctactcaycgtgcatgacatcagttttaatggccattcagggaaagttatgcctgagtcatgcaaggataagtaacagaagcagtcaaattaggtaacacattcagaagtattcttactctgtgtcaaacctatcctctaaatcaayaacataccttataactgtcttctggcagcagtttcaacacacccagcagtattttggctgtttcttttcttctttagcatctgttttccttcttttttttttcttttttctttttcccatcccagggttactcctctgattgtcagaattaca

SEQ ID NO: 24288 - DNA, 600 bp, Chicken  19866894238402_6
gcataggatgtaaacactcaacaaatgaatggatgggtaaatctcttaaaaatgtacactgcttgtaactgcatacatattaggagaaacactgctgtttcttaactcgaactaagcaaagcaagacttrtttgtaagctacaaagctgccaaatgtcccacacttacatgacgccttattaatagaacactcacttctctggaagcagcaaatattaacaaggttctttgtgtgcatgtgtgggatgagggcaacaaaccatgggaagcaygtcctctggtagattgtctyctactcaycgtgcatgacatcagttttaatggccattcagggaaagttatgcctgagtcatgcaaggataagtaacagaagcagtcaaattaggtaacacattcagaagtattcttactctgtgtcaaacctatcctctaaatcaayaacataccttataactgtcttctggcagcagtttcaacacacccagcagtattttggctgtttcttttcttctttagcatctgttttccttcttttttttttcttttttctttttcccatcccagggttactcctctgattgtcagaattacatgcttgac

SEQ ID NO: 24289 - DNA, 600 bp, Chicken  19866894238402_7
tacaaagctgccaaatgtcccacacttacatgacgccttattaatagaacactcacttctctggaagcagcaaatattaacaaggttctttgtgtgcatgtgtgggatgagggcaacaaaccatgggaagcaygtcctctggtagattgtctyctactcaycgtgcatgacatcagttttaatggccattcagggaaagttatgcctgagtcatgcaaggataagtaacagaagcagtcaaattaggtaacacattcagaagtattcttactctgtgtcaaacctatcctctaaatcaayaacataccttataactgtcttctggcagcagtttcaacacacccagcagtattttggctgtttcttttcttctttagcatctgttttccttcttttttttttcttttttctttttcccatcccagggttactcctctgattgtcagaattacatgcttgacatagatgtgagagcagaagccagtccttttaatctgaatttaattacttgagctttagaggtgtgccatttcacttgaggtatggaagaatcagtcaagctccatatatcatttaactgaaagaaacagttgaatgaag

SEQ ID NO: 24290 - DNA, 600 bp, Chicken  19866894238404_1
gtaggtgggtggcaacaactctctgcttgagcataaatttgggcaattagtgatgaaaagacctacatttgttagatgtttgttagcattttttctgttaagtatcttatctgttgtattgccagtgctgatcctgaatgtatagctcacttattgctagttaattatgcgctattaataaatcaataaacaattttcattctgattaggtctaagatcagtgaactgggcatgttttcccttttataccaatatgttgtaactgtagatattgcatgatatgtagtgtcattataaatkggagttgtctgacaggtgggagacaaaaatgctgttgacaaaagaaagatagtttcactattaatttcactattgaggrcacttctgtgaagatttttgagcaaaataatgactgcttctggagtgctgcaggctttaattatatcattacaaccagctgatacagcaagcatgctgtcagaacgtgctgacattatactggtcagaactgctattccagcagtgactaaactaaggtcctattactaagcatcacaagttgcctgctggaagactgactttctcaggtctgttctttca

SEQ ID NO: 24291 - DNA, 600 bp, Chicken  19866894238404_2
ttgttagcattttttctgttaagtatcttatctgttgtattgccagtgctgatcctgaatgtatagctcacttattgctagttaattatgcgctattaataaatcaataaacaattttcattctgattaggtctaagatcagtgaactgggcatgttttcccttttataccaatatgttgtaactgtagatattgcatgatatgtagtgtcattataaatkggagttgtctgacaggtgggagacaaaaatgctgttgacaaaagaaagatagtttcactattaatttcactattgaggrcacttctgtgaagatttttgagcaaaataatgactgcttctggagtgctgcaggctttaattatatcattacaaccagctgatacagcaagcatgctgtcagaacgtgctgacattatactggtcagaactgctattccagcagtgactaaactaaggtcctattactaagcatcacaagttgcctgctggaagactgactttctcaggtctgttctttcacaacaaatcaggtttgtacaaacatgctgaaatgtagttttaagtccccaaacagagtaaggaatcaatacagtcttga

SEQ ID NO: 24292 - DNA, 416 bp, Chicken  19866894238404_3
gccctaaccatgagaatatttgggtacagttatagaagttctcttagcaatagctgttcttctagaggtaaaatccagctgcctttgattgcctaattacttgaatgtttgcacctttgttatcaacaggaggtaagtgtacttaagagatgaattctctttactgtagaggtcctgctgttacttcttagtaagtgtgtttgcttattcaattctactttcttagaggccagagatgactgtaggtcagatattataaaagaaattgctttaaatcaattgatagactgtggaggagcraggaaaagaagaaggataaagttcctaatttttatttccacttggttaggatcagattagtcagtaacccataaagttcatgagcacaagactggaaagaattgagtctcattctc

SEQ ID NO: 24293 - DNA, 600 bp, Chicken  19866894238409_1
acatgaatccaggtcttccatgcacaaacctggaatgaaatgcttataacaaagattcaggcttgcttgtgctttctgctggaaaagtttacagtttgtccctgcagttagatttttcccacaataactgaatgcttgctttgcatgggggaaagaaagaggctgcttgcctatgaagattgggaaagaagaactccgctgaaccctaccgctcccccagcacataacatcgcactgagaacacaaggctgttgattagggttttcagtctggcaaacaataaatcacagagccggcatrgtgagcagacacatctcagttaaggagcatgcctgcggagcgtgaatctgctgcacagtgtgctcactgttcaagtgcttacctccttaatggtgcaggcaatgtccacgaagcaaaaatgccagtgaaagggtgagggctgcccaggtggcaaggcagtcagctcaactccaacatctgttctcagaagagaaattttttatttatttagtgtcgagtggctttcactgatgctgtttcccatgaaatgcaagtctctgatgtccttccactggccacgctgctgtctgtgtcggggga

SEQ ID NO: 24294 - DNA, 600 bp, Chicken  19866894238409_2
ctgctgcacagtgtgctcactgttcaagtgcttacctccttaatggtgcaggcaatgtccacgaagcaaaaatgccagtgaaagggtgagggctgcccaggtggcaaggcagtcagctcaactccaacatctgttctcagaagagaaattttttatttatttagtgtcgagtggctttcactgatgctgtttcccatgaaatgcaagtctctgatgtccttccactggccacgctgctgtctgtgtcgggggaggctgcaaggggcagggaatggggaggaagatgagcatgctcagccstcagatatgctttctctgtcattagggccatttccagttgctttctgttgctgctggtggccccctccccagtgttctccttcccagcttgtcccagcttcctctgtctgtcttgctgctgccaatagcaagtctcagccactgtctggagcaacagcagctggtgggaaaccagtctctgttccagtatcacaggaacagcctctagggcaggttctcttcccatgctgaccttattatggcttctgtattgctcattggtagccaagagacctgcagcatcctgcccatcagagtaag

SEQ ID NO: 24295 - DNA, 600 bp, Chicken  19866894238415_1
ataaggggaggcttacggctcctcacgctttgtacagtgacagatctatccgccataaaccaaagcggtcgccttttggagagccaaaccaaacaaccaaaccgcagtgcagccgtgctcatggggccgaggattcgggattgcagcaagggctgagcgtgcaaagcggtgctgctcctgatctgctcaccccttcatgcaccgcgggcacccacggcgcttcgctgcagagagtttgtgagtgctcacacggctcagtgcttccccagcccccccccggcacccctcctgccccacctygcagggcctcaacctcccgccggcatttaattactccgagctcccagcctcgccggtgtgtttaatatgagctatgtaaatttctcccaagaatgataggattttgacagcctgatttgcctcgcaggcatactcaagccagctcattttctcttccctggaaatttttgagtggtcgggtggcatttgattaccattggctggcatatctgagctctggggttgagcataaagatattttaaatttaataggtttaagatgtcattatttccatgctgatgaatttatacttgtagcca

SEQ ID NO: 24296 - DNA, 600 bp, Chicken  19866894238423_1
caccatgggtctgggttgcatgtggacccttgggaaccttctgtgttcggggtgtgaatgcatctccatacgaaaatgagcagccttgtgttgagagtcacctcgaggggaaaaaccgggagcccaggcccccgtttcagtgtgagtgtggatttaagtgatggctcagtgctgtccctgcctgcgggatgcagggctggctgagagagatccaggtagcgctgggagatctgtgccccaagggatccctttccttcccctgcgtcccgatggagctccgagtctccacacttgggctgytgtgctgtcacatcacactggagttggactcaatgatcctttatgaatcccttccagctcagggtgttctatgattttatgatggtccagcccsgcagagctccaccagggcagccgtagcgaggagcagcagcagcaggtcctcccactgcccccggcctgccgaggccccgctcgatawgagcttcgactctcgcagccgctccggggctcagcgtccttcgcaccattttggctccacttcaaagcaaagtcttgcacacatcctggctgaggcgttggctgcctcgcggcccctgg

SEQ ID NO: 24297 - DNA, 600 bp, Chicken  19866894238423_2
gagtcacctcgaggggaaaaaccgggagcccaggcccccgtttcagtgtgagtgtggatttaagtgatggctcagtgctgtccctgcctgcgggatgcagggctggctgagagagatccaggtagcgctgggagatctgtgccccaagggatccctttccttcccctgcgtcccgatggagctccgagtctccacacttgggctgytgtgctgtcacatcacactggagttggactcaatgatcctttatgaatcccttccagctcagggtgttctatgattttatgatggtccagcccsgcagagctccaccagggcagccgtagcgaggagcagcagcagcaggtcctcccactgcccccggcctgccgaggccccgctcgatawgagcttcgactctcgcagccgctccggggctcagcgtccttcgcaccattttggctccacttcaaagcaaagtcttgcacacatcctggctgaggcgttggctgcctcgcggcccctggctgggacagtatcgccttggagggcagccaggcccccgccgtgcctccccgaccccaggcaggacgcgccacgccgtcgggcagacggatctcc

SEQ ID NO: 24298 - DNA, 600 bp, Chicken  19866894238423_3
ctgcgggatgcagggctggctgagagagatccaggtagcgctgggagatctgtgccccaagggatccctttccttcccctgcgtcccgatggagctccgagtctccacacttgggctgytgtgctgtcacatcacactggagttggactcaatgatcctttatgaatcccttccagctcagggtgttctatgattttatgatggtccagcccsgcagagctccaccagggcagccgtagcgaggagcagcagcagcaggtcctcccactgcccccggcctgccgaggccccgctcgatawgagcttcgactctcgcagccgctccggggctcagcgtccttcgcaccattttggctccacttcaaagcaaagtcttgcacacatcctggctgaggcgttggctgcctcgcggcccctggctgggacagtatcgccttggagggcagccaggcccccgccgtgcctccccgaccccaggcaggacgcgccacgccgtcgggcagacggatctccccccccctccctgcactgcttcgggcatatcttcggttatcgcgcggcggttggaaagcgggcggtttgttgtgtgttgatttagtt

SEQ ID NO: 24299 - DNA, 600 bp, Chicken  19866894238424_1
ctagcttctgggttttatctagttctactgattaaacactgcaatagtggagaggactgaggtttgctgctagaagattttgtagttaataacacccctgagcagactaagcttttcctgcttaggcaaagattttcaatccacagtaattctatattgcattttagtagcatatttgtttgcctttacatttccttcaacatacagccccactctgaaaatggtgcaacctactccaccacttctatataggtcagatcccgagactacagtggcttttcaattatattcccatcatcrggctttcagatgctgaataaatgccctcaattagaagcaagcatcccagtttctcctcttcatttccaggctgccatcactaatagcacagtgtatttcacgttggtttgatgctttgcacgtgtacagctgaacctcatttaggttgttctttgttcttcccaaaatttcaagctgtgtcacgttcttctttctggcacaccatgattttataaactcattttagaggattagagaactatatgggggattttcctcatctttactctgaattgtctttttgctcatctttcctagttt

SEQ ID NO: 24300 - DNA, 600 bp, Chicken  19866894238425_1
gctcaatattagatggaagaaatgttcccccagcttctgggggagaaaaaaaaaaaaaaaaagcaataacaaattgcagaaggtttatttaaacgtggctgtttatttttattggagattgagttaccttcccttataggagtaatgttttggaatcctcagttcgcctacaaaatatctgtttccaaagaaaagcaatgaggctctttgtcatttttctttgctttcctcctttggtgagtgaaggaaattcaccatgaagaatcatttataacaaaattgcttttgaaatcgttggcragtccttgrcatgtcggcaaaatgaattactgccctatccctgggcagccagaggacaaagacgtggctctcttgtttctcgctgtagactggcaggacctctactatcaggaagcacagagaataaagcaagcaagaagaaaggctcacagctggatctcagagagggtggtggggatggagggagggaccccaggtcctgtcatgacttcaagccatgttttgtcccagcaattgccaacgaccacatggacaacgttttgttgctggtattgtggcttcttgcaaatcacaggcttc

SEQ ID NO: 24301 - DNA, 600 bp, Chicken  19866894238425_2
tagatggaagaaatgttcccccagcttctgggggagaaaaaaaaaaaaaaaaagcaataacaaattgcagaaggtttatttaaacgtggctgtttatttttattggagattgagttaccttcccttataggagtaatgttttggaatcctcagttcgcctacaaaatatctgtttccaaagaaaagcaatgaggctctttgtcatttttctttgctttcctcctttggtgagtgaaggaaattcaccatgaagaatcatttataacaaaattgcttttgaaatcgttggcragtccttgrcatgtcggcaaaatgaattactgccctatccctgggcagccagaggacaaagacgtggctctcttgtttctcgctgtagactggcaggacctctactatcaggaagcacagagaataaagcaagcaagaagaaaggctcacagctggatctcagagagggtggtggggatggagggagggaccccaggtcctgtcatgacttcaagccatgttttgtcccagcaattgccaacgaccacatggacaacgttttgttgctggtattgtggcttcttgcaaatcacaggcttcatttctcag

SEQ ID NO: 24302 - DNA, 600 bp, Chicken  19866894238432_1
gagtatgattcagagattgaaaatccaatatgaagatgtaataaacttgagttctgtttgactgagttgcctagggagtcaaggtctgtgtgcagtgtgagctgataggccttggcctgcccaccggggctgcagctcttctgtttcacgcctctgttcagatgggtggctcacattttgttatcttagcagaggtctgggtgagtgccttcattgtgtgtccagcactgacccccccggctagcactttgattctactgacactggaatctctatctgtgattggaatatcacatggcstttttctgccttctggtctttatttttttgctgtaaatgagcactattttaggaagctgttgaattgggaggttcctgcaggaaaagtttcttgtgttaatgcatgcagggttttctgaagacaggacaaaccaacacttcactcatagtgttgagcctgctgctttaacataactaaaaccacttccactatcttgtgttaatggtagaagttattgagtggaggtatttcttttcttttcatggtattttttttgtgcctgccactgaagcccagtttttgttctgaagttatgctgt

SEQ ID NO: 24303 - DNA, 405 bp, Chicken  19866894238432_2
ggaaaagtttcttgtgttaatgcatgcagggttttctgaagacaggacaaaccaacacttcactcatagtgttgagcctgctgctttaacataactaaaaccacttccactatcttgtgttaatggtagaagttattgagtggaggtatttcttttcttttcatggtattttttttgtgcctgccactgaagcccagtttttgttctgaagttatgctgtaagaggccttctaaggtgttaagatgctgcactgaaacatattccaaatggtgacccagaggacatcaacttttaaatgraagcattatagtctttcaaataaacctcaatattatcatctaaggggtcatgctttgtattgctcctgacataactgataagattctgtgtttatagaaacatag

SEQ ID NO: 24304 - DNA, 599 bp, Chicken  19866894238437_1
  misc_feature (1)..(2): n is any nucleotide
nntatgctataaagaatggaagaatataaaatctttaactgtattaatatatgcattgaatactctattttttaagctaaataattcaactgtatttttcagcttcatgggaagaatgaatatattcttcagcttgtagagtttctagttaaatcagcaccttgctgacaaagcagctacttatatctgtgttggtttttaccacagtcacaagaagcttgcctgccatgctaatggcttttgagtctcttgctgtcctgctgttaagtagagagcaaaagaaggggaaaaggaagaaawaaaaatgtstgtcatgcgggcagagaaaaagactatgctgggggttgtaaagaaactataggcattgtatgaattatctcaaaagcaagaagacagtgaagcagtatttgacttcactgctgtgttgtcttactattacaccatgaaatagcttaattaaagctcttgcagcactccagatggaacacagatttaaagcaagtgtatatagtgtgaaacctccaaggctctttttctgtctttaagagaaatagatcttcaagagaagatggtccactgggctctgtacaggatgaaat

SEQ ID NO: 24305 - DNA, 600 bp, Chicken  19866894238437_2
taaagaatggaagaatataaaatctttaactgtattaatatatgcattgaatactctattttttaagctaaataattcaactgtatttttcagcttcatgggaagaatgaatatattcttcagcttgtagagtttctagttaaatcagcaccttgctgacaaagcagctacttatatctgtgttggtttttaccacagtcacaagaagcttgcctgccatgctaatggcttttgagtctcttgctgtcctgctgttaagtagagagcaaaagaaggggaaaaggaagaaawaaaaatgtstgtcatgcgggcagagaaaaagactatgctgggggttgtaaagaaactataggcattgtatgaattatctcaaaagcaagaagacagtgaagcagtatttgacttcactgctgtgttgtcttactattacaccatgaaatagcttaattaaagctcttgcagcactccagatggaacacagatttaaagcaagtgtatatagtgtgaaacctccaaggctctttttctgtctttaagagaaatagatcttcaagagaagatggtccactgggctctgtacaggatgaaattttggagatt

SEQ ID NO: 24306 - DNA, 600 bp, Chicken  19866894238439_1
cacagcataaaaagagctgtgagacttgccttacatgttgatgtacggatgacgctcagatgctggtaagcgtgctctcccaagggtactgtgaccaggaactacatcctgcacaaatcatcagtgtcaagcagaggcttggcgtaacagaactcagagaccgatggttccctgggcaccttctgttgtttcccatttctgaggggactgagtgtctttgagggtgtccacaactggaagagttaagttgccacgtttctcatgggaacagtggttccaggtccctctcacttggagtaytggccactgttgccaaactttgcaccatgtttttctaagtgggtgtgaactctcctgatggagccttccgatccagacagaatgagtcactgttacacctgctgatttagcagtgctgctcatttttcctgaaactgcagagagagctaggtaaagacccacttccccctgtagtccgagcatcctagttacctaggtttgcttagcagaaggtaggagttgagtactgaaactttattcaggttttgcatttatggataaatgtgctatagatgctgatcaattttcaataataatctc

SEQ ID NO: 24307 - DNA, 599 bp, Chicken  19866894238441_1
  misc_feature (1)..(27): n is any nucleotide
nnnnnnnnnnnnnnnnnnnnnnnnnnnacagtgcagacagccttctgctcgggcgttacgggtcacagagatgcttcgttaaaaggttttgggaaattcattcagaaagctcattattaagcacagatagaatgcagcacgtctccatgcaaatgtgctgcctccaattgcttctgcagcttctgggataattaaagcaattgaacttcaaaagatgcagagacgcgtgcccgaggagctgaagagataacggggctgcagctactctacaggaggaggaatggaggcaattggatgctrtaagatcaacacgggcatagaggcataggggtaaagttcctgctgtctcattttgagctctccaagtcacatttctgccttaatgctgcaacaccttggccaaccttcttccctttctccttcatttcaccagccccagttttctttaatacagaggaaagattttgcagtgttgctcttgaacacaaaaggctacagacttttaccaacaaggcctggactccagctttgctgcctgggsgagatggatacagctcatggtgctgagcaccacrggttacacccattgagcctcatct

SEQ ID NO: 24308 - DNA, 600 bp, Chicken  19866894238441_2
aagagataacggggctgcagctactctacaggaggaggaatggaggcaattggatgctrtaagatcaacacgggcatagaggcataggggtaaagttcctgctgtctcattttgagctctccaagtcacatttctgccttaatgctgcaacaccttggccaaccttcttccctttctccttcatttcaccagccccagttttctttaatacagaggaaagattttgcagtgttgctcttgaacacaaaaggctacagacttttaccaacaaggcctggactccagctttgctgcctgggsgagatggatacagctcatggtgctgagcaccacrggttacacccattgagcctcatctcccttttgagcactttccctcytgagtaacaagaggtccgaggcagaaatcccataggccaacatatggctctacagttggayggtcaaagtcaaccagcatcacatgagctgctgctcatcacgatcaagaaacatgcagatgtggcactgagggacatggtttagtgggcatggtggggacgagccgatggttggacttggtgacctttagaggtcttttccaaccttaacgattctatg

SEQ ID NO: 24309 - DNA, 600 bp, Chicken  19866894238441_3
gaggaatggaggcaattggatgctrtaagatcaacacgggcatagaggcataggggtaaagttcctgctgtctcattttgagctctccaagtcacatttctgccttaatgctgcaacaccttggccaaccttcttccctttctccttcatttcaccagccccagttttctttaatacagaggaaagattttgcagtgttgctcttgaacacaaaaggctacagacttttaccaacaaggcctggactccagctttgctgcctgggsgagatggatacagctcatggtgctgagcaccacrggttacacccattgagcctcatctcccttttgagcactttccctcytgagtaacaagaggtccgaggcagaaatcccataggccaacatatggctctacagttggayggtcaaagtcaaccagcatcacatgagctgctgctcatcacgatcaagaaacatgcagatgtggcactgagggacatggtttagtgggcatggtggggacgagccgatggttggacttggtgacctttagaggtcttttccaaccttaacgattctatgattccattctgtgattcagtgattgatacatgtc

SEQ ID NO: 24310 - DNA, 600 bp, Chicken  19866894238441_4
ggcataggggtaaagttcctgctgtctcattttgagctctccaagtcacatttctgccttaatgctgcaacaccttggccaaccttcttccctttctccttcatttcaccagccccagttttctttaatacagaggaaagattttgcagtgttgctcttgaacacaaaaggctacagacttttaccaacaaggcctggactccagctttgctgcctgggsgagatggatacagctcatggtgctgagcaccacrggttacacccattgagcctcatctcccttttgagcactttccctcytgagtaacaagaggtccgaggcagaaatcccataggccaacatatggctctacagttggayggtcaaagtcaaccagcatcacatgagctgctgctcatcacgatcaagaaacatgcagatgtggcactgagggacatggtttagtgggcatggtggggacgagccgatggttggacttggtgacctttagaggtcttttccaaccttaacgattctatgattccattctgtgattcagtgattgatacatgtcacagcatcgtggtgctttctgggcagagacaggctgtgtccagcca

SEQ ID NO: 24311 - DNA, 547 bp, Chicken  19866894238441_5
atgctgcaacaccttggccaaccttcttccctttctccttcatttcaccagccccagttttctttaatacagaggaaagattttgcagtgttgctcttgaacacaaaaggctacagacttttaccaacaaggcctggactccagctttgctgcctgggsgagatggatacagctcatggtgctgagcaccacrggttacacccattgagcctcatctcccttttgagcactttccctcytgagtaacaagaggtccgaggcagaaatcccataggccaacatatggctctacagttggayggtcaaagtcaaccagcatcacatgagctgctgctcatcacgatcaagaaacatgcagatgtggcactgagggacatggtttagtgggcatggtggggacgagccgatggttggacttggtgacctttagaggtcttttccaaccttaacgattctatgattccattctgtgattcagtgattgatacatgtcacagcatcgtggtgctttctgggcagagacaggctgtgtccagccacggagatg

SEQ ID NO: 24312 - DNA, 600 bp, Chicken  19866894238449_1
tttcagtctatttattgataaatcttttaaaagagattttatgccttctttcttacactgacagacttcaaactgttgccctattaaaaaaagcctggtagaagaccagattctcacttctcaaacaacagttgcatcatggatggctgtatcagctctagacacctcctggggaaaacagtgcatgaaacagatctggaagaaaaaacctgcaagtggccttgcagctgcatgtgaaaagattgtacttggctcttaactgtctcctgcaccacaatcaacaaggttttcacctttctygcaggccactagagaaccattctgcatagagaaaaaaaaatagccccagacctttcagttctcacagaagtgacccatgtgaataaaagagaaacacacaccttgcactgagactatcaagtacaaatccagctttgaaagcatgagacaacaccaaggaaataacagaaagctgatttcctaataatgaatatgcaggagatcaattaaatgaaggtggccgtaaaacagatcttcacataaaggtatgagagaacacacatgttcaactccagtaggtactctacagcggactgtcaa

SEQ ID NO: 24313 - DNA, 600 bp, Chicken  19866894238451_1
ccttggttaaccattggcttgaaagctattgaagccaaagaatgacacatacagtaggaagccagatcgaaagcatcacctgagtgctgcttatctatcagattttagatgtgactatatgttgtctacccaagtagaaagaaggagaaatgtaagaagtttattcactaagtaggaatgaatggacagcactatgttcttacccatgccagtggcagtagcagtactgaagcaaactccttgtgcacacacaccaaaggacactgtttctctgctttatctaggtggtctacatcctcygtgtgcagagtcagcactgcagtaccgtgtattcccctgtccagaaaggcaagtgcagtcccaactgtgtagaagaacagcagtaaagaagtaactgacatcctagaattcatattcaggaaataagtagccaagtaagaaacaaactgacaagctgacatagaactaagtaattccccctaacaaattctttaggatcagagtagaggatgtctctgtttctagctcatgcaggtgattctgtagtcttggctggatgctcatcctcttactccttktgtgcatcctacaccagaagga

SEQ ID NO: 24314 - DNA, 600 bp, Chicken  19866894238451_2
atctaggtggtctacatcctcygtgtgcagagtcagcactgcagtaccgtgtattcccctgtccagaaaggcaagtgcagtcccaactgtgtagaagaacagcagtaaagaagtaactgacatcctagaattcatattcaggaaataagtagccaagtaagaaacaaactgacaagctgacatagaactaagtaattccccctaacaaattctttaggatcagagtagaggatgtctctgtttctagctcatgcaggtgattctgtagtcttggctggatgctcatcctcttactccttktgtgcatcctacaccagaaggagtaacacaaagcatacagttacaggtggacgtgctaaaacrtgtccaagttgctgcaggtaagacacaagcagagtgaaaaaaatctttttatttatcattcactggaaatatagggctcttttctccttcagacagtactgagaggtaaactatgattctcccatacaatgggtttttgttttctcacagactccttgcacactgccaatccttggtagtgcaaaactaacctaacatttctcatttttgctgtttccactgaatggtttactcaaa

SEQ ID NO: 24315 - DNA, 600 bp, Chicken  19866894238451_3
cagaaaggcaagtgcagtcccaactgtgtagaagaacagcagtaaagaagtaactgacatcctagaattcatattcaggaaataagtagccaagtaagaaacaaactgacaagctgacatagaactaagtaattccccctaacaaattctttaggatcagagtagaggatgtctctgtttctagctcatgcaggtgattctgtagtcttggctggatgctcatcctcttactccttktgtgcatcctacaccagaaggagtaacacaaagcatacagttacaggtggacgtgctaaaacrtgtccaagttgctgcaggtaagacacaagcagagtgaaaaaaatctttttatttatcattcactggaaatatagggctcttttctccttcagacagtactgagaggtaaactatgattctcccatacaatgggtttttgttttctcacagactccttgcacactgccaatccttggtagtgcaaaactaacctaacatttctcatttttgctgtttccactgaatggtttactcaaatcctaccagactggtacttccatcctaagtgcttacaacagaacaacattttcctcctgattt

SEQ ID NO: 24316 - DNA, 600 bp, Chicken  19866894238451_4
acccaatagaggctacttttacttctggccatttactgaaaaatctattagcttgacactgccacaatagtaaatgggtctataatgttcattgcaagctttttctacatttacttaaataagaagatagggtgaggtaggcctggaaaactcactttgtttttgtcatgtgataaaaactttcagagtagcctgagtattcactctgtctactgatggagaagctataatcactgttatgacaacccactgatgtgtgtcatgagcaacgtgtattgattctgcctataattcttccaraataatagatctgtgagttgttcccttgtcttgcagagaaagttcactctagttcaaaatagaacagggatgaattagatttgttatgattattagtctattttgctgtcaggacgccatgtaatttctggtgaacaagacaaactaaacaagtagatttatattatttttctaaaactgcagtaaatacatatctgatttcttcatcagtttccatagtagaagactggacccgtgagtatttagagtatttggagaaaataaaaatgaggaaaacaagcactcaagcgtcacattttt

SEQ ID NO: 24317 - DNA, 599 bp, Chicken  19866894238452_1
  misc_feature (1)..(121): n is any nucleotide
nnnnnnnnnnnnnnnnnnnnnnnnnnnnnnnnnnnnnnnnnnnnnnnnnnnnnnnnnnnnnnnnnnnnnnnnnnnnnnnnnnnnnnnnnnnnnnnnnnnnnnnnnnnnnnnnnnnnnnnnnaatgcccataataccccatctctctgttatctggctgggatggtgtcattatagcgttttaaagacagccctaatcattaaactaaatacctgcagcctaatactttgcaatttcattttctccttgtcagactgtgtaattgatatttgtactggaggtaacaaaacagaaaacgtgsaggtgttgataactttgccattactgtctcttaaactgcccgtgagacatggtgaggactggatggcagtagagagctggaacctttttaatgggaaataaagcaactcagccagcctaagcctgcagtcaaggcctccccaagttygggtggggatccatggggtctgaaggactaacagctcccatcagcaaacaaatctggggattctgctcctgtggtccctcactgagggatgaagcaaaggaatgtgttgcaaaggcttcttgttgagagtccaccgagtgaatttttcttta

SEQ ID NO: 24318 - DNA, 600 bp, Chicken  19866894238452_2
ttatctggctgggatggtgtcattatagcgttttaaagacagccctaatcattaaactaaatacctgcagcctaatactttgcaatttcattttctccttgtcagactgtgtaattgatatttgtactggaggtaacaaaacagaaaacgtgsaggtgttgataactttgccattactgtctcttaaactgcccgtgagacatggtgaggactggatggcagtagagagctggaacctttttaatgggaaataaagcaactcagccagcctaagcctgcagtcaaggcctccccaagttygggtggggatccatggggtctgaaggactaacagctcccatcagcaaacaaatctggggattctgctcctgtggtccctcactgagggatgaagcaaaggaatgtgttgcaaaggcttcttgttgagagtccaccgagtgaatttttctttacctctgagtttgtttccttctctgaatgtcttgggctctgtaagagcacttctatggcaaatggcttgaaactgtcaaactgtagggcgggtcagcagatcttctacgaggcatttttcctcaactatcacagcactgaaggtacatg

SEQ ID NO: 24319 - DNA, 600 bp, Chicken  19866894238457_1
gtgtatcatgccaagccttgtggtggttttgtaatggggctgatgaacacgtggctgttcagctgccttccattggttgcatcatggaaataaacttgtctccagaggcaaagtggtttgctgttatactgacctgctgctacgctgagataataccaatcagttgagaacttccttacctcttaaaatgtatctgagtcaaattgctcagacaagagtaaacctgaagctgtttttaatgtagtttctgatgacagaagataggattatatgatataaatacagaattttgcatctcartgttttttgtgacatgatgaatctttatgttgtagctgtctttttggtagagaatgcagtgaaccctgacttgttcccatagaatgtttattacacacacttctaatctgcttctataattctgcaaactgctattcattgtaaatcaggtagaagaaaaaaacatatctcccttctgttctacattatgcagttctcaagtcagtatccaagaaaaaactgatagtatgcagttccgtagtcacaagtatttctctttctggggttcaaagacaacctatgcacagaacttgaaaagac

SEQ ID NO: 24320 - DNA, 600 bp, Chicken  19866894238459_1
gggtgggaaggtttagaaccacgggtggaatttgtgctctgggccagtgagagagatggagagcccagagactccatcctcgtcattacatccctgtgaggtacaggaggatgggtctgtgctgtgcatcccacgcggcagcatctggaaagtgaaacaggctttcagaacttgtggaaggtgggcatgttatgcatgcatacctatctgagggagtagggcttgtgtttggaactgtaatgggaaacagggaatgtttgggaatagctaagcaaagtgcttcagtggaaagtaaagaayaggacataacactcggcacagattcccacacggtacgaaagaagaacagctgtaggaagaagtgctgaaagtgtrattaaattgtttgtcttgaagagatctgtgcaaaaacttttgtggagttgaagcgtgaggacggggtcccatggtgggcttggaggatcgcagcagtggctttaaatgctttaaattgaaaaagaaagaaagattgggggcggtggcttattaaaatgatacatcagagtctgttttcaaataataacgtgggagattgatgtgggaggttggagtatctctctc

SEQ ID NO: 24321 - DNA, 600 bp, Chicken  19866894238459_2
atcctcgtcattacatccctgtgaggtacaggaggatgggtctgtgctgtgcatcccacgcggcagcatctggaaagtgaaacaggctttcagaacttgtggaaggtgggcatgttatgcatgcatacctatctgagggagtagggcttgtgtttggaactgtaatgggaaacagggaatgtttgggaatagctaagcaaagtgcttcagtggaaagtaaagaayaggacataacactcggcacagattcccacacggtacgaaagaagaacagctgtaggaagaagtgctgaaagtgtrattaaattgtttgtcttgaagagatctgtgcaaaaacttttgtggagttgaagcgtgaggacggggtcccatggtgggcttggaggatcgcagcagtggctttaaatgctttaaattgaaaaagaaagaaagattgggggcggtggcttattaaaatgatacatcagagtctgttttcaaataataacgtgggagattgatgtgggaggttggagtatctctctcttcacatagccttcatggcaagctacgtgatggggcgtgaggatgagagaaactggtgctaacagtaacctggca

SEQ ID NO: 24322 - DNA, 518 bp, Chicken  19866894238464_1
taatgcccgccaagctgtctacagaactaggggaaatctggctagctagccagacggcgctgctctgaaggttctctggtcgctgtgaaaattttacatctgctcctctggtaccacctcaaggaatcaaaccgcttaacgtggcatcgacttgtctggtggagattatttagcagcaaatcttcaccttaccggtgctacttctgcagaatgaaggtgatccgatggaaaatttctctaccaaaagctgcaaaacatagatgctcgctttctagatgagacaacttaggagtatagaartacaactcgtcagtgaccacgctcaaccgggacttccttgcacgcgtccaaggagaatatcgtccctctcagatggtgaaacagtctctcttcgatatcacgaaacaggaaatatctgaaagatgcttaaaactgccctactcttaaatcaaatcagctaaaagattctttgttatcaactccacgcaaaactcaaatagttgacagcgatagaaaag

SEQ ID NO: 24323 - DNA, 600 bp, Chicken  19866894238474_1
ctttgctgttcctacactcgtaagcttcctcatttctaagacattttcctgcttcgtgtgcactttttttcctgttggtttttttcttcgctttccagttccagagctccccaacccaaacagctttgatacctcatttgcagttcatcagagccgtagctgcagacctgcttctgtttacctttctaacctaaaaaactcaggttggatattaggaaaaacttctcagaaagagcagtgaggcagtggcacaggctgcccagggaggtggtggtcaccatccctggaggtgttcaagarctgtgtggatgtggcactgagggacatggtcagtaggcatggtggggttgggtcagctgttggactggatgatcttagagggcttttccaagcttaatgattctgtgattcaatgcaatccacttacgatgcttctgtataagttacttcctattgctgattcttccaatcttcatatttgttgaaactggacgtaagcaaacgtcccactgtcgtagaatctaactgctaacagagacatatttttgtattttcagatgttaaaagcatttgattacttctcttcttggaagggagatg

SEQ ID NO: 24324 - DNA, 600 bp, Chicken  19866894238476_1
cgactttttgccagctttttgactttgtggctgcacatcttatccatggaactttgtcaaattctctatttccaaactctgtaatttcctctgccttctcccctctgtcattcttggcagtgagattcctcagaattccagcaagttagtgagccgtaggcttgtgcagcacagacccggaacagaatccagagagctgagcacagcactggtttactttaatcaagccacacagttctagaaaatctcattctctttaatattctatttatttacaagttatatgctgcagcatttcayagcgttactcttgtgtgcagaagcctggtacactttacctgcacgtagaaaattaggctcattttggtggacgggtgcattttatatgtaagattgctggcatgagatcattttcctggtgtgcagcgagtgtttgcagggccccaaaatcccgactggggcctgtctgcattactataaatacatcctataattatcaggaagtctttgaatcagaagataaaacttcatgaaaataggtcgtgaaaagttttatgggtgctgtgaaaaacagattcctgactcttgataaaaatgcta

SEQ ID NO: 24325 - DNA, 600 bp, Chicken  19866894238476_2
gacctaacactctataattttatcctatgtaagtctttttaaagccgtgggctcacagtcaaaaactccagagcaggaggactggcgtgtttgtaggatgtattcagaaatgcagctgtttcttagtgggggaagcattccatcataaggcagggagcgcgacgtcactgacaagctgctgtggccgtgtacccgagcagtgacctgcaggcagctctgaggaggtgcgttgtgtctccaggtttgctcgctctgtgccctgtgctgaggtcattgtgaaggcagcggtcagttgtgtcratcccctgtaatccagaaactttcttctgagaaatacgagtgaggtctgaccttgtcagacattgtatggaaatgggtcccattcaccacagcctgcactrcagccaaaccaaaagtgtacaaataagaattgcrcacctaactcccattctaattggctatgaacctaactaccattctaatcagctataaacgtttttcccaccgccrttttgtgtcagagtacaagcagtgattttgttacctggtgaggtgccttccatctaaccacagcagtgtgctgtgctcctgagaaaaaca

SEQ ID NO: 24326 - DNA, 600 bp, Chicken  19866894238476_3
attcagaaatgcagctgtttcttagtgggggaagcattccatcataaggcagggagcgcgacgtcactgacaagctgctgtggccgtgtacccgagcagtgacctgcaggcagctctgaggaggtgcgttgtgtctccaggtttgctcgctctgtgccctgtgctgaggtcattgtgaaggcagcggtcagttgtgtcratcccctgtaatccagaaactttcttctgagaaatacgagtgaggtctgaccttgtcagacattgtatggaaatgggtcccattcaccacagcctgcactrcagccaaaccaaaagtgtacaaataagaattgcrcacctaactcccattctaattggctatgaacctaactaccattctaatcagctataaacgtttttcccaccgccrttttgtgtcagagtacaagcagtgattttgttacctggtgaggtgccttccatctaaccacagcagtgtgctgtgctcctgagaaaaacatttccatcctttaaaatgttcttaatttcttctttctcaagaaattggacatggaaaaaaatatgtatttctgtttgtttctttattaatctttgagtttc

SEQ ID NO: 24327 - DNA, 600 bp, Chicken  19866894238476_4
cattccatcataaggcagggagcgcgacgtcactgacaagctgctgtggccgtgtacccgagcagtgacctgcaggcagctctgaggaggtgcgttgtgtctccaggtttgctcgctctgtgccctgtgctgaggtcattgtgaaggcagcggtcagttgtgtcratcccctgtaatccagaaactttcttctgagaaatacgagtgaggtctgaccttgtcagacattgtatggaaatgggtcccattcaccacagcctgcactrcagccaaaccaaaagtgtacaaataagaattgcrcacctaactcccattctaattggctatgaacctaactaccattctaatcagctataaacgtttttcccaccgccrttttgtgtcagagtacaagcagtgattttgttacctggtgaggtgccttccatctaaccacagcagtgtgctgtgctcctgagaaaaacatttccatcctttaaaatgttcttaatttcttctttctcaagaaattggacatggaaaaaaatatgtatttctgtttgtttctttattaatctttgagtttctggaagacatgtattcaaaggtaaaatagacggt

SEQ ID NO: 24328 - DNA, 574 bp, Chicken  19866894238476_5
gcagctctgaggaggtgcgttgtgtctccaggtttgctcgctctgtgccctgtgctgaggtcattgtgaaggcagcggtcagttgtgtcratcccctgtaatccagaaactttcttctgagaaatacgagtgaggtctgaccttgtcagacattgtatggaaatgggtcccattcaccacagcctgcactrcagccaaaccaaaagtgtacaaataagaattgcrcacctaactcccattctaattggctatgaacctaactaccattctaatcagctataaacgtttttcccaccgccrttttgtgtcagagtacaagcagtgattttgttacctggtgaggtgccttccatctaaccacagcagtgtgctgtgctcctgagaaaaacatttccatcctttaaaatgttcttaatttcttctttctcaagaaattggacatggaaaaaaatatgtatttctgtttgtttctttattaatctttgagtttctggaagacatgtattcaaaggtaaaatagacggtgagtgattggaagaagttgtacatttaagcataacacctcgtcaaagtg

SEQ ID NO: 24329 - DNA, 389 bp, Chicken  19866894238483_1
aatgttacgtaaggggattcttggatgacgaagtgcctctgttagggtatgctctgcttattgtgtagttactgaaattgtttgctgttttggaccggtgtcaggcagaataatactgaataagtcccagatgaatgtgggtggtgaaaggagaaaaataacttaaaataaagaggggtattatcaactgaacagctagtgttgatcctgtggtgctgaaaaatggaagcaggaaaaagtagttgatttttctttttttcccttttctttccatcttctttttcttcttttttttttttyccccttcctttaaaaaggaaaatcttagactgaaggatttgttctgacaagagtttggcacacttcttaaactcgcagcaatttgggat

SEQ ID NO: 24330 - DNA, 599 bp, Chicken  19866894238484_1
  misc_feature (1)..(138): n is any nucleotide
nnnnnnnnnnnnnnnnnnnnnnnnnnnnnnnnnnnnnnnnnnnnnnnnnnnnnnnnnnnnnnnnnnnnnnnnnnnnnnnnnnnnnnnnnnnnnnnnnnnnnnnnnnnnnnnnnnnnnnnnnnnnnnnnnnnnnnnnnncccccagccccagtctgccctgagctcctggtgatgacagtttgcagctcccttatgccgttctggcagcagcctctgactgtgcatctgctcatgagagtgatgccagcgctgcttgggctgtgtttctctatagtctccatctctagtgcccagctcccytctctcctccccagaagtgagcaaagcctctgtgatggcagtacccctgctccagatgctatcctggcgaccagcagcagcatccctggggtgctctctgccaaccccacaggggtgccgccctctgagggttgtcaggatttcagtggggacattcagcccccatcccrttgggtgaccatctggcatgtggctgccaacactgtgtccctgcagctggaggcaaaarcaggcaaaggcatcacggagcggacgctaccagactggaaggtggcactgaagagggagcgcgaggagca

SEQ ID NO: 24331 - DNA, 600 bp, Chicken  19866894238484_2
gatgacagtttgcagctcccttatgccgttctggcagcagcctctgactgtgcatctgctcatgagagtgatgccagcgctgcttgggctgtgtttctctatagtctccatctctagtgcccagctcccytctctcctccccagaagtgagcaaagcctctgtgatggcagtacccctgctccagatgctatcctggcgaccagcagcagcatccctggggtgctctctgccaaccccacaggggtgccgccctctgagggttgtcaggatttcagtggggacattcagcccccatcccrttgggtgaccatctggcatgtggctgccaacactgtgtccctgcagctggaggcaaaarcaggcaaaggcatcacggagcggacgctaccagactggaaggtggcactgaagagggagcgcgaggagcatcagcatctcctggctgaatcctacagcgccgtcatggacctgaccaagcagctgcagatcagtgaaaagaactggaaacaggagaaggtggagctgctggcccgcttcaaggaagagcagcagcaggcagagcagcaagcaaaggacctgcagaacaaactcaaccaggt

SEQ ID NO: 24332 - DNA, 600 bp, Chicken  19866894238484_3
tcatgagagtgatgccagcgctgcttgggctgtgtttctctatagtctccatctctagtgcccagctcccytctctcctccccagaagtgagcaaagcctctgtgatggcagtacccctgctccagatgctatcctggcgaccagcagcagcatccctggggtgctctctgccaaccccacaggggtgccgccctctgagggttgtcaggatttcagtggggacattcagcccccatcccrttgggtgaccatctggcatgtggctgccaacactgtgtccctgcagctggaggcaaaarcaggcaaaggcatcacggagcggacgctaccagactggaaggtggcactgaagagggagcgcgaggagcatcagcatctcctggctgaatcctacagcgccgtcatggacctgaccaagcagctgcagatcagtgaaaagaactggaaacaggagaaggtggagctgctggcccgcttcaaggaagagcagcagcaggcagagcagcaagcaaaggacctgcagaacaaactcaaccaggtatggtgtccccatgcatgtgtcattcagcatcggcccctgctcgctgtgcactcgttgg

SEQ ID NO: 24333 - DNA, 600 bp, Chicken  19866894238486_1
ttgctaatggccaggtcagcatgcacagtgcttgcagcctggcattgtctctgtttcatttcaggctaaaccaaggtgcagaataaggttgtggatttattgcagaacaagccaatactttttaaataggaagtgtacctgtgactgccttagaggctggtctaagctgtgctgtaaggcttcccttccttattacaaacctctgcttggagaggcagtgggctgaattggaaggcattcaccagagtcacacagtcatgtacttagataagagaccttcagacagataagagccacaawctcccagccccaagaccatcagcaggtgccgagcaccctgttgtccaaagatgctaattgctatctcagtagtatagaaggaacaaacacaaatctcacatctttggtaacatgacaattcaaacaaagtgttttcacactactgagatggatagataaggatgagccatttcctgagggctggaacccacactgtccacagtgatgcatggcagtaacatcttccatttgtgccgatagtggcttcttcaatgagaaagggttttgttaactccacttttggtgctgagaactctgcca

SEQ ID NO: 24334 - DNA, 600 bp, Chicken  19866894238487_1
agatggggtccacagcggcaagagagcaacagccccaccaccagcctgcagagggcagcagcagtgtcacatcaacgtcacaccgatgtcacaccgccaccacgttgtacccccgtcaccaacgctgggcacaacaccgcaccggcggccacatcggtgtgacagcagtgtcaccccagcatcacaccgttgccatcccgatgtcacaccggtgtcaccccatcacgcaaccaatgccacaccagcaccacaccgatgtcaagcgggagtcacgccagcaccctgccacattagcaccgygttggccatcacgccaccaccatggcacagcatggccagcagcgcagggacaaggccaggtcttctactcgctggtgagcaggagtggagcagctacactacagcaggatggccacgccgctgggctacgctacgggccggctccagccatcgcacttacgcggcccggctgtggccatctcccgagctcgaccgaggagacgtcgctgcaagagcagctccgagacagcttctccaagagtgtctcccgaaagatgtccaacaaggaccaaccgtgcttgtcggctgcccgcactgggc

SEQ ID NO: 24335 - DNA, 600 bp, Chicken  19866894238487_2
ccaggtcttctactcgctggtgagcaggagtggagcagctacactacagcaggatggccacgccgctgggctacgctacgggccggctccagccatcgcacttacgcggcccggctgtggccatctcccgagctcgaccgaggagacgtcgctgcaagagcagctccgagacagcttctccaagagtgtctcccgaaagatgtccaacaaggaccaaccgtgcttgtcggctgcccgcactgggctcttgggcggagagaagaggagctgtgagggcaggagggccagcgccgggagccrtggccggatggatggagctgtgccacccactgggacttcccctggcacgctcaactcaacaaagcaaagcccaccatgggcacttcaacccaaccgtggccgcccagctccatacttacatagaaggcctgctcccgcagggacggcgtatcgggtgggctctggttataggtggagaagcgtttgttcactgtggaggccttgttgacggtgctggctgccgagggctggtcatccttgtcgaaggggctgcaggggagagcggggaggtgagggaagcatcctaagccagaaggtccc

SEQ ID NO: 24336 - DNA, 600 bp, Chicken  19866894238488_1
ggttgcattttctgaatgtcctcatagacattaacagtaatattccaaaacatgcttgtactaacttaggggaaataaaccattgcatcccatcagatgatagctctgacatagtcaaagaaagagactggaaagtctaaatatgcatctgaaatgctgtacaatcaatagtgcatattgaaattatcaaagcctcttcatacgacgtgtttcatgtcactggaatgatggtaatggctcctaagtgctgcaataggatttacaatattgtatattattaaaataggggattgtgctaaraaatgggtacgtattttcaaaattattaggcacagttggaaacatagctgaaagcaagactgccttcaaataacatactgccagacctaactgctttgatttcttaagactagatgatgattgtttgatcattttattaaaaaaaaaatggtctaggtgtcaaagagtttccttatgtctaaacaagtgttattaacttcaattatggctgccaggtggagaactgtgcagttcttttaccatgtttcaaaatatttcatttagacattttggaaaaacatacatccctattcataaccc

SEQ ID NO: 24337 - DNA, 600 bp, Chicken  19866894238492_1
cttctggtattgtttcttgccaatttttaaaacagatctagtctatggtcttcacactcaagtctagaacaattgcatctatgctgattaagatcttgacagtgaaatacttcaacagttctcttcacaagcatgattttatactactattaaatccgagaatcatagaatgtcttaggttggaagggaccttaaagctcatccagttttgaccccctgctgtgggcagcatggccactaggtcaggttgcccaaggctccatccaacctggcttgagactcaagtgatgcatacagagrgtagacactgtgatggagagagatttgtagcatcaaaggctggaagcaccttctaaagttcatatagattctgctgatctctaaggcaagcagtttcggaagtagaaatgtgtaaaatacttagaagcccagtgccacacttcacctgacacagttctgtctgcctttataacaccaggaaacaaataatcttttccctaacatcactaaagtcacttattatcttggtcttctgtgttctcttcctcagaggtgtgcacacacagtcctgctgcatttcactgctctccagaatcccat

SEQ ID NO: 24338 - DNA, 599 bp, Chicken  19866894238498_1
  misc_feature (1)..(109): n is any nucleotide
nnnnnnnnnnnnnnnnnnnnnnnnnnnnnnnnnnnnnnnnnnnnnnnnnnnnnnnnnnnnnnnnnnnnnnnnnnnnnnnnnnnnnnnnnnnnnnnnnnnnnnnnnnnnncagaggatggtgacacactggaacaggttgcccaaggaggctgtggatgccccatccctggaggcactcaaggccaggctggatgtggctctgggcagcctggtctgctggttggcgaccctgcacatagcaggggggttgaaaatcgatgatcactgtggtccttttcaacccaggccattctatgattytatgatatgccttgcttagccgtgttcattttataaaactcactcacaagaagttcacacaggagctgacttgccttcagaacacgtcaggatcaggctttccaactggacagctctctggtgcagtgctttctccatcccactcttcagccatgtggaagtcactgctcttttctgttagccccagttcagctgctggcagccccacrtgctgcaggggtgtgggaaagcatctggagtacccctgggactggttgagctttcagtcatacrtctgcattcaaacataaaacattaat

SEQ ID NO: 24339 - DNA, 600 bp, Chicken  19866894238498_2
tggtctgctggttggcgaccctgcacatagcaggggggttgaaaatcgatgatcactgtggtccttttcaacccaggccattctatgattytatgatatgccttgcttagccgtgttcattttataaaactcactcacaagaagttcacacaggagctgacttgccttcagaacacgtcaggatcaggctttccaactggacagctctctggtgcagtgctttctccatcccactcttcagccatgtggaagtcactgctcttttctgttagccccagttcagctgctggcagccccacrtgctgcaggggtgtgggaaagcatctggagtacccctgggactggttgagctttcagtcatacrtctgcattcaaacataaaacattaatacagttaggccctgaagttctgcttttgaatgtcttgctctccatgacaggattcaaaacacagraaagacctgaaaccctcatcataaacacagctttgggctccccasataggacttctcccagatctgatgaagaataatctgcttttaatgcgttagcagctgcatgggcatctgcaaacacagatataggcaagaaatcatgtag

SEQ ID NO: 24340 - DNA, 600 bp, Chicken  19866894238498_3
ttttcaacccaggccattctatgattytatgatatgccttgcttagccgtgttcattttataaaactcactcacaagaagttcacacaggagctgacttgccttcagaacacgtcaggatcaggctttccaactggacagctctctggtgcagtgctttctccatcccactcttcagccatgtggaagtcactgctcttttctgttagccccagttcagctgctggcagccccacrtgctgcaggggtgtgggaaagcatctggagtacccctgggactggttgagctttcagtcatacrtctgcattcaaacataaaacattaatacagttaggccctgaagttctgcttttgaatgtcttgctctccatgacaggattcaaaacacagraaagacctgaaaccctcatcataaacacagctttgggctccccasataggacttctcccagatctgatgaagaataatctgcttttaatgcgttagcagctgcatgggcatctgcaaacacagatataggcaagaaatcatgtaggatattcatgttttagacaaaacccagcaactgagattatcttctgcctgcagaattatagaag

SEQ ID NO: 24341 - DNA, 600 bp, Chicken  19866894238498_4
gctgacttgccttcagaacacgtcaggatcaggctttccaactggacagctctctggtgcagtgctttctccatcccactcttcagccatgtggaagtcactgctcttttctgttagccccagttcagctgctggcagccccacrtgctgcaggggtgtgggaaagcatctggagtacccctgggactggttgagctttcagtcatacrtctgcattcaaacataaaacattaatacagttaggccctgaagttctgcttttgaatgtcttgctctccatgacaggattcaaaacacagraaagacctgaaaccctcatcataaacacagctttgggctccccasataggacttctcccagatctgatgaagaataatctgcttttaatgcgttagcagctgcatgggcatctgcaaacacagatataggcaagaaatcatgtaggatattcatgttttagacaaaacccagcaactgagattatcttctgcctgcagaattatagaaggagcttcagaaatcagcagattaacatcagacacttgattttttttttgttctgtgacttgaaaacaagagtttctggcttcttataacac

SEQ ID NO: 24342 - DNA, 600 bp, Chicken  19866894238498_5
acagctctctggtgcagtgctttctccatcccactcttcagccatgtggaagtcactgctcttttctgttagccccagttcagctgctggcagccccacrtgctgcaggggtgtgggaaagcatctggagtacccctgggactggttgagctttcagtcatacrtctgcattcaaacataaaacattaatacagttaggccctgaagttctgcttttgaatgtcttgctctccatgacaggattcaaaacacagraaagacctgaaaccctcatcataaacacagctttgggctccccasataggacttctcccagatctgatgaagaataatctgcttttaatgcgttagcagctgcatgggcatctgcaaacacagatataggcaagaaatcatgtaggatattcatgttttagacaaaacccagcaactgagattatcttctgcctgcagaattatagaaggagcttcagaaatcagcagattaacatcagacacttgattttttttttgttctgtgacttgaaaacaagagtttctggcttcttataacaccgagtaattaatgttaataacacctgcactacaccggggttggga

SEQ ID NO: 24343 - DNA, 600 bp, Chicken  19866894238503_1
tccagcatcctgtctgcatatagaatgagaaaggcatttataaaactgttatttgcacaccagatttttcatatggctgcatgcaccaggtatcaatcacgcccctctcagccgtggtgtcaccgtgcatcacacagccctgcagagactaatgatgctcctgcctgtgacatctgccacacagattgatgacatcacaccctctgcacgccatgtgattgttgccacggctcacacggccaaatttgacccgattctatgtttaacagcattcctccccatcccctggtaacaaatgckggtataatacaaacaatctcacacattttggggaagttcagagctaggttakgttgccatttcattactgtgttcacactgatcatcgttatatggtaatttccatcagtaaaatagcagtcctctcagttccatgttctataatctgcgtacggatcaggctttgatgggagcttaatcaaaacaacagtcaagttcattcttttacacactaagcctcaaatattcttcgtgcttcagtgaaggatgacaatctctctgtcctctttgctgtgtgtttattcattccactgaaattat

SEQ ID NO: 24344 - DNA, 600 bp, Chicken  19866894238503_2
ttgcacaccagatttttcatatggctgcatgcaccaggtatcaatcacgcccctctcagccgtggtgtcaccgtgcatcacacagccctgcagagactaatgatgctcctgcctgtgacatctgccacacagattgatgacatcacaccctctgcacgccatgtgattgttgccacggctcacacggccaaatttgacccgattctatgtttaacagcattcctccccatcccctggtaacaaatgckggtataatacaaacaatctcacacattttggggaagttcagagctaggttakgttgccatttcattactgtgttcacactgatcatcgttatatggtaatttccatcagtaaaatagcagtcctctcagttccatgttctataatctgcgtacggatcaggctttgatgggagcttaatcaaaacaacagtcaagttcattcttttacacactaagcctcaaatattcttcgtgcttcagtgaaggatgacaatctctctgtcctctttgctgtgtgtttattcattccactgaaattatgagactgcaggaagctaaaatgccaaaaaatgccttgttttcctctctgttc

SEQ ID NO: 24345 - DNA, 600 bp, Chicken  19866894238503_3
tgatgggagcttaatcaaaacaacagtcaagttcattcttttacacactaagcctcaaatattcttcgtgcttcagtgaaggatgacaatctctctgtcctctttgctgtgtgtttattcattccactgaaattatgagactgcaggaagctaaaatgccaaaaaatgccttgttttcctctctgttcagcagtccttgccttgttgtttttttttatctggagacaaacacacacatctctacccatggcaacacttagaccaggagctgcttacactctaaagctcacaatatggatygagctttaattttactatgggaaatgacttttccactttcttctatccttcatcagttcccacagccttgacccatgaccattaaagctcatgtaatcctcctgtagactccagtgggcaccagaacatggtcagaaaaatacccatgagcttttaaagcctaggtaattgttcccctaattatatgatggtcttatgaagagacctcttgtctacatgtgaaactcattctgcaatgatgtaaggagcagattcaaagcacagtgccttgctgggataactcatatatagacaagccct

SEQ ID NO: 24346 - DNA, 600 bp, Chicken  19866894238512_1
ggtgaagcaagagctgctgtggatgtggcttcatcctgctcagggacagaacatcctctgttgtccttgtggaggttgaacttccccagtgctctgactcctgcccatgccaagaggacccagcctgaggcacggtgatgttaactgtctctgtgagatcaattattttctccaaagttttataaaaagcacttaattcccagcttttgctagcgggggaaaactgtctcccacgagtgccccattcaggccaagatggatattccagcaactatttcttttagagaaaggtgatgaccrgcattcactgctgttgggctgagcaagaaggcatctaaggagaggatcattccttgaaaaactgttattgcaaagaccaacagaactggctgctcctcagaggcaatgatccccacggtgccgtgcaacaccattgaggatgtagtgcctgcagccctccctccccctggaggtgctcagaggaaggctgagcacaccaaggtgctgggcagagatagcacagggcctttcttctcctccaaaccctgcaaagtctatttaggaaagcagcctctaggtcagcctctgtgcatgaaggcc

SEQ ID NO: 24347 - DNA, 600 bp, Chicken  19866894238517_1
ttactcagcaggtgatgaggaacagactgcccagataagctgttaatgctccatctctgaaggcactcaaagacaggttggatggatctctgggctacctggtctagtggaaggtgtccctgcctatggcagggagattggaacttgatagtctcaaggttcctttaagcctatgccattctatgattttatgttttgttgctttcagagtagagttggactgggtccagatatctgggagtccaggctaagaagattactctgcctgtttttacagcactgggaaagatgcattcaccsaattacttttagactcaaagtaactgtaggagtccttttatacggtaacaaaaagcaagctggagttccgcctctgattcatcaagcaatcttaatgctagagaataaaaagcatgatgttcagtatcacagccaggcataacacacagatagaaataacaatttttgattgtacaaatagaaaacagctctcatcctttccaagtaacagcaaaacaaattcagcagaaccacagatgaaaaattactgaagtgtctcagattgttttagatccaacgaggcaaagttgcaagtgaaaa

SEQ ID NO: 24348 - DNA, 599 bp, Chicken  19866894238520_1
  misc_feature (1)..(176): n is any nucleotide
nnnnnnnnnnnnnnnnnnnnnnnnnnnnnnnnnnnnnnnnnnnnnnnnnnnnnnnnnnnnnnnnnnnnnnnnnnnnnnnnnnnnnnnnnnnnnnnnnnnnnnnnnnnnnnnnnnnnnnnnnnnnnnnnnnnnnnnnnnnnnnnnnnnnnnnnnnnnnnnnnnnnnnnnnnnnnnnnccaataaagcagaactggggatgaggaagctacgtaccacaaatgacattgtctgctattgtttaagataagaagagagggtgtaaaacagtgcaggtgtcaataggctattgaagagaagagyagctgcgatccagagcacatcccagcttgttggtgtgtggtcttctacaagatattgtgaaagtgcaggcaatagtccaggtttggctgatgtcctgcaggatggcagacgataccttgatggtatcagcagggtttgcactagatggtgaaaaaagaaatgtgagaatggtgttttttttggtgttgtcattgtttgtttgttctgtttagtttaaaactggttccaatttccctgaaataagaactgtactccttaagctaaaggcttaggctaaaatcataaaagtacaaacaaga

SEQ ID NO: 24349 - DNA, 506 bp, Chicken  19866894238520_2
tggtgttgtcattgtttgtttgttctgtttagtttaaaactggttccaatttccctgaaataagaactgtactccttaagctaaaggcttaggctaaaatcataaaagtacaaacaagacaaaaataacgtcctgacctccctccccgctttcaatttctcccagtggtgtctggaaggatgctgtatgttgcaaatgtgtctggatgaaaggacatgtgttctgcttccagcagcagggagatgctgctgtgtgaggaagatacttgcactgctgcaagtaaggtgggcctgccctctkcctgggcatggctctgtgacactttattcatagtaggcatgactacagtgacttgtgacctttcctgtggcatgctatgaagtttgctgtggaattggcagagtggcagaacagctgtcacctgcaagaatctgtcagccctaaatgctggagtatcattttaattgcttttgtaattgcccctgttgttgcatggaacagatgtg

SEQ ID NO: 24350 - DNA, 600 bp, Chicken  19866894238524_1
aatgtctacacctaacaagctctgcttctggtaaagaaattattcatagcattggtatcaaaaaggacacaatggaatgaagattcacactaataactgtaccaaagacacatggataataagatgcctaccaaagctatgtggaactggaaataagtcagaaaagaagacttggaataattttataagtgttatatatcatgaaaaagagattaatcttgagattggatacaaggacaattgtgcagttaagtaggcatagaaagcatataatttaattagaatataaccattttatgraatttcctggcttgcatctgaatctattgaaacaaaagcccatgaaaattacaaatgaacaagaagcccttccctgaagttaattaacatcaacattgggcctttttaagagcatttgttatacaggaagacatgttccttcacagcagtgcttcactgaggtagggaaaatagctaaaggttcatttgattgcaatttgtcaatataaactccagtttttcacctagatgttgaagaagttttctcagaggcgatggaaaatcaatgtacttcctggaaggcaggatttgatttcaaaa

SEQ ID NO: 24351 - DNA, 599 bp, Chicken  19866894238532_1
  misc_feature (1)..(10): n is any nucleotide
nnnnnnnnnntcttcttgaaatacatggacatgtgtggtactgaagagaggcacatagcacgtaaaagggccagactgcaagcagattgcatctgaattaaatatctattagtaacattaaaattacataataaatataagaagcaagttgtattcaaacttccttgaagtaaataagagggtccccataaatccagatccttcagaaatgtgaaggcaatgaggaagaaagctcaaagcttttcagacattcaaagacagatacccaaactcgttttttttaatcactccagattcagmtaacgatgaagttaatcagtcatctgcattcaaatgagtttcaagatattaatttaaatttactgggtatccttccarcagggcaagacctaccttgtaacttgctgctctgatgggaagacagcttgcagcatctctgaagaaacaggaacagactgaatcctgggtccagaggcagcagcaacccacctcgctgcaaggcagctgctgagcaacaagctgctcaagcagaaggctgaggattctaaacctatgttttcgggggaagtcttttcctctttccttctttcacaaaagca

SEQ ID NO: 24352 - DNA, 523 bp, Chicken  19866894238532_2
tcttcttgaaatacatggacatgtgtggtactgaagagaggcacatagcacgtaaaagggccagactgcaagcagattgcatctgaattaaatatctattagtaacattaaaattacataataaatataagaagcaagttgtattcaaacttccttgaagtaaataagagggtccccataaatccagatccttcagaaatgtgaaggcaatgaggaagaaagctcaaagcttttcagacattcaaagacagatacccaaactcgttttttttaatcactccagattcagmtaacgatgarcagggcaagacctaccttgtaacttgctgctctgatgggaagacagcttgcagcatctctgaagaaacaggaacagactgaatcctgggtccagaggcagcagcaacccacctcgctgcaaggcagctgctgagcaacaagctgctcaagcagaaggctgaggattctaaacctatgttttcgggggaagtcttttcctctttccttctttcacaaaagcatg

SEQ ID NO: 24353 - DNA, 600 bp, Chicken  19866894238533_1
ctcaagaaataatatgtagagggatgaaggagatagtttccagcttcaaactgcaaggacgtgagtgacgccacctgagaagagagtagcaaaggctcagtgatgccaagataacactcaggctgagacagaagaagagcctttaagcacatttcttctgcaagtctggccagggctcagggaatgcagataagagcctgaccggcacagagggggccagtttgcagctgcagagattccacaatagcagttcactgaggcaaaagagaaatagctaaaggccgtagagatctcacatcrttctctctactacaaggctgctgttgcttaactagagtggggatctctgccaggagaagagcttttgaaggcagtatggccctaacatgagttttgcattcgttccttggcactatgatccccgagggctgcaaatcgctggaaagatttgatggtcaggagaggggagccagggatgtcccaggcccacargattcatttctgggggctgtcccagattctgggccatggcactgataccagcagccgtgtgcttgcactggagttacagatagacaacacacaggggctttcactaag

SEQ ID NO: 24354 - DNA, 600 bp, Chicken  19866894238533_2
agagcctgaccggcacagagggggccagtttgcagctgcagagattccacaatagcagttcactgaggcaaaagagaaatagctaaaggccgtagagatctcacatcrttctctctactacaaggctgctgttgcttaactagagtggggatctctgccaggagaagagcttttgaaggcagtatggccctaacatgagttttgcattcgttccttggcactatgatccccgagggctgcaaatcgctggaaagatttgatggtcaggagaggggagccagggatgtcccaggcccacargattcatttctgggggctgtcccagattctgggccatggcactgataccagcagccgtgtgcttgcactggagttacagatagacaacacacaggggctttcactaaggattttgattccgtttccccaaatctcttggtttgatttaatccccaaacattcagtgatggtgcattggcacagctgtccagggagtggtggggtcaccatctctggaggtgttccagaaccgtggagatgtggcactgaaggacatagtgggcatggtgggggtgggcttggggtttgggcttgggggat

SEQ ID NO: 24355 - DNA, 600 bp, Chicken  19866894238536_1
gtttatacagctactgcaaaatggaaaacaagactcgaggctttttaactcttgtgggagtgcagtctgctcctcttgagaaggtttctgagttgttttttgtcttctctcattccagtaggattttaagattagaggctataagcattaaattggagagaaaagcagttatgtacagtactttcatctttattcttactactgaattgtactaggaggtagtttggagcagggcccataaagcacacacagatctgaaagctaaaaagcagtttaaaaaacaaaacaaagcaaaaacayctgcctgtaaatgcatgcatttccaaaacaacctagtagcgttcactctggatcttgttgcaatacaagttgctctgcaagtgatcttaagcagctcaattaattgagctgaataagaggaaaacatttttaaagtatttcaattttgaacgtttcccacccgcagtaacaagcgctccatagtttcccttgtgaatctgtttgtgtggcttattaaaatgtaattatttgctataggatgaagtcacaaacagaacaaagaaattattcagttcatcttgatgtcatgtgatggcgtga

SEQ ID NO: 24356 - DNA, 600 bp, Chicken  19866894238555_1
aattgacagttgcaaaagaggacagggataaggaacagaggtacagagtgtataggaaaggttgctaataagatgctgcagggtcaagttagggccatctctctctaaaataatgtaaggaaactcaaaatttctggggttgcatgacacatacatgatccctgaagagagtctcttatatgctcacagtttgcattgcctatcatggacagcctgctgcttcttcttgttgctccatctctcatgtggtagagatctcatgctctcattctttaatttactgaatttacaatctgctgmtgatgatacagatttcaaaatacggtgttctgtagtagcatttctttcttggtttagcttgttatcaaccttagcaattatagaaaaaaataataataatactatttaaattatacattaaatggtcagttagaaaaagagtaaattaagattagatgtataactctaaattggacaactgctgtgcaactgcacttaactatactaccatctagcagtggctatgtatagaaccctgtcaacaacttttgagaaaaacaagtcaccgttgtattttttagtcctatattgtatacacat

SEQ ID NO: 24357 - DNA, 600 bp, Chicken  19866894238566_1
ggcaggcccactgctccacagctgcaactctaagtactgtttctactgaggtgatcaaacctacgttggaataggggcagcactgatgcattcatctcaggtgtgcttcccagaactctgtggggattgctacagtgaaatgagactggtggagcagtgagccttgcacatggcttttcacataattgtacaatgtctcattaaatagcaccacacataatagtgttaagatgcacatcaactacaacagagtagcctaacaatactgcacgatactacaaaaaaaaaaagtaaaaaaawatatatatatagtaatagggagtgttaaatgaaccttttttccttctcacttcatctctggagagtgtgctaggttcctttttagctattttcctttcaggagtagaaatcctgcctctcccagttttaaaaggtttctcttttttatgcttatcgagagatgatcttcgcaattctctctctgccttctcctctttaggaacagtctctaactgttcagtcatgatgctcctatcatcatctgtaggatcagagcaaattgtaacaacaaacaaaagattagtaacaaatgttagcaat

SEQ ID NO: 24358 - DNA, 600 bp, Chicken  19866894238571_1
gcaagtttttgttactcttcctggtgtaataccagctcttactttgtaggtgaaaaaggctatgaccctaagtacttccactacagggtagaaaggatctttattgatgaccacaatgtcccagcattacagtgagtctcgttactaaatacttgcaccagcataacttctcatgcttttgctttggctgcactcattttcctcttatctagggacatgctgaaattcactgccagtgtccgtgaatggatgaatcaagatgagaagaatatcatagcaattcactgtaaaggaggcaarggtaaggcttcttgtgtacaacctgtgtatgccatgaattayacatttttgtcaaacttctyagactgaagtayagtctggtactctgaacacatctatgytatgatttaacttcaaagattctatgggcactgtgactagcaacagtgtaatgctgtttagtgttgcacacacctgttttgaagtagttytaagaaaacagctgccattttatggaaagagctaatctgaactcatttcaataacttcctgctctcctgaccctcctagtaggaggggctgaggacagggagctactaa

SEQ ID NO: 24359 - DNA, 600 bp, Chicken  19866894238571_2
tttgtaggtgaaaaaggctatgaccctaagtacttccactacagggtagaaaggatctttattgatgaccacaatgtcccagcattacagtgagtctcgttactaaatacttgcaccagcataacttctcatgcttttgctttggctgcactcattttcctcttatctagggacatgctgaaattcactgccagtgtccgtgaatggatgaatcaagatgagaagaatatcatagcaattcactgtaaaggaggcaarggtaaggcttcttgtgtacaacctgtgtatgccatgaattayacatttttgtcaaacttctyagactgaagtayagtctggtactctgaacacatctatgytatgatttaacttcaaagattctatgggcactgtgactagcaacagtgtaatgctgtttagtgttgcacacacctgttttgaagtagttytaagaaaacagctgccattttatggaaagagctaatctgaactcatttcaataacttcctgctctcctgaccctcctagtaggaggggctgaggacagggagctactaatgttgctactagcaattgttaagctgctgctttagctttgtg

SEQ ID NO: 24360 - DNA, 600 bp, Chicken  19866894238571_3
tgaccctaagtacttccactacagggtagaaaggatctttattgatgaccacaatgtcccagcattacagtgagtctcgttactaaatacttgcaccagcataacttctcatgcttttgctttggctgcactcattttcctcttatctagggacatgctgaaattcactgccagtgtccgtgaatggatgaatcaagatgagaagaatatcatagcaattcactgtaaaggaggcaarggtaaggcttcttgtgtacaacctgtgtatgccatgaattayacatttttgtcaaacttctyagactgaagtayagtctggtactctgaacacatctatgytatgatttaacttcaaagattctatgggcactgtgactagcaacagtgtaatgctgtttagtgttgcacacacctgttttgaagtagttytaagaaaacagctgccattttatggaaagagctaatctgaactcatttcaataacttcctgctctcctgaccctcctagtaggaggggctgaggacagggagctactaatgttgctactagcaattgttaagctgctgctttagctttgtggcagccagtggtattttgca

SEQ ID NO: 24361 - DNA, 600 bp, Chicken  19866894238571_4
cttccactacagggtagaaaggatctttattgatgaccacaatgtcccagcattacagtgagtctcgttactaaatacttgcaccagcataacttctcatgcttttgctttggctgcactcattttcctcttatctagggacatgctgaaattcactgccagtgtccgtgaatggatgaatcaagatgagaagaatatcatagcaattcactgtaaaggaggcaarggtaaggcttcttgtgtacaacctgtgtatgccatgaattayacatttttgtcaaacttctyagactgaagtayagtctggtactctgaacacatctatgytatgatttaacttcaaagattctatgggcactgtgactagcaacagtgtaatgctgtttagtgttgcacacacctgttttgaagtagttytaagaaaacagctgccattttatggaaagagctaatctgaactcatttcaataacttcctgctctcctgaccctcctagtaggaggggctgaggacagggagctactaatgttgctactagcaattgttaagctgctgctttagctttgtggcagccagtggtattttgcactgcaatatact

SEQ ID NO: 24362 - DNA, 600 bp, Chicken  19866894238571_5
tattgatgaccacaatgtcccagcattacagtgagtctcgttactaaatacttgcaccagcataacttctcatgcttttgctttggctgcactcattttcctcttatctagggacatgctgaaattcactgccagtgtccgtgaatggatgaatcaagatgagaagaatatcatagcaattcactgtaaaggaggcaarggtaaggcttcttgtgtacaacctgtgtatgccatgaattayacatttttgtcaaacttctyagactgaagtayagtctggtactctgaacacatctatgytatgatttaacttcaaagattctatgggcactgtgactagcaacagtgtaatgctgtttagtgttgcacacacctgttttgaagtagttytaagaaaacagctgccattttatggaaagagctaatctgaactcatttcaataacttcctgctctcctgaccctcctagtaggaggggctgaggacagggagctactaatgttgctactagcaattgttaagctgctgctttagctttgtggcagccagtggtattttgcactgcaatatactttgagctgctgaatttctttggggggt

SEQ ID NO: 24363 - DNA, 600 bp, Chicken  19866894238571_6
actcattttcctcttatctagggacatgctgaaattcactgccagtgtccgtgaatggatgaatcaagatgagaagaatatcatagcaattcactgtaaaggaggcaarggtaaggcttcttgtgtacaacctgtgtatgccatgaattayacatttttgtcaaacttctyagactgaagtayagtctggtactctgaacacatctatgytatgatttaacttcaaagattctatgggcactgtgactagcaacagtgtaatgctgtttagtgttgcacacacctgttttgaagtagttytaagaaaacagctgccattttatggaaagagctaatctgaactcatttcaataacttcctgctctcctgaccctcctagtaggaggggctgaggacagggagctactaatgttgctactagcaattgttaagctgctgctttagctttgtggcagccagtggtattttgcactgcaatatactttgagctgctgaatttctttggggggttgttcaaaatactgctggatccttaagacacataaggcattgagaaagagcacgtggtagctttgtggggacaggctttgtgtgagctcc

SEQ ID NO: 24364 - DNA, 600 bp, Chicken  19866894238572_1
tgtgaactgtgaaccactatacaagcaatttgtttttgtgtttgaaagtgactagtagtgcaccattctaaatagaaaagagctagagaggtaattctcagtccagctagaaaagtctatattctgcctcattccgtcttcaaaaaggtgattcactccttaacaacaaagaaaaagtccttctgaagtattagatcaggagttttcgaggtttcacatacaaactctcagcagtgctttctcaactgctatgactattttgttttacttgattagaataatgtctgaaggagtgttaayaataatattgcttaaaattgactcagtttctctcctcttttgctgtttatgactttcctgaactttaccagacctgtctgtattttctgtactaggtcgattcattctgatgcatgtggaatggagagagagtaagaagggaggagggagggaaaagggaacaagtcagccacagatacatgtcawtttccttgaataagggaaagagaaaaacaagttctttttctcaggtcagaattctcattctagtaattctttgacaagtttttgtgcttttgtgttttgaattagtatctgaaa

SEQ ID NO: 24365 - DNA, 600 bp, Chicken  19866894238572_2
agtattagatcaggagttttcgaggtttcacatacaaactctcagcagtgctttctcaactgctatgactattttgttttacttgattagaataatgtctgaaggagtgttaayaataatattgcttaaaattgactcagtttctctcctcttttgctgtttatgactttcctgaactttaccagacctgtctgtattttctgtactaggtcgattcattctgatgcatgtggaatggagagagagtaagaagggaggagggagggaaaagggaacaagtcagccacagatacatgtcawtttccttgaataagggaaagagaaaaacaagttctttttctcaggtcagaattctcattctagtaattctttgacaagtttttgtgcttttgtgttttgaattagtatctgaaagtctgcaagaggagaagggaccaaaatgtcaagcatacaaatctgccatccctataagaacacaagtctctaaaatttcaatagtcactcactcagtaatgttttttaaatcataaaagaaaaatactataagtacctaatctagttttggtggtgtctacagaagatagttctgtggcagacagt

SEQ ID NO: 24366 - DNA, 599 bp, Chicken  19866894238575_1
  misc_feature (1)..(18): n is any nucleotide
nnnnnnnnnnnnnnnnnntgttaagtgatagtcattactgcatgttgccctgaggaagatgtacccataatttcctggaggtgttcagccggatgctacttggtttgcagaaagggagtgtatttctggcaagaaggtgaagacggttgctcaggaggttctggaagggctgtggttctcacacatgctggacagtatgaatgaaacccccagctgttggcacacttgctattaggagtgatgcaacacaaaaatgcacacctgcagctgaggcaaaaatagttaaccccgtgtgcctcrtttctggctctcactgacgtgggactgcaatacactgccagggaggtgaattcccactgggagccatggcttgtggccatgagggcaatcggcagcagaagcatttcatctggatgggctcatacttagataccaggactaagatttccagctctgaaccaaggcccaagcaactcgaggagctacaagcaattattgcaaaaacctgctttccttctgtctcatcctaaagatgttgctcctgccagggcacgaactctggccagctgcttgagtctgaggagctgtgataagactaa

SEQ ID NO: 24367 - DNA, 599 bp, Chicken  19866894238583_1
  misc_feature (1)..(27): n is any nucleotide
nnnnnnnnnnnnnnnnnnnnnnnnnnngttggctgtgggtgcccggcctccgtggaacagctcggtctccacgtgccattgtgtctctgcatgctgttgccgtaacttttctatcagctggggctcaatccagttccccctgcaaccagttgtagttttcctgttgattaatggagataggattgaacctccagtagctgatacttacatccacaggagattgcttgtgataattaaatttagtgccaagttcacttttatttatgtgtagttcactgtgataatggtaattcctccacwtatgaacagcatctcgttacaagaaccaaaatttgtgtcacttctgcaggagtaatrctgctctgtggtaactgtaatgaacaacatgataaccgtttgtggttgtgtgctcaagccagatggacagccttgaytgatggagcagcactgtctgaaagtggtgcagtcattggcactgctgagcaaaaggctcctgtgccgactgccctgagaagcaggattcagcactgagaacatgcgggaggctgtgcccactgttcagattggtgagctgcccagcaaaaagcattgcactctta

SEQ ID NO: 24368 - DNA, 600 bp, Chicken  19866894238583_2
cagctcggtctccacgtgccattgtgtctctgcatgctgttgccgtaacttttctatcagctggggctcaatccagttccccctgcaaccagttgtagttttcctgttgattaatggagataggattgaacctccagtagctgatacttacatccacaggagattgcttgtgataattaaatttagtgccaagttcacttttatttatgtgtagttcactgtgataatggtaattcctccacwtatgaacagcatctcgttacaagaaccaaaatttgtgtcacttctgcaggagtaatrctgctctgtggtaactgtaatgaacaacatgataaccgtttgtggttgtgtgctcaagccagatggacagccttgaytgatggagcagcactgtctgaaagtggtgcagtcattggcactgctgagcaaaaggctcctgtgccgactgccctgagaagcaggattcagcactgagaacatgcgggaggctgtgcccactgttcagattggtgagctgcccagcaaaaagcattgcactcttactgttcacctgaacagtccctctctggaaaacagcagtgctgccgatcagttgctgac

SEQ ID NO: 24369 - DNA, 570 bp, Chicken  19866894238583_3
tccccctgcaaccagttgtagttttcctgttgattaatggagataggattgaacctccagtagctgatacttacatccacaggagattgcttgtgataattaaatttagtgccaagttcacttttatttatgtgtagttcactgtgataatggtaattcctccacwtatgaacagcatctcgttacaagaaccaaaatttgtgtcacttctgcaggagtaatrctgctctgtggtaactgtaatgaacaacatgataaccgtttgtggttgtgtgctcaagccagatggacagccttgaytgatggagcagcactgtctgaaagtggtgcagtcattggcactgctgagcaaaaggctcctgtgccgactgccctgagaagcaggattcagcactgagaacatgcgggaggctgtgcccactgttcagattggtgagctgcccagcaaaaagcattgcactcttactgttcacctgaacagtccctctctggaaaacagcagtgctgccgatcagttgctgaccggccatcggggggatctgctggggctggcttttgctttcctaacgc

SEQ ID NO: 24370 - DNA, 600 bp, Chicken  19866894238587_1
gggataacacaaggtaacaataaataacctgcagtggaaaactagagtagaaactatattttggtgtgttctgtagtacttcagctgtatgttgcagactctggagaaacagagctctacaacagaaattggtgtcacagtttaaaactcttttgagtagagctgctcccagctcaagaccccatgcatgatgtctttggatttttttttcagtactataaaagaaatagcaagcagaagatagaacatattagcacaaaatgagtaatgcacaatgtcagtccctgaaaaattgccccraaactatgaaggtgtatttgctatatgctttatttaatagaaaggaaaataaaggcacacaggaatcttaggtattggcgtagattgtatcgcagtgcagaaattctgtgcagagccgagcagcttgcttggagcctrgggtgaaaaaaaaagaacaagggcactttctggccaggctagatacagygttgastgtatatttcatttgtgttccttgcttaatttcttttctccttatcttcacaccttgagctcaggcagaccggtgtttttatgctcctttcaaaatgataggaaaaa

SEQ ID NO: 24371 - DNA, 600 bp, Chicken  19866894238587_2
agtttaaaactcttttgagtagagctgctcccagctcaagaccccatgcatgatgtctttggatttttttttcagtactataaaagaaatagcaagcagaagatagaacatattagcacaaaatgagtaatgcacaatgtcagtccctgaaaaattgccccraaactatgaaggtgtatttgctatatgctttatttaatagaaaggaaaataaaggcacacaggaatcttaggtattggcgtagattgtatcgcagtgcagaaattctgtgcagagccgagcagcttgcttggagcctrgggtgaaaaaaaaagaacaagggcactttctggccaggctagatacagygttgastgtatatttcatttgtgttccttgcttaatttcttttctccttatcttcacaccttgagctcaggcagaccggtgtttttatgctcctttcaaaatgataggaaaaaggagagattgagccatgtttttagttaatggcctattaacgttttgatgaagttatttctaatgtctctgcataacattttatattatcttatattagaataattataagctagaaacttcatagtgccacctactgc

SEQ ID NO: 24372 - DNA, 600 bp, Chicken  19866894238587_3
atgatgtctttggatttttttttcagtactataaaagaaatagcaagcagaagatagaacatattagcacaaaatgagtaatgcacaatgtcagtccctgaaaaattgccccraaactatgaaggtgtatttgctatatgctttatttaatagaaaggaaaataaaggcacacaggaatcttaggtattggcgtagattgtatcgcagtgcagaaattctgtgcagagccgagcagcttgcttggagcctrgggtgaaaaaaaaagaacaagggcactttctggccaggctagatacagygttgastgtatatttcatttgtgttccttgcttaatttcttttctccttatcttcacaccttgagctcaggcagaccggtgtttttatgctcctttcaaaatgataggaaaaaggagagattgagccatgtttttagttaatggcctattaacgttttgatgaagttatttctaatgtctctgcataacattttatattatcttatattagaataattataagctagaaacttcatagtgccacctactgctggaaatatgtattttaaaacctgactagtttgagcaacaaagaaaact

SEQ ID NO: 24373 - DNA, 600 bp, Chicken  19866894238587_4
tctttggatttttttttcagtactataaaagaaatagcaagcagaagatagaacatattagcacaaaatgagtaatgcacaatgtcagtccctgaaaaattgccccraaactatgaaggtgtatttgctatatgctttatttaatagaaaggaaaataaaggcacacaggaatcttaggtattggcgtagattgtatcgcagtgcagaaattctgtgcagagccgagcagcttgcttggagcctrgggtgaaaaaaaaagaacaagggcactttctggccaggctagatacagygttgastgtatatttcatttgtgttccttgcttaatttcttttctccttatcttcacaccttgagctcaggcagaccggtgtttttatgctcctttcaaaatgataggaaaaaggagagattgagccatgtttttagttaatggcctattaacgttttgatgaagttatttctaatgtctctgcataacattttatattatcttatattagaataattataagctagaaacttcatagtgccacctactgctggaaatatgtattttaaaacctgactagtttgagcaacaaagaaaactgctgtt

SEQ ID NO: 24374 - DNA, 563 bp, Chicken  19866894238592_1
tgggatttgaatggacttctgtaggccatctggtccaacccctattctagcaggaactcccagagtaggttgtccaagatcacacccagatcactttagaagatttccaaggaggagactccacaacctccctgggaaacctgaactagtgctgtcactcacagggaaagagtttcttggtgttcagatgtgtttcagtttgtgccctgagcctcttatcctgtcattgggtaccacataagaaagcctgactccaccttctttgcactctcccaccaggtatttctgtatagtggtaakgttcctcctgaaccttctcttggccaagtagtcccaactcgctcaacttctctttgaaagagrgatgctcttttccattaatcttcatggcccttcactggactctctgcagcatgtgcacgactttcacgtgctaaggagcccagaactggacacagtactccagctgtgacctcaccattgctgagaagatatgaagaattgtctctcagtctgctggcaaagttttgcctaaggcagttcaggacactgtcagccttcta

SEQ ID NO: 24375 - DNA, 500 bp, Chicken  19866894238592_2
agtaggttgtccaagatcacacccagatcactttagaagatttccaaggaggagactccacaacctccctgggaaacctgaactagtgctgtcactcacagggaaagagtttcttggtgttcagatgtgtttcagtttgtgccctgagcctcttatcctgtcattgggtaccacataagaaagcctgactccaccttctttgcactctcccaccaggtatttctgtatagtggtaakgttcctcctgaaccttctcttggccaagtagtcccaactcgctcaacttctctttgaaagagrgatgctcttttccattaatcttcatggcccttcactggactctctgcagcatgtgcacgactttcacgtgctaaggagcccagaactggacacagtactccagctgtgacctcaccattgctgagaagatatgaagaattgtctctcagtctgctggcaaagttttgcctaaggcagttcaggacactgtcagccttcta

SEQ ID NO: 24376 - DNA, 600 bp, Chicken  19866894238606_1
gagcctctcagaaggcagtggtgccaagcagctttactgctattgtttattgtggtggaggagctagaaccagctcttcaaaatagaccgatattgccaactcgtaatgggttaatggtccctgcaacagaagtgtaatggttcttggtgaaatgggggaaacatctgtagaaagtaagtttggaagcagtaaaaactgctatgaattaatttgattttattcagacatctcaggcagagagagctaaaggccctgtttgaatagctgttgcaattgcacgtaataaaagctgaaggatygtctccatggacagatttacctaagygccaagcaaaagaaacaggtraaagcattcakatgggtgtgagcgcagtatagctggaatgactgaaggtatcactgggcagggaggtctggtatgagtaaattgaatgatggtgagggtggagcatctgtgctatttacgtttgtgaggtaggggtggaggttccaaagctctgctttggagacccagtccttagaactgaatgttagtagcttgagtacattagaggtgctcaggcacttgcctcccactccaacttcatctacaagaaatc

SEQ ID NO: 24377 - DNA, 600 bp, Chicken  19866894238606_2
agcagctttactgctattgtttattgtggtggaggagctagaaccagctcttcaaaatagaccgatattgccaactcgtaatgggttaatggtccctgcaacagaagtgtaatggttcttggtgaaatgggggaaacatctgtagaaagtaagtttggaagcagtaaaaactgctatgaattaatttgattttattcagacatctcaggcagagagagctaaaggccctgtttgaatagctgttgcaattgcacgtaataaaagctgaaggatygtctccatggacagatttacctaagygccaagcaaaagaaacaggtraaagcattcakatgggtgtgagcgcagtatagctggaatgactgaaggtatcactgggcagggaggtctggtatgagtaaattgaatgatggtgagggtggagcatctgtgctatttacgtttgtgaggtaggggtggaggttccaaagctctgctttggagacccagtccttagaactgaatgttagtagcttgagtacattagaggtgctcaggcacttgcctcccactccaacttcatctacaagaaatccagcttgcatcctctgagattttgcc

SEQ ID NO: 24378 - DNA, 600 bp, Chicken  19866894238606_3
tattgtggtggaggagctagaaccagctcttcaaaatagaccgatattgccaactcgtaatgggttaatggtccctgcaacagaagtgtaatggttcttggtgaaatgggggaaacatctgtagaaagtaagtttggaagcagtaaaaactgctatgaattaatttgattttattcagacatctcaggcagagagagctaaaggccctgtttgaatagctgttgcaattgcacgtaataaaagctgaaggatygtctccatggacagatttacctaagygccaagcaaaagaaacaggtraaagcattcakatgggtgtgagcgcagtatagctggaatgactgaaggtatcactgggcagggaggtctggtatgagtaaattgaatgatggtgagggtggagcatctgtgctatttacgtttgtgaggtaggggtggaggttccaaagctctgctttggagacccagtccttagaactgaatgttagtagcttgagtacattagaggtgctcaggcacttgcctcccactccaacttcatctacaagaaatccagcttgcatcctctgagattttgcccagtgatgtcaactgaagtgc

SEQ ID NO: 24379 - DNA, 600 bp, Chicken  19866894238606_4
aggagctagaaccagctcttcaaaatagaccgatattgccaactcgtaatgggttaatggtccctgcaacagaagtgtaatggttcttggtgaaatgggggaaacatctgtagaaagtaagtttggaagcagtaaaaactgctatgaattaatttgattttattcagacatctcaggcagagagagctaaaggccctgtttgaatagctgttgcaattgcacgtaataaaagctgaaggatygtctccatggacagatttacctaagygccaagcaaaagaaacaggtraaagcattcakatgggtgtgagcgcagtatagctggaatgactgaaggtatcactgggcagggaggtctggtatgagtaaattgaatgatggtgagggtggagcatctgtgctatttacgtttgtgaggtaggggtggaggttccaaagctctgctttggagacccagtccttagaactgaatgttagtagcttgagtacattagaggtgctcaggcacttgcctcccactccaacttcatctacaagaaatccagcttgcatcctctgagattttgcccagtgatgtcaactgaagtgctttaagtgggg

SEQ ID NO: 24380 - DNA, 599 bp, Chicken  19866894238622_1
  misc_feature (1)..(8): n is any nucleotide
nnnnnnnntgtcttccagagtgcttttatttatggctgactttcaaactttgcaaatgaagtagcataatggaaatgttggcaccaccttatcttttcatacactaatgcagagccatacgaacacactagggattcacgggcgtaaaactttgaccctatggaagcccagctgggaatcaacaaatatccttttgtcttaacttattttcttagaacttcttcgggtttattagtaatcaacctcaccattatcttacctacctagaaagacggtcatcctaaaatatactcatgaccyggacacagtacccatctgttgttttgttttatgaggagcagaaaacactgctcctcataaaggaggactcccacatcccatttaacaaactccagcaggaaggtgcattaacaagaaggtgtacaaagtcatgacagagccaatgaaggaacctccagtgaaatattttggaaccagttagtcatgtatgtgcagacagggaaatgaccttctgaaagtgacttcgctctttgtaaacaagcttggaaaacttgctcagcctgcagtatctcccttgtagacatctaagattaaggtag

SEQ ID NO: 24381 - DNA, 600 bp, Chicken  19866894238627_1
tgcttgtttcatgcagttctttcatagtactgagcaaacatgaggtgtgtaaatataggcgtgtcaggaacaaaactcttctgtggaattatacactcaggcaaatagtgcaaattttatcacccctgtaacaatcataaagaagtaacaaacttaattgaagacctatttgagatgtgtgagaaaagcacatagttcctaccataagggtctgcaaaccctttatggcatgttctcttcaaaagactgcttcagtttattgtaattcctgtaggagtaggaaatgcttatacttagaaytttttttttttttgagtaaattactaactcaaaaccaagtggtagctagccaaccaaataaagtgtgtttgaatctaatgacaccattagatattggcttgcacccatcattccrcccttcaygctgataaaaacattgagtttaaagtgccattactgctgtcaacagtttccacctagaacctcttatagaggagctatatgttgtgctttcgcacgcagcraaaattggcttagactgctgagcacttcctatgcactactcattctcatacaggtaatataattccttacatctct

SEQ ID NO: 24382 - DNA, 600 bp, Chicken  19866894238627_2
gcttgtttcatgcagttctttcatagtactgagcaaacatgaggtgtgtaaatataggcgtgtcaggaacaaaactcttctgtggaattatacactcaggcaaatagtgcaaattttatcacccctgtaacaatcataaagaagtaacaaacttaattgaagacctatttgagatgtgtgagaaaagcacatagttcctaccataagggtctgcaaaccctttatggcatgttctcttcaaaagactgcttcagtttattgtaattcctgtaggagtaggaaatgcttatacttagaatyttttttttttttgagtaaattactaactcaaaaccaagtggtagctagccaaccaaataaagtgtgtttgaatctaatgacaccattagatattggcttgcacccatcattccrcccttcaygctgataaaaacattgagtttaaagtgccattactgctgtcaacagtttccacctagaacctcttatagaggagctatatgttgtgctttcgcacgcagcraaaattggcttagactgctgagcacttcctatgcactactcattctcatacaggtaatataattccttacatctctg

SEQ ID NO: 24383 - DNA, 542 bp, Chicken  19866894238627_3
tttatcacccctgtaacaatcataaagaagtaacaaacttaattgaagacctatttgagatgtgtgagaaaagcacatagttcctaccataagggtctgcaaaccctttatggcatgttctcttcaaaagactgcttcagtttattgtaattcctgtaggagtaggaaatgcttatacttagaattttttttttttttgagtaaattactaactcaaaaccaagtggtagctagccaaccaaataaagtgtgtttgaatctaatgacaccattagatattggcttgcacccatcattccrcccttcaygctgataaaaacattgagtttaaagtgccattactgctgtcaacagtttccacctagaacctcttatagaggagctatatgttgtgctttcgcacgcagcraaaattggcttagactgctgagcacttcctatgcactactcattctcatacaggtaatataattccttacatctctgatcatagatatttataaggcagttatacctcttcatcttttgtaagtcttacgtgt

SEQ ID NO: 24384 - DNA, 534 bp, Chicken  19866894238627_4
ccctgtaacaatcataaagaagtaacaaacttaattgaagacctatttgagatgtgtgagaaaagcacatagttcctaccataagggtctgcaaaccctttatggcatgttctcttcaaaagactgcttcagtttattgtaattcctgtaggagtaggaaatgcttatacttagaattttttttttttttgagtaaattactaactcaaaaccaagtggtagctagccaaccaaataaagtgtgtttgaatctaatgacaccattagatattggcttgcacccatcattccrcccttcaygctgataaaaacattgagtttaaagtgccattactgctgtcaacagtttccacctagaacctcttatagaggagctatatgttgtgctttcgcacgcagcraaaattggcttagactgctgagcacttcctatgcactactcattctcatacaggtaatataattccttacatctctgatcatagatatttataaggcagttatacctcttcatcttttgtaagtcttacgtgt

SEQ ID NO: 24385 - DNA, 433 bp, Chicken  19866894238627_5
atggcatgttctcttcaaaagactgcttcagtttattgtaattcctgtaggagtaggaaatgcttatacttagaattttttttttttttgagtaaattactaactcaaaaccaagtggtagctagccaaccaaataaagtgtgtttgaatctaatgacaccattagatattggcttgcacccatcattccrcccttcaygctgataaaaacattgagtttaaagtgccattactgctgtcaacagtttccacctagaacctcttatagaggagctatatgttgtgctttcgcacgcagcraaaattggcttagactgctgagcacttcctatgcactactcattctcatacaggtaatataattccttacatctctgatcatagatatttataaggcagttatacctcttcatcttttgtaagtcttacgtgt

SEQ ID NO: 24386 - DNA, 600 bp, Chicken  19866894238637_1
atttttaatgctgaactacggggtggtatctccacagccgctgccctcagcgaagccacggagagcagtcccagacatgggaaggaaccaacggggggaactctttgtcagcatcccagcagaatcccaataacaacgtgggatgtttctgcacaccgtgccttactctgtgctctgaaagagttctaaaatgatcataataactgcactggagttttcctctgccttttcattcatacacaaacaataccccagacttccctccatcaaagcccagcgggctgtaaccgagcaaacaasccgtttgcataaatagggaacgatgggaagggaggaagttaatgtctgtcctaacaactaagctaaatcgatgcagtacattaatataacaactttcctaccaaaaaaagtgagatctaaagcttattctgcgcacaaaggactcatttgtaagaaaagatggtttaattgcttaccaaaatttgctggtttctcatgcagacaaggaacgtgaaaataagacacaggtatttataatccttatgggcaccggcaagccagaccccaacccaggtgctcagcaacctgcttaccccagac

SEQ ID NO: 24387 - DNA, 599 bp, Chicken  19866894238668_1
  misc_feature (1)..(24): n is any nucleotide
nnnnnnnnnnnnnnnnnnnnnnnnttaatatttatttgtattctatgccgtgctgtgttacagggtttgtagcctggctctgtagttttgctttgtatgaaaaaagagaaatgaagggattagccagtgcccattcctgggctcagcctgttgccacacagctgcaggatgttctcaagcacaggggctttgagaaataccagcagagctttaaagttgccttaagagaaacctcttttggtttggtttggcttagtctggtttgatagagtgagaagaaaggggcaggctggttctcarttgcacaaygctacaagctcatcgatttctccctgtgccaaagggtgcaggtatcacccctcaatgttgcccatgccaatgggagctgatacccagcaaacccacagcactgtactgtgctccctctgtactcagctctggtgaggccacatcttgagtgctgcattcasttttgggctcctcactacaagaaagataacgaagccctggagcatgtccagagaagggcaatgaagctgtgggggtctggatgaagcctgaatgtctatccccaggggtgaccctctggaaagctgtat

SEQ ID NO: 24388 - DNA, 599 bp, Chicken  19866894238668_2
  misc_feature (1)..(15): n is any nucleotide
nnnnnnnnnnnnnnnttaatatttatttgtattctatgccgtgctgtgttacagggtttgtagcctggctctgtagttttgctttgtatgaaaaaagagaaatgaagggattagccagtgcccattcctgggctcagcctgttgccacacagctgcaggatgttctcaagcacaggggctttgagaaataccagcagagctttaaagttgccttaagagaaacctcttttggtttggtttggcttagtctggtttgatagagtgagaagaaaggggcaggctggttctcarttgcacaaygctacaagctcatcgatttctccctgtgccaaagggtgcaggtatcacccctcaatgttgcccatgccaatgggagctgatacccagcaaacccacagcactgtactgtgctccctctgtactcagctctggtgaggccacatcttgagtgctgcattcasttttgggctcctcactacaagaaagataacgaagccctggagcatgtccagagaagggcaatgaagctgtgggggtctggatgaagcctgaatgtctatccccaggggtgaccctctggaaagctgtattttccttaa

SEQ ID NO: 24389 - DNA, 600 bp, Chicken  19866894238668_3
gttctcaagcacaggggctttgagaaataccagcagagctttaaagttgccttaagagaaacctcttttggtttggtttggcttagtctggtttgatagagtgagaagaaaggggcaggctggttctcarttgcacaaygctacaagctcatcgatttctccctgtgccaaagggtgcaggtatcacccctcaatgttgcccatgccaatgggagctgatacccagcaaacccacagcactgtactgtgctccctctgtactcagctctggtgaggccacatcttgagtgctgcattcasttttgggctcctcactacaagaaagataacgaagccctggagcatgtccagagaagggcaatgaagctgtgggggtctggatgaagcctgaatgtctatccccaggggtgaccctctggaaagctgtattttccttaacttggtgcctggggaaacctgagaactagctctttatttaaatatatatttctgtacctttttttctttttttaaataagtgtttttgaagtctcattgaagatgttgtcactggaatcattatatttctatagagatcataatgactccttttgaagagtt

SEQ ID NO: 24390 - DNA, 600 bp, Chicken  19866894238678_1
ctgcggttggacttgatgatctttggaggtcctttccaacctgagtaattctatgattctataattctcttctccagttctctcagcctttgtacgtataggagatgtttcatttccttcatcatcttcacagcccttagagattatacagtaaatcccctcttgtaattggccaagttgatggataattgtatttattttttgctttccaagaaaaaaagcattggccattactggtgtcttctctaagaaactgtcataactttgtttttataagatatgacacactctctgtcttcygccttccagctttgcactccaggatctttgtaagagcctaaagtgagcttatttcagagctgagtgaacttcactgtgatcaactaagcttttctgaactttcaaagattttgggaaattaacttggcaaattgatcttgttttcatatgtggcacagcaaaccatgcagcaagaggggtgggtcgcagatttgtcctccttctgtgtcacaatccccagagcaattcctctgcatttgtacactgttggctctcagttattaagcacaaatttcagttagagataggaaagactgcaat

SEQ ID NO: 24391 - DNA, 599 bp, Chicken  19866894238693_1
  misc_feature (1)..(100): n is any nucleotide
nnnnnnnnnnnnnnnnnnnnnnnnnnnnnnnnnnnnnnnnnnnnnnnnnnnnnnnnnnnnnnnnnnnnnnnnnnnnnnnnnnnnnnnnnnnnnnnnnnnnactattttttcaagtgaaaatgtttctgcaggagagacagaaaaataatattttgtagatggtattacgaaagaataaaaatcttgattctaattcttctccaatgaaacacaaacctctcccttccaaattactggaactgataaataacaatttaaaatacaccagatcccagatatttccagataggtaccacaaaraatttttgtaaaccttggcaaggcaatgttttctctctttgttcaagatctgagtgtctagctgagagtatctgtgaacgcccttgaacaacttatgcagaagatctgtctgacagcaggctgtaccaagtacagtccttatccttttatgcctcttcccattgcccttgtcttctgatttgttcaaaatgcttccttctactttttttttttycccctgtttttttcccctcctgagggactctggctactctttgatgagacaagcccccgttgctatatcaactgaagtcaaaaac

SEQ ID NO: 24392 - DNA, 600 bp, Chicken  19866894238693_2
acctctcccttccaaattactggaactgataaataacaatttaaaatacaccagatcccagatatttccagataggtaccacaaaraatttttgtaaaccttggcaaggcaatgttttctctctttgttcaagatctgagtgtctagctgagagtatctgtgaacgcccttgaacaacttatgcagaagatctgtctgacagcaggctgtaccaagtacagtccttatccttttatgcctcttcccattgcccttgtcttctgatttgttcaaaatgcttccttctactttttttttttycccctgtttttttcccctcctgagggactctggctactctttgatgagacaagcccccgttgctatatcaactgaagtcaaaaacaatgccytattcaagcatcccattgttactagtagaagctatatttacatgaacttctctctcaaaatccctatgagctcaaagatacatcaacacggccctcagacaagtagaaaatactatcaagtagataaccttcaggatatttttaaactcagttattcttttgttatgtggcttatgaaaaagtgtgcaaaattatgtccaaaaagaat

SEQ ID NO: 24393 - DNA, 600 bp, Chicken  19866894238693_3
tgtaaaccttggcaaggcaatgttttctctctttgttcaagatctgagtgtctagctgagagtatctgtgaacgcccttgaacaacttatgcagaagatctgtctgacagcaggctgtaccaagtacagtccttatccttttatgcctcttcccattgcccttgtcttctgatttgttcaaaatgcttccttctactttttttttttycccctgtttttttcccctcctgagggactctggctactctttgatgagacaagcccccgttgctatatcaactgaagtcaaaaacaatgccytattcaagcatcccattgttactagtagaagctatatttacatgaacttctctctcaaaatccctatgagctcaaagatacatcaacacggccctcagacaagtagaaaatactatcaagtagataaccttcaggatatttttaaactcagttattcttttgttatgtggcttatgaaaaagtgtgcaaaattatgtccaaaaagaatgcaaacctgctagctcatgttgaagataaagaatttaacagaggttggtatacaagattatataaatttagagakgtttattaggcaaaatc

SEQ ID NO: 24394 - DNA, 600 bp, Chicken  19866894238693_4
agtcaaaaacaatgccytattcaagcatcccattgttactagtagaagctatatttacatgaacttctctctcaaaatccctatgagctcaaagatacatcaacacggccctcagacaagtagaaaatactatcaagtagataaccttcaggatatttttaaactcagttattcttttgttatgtggcttatgaaaaagtgtgcaaaattatgtccaaaaagaatgcaaacctgctagctcatgttgaagataaagaatttaacagaggttggtatacaagattatataaatttagagakgtttattaggcaaaatctagaagaaaaaaaaaaagaaaagaaaaaagatcaacaaaatctactttggtaattcttttattccagtgtatccagaaagaaatcacattctttgttcatcctagtatacttggttacttgcaataaacttttgggtatggttatcttcatagaagcttctctgtagcatagtagaaatgtaagttgggttagagatttagtgaatgtggacttttaagtaataagtttgaagcaaagtcttatatgtcacatcagtaagaaaaggtacaaatttgtggaaaa

SEQ ID NO: 24395 - DNA, 600 bp, Chicken  19866894238694_1
ctcttcaccgtccttgttcaggtacgacacaacaaaaggctttgaacaaatcctctgtggggtcagagagctcacgccgagctgttttgttggcatcccgcaggaaatgctggccgcctttgagcaggaagccaagcaggtgaacaagccccgtctcatgatcacagctgccgttgctgcaggactttccaacattcaggctggctaccagattgctgagctcggaaagtgagtagcaaactctctggtatgctttctagaacttccttcaagagatttcttccagcactcttcctgccrttattgggcacaacccrtccttactgcctgagcagcccccatgctgttgtacagggcaagaaggccatgcaggtggtgcctgtttggtggagaaatggatacctccatgagggaagggtaacagcaggcgggctccagccactccaagccatcagagaacatctctcagttctcacaacttcagcacaattcccaccctgcactgtcctctgcctccctcctctgcaggaggaacwmgtctcagcccttggaaggcttgctcaaaagaagtctcaaagaaacctgatttggagaaagygt

SEQ ID NO: 24396 - DNA, 600 bp, Chicken  19866894238694_2
tcaggtacgacacaacaaaaggctttgaacaaatcctctgtggggtcagagagctcacgccgagctgttttgttggcatcccgcaggaaatgctggccgcctttgagcaggaagccaagcaggtgaacaagccccgtctcatgatcacagctgccgttgctgcaggactttccaacattcaggctggctaccagattgctgagctcggaaagtgagtagcaaactctctggtatgctttctagaacttccttcaagagatttcttccagcactcttcctgccrttattgggcacaacccrtccttactgcctgagcagcccccatgctgttgtacagggcaagaaggccatgcaggtggtgcctgtttggtggagaaatggatacctccatgagggaagggtaacagcaggcgggctccagccactccaagccatcagagaacatctctcagttctcacaacttcagcacaattcccaccctgcactgtcctctgcctccctcctctgcaggaggaacwmgtctcagcccttggaaggcttgctcaaaagaagtctcaaagaaacctgatttggagaaagygtgtgggcacagccagggt

SEQ ID NO: 24397 - DNA, 600 bp, Chicken  19866894238694_3
caaactctctggtatgctttctagaacttccttcaagagatttcttccagcactcttcctgccrttattgggcacaacccrtccttactgcctgagcagcccccatgctgttgtacagggcaagaaggccatgcaggtggtgcctgtttggtggagaaatggatacctccatgagggaagggtaacagcaggcgggctccagccactccaagccatcagagaacatctctcagttctcacaacttcagcacaattcccaccctgcactgtcctctgcctccctcctctgcaggaggaacwmgtctcagcccttggaaggcttgctcaaaagaagtctcaaagaaacctgatttggagaaagygtgtgggcacagccagggttgttgtggggtaaatggccaggtctgaaggaacagttgggtctgggcgatggaactggccaggatgcagactcaggaacctttstccgcaggtacttggactactttcacgtgatgacttatgatttccatggctcctgggatacacaaacagggggagaacagccctctgtaccaaggcccgagtgacactggggacaatatctattttaatgttgta

SEQ ID NO: 24398 - DNA, 600 bp, Chicken  19866894238694_4
aaactctctggtatgctttctagaacttccttcaagagatttcttccagcactcttcctgccrttattgggcacaacccrtccttactgcctgagcagcccccatgctgttgtacagggcaagaaggccatgcaggtggtgcctgtttggtggagaaatggatacctccatgagggaagggtaacagcaggcgggctccagccactccaagccatcagagaacatctctcagttctcacaacttcagcacaattcccaccctgcactgtcctctgcctccctcctctgcaggaggaacwmgtctcagcccttggaaggcttgctcaaaagaagtctcaaagaaacctgatttggagaaagygtgtgggcacagccagggttgttgtggggtaaatggccaggtctgaaggaacagttgggtctgggcgatggaactggccaggatgcagactcaggaacctttstccgcaggtacttggactactttcacgtgatgacttatgatttccatggctcctgggatacacaaacagggggagaacagccctctgtaccaaggcccgagtgacactggggacaatatctattttaatgttgtaa

SEQ ID NO: 24399 - DNA, 600 bp, Chicken  19866894238694_5
crttattgggcacaacccrtccttactgcctgagcagcccccatgctgttgtacagggcaagaaggccatgcaggtggtgcctgtttggtggagaaatggatacctccatgagggaagggtaacagcaggcgggctccagccactccaagccatcagagaacatctctcagttctcacaacttcagcacaattcccaccctgcactgtcctctgcctccctcctctgcaggaggaacwmgtctcagcccttggaaggcttgctcaaaagaagtctcaaagaaacctgatttggagaaagygtgtgggcacagccagggttgttgtggggtaaatggccaggtctgaaggaacagttgggtctgggcgatggaactggccaggatgcagactcaggaacctttstccgcaggtacttggactactttcacgtgatgacttatgatttccatggctcctgggatacacaaacagggggagaacagccctctgtaccaaggcccgagtgacactggggacaatatctattttaatgttgtaagtatattttaggagcctgtgtaagaaatgtcagcactgtgatcagagcagtgatgataatg

SEQ ID NO: 24400 - DNA, 600 bp, Chicken  19866894238694_6
cctccatgagggaagggtaacagcaggcgggctccagccactccaagccatcagagaacatctctcagttctcacaacttcagcacaattcccaccctgcactgtcctctgcctccctcctctgcaggaggaacwmgtctcagcccttggaaggcttgctcaaaagaagtctcaaagaaacctgatttggagaaagygtgtgggcacagccagggttgttgtggggtaaatggccaggtctgaaggaacagttgggtctgggcgatggaactggccaggatgcagactcaggaacctttstccgcaggtacttggactactttcacgtgatgacttatgatttccatggctcctgggatacacaaacagggggagaacagccctctgtaccaaggcccgagtgacactggggacaatatctattttaatgttgtaagtatattttaggagcctgtgtaagaaatgtcagcactgtgatcagagcagtgatgataatgcaaaaattcaccatcctgcctaccaaaccttgcacagagtggaattctgtttgtttgtttgtttttaaataggattatgctatgaattactggaaaagcaatg

SEQ ID NO: 24401 - DNA, 600 bp, Chicken  19866894238699_1
gctgggtggtaaaaaataataataataataataatacctaaaaaattaagcctaaaaacaggatttgtccagattgaggtgttcatattgcctttacgtttgacgattactctgcattgtatcagcaaccaagtatatctttataaaagcaaataccaacatatctgccaacttagcttcccaaatccaaatactactgaagcattatcttattcttctccaggcagcataaaacacctactctgaaagatgactctacttgtaagttacaatttttctttttaatagtttcagcaatawttttccattgcagcaggtatgctgacctactacccttcagtgtgctcttcagacaaagagcaaaaaggcggtaaccaccctagaaagcatcaaataagtatctgaggaattacaaacgtgtttcctatttgaggtctggagctgaccaataattgtaaagcttaagttcaaatctagaagatagtattaatgagtgttgtgctccctactgcattgccaattgaggcaggcagggaggctggctgagaagtgaggtaggagaagggagaggcaagtgcatttaagtagactgcaagggag

SEQ ID NO: 24402 - DNA, 599 bp, Chicken  19866894238700_1
  misc_feature (1)..(131): n is any nucleotide
nnnnnnnnnnnnnnnnnnnnnnnnnnnnnnnnnnnnnnnnnnnnnnnnnnnnnnnnnnnnnnnnnnnnnnnnnnnnnnnnnnnnnnnnnnnnnnnnnnnnnnnnnnnnnnnnnnnnnnnnnnnnnnnnnnntcatatttcccaaacaagagcatataccaataggtagggaaactgaaaacaaaacaaaaaaatccagttcagaatagcaattccaggctgtttttctgctgtattttctatgtctgaaatcaggatatcaagggttaaactgggagtgcatttcaaccttgtagctctstgttcgtaggtcattttaagatgtcagccctgagatactgctaacttcttacaagtgatgttaaacagtctgttgcttctcygtcttaaaacaattcacctaaaaaatatgtatcttctcctgacagatggataacaagcacatggaaaaaaatggcttttgtaagtgactggttggacttgaaagtggatgttttgtatgcataaaaatgtatgcaggccagcaatgtcaaaggcttaaaagaaagaatcattatagcttctgctaaatgcagctatgctgctaaattgcctgtgatc

SEQ ID NO: 24403 - DNA, 599 bp, Chicken  19866894238700_2
  misc_feature (1)..(49): n is any nucleotide
nnnnnnnnnnnnnnnnnnnnnnnnnnnnnnnnnnnnnnnnnnnnnnnnntcatatttcccaaacaagagcatataccaataggtagggaaactgaaaacaaaacaaaaaaatccagttcagaatagcaattccaggctgtttttctgctgtattttctatgtctgaaatcaggatatcaagggttaaactgggagtgcatttcaaccttgtagctctstgttcgtaggtcattttaagatgtcagccctgagatactgctaacttcttacaagtgatgttaaacagtctgttgcttctcygtcttaaaacaattcacctaaaaaatatgtatcttctcctgacagatggataacaagcacatggaaaaaaatggcttttgtaagtgactggttggacttgaaagtggatgttttgtatgcataaaaatgtatgcaggccagcaatgtcaaaggcttaaaagaaagaatcattatagcttctgctaaatgcagctatgctgctaaattgcctgtgatcctagaaagcaaaatcttgcgagaataatcaatggtttcccagtcagttgtaaaaggcaggttcctttgaacacggtcttcct

SEQ ID NO: 24404 - DNA, 600 bp, Chicken  19866894238701_1
gtgatcctgcagacaggtctgcttgcatcccactgacacctggcctgcgtgtttcagctttgtcataaatgcaaccattttcttcatgttgatgttggtttttccaggttcacaaggcaaacccaatacgcagataccgcagcgtagaagtgaaacccagtgaccagccactgactatgccgaaatctccaaacttctcagacagattccgatgctaacatgcatccatgtgataggaggaggagagagcacatcctgctctgcacccttgacatgcagagaaggagcagttgtttgtaygtggttccctcagtctcaacacctatacttggctccgttatcgtttgttgagaagtttaactctgtttgaggcagatggcagaggcacagcgtactgagagccatacagtctccgtggcctcatttttacgtctagacaccttagtctccaaagactaaaccaggtttttatattgcatacaaacattgtgtacttaaactaaataaaaaatagtaatctgactgctgtctcttgctagcaggctcagtctcattcctgcaagagagcttttcttaaaggacactctgaacctgcgggga

SEQ ID NO: 24405 - DNA, 599 bp, Chicken  19866894238703_1
  misc_feature (1)..(76): n is any nucleotide
nnnnnnnnnnnnnnnnnnnnnnnnnnnnnnnnnnnnnnnnnnnnnnnnnnnnnnnnnnnnnnnnnnnnnnnnnnnntgagatttgcagaacatagtgatagttccactccatcttgatatattccttttctctaagaagggacagtgaatattgctttgcatgatgatttttaaatctaatttagtctaactaaggggaaaaggaatcaagaatattatttgcataaaatctgttctcatttcattatctactacatgccctacctgggttatcattgtttttctgaatctttaaaaaayrtaaacaattgttgctgtgacggaactacaaggactaataactctagcstataatcagctgcttagaattgtcagcgcctttaattttctggaccacctcatatctgatgaaattaagaaagctgtcctccagacatcaaaacacagagcatctgactgtcagagaggaactcttgtgctcccaaaatcacccatgctgcaactgttttgctatgggccagcagttgcacaactgtgcctaaatcaaacaaaaagcatgatggaatgatttaataaagagtatactgaaggaaggagca

SEQ ID NO: 24406 - DNA, 599 bp, Chicken  19866894238703_2
  misc_feature (1)..(75): n is any nucleotide
nnnnnnnnnnnnnnnnnnnnnnnnnnnnnnnnnnnnnnnnnnnnnnnnnnnnnnnnnnnnnnnnnnnnnnnnnnntgagatttgcagaacatagtgatagttccactccatcttgatatattccttttctctaagaagggacagtgaatattgctttgcatgatgatttttaaatctaatttagtctaactaaggggaaaaggaatcaagaatattatttgcataaaatctgttctcatttcattatctactacatgccctacctgggttatcattgtttttctgaatctttaaaaaayrtaaacaattgttgctgtgacggaactacaaggactaataactctagcstataatcagctgcttagaattgtcagcgcctttaattttctggaccacctcatatctgatgaaattaagaaagctgtcctccagacatcaaaacacagagcatctgactgtcagagaggaactcttgtgctcccaaaatcacccatgctgcaactgttttgctatgggccagcagttgcacaactgtgcctaaatcaaacaaaaagcatgatggaatgatttaataaagagtatactgaaggaaggagcac

SEQ ID NO: 24407 - DNA, 599 bp, Chicken  19866894238703_3
  misc_feature (1)..(27): n is any nucleotide
nnnnnnnnnnnnnnnnnnnnnnnnnnntgagatttgcagaacatagtgatagttccactccatcttgatatattccttttctctaagaagggacagtgaatattgctttgcatgatgatttttaaatctaatttagtctaactaaggggaaaaggaatcaagaatattatttgcataaaatctgttctcatttcattatctactacatgccctacctgggttatcattgtttttctgaatctttaaaaaayrtaaacaattgttgctgtgacggaactacaaggactaataactctagcstataatcagctgcttagaattgtcagcgcctttaattttctggaccacctcatatctgatgaaattaagaaagctgtcctccagacatcaaaacacagagcatctgactgtcagagaggaactcttgtgctcccaaaatcacccatgctgcaactgttttgctatgggccagcagttgcacaactgtgcctaaatcaaacaaaaagcatgatggaatgatttaataaagagtatactgaaggaaggagcacagacataaggggaaggaaataacagctctggagataaagctgcaatca

SEQ ID NO: 24408 - DNA, 600 bp, Chicken  19866894238725_1
catttctccagcttaggtcatttgcattctctaacagtaaggttatagttggggtgagtttgatatgtagtccttgggggggggaggcgggcaggggggcgaaagtgaagcagggatatctttcttatgtaaaagttgtcattgtcaacaacaaaaatattttcaccttttgctttttgtttctcttaaactctgtggtgatttgtgtgttttggtgttatggttgtttgtttgttcatttgtttggctttgtttgcttttttcctgtggaactctggggaaaaactaaaactcctatgstaattgttacagaatcctgagtatgttcgatctaaagaggacagtaaatcctcttttcatttgggaatgtccaagttgttaatagctgaaataccaaagcagaagtgaaagcgtacacaacaaacatttaaaagctagtagatgttgaagatattcttgacaataaaagaggatcagattcatgaggtggcttcagttgcaatttctagagcaccatgagcattaggcaggaggtgggagcttggtagtgtttgaactgttaaattctgtcactgtgcaaatgggcagctggttgtctct

SEQ ID NO: 24409 - DNA, 599 bp, Chicken  19866894238726_1
  misc_feature (1)..(163): n is any nucleotide
nnnnnnnnnnnnnnnnnnnnnnnnnnnnnnnnnnnnnnnnnnnnnnnnnnnnnnnnnnnnnnnnnnnnnnnnnnnnnnnnnnnnnnnnnnnnnnnnnnnnnnnnnnnnnnnnnnnnnnnnnnnnnnnnnnnnnnnnnnnnnnnnnnnnnnnnnnnnnnnnnnnacagcagtaaaaacaaagagcgaaagcccaaactgcagcacagcaaacatgaaaattatatacaatttggattcagttagtgattcaattgcttcagtgtcacttgtgacgctgatgctaagaatctaggtgtcatyttttccttcttcatgaaactgtggtcatccttactgcatccctatacaaacaatatcatcctcaatcagcaccaaaactctgtggggaaaaggcattagctgaggcaggcggaattgttcccygtgttctcctatggggcaggcaggaaagaaaaataatcattcctgaggctcttacctactgttttctaccaagagagtcctaacctcttgatggctatgtggatatatgctgtacgacaaggtttactgcacctccggtgctgtgcgcagaacatgtgccctgccacgctgttggc

SEQ ID NO: 24410 - DNA, 599 bp, Chicken  19866894238726_2
  misc_feature (1)..(40): n is any nucleotide
nnnnnnnnnnnnnnnnnnnnnnnnnnnnnnnnnnnnnnnnacagcagtaaaaacaaagagcgaaagcccaaactgcagcacagcaaacatgaaaattatatacaatttggattcagttagtgattcaattgcttcagtgtcacttgtgacgctgatgctaagaatctaggtgtcatyttttccttcttcatgaaactgtggtcatccttactgcatccctatacaaacaatatcatcctcaatcagcaccaaaactctgtggggaaaaggcattagctgaggcaggcggaattgttcccygtgttctcctatggggcaggcaggaaagaaaaataatcattcctgaggctcttacctactgttttctaccaagagagtcctaacctcttgatggctatgtggatatatgctgtacgacaaggtttactgcacctccggtgctgtgcgcagaacatgtgccctgccacgctgttggcctcttttcacaaatggagctctgctggggatgggaggctcctctcaccatgcctcaccccactcagtgctgccagacacagccttcattcccttcccatgtagccgagcaacacagcaattca

SEQ ID NO: 24411 - DNA, 599 bp, Chicken  19866894238738_1
  misc_feature (1)..(146): n is any nucleotide
nnnnnnnnnnnnnnnnnnnnnnnnnnnnnnnnnnnnnnnnnnnnnnnnnnnnnnnnnnnnnnnnnnnnnnnnnnnnnnnnnnnnnnnnnnnnnnnnnnnnnnnnnnnnnnnnnnnnnnnnnnnnnnnnnnnnnnnnnnnnnnnnnnatagggtgtgcctttaatctccctacatttcaaaagtctcagctattgggaaagattaatacccttggtttgctccactgaccctaacttgggctgcaaggctttttgtctgtgaagggtgaaatgctacgtgcgctcaggagattctgcattyctccattcctcctgatttagacaacatagcagtcagctgaattctggcagaagatttttttcttgctgaagtacttttaagacatccttgcaacttcagccgtgctagtcatttgaaactggctagctttcttagtgtgatagagagtccagtcagtgagtacgtaaccctttttcacactctaccagtggcagccttaaaaaggtgagaagctgacagcttctcggtaaatctrtaaacattcactgccaaagaagtaacaaaaactttctstcttggtccatgtattccagatgatc

SEQ ID NO: 24412 - DNA, 600 bp, Chicken  19866894238738_2
tgggctgcaaggctttttgtctgtgaagggtgaaatgctacgtgcgctcaggagattctgcattyctccattcctcctgatttagacaacatagcagtcagctgaattctggcagaagatttttttcttgctgaagtacttttaagacatccttgcaacttcagccgtgctagtcatttgaaactggctagctttcttagtgtgatagagagtccagtcagtgagtacgtaaccctttttcacactctaccagtggcagccttaaaaaggtgagaagctgacagcttctcggtaaatctrtaaacattcactgccaaagaagtaacaaaaactttctstcttggtccatgtattccagatgatctctataaggcaaaactctctttgagtagcatcatttgaaaggtcaggtcrtgaatctacagacattgctaatcagatcatataaactgtgcttggacttatctcataaactcagaaattttgtgaagtagatgtctggtcagaatttcaaaaaaggaaattaacatggggaattttagccctagactacctgtcacttgcataagtttgcagccttcatctgcatggagactgctg

SEQ ID NO: 24413 - DNA, 600 bp, Chicken  19866894238738_3
tacgtgcgctcaggagattctgcattyctccattcctcctgatttagacaacatagcagtcagctgaattctggcagaagatttttttcttgctgaagtacttttaagacatccttgcaacttcagccgtgctagtcatttgaaactggctagctttcttagtgtgatagagagtccagtcagtgagtacgtaaccctttttcacactctaccagtggcagccttaaaaaggtgagaagctgacagcttctcggtaaatctrtaaacattcactgccaaagaagtaacaaaaactttctstcttggtccatgtattccagatgatctctataaggcaaaactctctttgagtagcatcatttgaaaggtcaggtcrtgaatctacagacattgctaatcagatcatataaactgtgcttggacttatctcataaactcagaaattttgtgaagtagatgtctggtcagaatttcaaaaaaggaaattaacatggggaattttagccctagactacctgtcacttgcataagtttgcagccttcatctgcatggagactgctggtgacagaatgaaaaatgggcattttggttttagagag

SEQ ID NO: 24414 - DNA, 600 bp, Chicken  19866894238738_4
gaagatttttttcttgctgaagtacttttaagacatccttgcaacttcagccgtgctagtcatttgaaactggctagctttcttagtgtgatagagagtccagtcagtgagtacgtaaccctttttcacactctaccagtggcagccttaaaaaggtgagaagctgacagcttctcggtaaatctrtaaacattcactgccaaagaagtaacaaaaactttctstcttggtccatgtattccagatgatctctataaggcaaaactctctttgagtagcatcatttgaaaggtcaggtcrtgaatctacagacattgctaatcagatcatataaactgtgcttggacttatctcataaactcagaaattttgtgaagtagatgtctggtcagaatttcaaaaaaggaaattaacatggggaattttagccctagactacctgtcacttgcataagtttgcagccttcatctgcatggagactgctggtgacagaatgaaaaatgggcattttggttttagagagaaagacctcaagtatttatgcttgttttgaccttttctgtttgtttgtttctgagtgaaattttgaaggaaaaata

SEQ ID NO: 24415 - DNA, 600 bp, Chicken  19866894238739_1
caaagacccatcagcttacaccagatactgtcctctagattttaaccaactccagctgtgtcataacataggacagctagaaaatggatatattttcagatgatttggccttcgactagaggaaatgaaagaaatgcaccagagccatgttagtgggatatttctgggacggagtcccaagacatttggctgtttcaataagggtaatttgcattgcattagcacatctcatcccctgaagacaccaccaaaaaatggccttgtcatctccttcagatgttgggaaccagcattggtgcmatgttgtgctgactgccacctccccagggaacaggaagggcatcaggaaaggaaattggagttggtgaaaaaaaaaaaagaaaatcatgaaagaaaccacagctgtgactgtcttgagtcaccagggcacttgggagtatgagtgcactgagagcctactgtgcacatgagcaggctgagtcaaactccgaaataaattgtatcatgattgagaagatcaaatggaaggcacctacttcagagtttgtgatagaagagatggaaataagtacattcccacaacaaaggtcttgggaagaa

SEQ ID NO: 24416 - DNA, 599 bp, Chicken  19866894238742_1
  misc_feature (1)..(126): n is any nucleotide
nnnnnnnnnnnnnnnnnnnnnnnnnnnnnnnnnnnnnnnnnnnnnnnnnnnnnnnnnnnnnnnnnnnnnnnnnnnnnnnnnnnnnnnnnnnnnnnnnnnnnnnnnnnnnnnnnnnnnnnnnnnnnntgaaaacctagtacttggggattaattttctggaatttaatgaggccaaaagtcaggtagcaattaatctctgtagacagaaagagtagttacataatagacttcaagtggtaaggttggcttagaaactcctacccctgtgttgcagttcgttaccagtactaccgtgctggygactgtgctgtaagccagamtgatggaatgatttgcattgcaaactcttccaggagattatatttgagctgtggcatttcaagagtaggctcaggttcctgccaaactggagtgatgaagctgtgtatgtgtcgagcgtgcacgtgtgcattcattcacatctctgtagatgcattgcagaagtgatgcttgcacataggaagcacagtgctgaagtccaagattcagtgcttatgcctgagaagctaaataaaagagaggcagggagttatgccttgcctgaagctaaacaccactga

SEQ ID NO: 24417 - DNA, 599 bp, Chicken  19866894238742_2
  misc_feature (1)..(106): n is any nucleotide
nnnnnnnnnnnnnnnnnnnnnnnnnnnnnnnnnnnnnnnnnnnnnnnnnnnnnnnnnnnnnnnnnnnnnnnnnnnnnnnnnnnnnnnnnnnnnnnnnnnnnnnnnntgaaaacctagtacttggggattaattttctggaatttaatgaggccaaaagtcaggtagcaattaatctctgtagacagaaagagtagttacataatagacttcaagtggtaaggttggcttagaaactcctacccctgtgttgcagttcgttaccagtactaccgtgctggygactgtgctgtaagccagamtgatggaatgatttgcattgcaaactcttccaggagattatatttgagctgtggcatttcaagagtaggctcaggttcctgccaaactggagtgatgaagctgtgtatgtgtcgagcgtgcacgtgtgcattcattcacatctctgtagatgcattgcagaagtgatgcttgcacataggaagcacagtgctgaagtccaagattcagtgcttatgcctgagaagctaaataaaagagaggcagggagttatgccttgcctgaagctaaacaccactgatttattcacctggttagagc

SEQ ID NO: 24418 - DNA, 600 bp, Chicken  19866894238763_1
ctgggggagagagcgcggtgcgaggagtgcgtgaggctgctgcggggctgaaaatagaacaggaagcacagcagtgacactgctgctgccctgagtcctcgccgtcctgctgtagtgagcacagtagtatccacctacaatgccgtgactatagcaagaattagatagcgattagggaagctgtaccatttagtggtgcgctagtgcaaatgtaagaaagataaaagatagaaactggcgattgtgaagacttagaatcatagaatgggttggattgggagggacctttaagatcatctwgttccaaccccctgctataggcaggaacacctcccactagaccaggttgctcaaagccccatccagcctggccttggatacttccagggagggggaatccacagcctcactgggtaacctgttcagtgtctcaccaccctcacagtaaagaatttctttctgatatttagcctaaatctactctcttccagtttaaagccatttcctcttgtcctgttgctacatgccctcataaaaagtccctccccagctttcctgtaggccccaacttaaagcatagaagaacatgctgagagttag

SEQ ID NO: 24419 - DNA, 600 bp, Chicken  19866894238765_1
gtctccaaataaatcagttgtagaagtattatttctagaagtgaacagcttttatctctttatgtgatctagttacagcgtttctcatgagcttctcaaaactcagattttgcttccagctgtaaattacctgtaatagtattcatttgttcatttttgcttcttcatatactgaagacatgtttctggcactgtctctggactatcaggatgctagaatgttgcacacctgtttaagcatgctaatttcatgtggaaataaaagttatcagtgagaaacagaacagagaaatggtattmggaaaggtaaagtctgctagtatctatatatatgtatatatgtaatggagtattttcaaaaaatgagagaaaatatttcaagaagatcttttcagatatgtcaacaagatggtataattccgttatattaatatctgagaaattcaatttctttctggtgcagaggaaagttagtttcttcttccctctcagtatataagtaggtcactccagaagtaatgcctcctatttatttccatggaaactacaatagatacaaacagsacaataacactgtttgataggaaaaatctcagatat

SEQ ID NO: 24420 - DNA, 600 bp, Chicken  19866894238765_2
ggcactgtctctggactatcaggatgctagaatgttgcacacctgtttaagcatgctaatttcatgtggaaataaaagttatcagtgagaaacagaacagagaaatggtattmggaaaggtaaagtctgctagtatctatatatatgtatatatgtaatggagtattttcaaaaaatgagagaaaatatttcaagaagatcttttcagatatgtcaacaagatggtataattccgttatattaatatctgagaaattcaatttctttctggtgcagaggaaagttagtttcttcttcccmctcagtatataagtaggtcactccagaagtaatgcctcctatttatttccatggaaactacaatagatacaaacagsacaataacactgtttgataggaaaaatctcagatatcaccaccatcagctacatatttttgccagtratgaacaagagcctccactgtcactcatttggtattgagaaaaaaaaataaaatgaacacttaagtaaatacatttccttctccttccccaggctctgcttaagccaggcacctttccttctccattcccaaactcactttcacatactctcacca

SEQ ID NO: 24421 - DNA, 600 bp, Chicken  19866894238765_3
cactgtctctggactatcaggatgctagaatgttgcacacctgtttaagcatgctaatttcatgtggaaataaaagttatcagtgagaaacagaacagagaaatggtattmggaaaggtaaagtctgctagtatctatatatatgtatatatgtaatggagtattttcaaaaaatgagagaaaatatttcaagaagatcttttcagatatgtcaacaagatggtataattccgttatattaatatctgagaaattcaatttctttctggtgcagaggaaagttagtttcttcttccctcmcagtatataagtaggtcactccagaagtaatgcctcctatttatttccatggaaactacaatagatacaaacagsacaataacactgtttgataggaaaaatctcagatatcaccaccatcagctacatatttttgccagtratgaacaagagcctccactgtcactcatttggtattgagaaaaaaaaataaaatgaacacttaagtaaatacatttccttctccttccccaggctctgcttaagccaggcacctttccttctccattcccaaactcactttcacatactctcaccatg

SEQ ID NO: 24422 - DNA, 600 bp, Chicken  19866894238765_4
gttatcagtgagaaacagaacagagaaatggtattmggaaaggtaaagtctgctagtatctatatatatgtatatatgtaatggagtattttcaaaaaatgagagaaaatatttcaagaagatcttttcagatatgtcaacaagatggtataattccgttatattaatatctgagaaattcaatttctttctggtgcagaggaaagttagtttcttcttccctctcagtatataagtaggtcactccagaagtaatgcctcctatttatttccatggaaactacaatagatacaaacagsacaataacactgtttgataggaaaaatctcagatatcaccaccatcagctacatatttttgccagtratgaacaagagcctccactgtcactcatttggtattgagaaaaaaaaataaaatgaacacttaagtaaatacatttccttctccttccccaggctctgcttaagccaggcacctttccttctccattcccaaactcactttcacatactctcaccatgaatcactcctaagccaaaatgtggttccaaagtaccaaagttccaaaatgcatttgtgttgggtaaggaaccagc

SEQ ID NO: 24423 - DNA, 600 bp, Chicken  19866894238765_5
atgtatatatgtaatggagtattttcaaaaaatgagagaaaatatttcaagaagatcttttcagatatgtcaacaagatggtataattccgttatattaatatctgagaaattcaatttctttctggtgcagaggaaagttagtttcttcttccctctcagtatataagtaggtcactccagaagtaatgcctcctatttatttccatggaaactacaatagatacaaacagsacaataacactgtttgataggaaaaatctcagatatcaccaccatcagctacatatttttgccagtratgaacaagagcctccactgtcactcatttggtattgagaaaaaaaaataaaatgaacacttaagtaaatacatttccttctccttccccaggctctgcttaagccaggcacctttccttctccattcccaaactcactttcacatactctcaccatgaatcactcctaagccaaaatgtggttccaaagtaccaaagttccaaaatgcatttgtgttgggtaaggaaccagcacatcattgtgctcagccacactgccaagcactttatgtcactgccacagcagattccctcttaaca

SEQ ID NO: 24424 - DNA, 599 bp, Chicken  19866894238768_1
  misc_feature (1)..(212): n is any nucleotide
nnnnnnnnnnnnnnnnnnnnnnnnnnnnnnnnnnnnnnnnnnnnnnnnnnnnnnnnnnnnnnnnnnnnnnnnnnnnnnnnnnnnnnnnnnnnnnnnnnnnnnnnnnnnnnnnnnnnnnnnnnnnnnnnnnnnnnnnnnnnnnnnnnnnnnnnnnnnnnnnnnnnnnnnnnnnnnnnnnnnnnnnnnnnnnnnnnnnnnnnnnnnnnnnnnnnttcgaagactggactggaaataattttacacagaaagaaaaacaaaacaacaaaaaaatcaggaaccccaaactctttaaaaagtgcwtgatgccaactgcttctgtgaatgaaaattagactttccaatattgctaactaaacataaagtctgataggtrgtatacascatgtgaatatttaatttaagttattgtgtcaggaaagaccatttaaaagatttagaagtccccactactttaagttaagtctcacctgctgcacaacttcaggagggagttctgatttccactgcttaagctgccgagatgcaaaagaatgtagggcataagaaatggtgccgtattctatccacaaggagagattagagctgtcgatctcaagggc

SEQ ID NO: 24425 - DNA, 599 bp, Chicken  19866894238768_2
  misc_feature (1)..(139): n is any nucleotide
nnnnnnnnnnnnnnnnnnnnnnnnnnnnnnnnnnnnnnnnnnnnnnnnnnnnnnnnnnnnnnnnnnnnnnnnnnnnnnnnnnnnnnnnnnnnnnnnnnnnnnnnnnnnnnnnnnnnnnnnnnnnnnnnnnnnnnnnnnnttcgaagactggactggaaataattttacacagaaagaaaaacaaaacaacaaaaaaatcaggaaccccaaactctttaaaaagtgcwtgatgccaactgcttctgtgaatgaaaattagactttccaatattgctaactaaacataaagtctgataggtrgtatacascatgtgaatatttaatttaagttattgtgtcaggaaagaccatttaaaagatttagaagtccccactactttaagttaagtctcacctgctgcacaacttcaggagggagttctgatttccactgcttaagctgccgagatgcaaaagaatgtagggcataagaaatggtgccgtattctatccacaaggagagattagagctgtcgatctcaagggctcgcttgaagcaattcaagacaggagtagagtgcttccagattgggccatcactttttcagttcattagagtt

SEQ ID NO: 24426 - DNA, 599 bp, Chicken  19866894238768_3
  misc_feature (1)..(131): n is any nucleotide
nnnnnnnnnnnnnnnnnnnnnnnnnnnnnnnnnnnnnnnnnnnnnnnnnnnnnnnnnnnnnnnnnnnnnnnnnnnnnnnnnnnnnnnnnnnnnnnnnnnnnnnnnnnnnnnnnnnnnnnnnnnnnnnnnnnttcgaagactggactggaaataattttacacagaaagaaaaacaaaacaacaaaaaaatcaggaaccccaaactctttaaaaagtgcwtgatgccaactgcttctgtgaatgaaaattagactttccaatattgctaactaaacataaagtctgataggtrgtatacascatgtgaatatttaatttaagttattgtgtcaggaaagaccatttaaaagatttagaagtccccactactttaagttaagtctcacctgctgcacaacttcaggagggagttctgatttccactgcttaagctgccgagatgcaaaagaatgtagggcataagaaatggtgccgtattctatccacaaggagagattagagctgtcgatctcaagggctcgcttgaagcaattcaagacaggagtagagtgcttccagattgggccatcactttttcagttcattagagttcaacttgt

SEQ ID NO: 24427 - DNA, 599 bp, Chicken  19866894238769_1
  misc_feature (1)..(17): n is any nucleotide
nnnnnnnnnnnnnnnnnttactcagtgagaaaatttggttcagaagccaatgtttggtctcaaaagatcagtatatttctcttaataagtttcttttttaataggatgctctagaagactgctggagaaatcctgtttgaggggaaaggttaacagcttgcttataaaaattctcccatactagctatttttaactcttgtatgaacatttttttatgaatgtaaatgcagcactgcaaattattcagtccattttaattaaaaactctattttagcaattgtttttgaagacttcagtmatgaaagtgcagtttaccagtagcaatttttttaaacatatatatatwttttataattagggcaattatgatgatgctcacattacttagtttgatttttttctttttcttctttttatacagcattttcctttaaaatcttgttgtgttttgtaagaacatctagaataactgcatatgatcaaaagatttcagtgataggattagctrtattggtgtgcaataaaatcaataaagttaattcagtaaattcactgttgcattcccagacagtgtggatttttactcaatgacaactg

SEQ ID NO: 24428 - DNA, 600 bp, Chicken  19866894238769_2
aatgtttggtctcaaaagatcagtatatttctcttaataagtttcttttttaataggatgctctagaagactgctggagaaatcctgtttgaggggaaaggttaacagcttgcttataaaaattctcccatactagctatttttaactcttgtatgaacatttttttatgaatgtaaatgcagcactgcaaattattcagtccattttaattaaaaactctattttagcaattgtttttgaagacttcagtmatgaaagtgcagtttaccagtagcaatttttttaaacatatatatatwttttataattagggcaattatgatgatgctcacattacttagtttgatttttttctttttcttctttttatacagcattttcctttaaaatcttgttgtgttttgtaagaacatctagaataactgcatatgatcaaaagatttcagtgataggattagctrtattggtgtgcaataaaatcaataaagttaattcagtaaattcactgttgcattcccagacagtgtggatttttactcaatgacaactgtaattaatctcttctttacatctctttgtgtgcatgccaggtgccaatg

SEQ ID NO: 24429 - DNA, 594 bp, Chicken  19866894238769_3
ttaactcttgtatgaacatttttttatgaatgtaaatgcagcactgcaaattattcagtccattttaattaaaaactctattttagcaattgtttttgaagacttcagtmatgaaagtgcagtttaccagtagcaatttttttaaacatatatatatwttttataattagggcaattatgatgatgctcacattacttagtttgatttttttctttttcttctttttatacagcattttcctttaaaatcttgttgtgttttgtaagaacatctagaataactgcatatgatcaaaagawttcagtgataggattagctrtattggtgtgcaataaaatcaataaagttaattcagtaaattcactgttgcattcccagacagtgtggatttttactcaatgacaactgtaattaatctcttctttacatctctttgtgtgcatgccaggtgccaatgtgcagaaaggaaagcatctggaaactccactgcatgctgctgcccagcattcaagtacagagattgtaaacttactcctcgaatttggggcagacataaatgccaaaaacacagattttgagaggcctgttgattt

SEQ ID NO: 24430 - DNA, 574 bp, Chicken  19866894238769_4
tttttatgaatgtaaatgcagcactgcaaattattcagtccattttaattaaaaactctattttagcaattgtttttgaagacttcagtmatgaaagtgcagtttaccagtagcaatttttttaaacatatatatatwttttataattagggcaattatgatgatgctcacattacttagtttgatttttttctttttcttctttttatacagcattttcctttaaaatcttgttgtgttttgtaagaacatctagaataactgcatatgatcaaaagatttcagtgataggattagctrtattggtgtgcaataaaatcaataaagttaattcagtaaattcactgttgcattcccagacagtgtggatttttactcaatgacaactgtaattaatctcttctttacatctctttgtgtgcatgccaggtgccaatgtgcagaaaggaaagcatctggaaactccactgcatgctgctgcccagcattcaagtacagagattgtaaacttactcctcgaatttggggcagacataaatgccaaaaacacagattttgagaggcctgttgattt

SEQ ID NO: 24431 - DNA, 495 bp, Chicken  19866894238784_1
  misc_feature (1)..(93): n is any nucleotide
nnnnnnnnnnnnnnnnnnnnnnnnnnnnnnnnnnnnnnnnnnnnnnnnnnnnnnnnnnnnnnnnnnnnnnnnnnnnnnnnnnnnnnnnnnnnncagtaaaaaatactaatgaataacgatggagtgcagaccttaatgcattccattctcttggaataactggcttttctctgtgggctctggagaagaaacgtctgtagaggctgagtctgttcagaagccaaaggatggagtcacacccgacagcggctttctggctaaaatgttaccccggcatttctcgcgcggcgtgagctcttygctctgccccacgcggacgggccgagggcaccggagctgacggaatcccgggccgtgggagctgcggcggggaaggggcgcggtgctgtgcgggggatccccgccctcgcagtccagcacgaggaggcaggcgggtgccggcggcgcgcccgaggcgggctgtgtggcggcagtccgctcgcggcccccggcgcc

SEQ ID NO: 24432 - DNA, 600 bp, Chicken  19866894238791_1
caagtattatttccagaaaggaatccattttgcacaggagcattattctttgacctatgctgctggtgagcactgtaagctatagctacaccaagaccagtcatttacaacacctatctgggccgatcaactctgctgcagtcagaaagagaactgatatggttctccagcaaaaaggaataatgtgctcaggaaaatggcctgacaaaaaaagtgcttaagccagcaaagaatggtctctggccggattctcttatttggattattaagcctgtgaatctcaggtcataaatcacaccscactgggcaaaatgctctataaacctagaacaaaggagataatcaccatttaatgttgccacgttccctgcattacctcttgctgaagttaaaaacccttctgatagatgggtcagagctcatctgagcatttaaaatactctcataagttatcttgactcactacaagttgtattgtagtagaactgcaccgaacatacattaatcactcattattggttcaaaagggtcataaaatacatttcaaaaaattaaatatacrtttctgtggcagaacttactcgtagaagtgggacttgg

SEQ ID NO: 24433 - DNA, 600 bp, Chicken  19866894238791_2
ttattaagcctgtgaatctcaggtcataaatcacaccscactgggcaaaatgctctataaacctagaacaaaggagataatcaccatttaatgttgccacgttccctgcattacctcttgctgaagttaaaaacccttctgatagatgggtcagagctcatctgagcatttaaaatactctcataagttatcttgactcactacaagttgtattgtagtagaactgcaccgaacatacattaatcactcattattggttcaaaagggtcataaaatacatttcaaaaaattaaatatacrtttctgtggcagaacttactcgtagaagtgggacttggaaatagacaggaagctacagtctcgattggccttgatggtgaaaatcagtggttccccagtgagaacagcaagctggcccacgagttctcctgggtgagtaatgaacaggcaggtgtcctcctcggagtcgaccttctgttggtacacgtgaagcatcccggagaccacaaagcaaacattaacatcctggagaaaatggagacaacgctcaatgaaatccccaaagactttaaaagcaattatcacaacgacagcactatc

SEQ ID NO: 24434 - DNA, 600 bp, Chicken  19866894238792_1
tctacttcctttgtccttcccctctgctgacttctcggccctaactcctctttacaaccaaacgcaaaacaaaatcagagatggcttaatctcagcttttgcttggttattagcagtacaaaagaagctaccataaatagattgttacagtttagtaacttcctgatggaaggctgaagctcaggcatctgctcccagaccaaagcctccctgcaggtcaggattaaaacaaagagtgcaataggaatagaagaacaattgctagtcgttttggagctgagaatttgcagaaaagatccygataactccacagacatgcttcacagctttcatttttcttaaatgagagtctgagggcaaaagaatatgagaatttaagtagaaggccaaggcagaggaggtggcaggagttaacatagcaaaactttgagataacttctcagttctgtgactaaagaaactgcaaccgtgcaagtaaagaaatggttctcaaagacaagcagaaaacaccacagtaattcaactcagtgtatactgagaataagcgaggtttcaagcagctaaaytccaggataaggaagatctacagcgtattcagaa

SEQ ID NO: 24435 - DNA, 600 bp, Chicken  19866894238792_2
cgttttggagctgagaatttgcagaaaagatccygataactccacagacatgcttcacagctttcatttttcttaaatgagagtctgagggcaaaagaatatgagaatttaagtagaaggccaaggcagaggaggtggcaggagttaacatagcaaaactttgagataacttctcagttctgtgactaaagaaactgcaaccgtgcaagtaaagaaatggttctcaaagacaagcagaaaacaccacagtaattcaactcagtgtatactgagaataagcgaggtttcaagcagctaaaytccaggataaggaagatctacagcgtattcagaaccataagttcattaagaaactccacagaagcatccatcatcatgcagaatttaatgatacacaagtactcagaagaggggaaaggaatagcttttttcagtagttacagctctgtgaagtagaaattgttcttagagaactatgcttttcctatattcctctggaatagttctaaataaggaaaaagatgagagcagtccttgttttccctgagcatgtttgcagtaaccatacagttaaatctagattaaaatggaacaatcttg

SEQ ID NO: 24436 - DNA, 600 bp, Chicken  19866894238808_1
aaatatctacattattacagccccgttgccttcctaccacaccacactgtttcaaaagagctactaaccaaatgaaaatgtgatccgctctaaaataaggcactccacaaattcattctggcacaccctttctgtgcacagcatcggtcatctgaaatacaatgactgagcttgaaaaaccatgatttatcaaaattattattgctatgcttattacattatatttacacagaaaataatttgcttacagtttactctaaaagaaaccatatggttatgactagtttaaccattgttttrtatgctttctagctctttccaattttattttagawgggaatcagatttatgcatcgtgaaaaggcatttgtcatccttgcggaattaccaggtcatgtacaaaaatcaaagtgcagaggataaagaagttatccttttaccatgtaaactggatgagatacttacagatgtatcacacagtcagagatgtatcctagaacttgagaagactgagattgttcaaaacccacagaagtacaagaaggaatggaaacacacatcattaatygctttgtgcgactcatttcacatgcccatgtt

SEQ ID NO: 24437 - DNA, 600 bp, Chicken  19866894238808_2
accacaccacactgtttcaaaagagctactaaccaaatgaaaatgtgatccgctctaaaataaggcactccacaaattcattctggcacaccctttctgtgcacagcatcggtcatctgaaatacaatgactgagcttgaaaaaccatgatttatcaaaattattattgctatgcttattacattatatttacacagaaaataatttgcttacagtttactctaaaagaaaccatatggttatgactagtttaaccattgttttrtatgctttctagctctttccaattttattttagawgggaatcagatttatgcatcgtgaaaaggcatttgtcatccttgcggaattaccaggtcatgtacaaaaatcaaagtgcagaggataaagaagttatccttttaccatgtaaactggatgagatacttacagatgtatcacacagtcagagatgtatcctagaacttgagaagactgagattgttcaaaacccacagaagtacaagaaggaatggaaacacacatcattaatygctttgtgcgactcatttcacatgcccatgttggccttcagcactgaaactgtgactaagttacayt

SEQ ID NO: 24438 - DNA, 600 bp, Chicken  19866894238808_3
atatggttatgactagtttaaccattgttttrtatgctttctagctctttccaattttattttagawgggaatcagatttatgcatcgtgaaaaggcatttgtcatccttgcggaattaccaggtcatgtacaaaaatcaaagtgcagaggataaagaagttatccttttaccatgtaaactggatgagatacttacagatgtatcacacagtcagagatgtatcctagaacttgagaagactgagattgttcaaaacccacagaagtacaagaaggaatggaaacacacatcattaatygctttgtgcgactcatttcacatgcccatgttggccttcagcactgaaactgtgactaagttacaytacagcctctcatttcaagtccactttcaccagaatccactagtcatattatatataattacttttgcctcagtgattatccctagcttgtgatcatcttgcaggtggttacatgctctatgataaatcagctatagagtcagttatcattgataaaatttcatgtaaacaaaaatgtacacagtgtactgaaagctcttcaaaaaccaaacaagtcaactccttcaactgcag

SEQ ID NO: 24439 - DNA, 600 bp, Chicken  19866894238808_4
wgggaatcagatttatgcatcgtgaaaaggcatttgtcatccttgcggaattaccaggtcatgtacaaaaatcaaagtgcagaggataaagaagttatccttttaccatgtaaactggatgagatacttacagatgtatcacacagtcagagatgtatcctagaacttgagaagactgagattgttcaaaacccacagaagtacaagaaggaatggaaacacacatcattaatygctttgtgcgactcatttcacatgcccatgttggccttcagcactgaaactgtgactaagttacaytacagcctctcatttcaagtccactttcaccagaatccactagtcatattatatataattacttttgcctcagtgattatccctagcttgtgatcatcttgcaggtggttacatgctctatgataaatcagctatagagtcagttatcattgataaaatttcatgtaaacaaaaatgtacacagtgtactgaaagctcttcaaaaaccaaacaagtcaactccttcaactgcagaacagtacttaatttttcattcaggaatttctactctctccactataaaaaaattaaatcaaggat

SEQ ID NO: 24440 - DNA, 600 bp, Chicken  19866894238808_5
atattatatataattacttttgcctcagtgattatccctagcttgtgatcatcttgcaggtggttacatgctctatgataaatcagctatagagtcagttatcattgataaaatttcatgtaaacaaaaatgtacacagtgtactgaaagctcttcaaaaaccaaacaagtcaactccttcaactgcagaacagtacttaatttttcattcaggaatttctactctctccactataaaaaaattaaatcaaggatactctacaattcattacagaactaaggtgaagtatttattttacrttacattaatacatttattattctaatactattcaaagtgtttctcaattacttgaatgtttatttcattttaattaattttatttatctatttaacagctcacgacactacttctaggatacaggatcctctaccccactcttgatgaccagagcaatcaacttggctcagtgtatgtcatcaaagaattggaaagcacattaaagaacttgaataaatgcatttttcattgaagataacaactctctaaatcagagagagtttgatcagactaagaaaactgggggaaccaaatttca

SEQ ID NO: 24441 - DNA, 600 bp, Chicken  19866894238810_1
ggaaggtatgcaggaaattactaagagtttagaatctaaagctcttaaaaggattcatggttcaaggaagtgactgaatatatttgctataatgccaaaacagtcatacaggaagaaatgataatcactttatttcatctaacaaaaacttttgtataatatatatgaagactattaggaagacaacagaacctacttttgggtacactatttatggcatattccatctgtaaagtaatgcagtgataatttcatagctcagcacactaatttgctggtgaacactgtacattagattgstaaaatctaattgtattctatggatttcttttyttcatccaagtggtgatttttttaacactattgaaaaaccttgtgagatatattaaatcatcagttcatcattgtctctgtcttctaagaggtattggcactgttcactttgccatttcatcattttaacttcatttctggtgaagaacrttgttcatgctgtgttttgttttggatcgttaaatatttcctgcgcatgcacactattctgtctattgcactccagtttacactggtttgatgttgtgataataaatcacactgtac

SEQ ID NO: 24442 - DNA, 600 bp, Chicken  19866894238810_2
atctaaagctcttaaaaggattcatggttcaaggaagtgactgaatatatttgctataatgccaaaacagtcatacaggaagaaatgataatcactttatttcatctaacaaaaacttttgtataatatatatgaagactattaggaagacaacagaacctacttttgggtacactatttatggcatattccatctgtaaagtaatgcagtgataatttcatagctcagcacactaatttgctggtgaacactgtacattagattgstaaaatctaattgtattctatggatttcttttyttcatccaagtggtgatttttttaacactattgaaaaaccttgtgagatatattaaatcatcagttcatcattgtctctgtcttctaagaggtattggcactgttcactttgccatttcatcattttaacttcatttctggtgaagaacrttgttcatgctgtgttttgttttggatcgttaaatatttcctgcgcatgcacactattctgtctattgcactccagtttacactggtttgatgttgtgataataaatcacactgtactgtgggaaagctggagcagaatacacaaactgt

SEQ ID NO: 24443 - DNA, 600 bp, Chicken  19866894238810_3
caacagaacctacttttgggtacactatttatggcatattccatctgtaaagtaatgcagtgataatttcatagctcagcacactaatttgctggtgaacactgtacattagattgstaaaatctaattgtattctatggatttcttttyttcatccaagtggtgatttttttaacactattgaaaaaccttgtgagatatattaaatcatcagttcatcattgtctctgtcttctaagaggtattggcactgttcactttgccatttcatcattttaacttcatttctggtgaagaacrttgttcatgctgtgttttgttttggatcgttaaatatttcctgcgcatgcacactattctgtctattgcactccagtttacactggtttgatgttgtgataataaatcacactgtactgtgggaaagctggagcagaatacacaaactgttcttcaaaattcttgtctaattaattctacagaaactcttttcacataaatgctgagtcacagtggcaaaatgtgagggatggcatatcagaaatttctccttctctgctaacagcgtgggagggaagagctgtggctaagtaatgatgt

SEQ ID NO: 24444 - DNA, 599 bp, Chicken  19866894238812_1
  misc_feature (1)..(197): n is any nucleotide
nnnnnnnnnnnnnnnnnnnnnnnnnnnnnnnnnnnnnnnnnnnnnnnnnnnnnnnnnnnnnnnnnnnnnnnnnnnnnnnnnnnnnnnnnnnnnnnnnnnnnnnnnnnnnnnnnnnnnnnnnnnnnnnnnnnnnnnnnnnnnnnnnnnnnnnnnnnnnnnnnnnnnnnnnnnnnnnnnnnnnnnnnnnnnnnnnnnnnctgaattatttttctttgtgaaactgtgagtctaggagttgtcacaaacctatatccccctatgaatagttttccagctaccagcctatgaaaaattcttcartgttttcaagcatactgaaaatttggcrtatggctacccttctgtacttcaaaactcattatttagtggggtggagaaattttgatagtaaatactacttttttacatactggatattcactgtttttcttttcactgtttacagatgcaactttaattctgagtggaattttgatgttattgtaaatggcatgattatctgcttttcattttaagtaatacacctgcatatcatcgtgcataaaatatcttcaggccatagaccaaactgacctagaacaacaggacagttctgctcc

SEQ ID NO: 24445 - DNA, 599 bp, Chicken  19866894238812_2
  misc_feature (1)..(169): n is any nucleotide
nnnnnnnnnnnnnnnnnnnnnnnnnnnnnnnnnnnnnnnnnnnnnnnnnnnnnnnnnnnnnnnnnnnnnnnnnnnnnnnnnnnnnnnnnnnnnnnnnnnnnnnnnnnnnnnnnnnnnnnnnnnnnnnnnnnnnnnnnnnnnnnnnnnnnnnnnnnnnnnnnnnnnnnnnctgaattatttttctttgtgaaactgtgagtctaggagttgtcacaaacctatatccccctatgaatagttttccagctaccagcctatgaaaaattcttcartgttttcaagcatactgaaaatttggcrtatggctacccttctgtacttcaaaactcattatttagtggggtggagaaattttgatagtaaatactacttttttacatactggatattcactgtttttcttttcactgtttacagatgcaactttaattctgagtggaattttgatgttattgtaaatggcatgattatctgcttttcattttaagtaatacacctgcatatcatcgtgcataaaatatcttcaggccatagaccaaactgacctagaacaacaggacagttctgctcctgctggagaagaaaaggagaatacagtt

SEQ ID NO: 24446 - DNA, 599 bp, Chicken  19866894238815_1
  misc_feature (1)..(70): n is any nucleotide
nnnnnnnnnnnnnnnnnnnnnnnnnnnnnnnnnnnnnnnnnnnnnnnnnnnnnnnnnnnnnnnnnnnnnnaaataattaacatgctgtcccactcttttgggcatgcgttctaagagcttggtggggggtctctggtggtcactggatgaaggctagtagtcacccttgctgtgaacttccaaccttctaaggggttgctagcccaaaccagttcccacttgtattgcattgagctgaggcatctgctttgctgtcttattttcaacaacaggacatgcattctactttcttatctttayttaaccatgtggcctctgcattctgttgttgagcttacatttacacaaacattctgtccttccttcagcttgtatccgcacaagttatgtgaaaggctgttctcacaatatggaaagtctgttctcacagtatggaaagattgttctcatgattcagtgggatcaagtgcaccttcagcaagtttgagaatgactccaagctgtggtgtgcagttgacatgcccaagagacaggatgccatccagagggacctagacagtcttgarcagtggtccaagctgaaactcataaggttcaac

SEQ ID NO: 24447 - DNA, 600 bp, Chicken  19866894238815_2
caacaggacatgcattctactttcttatctttayttaaccatgtggcctctgcattctgttgttgagcttacatttacacaaacattctgtccttccttcagcttgtatccgcacaagttatgtgaaaggctgttctcacaatatggaaagtctgttctcacagtatggaaagattgttctcatgattcagtgggatcaagtgcaccttcagcaagtttgagaatgactccaagctgtggtgtgcagttgacatgcccaagagacaggatgccatccagagggacctagacagtcttgarcagtggtccaagctgaaactcataaggttcaacaaatccaaacgcaaggtcttgcatgtggatcgaggcaacgccctctaccaatataagctggaggatgaaacgattgagcacagccctgccaaaaagaacctggggtttctggtggatgagaagctggacatgagccagcaatgtgcgctcacagaccagaaagccaaccatatcctaggctgcatcagaagaagaatgcccagcagggtgagggaggtgatcctgcccctctactctgcactgataagacctcacctggagtactgc

SEQ ID NO: 24448 - DNA, 600 bp, Chicken  19866894238818_1
cagggaatctgctttatttctgctgtacatccactagaaccggcagaattatggcaaggacagatatggcccattttctttaagtcagtgtcattcatttctaccaaaaaataggcaagaggaattaatggttcttgctcatccttcatgctttgattctttaagttattgagcactttctattcctgtatgattgaaagtgaactgatagatgcagacacttatcagaagcaaatcccaggacagatgagggaacatattctcatctcagtgctggatcactttgctgaaattagcagygacttctccctaacaaaaaccaaagygcttccacaccatgtgacaaacgggccgggtgagaatgcarcagcagcagcagatataygcagccctgccgtgctggggctgtcacagccggatggtgtgggtccatgggcacacctggaaacctgcactcgtggtcctggctcggtgtcagtggccttcatgtacaatttacaggcctccattatgaatctgtgagtccatcattgttaaagatctaatctttcacyattrcatcagtgagatcaacaaggtctaggactgaatatgggcttt

SEQ ID NO: 24449 - DNA, 600 bp, Chicken  19866894238818_2
acatccactagaaccggcagaattatggcaaggacagatatggcccattttctttaagtcagtgtcattcatttctaccaaaaaataggcaagaggaattaatggttcttgctcatccttcatgctttgattctttaagttattgagcactttctattcctgtatgattgaaagtgaactgatagatgcagacacttatcagaagcaaatcccaggacagatgagggaacatattctcatctcagtgctggatcactttgctgaaattagcagygacttctccctaacaaaaaccaaagygcttccacaccatgtgacaaacgggccgggtgagaatgcarcagcagcagcagatataygcagccctgccgtgctggggctgtcacagccggatggtgtgggtccatgggcacacctggaaacctgcactcgtggtcctggctcggtgtcagtggccttcatgtacaatttacaggcctccattatgaatctgtgagtccatcattgttaaagatctaatctttcacyattrcatcagtgagatcaacaaggtctaggactgaatatgggctttagagaaaatcttatgtgctgggggac

SEQ ID NO: 24450 - DNA, 600 bp, Chicken  19866894238818_3
ggcccattttctttaagtcagtgtcattcatttctaccaaaaaataggcaagaggaattaatggttcttgctcatccttcatgctttgattctttaagttattgagcactttctattcctgtatgattgaaagtgaactgatagatgcagacacttatcagaagcaaatcccaggacagatgagggaacatattctcatctcagtgctggatcactttgctgaaattagcagygacttctccctaacaaaaaccaaagygcttccacaccatgtgacaaacgggccgggtgagaatgcarcagcagcagcagatataygcagccctgccgtgctggggctgtcacagccggatggtgtgggtccatgggcacacctggaaacctgcactcgtggtcctggctcggtgtcagtggccttcatgtacaatttacaggcctccattatgaatctgtgagtccatcattgttaaagatctaatctttcacyattrcatcagtgagatcaacaaggtctaggactgaatatgggctttagagaaaatcttatgtgctgggggaccattggagaaaggacttaacaaagactcggaatataaaaat

SEQ ID NO: 24451 - DNA, 600 bp, Chicken  19866894238818_4
cagtgtcattcatttctaccaaaaaataggcaagaggaattaatggttcttgctcatccttcatgctttgattctttaagttattgagcactttctattcctgtatgattgaaagtgaactgatagatgcagacacttatcagaagcaaatcccaggacagatgagggaacatattctcatctcagtgctggatcactttgctgaaattagcagygacttctccctaacaaaaaccaaagygcttccacaccatgtgacaaacgggccgggtgagaatgcarcagcagcagcagatataygcagccctgccgtgctggggctgtcacagccggatggtgtgggtccatgggcacacctggaaacctgcactcgtggtcctggctcggtgtcagtggccttcatgtacaatttacaggcctccattatgaatctgtgagtccatcattgttaaagatctaatctttcacyattrcatcagtgagatcaacaaggtctaggactgaatatgggctttagagaaaatcttatgtgctgggggaccattggagaaaggacttaacaaagactcggaatataaaaatttactgtgtaaggtaata

SEQ ID NO: 24452 - DNA, 600 bp, Chicken  19866894238818_5
acatattctcatctcagtgctggatcactttgctgaaattagcagygacttctccctaacaaaaaccaaagygcttccacaccatgtgacaaacgggccgggtgagaatgcarcagcagcagcagatataygcagccctgccgtgctggggctgtcacagccggatggtgtgggtccatgggcacacctggaaacctgcactcgtggtcctggctcggtgtcagtggccttcatgtacaatttacaggcctccattatgaatctgtgagtccatcattgttaaagatctaatctttcacyattrcatcagtgagatcaacaaggtctaggactgaatatgggctttagagaaaatcttatgtgctgggggaccattggagaaaggacttaacaaagactcggaatataaaaatttactgtgtaaggtaataaagtttttcttttccttcttaataaaaaacataagtgctttttcttattttcttatacgtaggctagtgaaaacaagtaaaacccaagtctatcataagcactacaattcattgattaggtaaataaattaatgagaagtcagtccttacataaagcagtacatttagc

SEQ ID NO: 24453 - DNA, 600 bp, Chicken  19866894238818_6
attctcatctcagtgctggatcactttgctgaaattagcagygacttctccctaacaaaaaccaaagygcttccacaccatgtgacaaacgggccgggtgagaatgcarcagcagcagcagatataygcagccctgccgtgctggggctgtcacagccggatggtgtgggtccatgggcacacctggaaacctgcactcgtggtcctggctcggtgtcagtggccttcatgtacaatttacaggcctccattatgaatctgtgagtccatcattgttaaagatctaatctttcacyattrcatcagtgagatcaacaaggtctaggactgaatatgggctttagagaaaatcttatgtgctgggggaccattggagaaaggacttaacaaagactcggaatataaaaatttactgtgtaaggtaataaagtttttcttttccttcttaataaaaaacataagtgctttttcttattttcttatacgtaggctagtgaaaacaagtaaaacccaagtctatcataagcactacaattcattgattaggtaaataaattaatgagaagtcagtccttacataaagcagtacatttagcatgg

SEQ ID NO: 24454 - DNA, 600 bp, Chicken  19866894238818_7
gcttttccatctgcaaataaaagtaagctacttaaaatttttggcagtgaactggcattttgtcatttaatcatttcacatcattacactgcaatatgcaatgtaatgatatgacactcctaaatgacaaacactgggtacctcctgcactggaagaaataatgtaataggaaggaaattatatacttaaggtttcactcccacaaattgggattaagatacagaatagttgcaaggagaagagagagagtcttgcctacagttaattgagctaacccttaagcacacatcaactatacrtctagaaatacccacccacagctcagttctgataagggtcaaggatcctaaagtcatgccaaagcactcgtgaattgaggtgctacaagggacaatacccaacacttccctgggtcagaccatgcatgaaggaaagccaaaatatccttatctctctggcccacttgattttgaggatatattaacctttaagtattttggagaaatgcctccagagatcatctgccaaagcctgatttgattgtctgatgtggtgacaaatagggtaaaggcaggtaagagtccaaagccacaaggcaa

SEQ ID NO: 24455 - DNA, 600 bp, Chicken  19866894238819_1
gatgactgaaagcttccccgctcctctgggcacgaagggaattaaagaacagagaatgggagacaggtggagatatgtctcctgtcctggtttttggtgcatgtaaaatacattatataatatttatgtaatgaaagcagcgaaaggtgcagatcttccctgtgattggtgaactcattgctgccatcatccacgcgcacaccttcagcgtgtctcttgctgtggtccatcagtcccttctaattgattctggcaatcaggagccataaattgtgtctgcatctcctcgccattactgcygtgatagccaaggcagaaatgggggaaatgacatggttgaattaaaggctttattacacatttctgagcttttctggggtccttyaaatctcctattatagaaaagaattggaaaaaaaagaaattgctcattagaggtgaaaagtctttgtctgcrctgtgttgtcagagcagcgatgccctgcactggtatttacagcactttgaataacaggagtgctctaatgctgagaaatcattttggtaattggtcgtgtgttgttcaaatggatgagcagcagaaagcacacaatcctgccc

SEQ ID NO: 24456 - DNA, 600 bp, Chicken  19866894238819_2
cctggtttttggtgcatgtaaaatacattatataatatttatgtaatgaaagcagcgaaaggtgcagatcttccctgtgattggtgaactcattgctgccatcatccacgcgcacaccttcagcgtgtctcttgctgtggtccatcagtcccttctaattgattctggcaatcaggagccataaattgtgtctgcatctcctcgccattactgcygtgatagccaaggcagaaatgggggaaatgacatggttgaattaaaggctttattacacatttctgagcttttctggggtccttyaaatctcctattatagaaaagaattggaaaaaaaagaaattgctcattagaggtgaaaagtctttgtctgcrctgtgttgtcagagcagcgatgccctgcactggtatttacagcactttgaataacaggagtgctctaatgctgagaaatcattttggtaattggtcgtgtgttgttcaaatggatgagcagcagaaagcacacaatcctgcccattgtcttggaaactgaaataagaggcattgattgcgttcaataaattttatggagagagaagctggacttattttcttgtataa

SEQ ID NO: 24457 - DNA, 600 bp, Chicken  19866894238819_3
ccctgtgattggtgaactcattgctgccatcatccacgcgcacaccttcagcgtgtctcttgctgtggtccatcagtcccttctaattgattctggcaatcaggagccataaattgtgtctgcatctcctcgccattactgcygtgatagccaaggcagaaatgggggaaatgacatggttgaattaaaggctttattacacatttctgagcttttctggggtccttyaaatctcctattatagaaaagaattggaaaaaaaagaaattgctcattagaggtgaaaagtctttgtctgcrctgtgttgtcagagcagcgatgccctgcactggtatttacagcactttgaataacaggagtgctctaatgctgagaaatcattttggtaattggtcgtgtgttgttcaaatggatgagcagcagaaagcacacaatcctgcccattgtcttggaaactgaaataagaggcattgattgcgttcaataaattttatggagagagaagctggacttattttcttgtataatttttcttttacaagcagctgacgatgaaatgtctgtagttttgacagagggtgtcctttcctatcacaacc

SEQ ID NO: 24458 - DNA, 600 bp, Chicken  19866894238821_1
agagaagagctatgagctaccttccttgtcagagatgtttgttgtcttaatgagggaaaaatagccattaactggccttaagcatgtacttgaatttcagtaagtgttttctttgtgtaactgagaacaggttacagatcagacatagtacctactggatatgaccaatttataaaccatggacgcttcatttgtaagattttcagatgccaccatagataaattaaacacctgatgatgggaactcatcaagtgcttgatttttaggtctcactgctttacccaaggtaaagccatgargacatgtcttagagatgtagaaataccctcagtcacccagctgttccaaactggcaatacctctccacacacagcctgaagtggagtgtgtcttcagaaaactcttgcatattgcatagataaaattcactgatttcttgcacgggcctcgtagtagaagaaaacacaaggacagtagtgtgactaaagctctttaaattatctggaacacattagttttagatacattgctgctctttcagtcactgtaatacacactgagaaacamacgctcycttcccactcattggaaagcagctc

SEQ ID NO: 24459 - DNA, 600 bp, Chicken  19866894238821_2
tctcactgctttacccaaggtaaagccatgargacatgtcttagagatgtagaaataccctcagtcacccagctgttccaaactggcaatacctctccacacacagcctgaagtggagtgtgtcttcagaaaactcttgcatattgcatagataaaattcactgatttcttgcacgggcctcgtagtagaagaaaacacaaggacagtagtgtgactaaagctctttaaattatctggaacacattagttttagatacattgctgctctttcagtcactgtaatacacactgagaaacamacgctcycttcccactcattggaaagcagctccaagagctttaggtggggaaagagctggggaagggcaggcagcgccttcctcgatctgaaccatgtgcattaggagcttcactcactgctgtaaattgattctgagtgcccctctacatcaaatctcgcctcccatcttggctgctgttgggctgtgctggcacgtgggcacccgctctcactgtccatagtgagcaacgcaccaaaggaactactgcaggtccagctccgtgagtcctgctcgcaccycacagcactggggctctgc

SEQ ID NO: 24460 - DNA, 600 bp, Chicken  19866894238821_3
gctttacccaaggtaaagccatgargacatgtcttagagatgtagaaataccctcagtcacccagctgttccaaactggcaatacctctccacacacagcctgaagtggagtgtgtcttcagaaaactcttgcatattgcatagataaaattcactgatttcttgcacgggcctcgtagtagaagaaaacacaaggacagtagtgtgactaaagctctttaaattatctggaacacattagttttagatacattgctgctctttcagtcactgtaatacacactgagaaacamacgctcycttcccactcattggaaagcagctccaagagctttaggtggggaaagagctggggaagggcaggcagcgccttcctcgatctgaaccatgtgcattaggagcttcactcactgctgtaaattgattctgagtgcccctctacatcaaatctcgcctcccatcttggctgctgttgggctgtgctggcacgtgggcacccgctctcactgtccatagtgagcaacgcaccaaaggaactactgcaggtccagctccgtgagtcctgctcgcaccycacagcactggggctctgccttcctt

SEQ ID NO: 24461 - DNA, 600 bp, Chicken  19866894238821_4
aatacacactgagaaacamacgctcycttcccactcattggaaagcagctccaagagctttaggtggggaaagagctggggaagggcaggcagcgccttcctcgatctgaaccatgtgcattaggagcttcactcactgctgtaaattgattctgagtgcccctctacatcaaatctcgcctcccatcttggctgctgttgggctgtgctggcacgtgggcacccgctctcactgtccatagtgagcaacgcaccaaaggaactactgcaggtccagctccgtgagtcctgctcgcaccycacagcactggggctctgccttccttccctcttttcctgtttggtggctgcaatgtgaacgttctgtgcatttcacagcttacacctttctgctgcgctttagggccgccttgagagcaccaataaaatcagcttatggcctgagtttctaaygagctgttgagtcgcaatcagaacctgctcagcggaggctgggagatgtggctgtgttaaaatgtcctgcttgttttttcccttccgtaagtgtaatatgttatccatacttaaataggaaggaggaaataaatgraggctcttacc

SEQ ID NO: 24462 - DNA, 571 bp, Chicken  19866894238821_5
tgagtgcccctctacatcaaatctcgcctcccatcttggctgctgttgggctgtgctggcacgtgggcacccgctctcactgtccatagtgagcaacgcaccaaaggaactactgcaggtccagctccgtgagtcctgctcgcaccycacagcactggggctctgccttccttccctcttttcctgtttggtggctgcaatgtgaacgttctgtgcatttcacagcttacacctttctgctgcgctttagggccgccttgagagcaccaataaaatcagcttatggcctgagtttctaaygagctgttgagtcgcaatcagaacctgctcagcggaggctgggagatgtggctgtgttaaaatgtcctgcttgttttttcccttccgtaagtgtaatatgttatccatacttaaataggaaggaggaaataaatgraggctcttaccgaactctaatctgcctctgtggcacgtgaatgcggcgctgcttttcaggagataataattaatgatgttctgtggacttcccttatcttaaattaggataagcttaaggtccggggattctttg

SEQ ID NO: 24463 - DNA, 435 bp, Chicken  19866894238821_6
tgctcgcaccycacagcactggggctctgccttccttccctcttttcctgtttggtggctgcaatgtgaacgttctgtgcatttcacagcttacacctttctgctgcgctttagggccgccttgagagcaccaataaaatcagcttatggcctgagtttctaaygagctgttgagtcgcaatcagaacctgctcagcggaggctgggagatgtggctgtgttaaaatgtcctgcttgttttttcccttccgtaagtgtaatatgttatccatacttaaataggaaggaggaaataaatgraggctcttaccgaactctaatctgcctctgtggcacgtgaatgcggcgctgcttttcaggagataataattaatgatgttctgtggacttcccttatcttaaattaggataagcttaaggtccggggattctttg

SEQ ID NO: 24464 - DNA, 600 bp, Chicken  19866894238822_1
ttgaccaatttcatcctttaatccacagaaagtttcaaattgtatgtacatgatctgaacaatttataattcagtctttaaagactctgatagcagaaaaaagtcctcagatatacaggtttttgtttgtttgtttgttttgttttttaaggtacgaaggaagataatcaggagcaagagagataatggtatagtcgaggaggggtcatgacaaaaggaattattctgagagagatcctgatggtaaactccttgcactcactacactggcactgtaattctagttgctgctgatgatgygcagggcttgtattatttcagaagatctgtggagtatgtgcatgaaaatatggtaaatcagaactgccctggctccacacatgaggatcacagctgcagaagtctctgccaactatgcaaacactcattaggctgacatcacaggccaatatttatgttactctcttggggaaaaagtggggaaagagataaaatagaacacttaacctattggctttatgaactatttcaactgaaatgctwtgagtaaattacacaagtttcagtatgatattaacattctcraattaggggtagggg

SEQ ID NO: 24465 - DNA, 600 bp, Chicken  19866894238822_2
gtaaactccttgcactcactacactggcactgtaattctagttgctgctgatgatgygcagggcttgtattatttcagaagatctgtggagtatgtgcatgaaaatatggtaaatcagaactgccctggctccacacatgaggatcacagctgcagaagtctctgccaactatgcaaacactcattaggctgacatcacaggccaatatttatgttactctcttggggaaaaagtggggaaagagataaaatagaacacttaacctattggctttatgaactatttcaactgaaatgctwtgagtaaattacacaagtttcagtatgatattaacattctcraattaggggtaggggtttttataaaacctgcagatgtgagtattccaacttcagtcagtactacttgaaatgtctgcctcacccacatgtctcctttaaagcagtggcagaggtattacttccctcaataactagaggctgatcatggaaagtacgtggggagatgccaccatttaaacacgaaaaacaaacatcaatcaaccaaccaaacattatgccaaaatttcaaggactccctacattatttattgcagagaa

SEQ ID NO: 24466 - DNA, 600 bp, Chicken  19866894238822_3
tgctgctgatgatgygcagggcttgtattatttcagaagatctgtggagtatgtgcatgaaaatatggtaaatcagaactgccctggctccacacatgaggatcacagctgcagaagtctctgccaactatgcaaacactcattaggctgacatcacaggccaatatttatgttactctcttggggaaaaagtggggaaagagataaaatagaacacttaacctattggctttatgaactatttcaactgaaatgctwtgagtaaattacacaagtttcagtatgatattaacattctcraattaggggtaggggtttttataaaacctgcagatgtgagtattccaacttcagtcagtactacttgaaatgtctgcctcacccacatgtctcctttaaagcagtggcagaggtattacttccctcaataactagaggctgatcatggaaagtacgtggggagatgccaccatttaaacacgaaaaacaaacatcaatcaaccaaccaaacattatgccaaaatttcaaggactccctacattatttattgcagagaaacaatgatcaacttacaaagaaggctgagttctacttttgca

SEQ ID NO: 24467 - DNA, 599 bp, Chicken  19866894238825_1
  misc_feature (1)..(77): n is any nucleotide
nnnnnnnnnnnnnnnnnnnnnnnnnnnnnnnnnnnnnnnnnnnnnnnnnnnnnnnnnnnnnnnnnnnnnnnnnnnnncttaagacccctgagctgctgtggcatttcttgatgttggttggagcacagcagagggaccaggagctcttctggccccagctgcttccaaaccaaggctgacacacatatggctccctctggatattaaagagtacccccatggtgtcccccagtaaaaaaaaaatagctgctctcatagtcctggattcccatgagaaaatgcacttcagaatattctgarttattccatgtactcaggtttctgaatatagatttcttttttcttccagtttttatttattactatttttcttgttcttgaatcgtgtttgtgctggcccttcgattacaggcagtggaggtcactagaacatgattaaaaatgataaataaaagatactgtggagagaaaaaaatcaatataactgactgaaaatatggcaaaggagaaataccgtgccccagtgctttgcaagttatcggccagcactccagtgagatctctttcctactgtaattgtctccttgggtggtgtctac

SEQ ID NO: 24468 - DNA, 600 bp, Chicken  19866894238825_2
aataacacacttgtcatagtgatacctgcaggaaatgtttagaatctatacactggatgatcaaaaaatcaaaagaaaagaattctgggactgaaaactttgcttttattgaaaatcagaactgtcccaatcattttttttatgacttcttgccaaaattgtttttgaagttttatttgtgtttgctgaatttgggagtctttgttttgaaccaatgttttcttttgcaagtttgcattaataacatacattgttataaaaataggaaaaaatgcttcaagagatatctgaaattctgcyctcagcccagcccttccaaacccatcacagttgcratgatggtacagctggaaaggatcagacagaagcagttcctttgccccaggttggactccatgctccttctgggtyccttccaactggtgatttctgtgatcctatgtgtgctgctcagcccccgtgtccggagggagctgagctcttctgaagcactcccatgctgtttggcacaaatgaaaatcctgtggtgaactcacagcagcrccttccctggcagctactatttgtgaagataattcttttgaaactcaggagtgaatc

SEQ ID NO: 24469 - DNA, 600 bp, Chicken  19866894238825_3
tgtttagaatctatacactggatgatcaaaaaatcaaaagaaaagaattctgggactgaaaactttgcttttattgaaaatcagaactgtcccaatcattttttttatgacttcttgccaaaattgtttttgaagttttatttgtgtttgctgaatttgggagtctttgttttgaaccaatgttttcttttgcaagtttgcattaataacatacattgttataaaaataggaaaaaatgcttcaagagatatctgaaattctgcyctcagcccagcccttccaaacccatcacagttgcratgatggtacagctggaaaggatcagacagaagcagttcctttgccccaggttggactccatgctccttctgggtyccttccaactggtgatttctgtgatcctatgtgtgctgctcagcccccgtgtccggagggagctgagctcttctgaagcactcccatgctgtttggcacaaatgaaaatcctgtggtgaactcacagcagcrccttccctggcagctactatttgtgaagataattcttttgaaactcaggagtgaatcactggctgtgcactgggaagtgggcgagaagaaca

SEQ ID NO: 24470 - DNA, 600 bp, Chicken  19866894238825_4
aaaatcagaactgtcccaatcattttttttatgacttcttgccaaaattgtttttgaagttttatttgtgtttgctgaatttgggagtctttgttttgaaccaatgttttcttttgcaagtttgcattaataacatacattgttataaaaataggaaaaaatgcttcaagagatatctgaaattctgcyctcagcccagcccttccaaacccatcacagttgcratgatggtacagctggaaaggatcagacagaagcagttcctttgccccaggttggactccatgctccttctgggtyccttccaactggtgatttctgtgatcctatgtgtgctgctcagcccccgtgtccggagggagctgagctcttctgaagcactcccatgctgtttggcacaaatgaaaatcctgtggtgaactcacagcagcrccttccctggcagctactatttgtgaagataattcttttgaaactcaggagtgaatcactggctgtgcactgggaagtgggcgagaagaacatgcccgtagcattcatggagagaaccgtccagttgcttggcgttcccccactcctgtactatgtgctttatttcag

SEQ ID NO: 24471 - DNA, 600 bp, Chicken  19866894238825_5
acatacattgttataaaaataggaaaaaatgcttcaagagatatctgaaattctgcyctcagcccagcccttccaaacccatcacagttgcratgatggtacagctggaaaggatcagacagaagcagttcctttgccccaggttggactccatgctccttctgggtyccttccaactggtgatttctgtgatcctatgtgtgctgctcagcccccgtgtccggagggagctgagctcttctgaagcactcccatgctgtttggcacaaatgaaaatcctgtggtgaactcacagcagcrccttccctggcagctactatttgtgaagataattcttttgaaactcaggagtgaatcactggctgtgcactgggaagtgggcgagaagaacatgcccgtagcattcatggagagaaccgtccagttgcttggcgttcccccactcctgtactatgtgctttatttcagcagcttgtgtgtatcatggagaaatggacccatcaattgctgtgggcgtttatagacctccttccgcttctgtaatatccactgtatttcagccgtttatgaactgcactaaaacctggtttgttcaggaaa

SEQ ID NO: 24472 - DNA, 600 bp, Chicken  19866894238829_1
gcttccttttctaaagtaaatgctctgggaagcagttggtgtcacagctcacttactcccgggatcactttaaaaaacaaaacagctgctcttgtatggaactatcccactgacctggattcactctgcaggctgccaacttacagactgggctgtgctgatttagttatggcagcctttagcagcatctgctatatctgggtacagtgtgttaacttgagaatatagagggtgtgatgttttagtggggatgatttggacgagggatgatttggtgagggttactgcatgtgagaaackatcacatcccgttgctctctgtgtttgcacgtgtctaaaataggctcatgtatgtatctgagtcactgtctggatataaaacagtcacttgtctctactaaaattgccttgtagagtttgtagttgttaggagatgtgtacaccagcatgtaaccctgtggaaagctgctcattgcttcgtagtgctggctactgcctaggagcgagtgggctctgttactcttggtttaaacaaacatacagtttcttctaaaaaatcataaatatgcaagaataaacttactaaaatcctcacttgtt

SEQ ID NO: 24473 - DNA, 600 bp, Chicken  19866894238837_1
gactgatagagtaacaatctgttttcatttagaaggtagtgaaattaaatgtaagaattaggatggttgccttaataatggttgtcttaacaaacttagagaatcatatttgaaaaagagaagacttgttagacagtgaatctaatgataactgagtaattctcattgttcaagcagccaattatacaacttattaaaatatatattcgtaattttgaattctcatactcactttttcaaggagatgactgcaaaacagtttgtaactttttgctctttgtgctggtacaagctacctakagaagaaaagtctgacctgcaaaacatttccacaacttactaatgactgcaacccaattccaaacctgagaagttagaaagtattgggttttatttagtggaacagaaatcctacaagattacaatgagtttccagatttcccctgctaccctttaataaattgctttcttactagattcttacaaaccagcaagctggctaagcgagcccaatgagtcagcgagggggtcattcaatcaccacacagtagttcctagagctgctactagaatttaactgcttccagggaaacttctttt

SEQ ID NO: 24474 - DNA, 600 bp, Chicken  19866894238837_2
actgatagagtaacaatctgttttcatttagaaggtagtgaaattaaatgtaagaattaggatggttgccttaataatggttgtcttaacaaacttagagaatcatatttgaaaaagagaagacttgttagacagtgaatctaatgataactgagtaattctcattgttcaagcagccaattatacaacttattaaaatatatattcgtaattttgaattctcatactcactttttcaaggagatgactgcaaaacagtttgtaactttttgctctttgtgctggtacaagctacctaakgaagaaaagtctgacctgcaaaacatttccacaacttactaatgactgcaacccaattccaaacctgagaagttagaaagtattgggttttatttagtggaacagaaatcctacaagattacaatgagtttccagatttcccctgctaccctttaataaattgctttcttactagattcttacaaaccagcaagctggctaagcgagcccaatgagtcagcgagggggtcattcaatcaccacacagtagttcctagagctgctactagaatttaactgcttccagggaaacttcttttt

SEQ ID NO: 24475 - DNA, 600 bp, Chicken  19866894238837_3
ctgatagagtaacaatctgttttcatttagaaggtagtgaaattaaatgtaagaattaggatggttgccttaataatggttgtcttaacaaacttagagaatcatatttgaaaaagagaagacttgttagacagtgaatctaatgataactgagtaattctcattgttcaagcagccaattatacaacttattaaaatatatattcgtaattttgaattctcatactcactttttcaaggagatgactgcaaaacagtttgtaactttttgctctttgtgctggtacaagctacctaaakaagaaaagtctgacctgcaaaacatttccacaacttactaatgactgcaacccaattccaaacctgagaagttagaaagtattgggttttatttagtggaacagaaatcctacaagattacaatgagtttccagatttcccctgctaccctttaataaattgctttcttactagattcttacaaaccagcaagctggctaagcgagcccaatgagtcagcgagggggtcattcaatcaccacacagtagttcctagagctgctactagaatttaactgcttccagggaaacttctttttt

SEQ ID NO: 24476 - DNA, 600 bp, Chicken  19866894238837_4
gggtcattcaatcaccacacagtagttcctagagctgctactagaatttaactgcttccagggaaacttctttttttttttttttcaatttcaaattctacctttttgaggatatcagtagttgggggagccaggcaatcagtcaagtctgctatacggaagcatgttactctagccatatggagagcttgggggatccttagtccaatctccagaacagcagccaacagaaccagttgcaaagaaaaccttatcagggaacctgtgaaatgcatctagctaaatacctgagtgccctgyaaatttgatcatgctgaggctctgaaagcctgggtatactgctgtctgtcacyctgggacttctgcatggtggctgggtaagaaggctgcattgttcactaactatgcaacttttttggctggctcacaggaggaacagctgtggtgtgcacaggattagagagaccaacaactcagcagatcgacagcagcagaaatttgttaaatgagatgtgggagcatgggaaaatcacttggatttatctagaagacttaggaagctgaatggtttcatgtttggtttgttggtttgcttggaaa

SEQ ID NO: 24477 - DNA, 600 bp, Chicken  19866894238837_5
gcttccagggaaacttctttttttttttttttcaatttcaaattctacctttttgaggatatcagtagttgggggagccaggcaatcagtcaagtctgctatacggaagcatgttactctagccatatggagagcttgggggatccttagtccaatctccagaacagcagccaacagaaccagttgcaaagaaaaccttatcagggaacctgtgaaatgcatctagctaaatacctgagtgccctgyaaatttgatcatgctgaggctctgaaagcctgggtatactgctgtctgtcacyctgggacttctgcatggtggctgggtaagaaggctgcattgttcactaactatgcaacttttttggctggctcacaggaggaacagctgtggtgtgcacaggattagagagaccaacaactcagcagatcgacagcagcagaaatttgttaaatgagatgtgggagcatgggaaaatcacttggatttatctagaagacttaggaagctgaatggtttcatgtttggtttgttggtttgcttggaaagtactgatgtaatttaatattttcttaaaatattggattttgccagatgagca

SEQ ID NO: 24478 - DNA, 600 bp, Chicken  19866894238839_1
gtagatactgagcatgcttactgagcacataggactgttttaggatcacgtgtgaggtgaaatactgaactggaaccagaaattatggaagctgcagaaaatctgacgccagagcagtggttttcaaactcaaaaagatttctcaatttttttcatcttaattgagaagactatcctgatttttttataattttttttttcccctgggtaaataaagagaagggaagaggtaggaagacagtgtactatatgttcaatatgactggaatacttccagcttagggtattaaacattatcaracttgctctgctcagacacagtctgtgaattaaakaaaataaatggtaaatctacttctcttaaaaaatatttgtcatcagttgtcaagttcataaaatgttgtctttaactgagaattattttaatactgtgaagtgttgtggacatttgtcaaggtcactgattttttatttcatttatttttttaatcttttcctattattgagttttggactacctgattagatacgccttagatttgacctggaatttcaccctcattcctttttgagaatgttttttcagtgtattcataaaga

SEQ ID NO: 24479 - DNA, 600 bp, Chicken  19866894238839_2
tgttttaggatcacgtgtgaggtgaaatactgaactggaaccagaaattatggaagctgcagaaaatctgacgccagagcagtggttttcaaactcaaaaagatttctcaatttttttcatcttaattgagaagactatcctgatttttttataattttttttttcccctgggtaaataaagagaagggaagaggtaggaagacagtgtactatatgttcaatatgactggaatacttccagcttagggtattaaacattatcaracttgctctgctcagacacagtctgtgaattaaakaaaataaatggtaaatctacttctcttaaaaaatatttgtcatcagttgtcaagttcataaaatgttgtctttaactgagaattattttaatactgtgaagtgttgtggacatttgtcaaggtcactgattttttatttcatttatttttttaatcttttcctattattgagttttggactacctgattagatacgccttagatttgacctggaatttcaccctcattcctttttgagaatgttttttcagtgtattcataaagaatgctcactttcagtttttaaaaacatctttcatt

SEQ ID NO: 24480 - DNA, 600 bp, Chicken  19866894238841_1
ctctgtggggcgggaagccattacgccttattaactttgagtgactaagccctttgtgcaggagctgaatataattaaaacacattttcattgctaagctgttacactgaggaggggctgggctcaggcttttcttttttgtcctaccagtctagtgtgtttgtgaaaatgcatggctgaagttaagaaaaatctgaaatggttagctggcagaatagcaataacaccaccacataaaagacaaaaagcactgtgaccatactttgacttaagccacacagacatttgatgcaaaatacwgggatctctcatgtcaaaaatagaagagatttactcaaaatgtggagacaactgtttacgcaggaaaaccacttttcatactraagatggctgttgacttttgtccgttttccagtcttgacttaaactacaggaacagccagagccatctcagattgttcgagaggcttcaacaagctggaaatcccttccacccttttgggaattcctgcaaggaactgagcaggctgaaatatgccaaaaaacaatgtttggcagaagtaagtgactgtggctgctcccgctacagtaatttaagac

SEQ ID NO: 24481 - DNA, 563 bp, Chicken  19866894238841_2
attttcattgctaagctgttacactgaggaggggctgggctcaggcttttcttttttgtcctaccagtctagtgtgtttgtgaaaatgcatggctgaagttaagaaaaatctgaaatggttagctggcagaatagcaataacaccaccacataaaagacaaaaagcactgtgaccatactttgacttaagccacacagacatttgatgcaaaatacwgggatctctcatgtcaaaaatagaagagatttactcaaaatgtggagacaactgtttacgcaggaaaaccacttttcatactraagatggctgttgacttttgtccgttttccagtcttgacttaaactacaggaacagccagagccatctcagattgttcgagaggcttcaacaagctggaaatcccttccacccttttgggaattcctgcaaggaactgagcaggctgaaatatgccaaaaaacaatgtttggcagaagtaagtgactgtggctgctcccgctacagtaatttaagacaggcagcagctgggaaaggctgtttctcatggtaaccctttccatg

SEQ ID NO: 24482 - DNA, 600 bp, Chicken  19866894238853_1
ttgtatgtgtggtaaatgatttcattctgtgttttgacttgcttgccacttatttataatgcaaagtgaatattctgcatatgtatgctccagcagtcttgatttcagatggcatcccacatataattttatcctaaactcatgtttaatatcaaagctcccaggaggatgcttcaaatagtgagggacttagaacggcactagagtttctgtaatttttttctttgaatttgtatctgaatattcctggaggtagttaaaaccagcaggcatcattccctgtgctagccagtgttaacrgcaaccaagtgcctcccttcttccttcatccattaatatttgctttaggttcatggcaagaaaattctgaatttggaataaaaaactttttgtatatggctgaaccttgaaccttcttttggaaacaactacaactgatttgttaaagccccatttagcaatagggacaaaaacatataggagaaagtattttgagtcatcaagaaattttgtgattccaaatgtatacctctactgaaattatctgttaactttaactactttcttgtgaaaacaaactcacactttttttttctttag

SEQ ID NO: 24483 - DNA, 599 bp, Chicken  19866894238864_1
  misc_feature (1)..(12): n is any nucleotide
nnnnnnnnnnnntgagattgcatcttttgttgcagtattaaccccattttctgaaaatgaataatgggattaaggaatcaaggaagaagtagtaataatcacttaaattaatagaatgttcactgttaagttaaaatcatcacaggtggggggagggggaaatggtgttatttttttctaagagtttttcctatgtgagttttaaatcaaaaggagcatgagaagatgagcagtgattactttagaggatctgcaggcataagaaaggagaattgtaaaaccagaccactgcaacataayagtatttcgtcagcactgaaagaaatttgttgtaacttgatgtagctgacactacatagcctaaagaaagttacctcatctgacaacactttgcttttgatgtaatatgttcgctgtaagaaaagctcttgtttatgcctttgctaatcccttccttgagcaaggcttcatagatgttaattagaacttccattaattttaattatatttcttattgggagtattggccccagaaggttctagtatttgtcatgccttcattccaatgtttcttgaggctaatggcaggatccataata

SEQ ID NO: 24484 - DNA, 572 bp, Chicken  19866894238877_1
attgcaccggataaggctgtcaaatgtcattacagagcaataaagggcgactaatacaagggccctgctgaactatcatctagcaggtaagatgatgtcttccttaaagttgcagcaaagtggcatctgcagacacacacacatagcccagggccacagaacaggacgagctcacaagctcatgtgctcctaccagcattaattcattaccattcctctggtgtcatttttttttgtaatatccaaaatgtaagtactatgaatgactgcaacttattagctacaagggagtggggctcyttttttttcaacacagaggtattccttaatcagcttgctctttaaacactggtgctccatcctaagtagttgattaaaactttctgttcgagtaggccagacttctcagaagtctttgttcatcccagcacatattatccatttcagatgcagtgcacagtgcgtgcagtgcaagctcccacagatcacagcagcctattcatgatgccttcatttcgtggcagtcagtgggagcatccataggcatcttttctgggaacagattcagtgag

SEQ ID NO: 24485 - DNA, 592 bp, Chicken  19866894238895_1
tttctgagaaaggcttttgaaagtagtcaaggactggtctccaacaattaagaatcacactttgctatgtaactaaagcagtgttgccaaataagagagtatggtaagaaacatttaaagaatttctcaggtttttaaaaaaaaaaagagagagaaatgatgtctgcggttcatgtctgccagttgtcagacacaggaggccgttagctggtctgtgaaggagggaatattgctgtatcaatgtcttaattttaggaaaattgtcttttaaaagtaaattctgtaagccctgagaaagtrttattagcaaaccatttttgatgctgtgagaatgtgatttttaatccagaaattgctttgagaaaaccattggaataaggttcctgcaataaatcccagcatcaggtaagccattctgcacatctgaagttccctgtaaaattgactctgatcatttttcacttttatgtttttcaataaaaatcctacagaacagttgtgtggtgttcttttcccttgtcaacacaaattcccttgtcaacacaaattcccttgtcaacacaaattcagagcgactctcactgtcacactg

SEQ ID NO: 24486 - DNA, 600 bp, Chicken  19866894238899_1
ggtggatattggcagcgcttgctcttgttgaagtgcctggcctcatgagaacaaagtcaagctagtgctgagggattccaccctaaaatccttggaatgttctccataggcaatttctcagtgcacacatctgatgacattaggagtcaagaggctaaagggaaaaagaacttgcttaaagtaatgttgttagagtcacacatgtagctatcaaaagagctagaggaatgaaagtacctccacattttctttcttgctgacagactcaaactgcagagggcaatttcccttctcacctckaaaatgatcccttcgggggagtttactctgccattcttggtatgctgaagaaacctgacatatatatcttttctatggctagagggagcctttccatttctgtgcagttagttcaacmccttttactgggttttgcagagaaaaagtggtgcactatgaagagagaagcagtgccacactaaactgatatgtgctctagcacatacatgaagaagatccttagcaacagaaatcctttcatttgtcccatcattcctgcgacatatttatttactgaataatacaagccgtctgactaat

SEQ ID NO: 24487 - DNA, 500 bp, Chicken  19866894238899_2
cagtgcacacatctgatgacattaggagtcaagaggctaaagggaaaaagaacttgcttaaagtaatgttgttagagtcacacatgtagctatcaaaagagctagaggaatgaaagtacctccacattttctttcttgctgacagactcaaactgcagagggcaatttcccttctcacctckaaaatgatcccttcgggggagtttactctgccattcttggtatgctgaagaaacctgacatatatatcttttctatggctagagggagcctttccatttctgtgcagttagttcaacmccttttactgggttttgcagagaaaaagtggtgcactatgaagagagaagcagtgccacactaaactgatatgtgctctagcacatacatgaagaagatccttagcaacagaaatcctttcatttgtcccatcattcctgcgacatatttatttactgaataatacaagccgtctgactaattcttgtgtgtccacaggt

SEQ ID NO: 24488 - DNA, 600 bp, Chicken  19866894238902_1
ggagcacatccagaggagggccataaaaatgatccctgggatggaacaccccccctggaggaggggctgagagctgcagctttgcagtatggagaagacaaggctgcggagagaccaatagcattatctaaaggggctgtaagaaggaaggggactctttagtggggtctgtgatgggatttcaaactaaatgaggagagatttaggttggatgtaaggaagaagtttttacaataagagcagtgagactagcacaggttgcccagagaggtggtggatgccccatccctggagacactmaaagtcaggatggatggggccctgagcacctgatctagtgtaggtattcttgttcactgcaggggagctggacgagacaacctttaagggtctcttccaattcaaaagattctatattcctcattattctggagataagaaacatttctgatgggattaacacctaattagatgtgactacatactgaattttactgacattaagaataggaagaattttaagaaacaactatttatagtagtaaatagcactgtcagtgcaaacctcctttgttgaacttagaaggttcataaggctaa

SEQ ID NO: 24489 - DNA, 600 bp, Chicken  19866894238904_1
caggaagacaggctcacaacgccaggctgcagaaacaggctatggggaacactgaggtcacgaagccattctttaaatctgctaaaatctaatgatctgaaggacttaaggggcagctctgcaaatgcagaagtgcaattcttgcaggagaatcgggcaagtaaatttttgttaaattatttctgatgctgacttttctagctgtgttctagctgacatctagatgtcatctcagtcacagcagaccatcatgcaggcacagcgtctgcatatctgcacacagtatttcatcttctctckgtctgactgctttaaagtcgctaggaactaaaaattataattggctttgtaacccacagcactgaactgacaccgattccaggttatttcagtacggcggactgtgaactacatttgttctagctttaccaatagttacagcagcacttcagcaggaaaagggaagaccatattacagytgctttcaagagtgttagtaaataaaaacatactgttctaaacccctrtactttggattctagaaattcttcccacatattcccaatttttattgtgcttcctcaagagcctccataataa

SEQ ID NO: 24490 - DNA, 600 bp, Chicken  19866894238904_2
tttctgatgctgacttttctagctgtgttctagctgacatctagatgtcatctcagtcacagcagaccatcatgcaggcacagcgtctgcatatctgcacacagtatttcatcttctctckgtctgactgctttaaagtcgctaggaactaaaaattataattggctttgtaacccacagcactgaactgacaccgattccaggttatttcagtacggcggactgtgaactacatttgttctagctttaccaatagttacagcagcacttcagcaggaaaagggaagaccatattacagytgctttcaagagtgttagtaaataaaaacatactgttctaaacccctrtactttggattctagaaattcttcccacatattcccaatttttattgtgcttcctcaagagcctccataataaagctacaacaattgcttttggtactgatgtgtcactgcagtctttccagtaataaaatctgatcgttttcccattatgctttcattaaatttcttatgtctgcaaagtcatccttggtcttgttatattgcaaagcaataaggcagtatttcaaatgctacacatgcaacgtaattaga

SEQ ID NO: 24491 - DNA, 600 bp, Chicken  19866894238904_3
catctcagtcacagcagaccatcatgcaggcacagcgtctgcatatctgcacacagtatttcatcttctctckgtctgactgctttaaagtcgctaggaactaaaaattataattggctttgtaacccacagcactgaactgacaccgattccaggttatttcagtacggcggactgtgaactacatttgttctagctttaccaatagttacagcagcacttcagcaggaaaagggaagaccatattacagytgctttcaagagtgttagtaaataaaaacatactgttctaaacccctrtactttggattctagaaattcttcccacatattcccaatttttattgtgcttcctcaagagcctccataataaagctacaacaattgcttttggtactgatgtgtcactgcagtctttccagtaataaaatctgatcgttttcccattatgctttcattaaatttcttatgtctgcaaagtcatccttggtcttgttatattgcaaagcaataaggcagtatttcaaatgctacacatgcaacgtaattagaaagcccatttcttattacactgtaaaaattaaggctgtttaatgccag

SEQ ID NO: 24492 - DNA, 443 bp, Chicken  19866894238910_1
caataaatcaaggatctgtcactctagaaatctttttttcattaaagaaagattttctatgtgattgtaatcattactctgaatttctcttaccaaaataggtgactcatttccaactctacctgtggcttcattttactgattccagaaagaaagcaatccgtttagataactaatttgacaacaacacttacgttagtgtttctaattgcttgatcctgctatactgcacagagctgcctggtaaagcccagcttcactgcaaggagatgactgcttggtcaccagaagagctgcaarcttcatctatacctcacaaaaatgccagtttttttttttccccaaatgataatttttgaaagaacttttaccttttgattaagggtgtagtttatatatcactgcattagacctaatggccatactaagggtttactcatgat

SEQ ID NO: 24493 - DNA, 600 bp, Chicken  19866894238912_1
ttattggcaggagtttaaattggtctgctgtaaatcatgctgccaagagtggcacacggtattcttgtcctttgcctctcctctgaaccagagagggaagcagatggtataaaactgtttcttccagctctatgccaatacccatcctggaaaaaaaatccctctcctgcctgttttaggcagctttcagtcccttcacaccactggagagcaaaaatccctcaacaaagattttctccaggaaaagaaagcagcatttcaaataatttttgtcctttcctggtttgatgttttgggaarcaaggtttttctcctttattgggtcttggggtgagttctgtgctgcattttgcccacagctttgtcctgtgagctctaggcaagagtcttttcaaccacacatagctatgaaagctgaatrtctgaatttgatgttccatactcaaaaayaaccatggaccatagctgttttattaaatggaaatatacacatctctaactaggagaaacataattgtccatcaaaggaatatgtgtgttttcaaaccatggatatacccaaagaaatgttttttgcaagaattttgattatttatttgt

SEQ ID NO: 24494 - DNA, 600 bp, Chicken  19866894238912_2
ttccagctctatgccaatacccatcctggaaaaaaaatccctctcctgcctgttttaggcagctttcagtcccttcacaccactggagagcaaaaatccctcaacaaagattttctccaggaaaagaaagcagcatttcaaataatttttgtcctttcctggtttgatgttttgggaarcaaggtttttctcctttattgggtcttggggtgagttctgtgctgcattttgcccacagctttgtcctgtgagctctaggcaagagtcttttcaaccacacatagctatgaaagctgaatrtctgaatttgatgttccatactcaaaaayaaccatggaccatagctgttttattaaatggaaatatacacatctctaactaggagaaacataattgtccatcaaaggaatatgtgtgttttcaaaccatggatatacccaaagaaatgttttttgcaagaattttgattatttatttgtgtatgtatgtacatgtacctttagagagaatcagttatatcatgtgagacccctggttattttcagcaatctgactttcttctttctaggtgttttcatttcttcttcrgaagcattatcc

SEQ ID NO: 24495 - DNA, 600 bp, Chicken  19866894238912_3
aaaaaaaatccctctcctgcctgttttaggcagctttcagtcccttcacaccactggagagcaaaaatccctcaacaaagattttctccaggaaaagaaagcagcatttcaaataatttttgtcctttcctggtttgatgttttgggaarcaaggtttttctcctttattgggtcttggggtgagttctgtgctgcattttgcccacagctttgtcctgtgagctctaggcaagagtcttttcaaccacacatagctatgaaagctgaatrtctgaatttgatgttccatactcaaaaayaaccatggaccatagctgttttattaaatggaaatatacacatctctaactaggagaaacataattgtccatcaaaggaatatgtgtgttttcaaaccatggatatacccaaagaaatgttttttgcaagaattttgattatttatttgtgtatgtatgtacatgtacctttagagagaatcagttatatcatgtgagacccctggttattttcagcaatctgactttcttctttctaggtgttttcatttcttcttcrgaagcattatccagtttgacatctcagttcaaatctgtaac

SEQ ID NO: 24496 - DNA, 600 bp, Chicken  19866894238912_4
gaaagctgaatrtctgaatttgatgttccatactcaaaaayaaccatggaccatagctgttttattaaatggaaatatacacatctctaactaggagaaacataattgtccatcaaaggaatatgtgtgttttcaaaccatggatatacccaaagaaatgttttttgcaagaattttgattatttatttgtgtatgtatgtacatgtacctttagagagaatcagttatatcatgtgagacccctggttattttcagcaatctgactttcttctttctaggtgttttcatttcttcttcrgaagcattatccagtttgacatctcagttcaaatctgtaacgtactacctcagctgaaaaagaacctgagaaaatgagcagaggcagaaacacaaaggaatagtgggagggactaaaaaagaagggtaagatgattctttgacgaagcagtctttgggatctagtgctgttgtgatttgttattgcactccgtgctttgctggtttttgggtttttcttggacaatgtacactggtcagcatctctgtctttttctatattgaccacagcagtcatacttcagtgaactgtcaatataag

SEQ ID NO: 24497 - DNA, 600 bp, Chicken  19866894238915_1
aattttccatgctcattgcccttccccccacacccccgctttttttccctcctccttcccagaggcttgatggcaggggataggccttgaaatgctttcatttatcccgctgctaaagagagtgaaatagaaaatagaccacgttatgctctgatgttctgaagatttgtgggctgcatcttttcactcaaggaattaaaaaaaaataagaataacacaaagaaaaccccataacgtttcacaaactggcagtgacaagcattcaaaaaccatgattcagattgccaaaattctaaacayattaaataaccattctactttcagtttccagacacactgttgagaaatgaatgyccagtttgcatatgtattctttctcatcctayataagtgggcaggtgaaaaattcccaggcacgttcttcttgcagctgtgtttccaatcagctgtaaagcaaacatgtcaaagtcccaataaggtcatttggaattgatgtcagttcactccctggaactttgagtcagccttctccctttgctcctgctttcagctgggacagaatcatcatcttcagatcatctggtatgatgctatgttttg

SEQ ID NO: 24498 - DNA, 600 bp, Chicken  19866894238915_2
cttcccagaggcttgatggcaggggataggccttgaaatgctttcatttatcccgctgctaaagagagtgaaatagaaaatagaccacgttatgctctgatgttctgaagatttgtgggctgcatcttttcactcaaggaattaaaaaaaaataagaataacacaaagaaaaccccataacgtttcacaaactggcagtgacaagcattcaaaaaccatgattcagattgccaaaattctaaacayattaaataaccattctactttcagtttccagacacactgttgagaaatgaatgyccagtttgcatatgtattctttctcatcctayataagtgggcaggtgaaaaattcccaggcacgttcttcttgcagctgtgtttccaatcagctgtaaagcaaacatgtcaaagtcccaataaggtcatttggaattgatgtcagttcactccctggaactttgagtcagccttctccctttgctcctgctttcagctgggacagaatcatcatcttcagatcatctggtatgatgctatgttttggttcaaggacaaaaataatgttgataacacaccaacgtttagagttgcttgcta

SEQ ID NO: 24499 - DNA, 600 bp, Chicken  19866894238915_3
ttgaaatgctttcatttatcccgctgctaaagagagtgaaatagaaaatagaccacgttatgctctgatgttctgaagatttgtgggctgcatcttttcactcaaggaattaaaaaaaaataagaataacacaaagaaaaccccataacgtttcacaaactggcagtgacaagcattcaaaaaccatgattcagattgccaaaattctaaacayattaaataaccattctactttcagtttccagacacactgttgagaaatgaatgyccagtttgcatatgtattctttctcatcctayataagtgggcaggtgaaaaattcccaggcacgttcttcttgcagctgtgtttccaatcagctgtaaagcaaacatgtcaaagtcccaataaggtcatttggaattgatgtcagttcactccctggaactttgagtcagccttctccctttgctcctgctttcagctgggacagaatcatcatcttcagatcatctggtatgatgctatgttttggttcaaggacaaaaataatgttgataacacaccaacgtttagagttgcttgctaagcagagctgtacagagccaaggccattcaga

SEQ ID NO: 24500 - DNA, 600 bp, Chicken  19866894238916_1
taccattgttcaacaaaaggtcactgagaaacatagtgatcagcggtaaaggacacagggaagttctttgcgcatagtattaaaattaactcatacaatgtttcgccacatgccatatatagccaaattgatgtaaggccttactggtccttttgcagcgtgccctcccatcctcccacctcatgtgtgaaaatctgaactaaagtgtcacaccacgtattttcaaatgttgtctttgatgtcaagttcatagatggtattttcaaatctggccactgtttttcacacaggttgaataamagaactggagaaaggacgagatcagaacaaatacatttgccccttattggctgccttggttatttttagttctgttgatcacttcaaggttttctctctagaaaagtgtcaagaagtgactgccactgagcaagggcagctctgcttccttagctgcatcctgtagttctggcactatcacaaagaaatttatcactgtggaatagtacagggagggatataggtggtgagaaagacaaaatacagactaaagtttgtgcatccaagtgacctcagatgcctctcagatggaggaaaaaa

SEQ ID NO: 24501 - DNA, 600 bp, Chicken  19866894238918_1
tactaccatttataggaaataataagcaatctctttcttagatcaattcaaaaaaaaataaacacaactgctgctaactcttattagagttactcttaagttggggttcaccataaaactttcttcaatcagtttggcagcattgatgtatttgtacagctgggatagtggaataaccatcataaaaatcaatgggattattccagttctggtcaagcagtgtaaatgcagatgctcaagcattaactgtgattttcttaaatgtttatgtagtttcacatcatgaaaataaataaacaratagtctaatagacaaacaaactaggtcatttcataaagggcaaygatgtgatacagctaagtgagttgaaagtaagctgcatcaaaaataggaagattggcttcttcctcacctcctccttctcctcccaggtgtggggccctgctgctgccacctcgtctgatcttcaacgattctctgagcacaccaggagctcgctcagcacacaaaactcacccagcaaagaaagcaatcatattttagtcactccagtttcctgtgcagacagatgagcacaggcatcagaggaggagagggtg

SEQ ID NO: 24502 - DNA, 563 bp, Chicken  19866894238918_2
attcaaaaaaaaataaacacaactgctgctaactcttattagagttactcttaagttggggttcaccataaaactttcttcaatcagtttggcagcattgatgtatttgtacagctgggatagtggaataaccatcataaaaatcaatgggattattccagttctggtcaagcagtgtaaatgcagatgctcaagcattaactgtgattttcttaaatgtttatgtagtttcacatcatgaaaataaataaacaratagtctaatagacaaacaaactaggtcatttcataaagggcaaygatgtgatacagctaagtgagttgaaagtaagctgcatcaaaaataggaagattggcttcttcctcacctcctccttctcctcccaggtgtggggccctgctgctgccacctcgtctgatcttcaacgattctctgagcacaccaggagctcgctcagcacacaaaactcacccagcaaagaaagcaatcatattttagtcactccagtttcctgtgcagacagatgagcacaggcatcagaggaggagagggtgcgtccaag

SEQ ID NO: 24503 - DNA, 373 bp, Chicken  19866894238925_1
cactcaattagccatcttcatacaacatttagtggacaaagaagggctgtcctatttgacaagtgactcgcaacataaaaaaacataatacagtagtactcaatcacaaaggttaataaacagcagcagttttgtccagagactgagtaacgcatgcagctacacatccatgttctacactcacgcttctttccacttaattaaatgagctctgcagagcctaatctaaatgtatcatgcagtgttttatctaaagggcggagatcaaagagcatcagagggaaaggatttcaggcaatycacacaactcttactaaactctactgcaacagttgtctgactccagacaactcttcagaagatcccagaaaag

SEQ ID NO: 24504 - DNA, 600 bp, Chicken  19866894238926_1
ttactgctcttttgagaaataaatcttaactttaattggtgaggcttaaagcaaaatcatgaactttatacagacttgaaaagtaatatcactggggccttgttttaaaactttggccaaactagaaagactattctaccaaaattatgtaaatatgatttattcatgtgaaactgcaaatctaaatacagtcatttttataactctaatagaaaaatctcatttgctgttttctgcaatttgttcatttgccaaataatgaagactttttaagttgttactgcgcttcaatagcataaytcaaagggaagcttattttactttggcatttcctacattcagaaattaatagctctgttctatctcagacttgcaggcctttggaagcacatatcttagagctggtgttctctggtcactcagcacactctgcaattgattttccagcattgttccttgttatcagttggaattattgtatgctgggagtggtccttcctactttaatatttttttgcttactttaatttgaaagctcctttataggagcaagtgtatttttctgttttctgttacttttttaactggaaataaatatgg

SEQ ID NO: 24505 - DNA, 600 bp, Chicken  19866894238930_1
aaacaaaggttgagaaaaaaaaaacctcactacctgggcttagttgattgaaaaggctagtgatggattatttagcatatagagacctgggcaggtctctatattattatattatgccttcacttaaggaaattagtacaagaattcacactgtagttcaagagccataatattcaattctaatgatttttatttattctaattaacagtcatacaaatgaattaaaaagtgcaaccacaaacattacttgctcactaatccatcatcacattgctaacagatctagcttaatcacattyacaatcgtagtttttttgattacacaaattattagtcaagtctcgtttcatttagtctctaaatgggtacattttattcgtcagagctaagtgaactttgcagacttgctgtcttacttgttctttcacccatataagcagagcaattaatgaaaaataattaaacgcctggtctaaaattacatcccccgaaggactttgttggatagaactggcatctatcaactccctgaaagctgtagaatcattacaaaaatgcagcttaaacaactttctccaaaggaattcaggcacataaaa

SEQ ID NO: 24506 - DNA, 600 bp, Chicken  19866894238931_1
tttattctgaatatttgcatgattgtgcttattcttatcctttgtattccacccagggaggaaagagtttaaaccagtgacagcagggtactttttaatcagttcctttgaaaaatcacattggtctgcactgttccacatagaacacagaataatattagctatatttcagagaggactaatttgaggatgggaggaggctgctgcacattgacaagtacctgtgttagctctccctgactttccatctcctgcatttacttttcgtaaatactgtgagtgctattgcttcacagggcwctttattcctgcagtgtccaacctagcctaagcagccatgaaaactgctgcttatcaccctacctcaagcaagtctaaagtggcttgaagaataaaagcaactaaaactgcctcagcccagcattactggtccctgcctgtccctggggcgaatgatcacttctcatccatcagacttgtggttaactctttgcaggtgcgacttctcaagagttgtttgtgctgaagtggcctcttgtggagaggtgcaattcctatcagcttcttcctcttgtttggccagaggctgcttttgacctt

SEQ ID NO: 24507 - DNA, 600 bp, Chicken  19866894238932_1
tcctttggttaggtttaagcctttcttatgcggattctttgacgcttacactgcaaagcatgttaacgaagtgccttccacccaggcttaagacttagctattgctcacacagtgtttaaggctgtagagaatgaaagatgatgatgcattaagtacttttgcagctgaacgtgtggcagacgtgctgtctcaccggtgcgtcacagccctcccagcctgccctgcagcctcctctccacttcccagtactctgattttctttctggagcagtagctgaaaaatcccaggggctgaagtstaaagcagccyggagcaaaacttgtggtgctcttctgatatccaaggacaggtgacagacagctttggctggtgtacacttgacccttacactccacatacccacgcttgtgctcattccacccaagataaaacagagagatggaaaagcaaatgggactctttcatcctctccactgtcagacacttatttatccttcctcagaattgccygaggcaggaacaggaaatggaaggaaactgctaactaaaatagccctttgccagctcacttggagtaactgccagtcaactccgctct

SEQ ID NO: 24508 - DNA, 600 bp, Chicken  19866894238932_2
ggtttaagcctttcttatgcggattctttgacgcttacactgcaaagcatgttaacgaagtgccttccacccaggcttaagacttagctattgctcacacagtgtttaaggctgtagagaatgaaagatgatgatgcattaagtacttttgcagctgaacgtgtggcagacgtgctgtctcaccggtgcgtcacagccctcccagcctgccctgcagcctcctctccacttcccagtactctgattttctttctggagcagtagctgaaaaatcccaggggctgaagtstaaagcagccyggagcaaaacttgtggtgctcttctgatatccaaggacaggtgacagacagctttggctggtgtacacttgacccttacactccacatacccacgcttgtgctcattccacccaagataaaacagagagatggaaaagcaaatgggactctttcatcctctccactgtcagacacttatttatccttcctcagaattgccygaggcaggaacaggaaatggaaggaaactgctaactaaaatagccctttgccagctcacttggagtaactgccagtcaactccgctctgactcatcacc

SEQ ID NO: 24509 - DNA, 501 bp, Chicken  19866894238932_3
ccagcctgccctgcagcctcctctccacttcccagtactctgattttctttctggagcagtagctgaaaaatcccaggggctgaagtstaaagcagccyggagcaaaacttgtggtgctcttctgatatccaaggacaggtgacagacagctttggctggtgtacacttgacccttacactccacatacccacgcttgtgctcattccacccaagataaaacagagagatggaaaagcaaatgggactctttcatcctctccactgtcagacacttatttatccttcctcagaattgccygaggcaggaacaggaaatggaaggaaactgctaactaaaatagccctttgccagctcacttggagtaactgccagtcaactccgctctgactcatcacctaggtaatgactgactacaaaaaggtaaagccaacagaaataagcaagtgcacttcctggctcgttttcattccccaacactgcattccttggggtcagtat

SEQ ID NO: 24510 - DNA, 600 bp, Chicken  19866894238936_1
gtgtgcaggtgggtgctgtgagacctcacctggtgcttgtcaggaccgggctgtatcccacctggcgcccgatttgcaggtggaaaacgagtacgggagctactatgcctgtgacctcggctacctgcagcacctgctgggcaccttccgggcgctgctgggccctgaggtgctgctcttcaccaccgatggtgcgcaagtggaggagctgcgctgtggcaccctgcaggggctctatgccaccatcgacttcgggccaggtgccaccaacggggaggagcagatgaggtgggtgcaggrgtcccggccccctcctgctccagcctcacttcttttccccttgtagactccaatgtgacggaggcgtttgatgcccagcgccacgttgagccaatgggaccgctggtgaggcaccacrtgagagggtggcctggggggtgtcagcccagctccaggcaggtgacagcccctggctttcccaggtgaactctgaatactacacgggctggctggactactggggggggccgcatgccagcaccagtgccacactggtggcccagggactcgccgatatgctgcagttgggagccaatgtca

SEQ ID NO: 24511 - DNA, 600 bp, Chicken  19866894238936_2
ggctacctgcagcacctgctgggcaccttccgggcgctgctgggccctgaggtgctgctcttcaccaccgatggtgcgcaagtggaggagctgcgctgtggcaccctgcaggggctctatgccaccatcgacttcgggccaggtgccaccaacggggaggagcagatgaggtgggtgcaggrgtcccggccccctcctgctccagcctcacttcttttccccttgtagactccaatgtgacggaggcgtttgatgcccagcgccacgttgagccaatgggaccgctggtgaggcaccacrtgagagggtggcctggggggtgtcagcccagctccaggcaggtgacagcccctggctttcccaggtgaactctgaatactacacgggctggctggactactggggggggccgcatgccagcaccagtgccacactggtggcccagggactcgccgatatgctgcagttgggagccaatgtcaacatgcaagtagccaacttggggcacagcccttcattattggttttagagttgggcagggggcagcagggtggtctaggtccgcgtgggtgctgactgctctctggggtgttacgcag

SEQ ID NO: 24512 - DNA, 567 bp, Chicken  19866894238947_1
caatttctactggcatcagctcaattgtaagaagatgataacagaccattgttgcaggctgagctgaaaccacctgtcttttggcttagctatagatgacctcaaaaggcgtcaaaccaaatcagattaacattccactgcataaaacgaagacttaggcaagcatgtttgaatcatctgtcaaacagcttctctggattgtatgataaattctgtttacgatatagagacaaatgatgctccaggcagagcctgaacactcttgttccaagaagagcttgctataaagtttcatgggtkctaggtgaaacacaaaccttggaggagctagtaaagtcttcttatgtcttgatctctccaacacccatgtaggagactttgcagtctttgtgatggagaatattgcattaaagaatctcctttttcctttaccaacatctccctctcatgcagcaattgctaacactttaaatttccctttcyctcttatgattttgggaaaagatcatataatcaaatccactagataaatatgagagaattttatgcctgaagtgtatacaggca

SEQ ID NO: 24513 - DNA, 384 bp, Chicken  19866894238947_2
aacagcttctctggattgtatgataaattctgtttacgatatagagacaaatgatgctccaggcagagcctgaacactcttgttccaagaagagcttgctataaagtttcatgggtkctaggtgaaacacaaaccttggaggagctagtaaagtcttcttatgtcttgatctctccaacacccatgtaggagactttgcagtctttgtgatggagaatattgcattaaagaatctcctttttcctttaccaacatctccctctcatgcagcaattgctaacactttaaatttccctttcyctcttatgattttgggaaaagatcatataatcaaatccactagataaatatgagagaattttatgcctgaagtgtatacaggca

SEQ ID NO: 24514 - DNA, 600 bp, Chicken  19866894238964_1
ctcacatctggaaatctcgcttcctacagtaggaaaagctaagggttatacaggtattagaggagccgcatagcacacccttgcaacagcaccaaagacagaaataaatgtatgggtagttatctagcatgctcccaaaacaggggctaaaatgggatccaggagactgtttatatccatacggcctggatactgcaagctgctggctctcctggctccacaggataaataataggtctttttttatgagtatgggtagtggtgtgaggggctgcgagtgcctggccttacgagtgatgyagggtggatggaaagaggagaggcacataggtacaaactacaacacaagcaaagttaatacatacccccaggtggaagataaagggctttgaggttgtgtgctggaatacattccaaagcaagagggaaaagaaacaatacacaaactcttgacgagagcagagcagacaacaaaccttcagtggcattagccatgtagccaagagccctttagtgctctctaattggctttccatgtgggtattgcagttggttgcaccagagggtacttygctttgcaagactgaactgggcagggct

SEQ ID NO: 24515 - DNA, 600 bp, Chicken  19866894238964_2
tgcgagtgcctggccttacgagtgatgyagggtggatggaaagaggagaggcacataggtacaaactacaacacaagcaaagttaatacatacccccaggtggaagataaagggctttgaggttgtgtgctggaatacattccaaagcaagagggaaaagaaacaatacacaaactcttgacgagagcagagcagacaacaaaccttcagtggcattagccatgtagccaagagccctttagtgctctctaattggctttccatgtgggtattgcagttggttgcaccagagggtacttygctttgcaagactgaactgggcagggctgttaaacaacccaaacaacgtaacagtatgtactcatccatctctcagagcaggtcagcagtcaccaaggtcttactctgacaagtgagtgttgatgctgtgctgcttggagaataacagtattttctccatcttggtttcccaaattgaaccaggtggaattaacatacagtaagatgcaacagatttgcacaagataagaaataataaagaacatttaaggaaaatccataaagtatcaaaagagagccttcctccctagcaggcagtgg

SEQ ID NO: 24516 - DNA, 600 bp, Chicken  19866894238964_3
tgccacagcaacggggttaatctctttaaaccaaagttatccaggtctgcccactgcacgctcacgatgtgcattgctgagcctcagccaaagcaaggagaatttgcagctgaagtaaacgggagctgtgctttgagcacatgcaacgctgcatgccttggaaaaactgaaagcaacatgaatgcaaagcagggaatgcttaccgtctctctgatgagcagagcagtgaagtcctggtcctcctgcccggcagccccttgttctggcacactgctagatccgagttcatgcgagccctgygctgggaaggccgggccgggccgctcgttgtctgtcgcctgccgtcccctcgtctcctctggtggatgtgctggctgcggcgaggcaggacctggaatgccatcctgctgtggctccggtctggggaaggccggccctggagcctcctctccatatgccctcagagatgctgaccctgcctcgggctgcccctgctgcggcacgcagccgttcagcacagcgcgcggctcctcgtccagcggctgcaggcaggggggacccggcgggctgctgtcctggatctcctgctctgtgttggtg

SEQ ID NO: 24517 - DNA, 390 bp, Chicken  19866894238965_1
tcttttcttcaccaacatttaggtagttgcccaaaatttttgtcacggagagatggtagctctgcattcgttaactccaacccttttgaacacaacgctttctctctttaatcttctcctgccaggtgctttcctcttctgctggacaccattttttgtggtccacattacaagggctctctgcaagtcctgcaccattcccactcaagtcaccagcatcgtcacctggctgggttacgtcaacagcgctgtcaaccccatcatttacactgttttcaacgccgagttcaggaacttctygttggggaggagggaaggagtaaagattgttcmaggatggcagctccaggatggtggttcccagccctctgtctccactgtgaggagtta

SEQ ID NO: 24518 - DNA, 357 bp, Chicken  19866894238965_2
tcttttcttcaccaacatttaggtagttgcccaaaatttttgtcacggagagatggtagctctgcattcgttaactccaacccttttgaacacaacgctttctctctttaatcttctcctgccaggtgctttcctcttctgctggacaccattttttgtggtccacattacaagggctctctgcaagtcctgcaccattcccactcaagtcaccagcatcgtcacctggctgggttacgtcaacagcgctgtcaaccccatcatttacactgttttcaacgccgagttcaggaacttctmaggatggcagctccaggatggtggttcccagccctctgtctccactgtgaggagtta

SEQ ID NO: 24519 - DNA, 569 bp, Chicken  19866894238968_1
agtcccccgagcccgcgccggacccctggcccagcgcgaaagccaggcggggcaggttgctctcggcgcggccgggcagcttctcctgcgacatgaggatgtcgtccagcgataagaagttctcctcggggcccaacccggggcccaccgggaaataagcctccgccatgctcacgcagcgactcccgctcagccgccagcgggcagtgctgcgcgtgcgcgcagagaactcccgcccgccgcgaaggcgggaacgggggctgaggggcgggcggtgctgcgggcgctctgcggctccgkcagagtgacgcccgctcaaagacggtcagattggtgctggtttattaaaatcctgcacggttgcatttttcactgagagaaataaaacacaagggtgcaggccaggacgtcagtgcgacctattcctgtcacgtcccagcagcatgtgctgcaggaacatgctgtgacaaatagattttccaaatgagttacaaagcaatttccaaaagtaccttcgaaatgacagtttagtaaaaagattccctttttcatcaagttagagggcagat

SEQ ID NO: 24520 - DNA, 600 bp, Chicken  19866894238972_1
aagcattaattacagctaagagtcaagcacacctttttatctatggctaaataaaaagtaataaagaagtaaaagatttgtctgaaggccagtgcctcctgaatgactactgacaaagcacaaaggttcatagcactgtgctgggacgtttcgatgcctcagcaggcatctgtattgctctacgcatgacccctgcctgtagggaaatggagcaggaatatatagagggttgtctgaagagaataggcagcatggacagccactttttgcactgcctgcagcaaggccaacaaggcttayctgccttggtggagatgtcagaccttacatagcaccgtgttttctcgtgagggattttatctccatgaaaggctgaaaagaataaaacatctcagcctggctagaaaggagagatccaggcttgtgccttctctgctggaaagacagatgagcagtgttgatctgagtcactctgttttgatacagtctgtcaggaacaatggaataagatacaacacttaaggcagcgtttctaaaaagtggcaaaaccacaacctgacgagcctgtgcaactcatcagcacagtttaccacagcccat

SEQ ID NO: 24521 - DNA, 599 bp, Chicken  19866894238975_1
  misc_feature (1)..(60): n is any nucleotide
nnnnnnnnnnnnnnnnnnnnnnnnnnnnnnnnnnnnnnnnnnnnnnnnnnnnnnnnnnnnatagagcagaggagctgaggggaggcctgatggtggctgcagcccctcacagggagcggaggggcaacgctgagctctgctctctgtgacagcaacagggcctgtgggaattgcgtggaactgtgtcaggggaggattagattgggtgttaggagaaggcgttttcagcagggggtggatggacactggcactggctgctcagggcagtgggcatggtcccaagtgctggagttaaggarcatttgtacaatgctcccacacaggttttggattttaggtggtccaggagctggactcaatccttgkgggtctctttcaacttaggatattctgattgcatggttctataaagttaagtctgaagtagttattttggggatgttttgtaattcataaaagatgcctttggaccaggaattgagtaagcttcttttgagataattcttatcttaatagatttttgcaaagggaatgaattattgctccaattaagtatgttgaatctctaaagattgagaaagttctgtagagtcaatat

SEQ ID NO: 24522 - DNA, 600 bp, Chicken  19866894238975_2
agaggagctgaggggaggcctgatggtggctgcagcccctcacagggagcggaggggcaacgctgagctctgctctctgtgacagcaacagggcctgtgggaattgcgtggaactgtgtcaggggaggattagattgggtgttaggagaaggcgttttcagcagggggtggatggacactggcactggctgctcagggcagtgggcatggtcccaagtgctggagttaaggarcatttgtacaatgctcccacacaggttttggattttaggtggtccaggagctggactcaatccttgkgggtctctttcaacttaggatattctgattgcatggttctataaagttaagtctgaagtagttattttggggatgttttgtaattcataaaagatgcctttggaccaggaattgagtaagcttcttttgagataattcttatcttaatagatttttgcaaagggaatgaattattgctccaattaagtatgttgaatctctaaagattgagaaagttctgtagagtcaatatgtctttttcaggatattagacttatttcatgaagttatcatatatgtgcagcaatatgaaagagcaga

SEQ ID NO: 24523 - DNA, 600 bp, Chicken  19866894238975_3
tgattgcatggttctataaagttaagtctgaagtagttattttggggatgttttgtaattcataaaagatgcctttggaccaggaattgagtaagcttcttttgagataattcttatcttaatagatttttgcaaagggaatgaattattgctccaattaagtatgttgaatctctaaagattgagaaagttctgtagagtcaatatgtctttttcaggatattagacttatttcatgaagttatcatatatgtgcagcaatatgaaagagcagatatttcatcaccaagagactgaaayattttgggagagctttccttgtaattaaaaaatartaggcataatggaacatttctctttcttgtttgaaggagaaacaggaaatggaatgagcactttctctcactgaaactcttctgagtggtttatgtgcatgtaatctttagaaaactattgtagtaatacrtgaatggtagagatatctaataactaccaccataagcatgcaggtattgctcagttaaatttgttacccttccttttttttacagaaagtataaaaacatttttatcaatctgtaatcaatagcaaagaagctg

SEQ ID NO: 24524 - DNA, 600 bp, Chicken  19866894238975_4
gttattttggggatgttttgtaattcataaaagatgcctttggaccaggaattgagtaagcttcttttgagataattcttatcttaatagatttttgcaaagggaatgaattattgctccaattaagtatgttgaatctctaaagattgagaaagttctgtagagtcaatatgtctttttcaggatattagacttatttcatgaagttatcatatatgtgcagcaatatgaaagagcagatatttcatcaccaagagactgaaayattttgggagagctttccttgtaattaaaaaatartaggcataatggaacatttctctttcttgtttgaaggagaaacaggaaatggaatgagcactttctctcactgaaactcttctgagtggtttatgtgcatgtaatctttagaaaactattgtagtaatacrtgaatggtagagatatctaataactaccaccataagcatgcaggtattgctcagttaaatttgttacccttccttttttttacagaaagtataaaaacatttttatcaatctgtaatcaatagcaaagaagctggagtagatgataaaaactaagcttgtttatttagt

SEQ ID NO: 24525 - DNA, 600 bp, Chicken  19866894238975_5
ttgaatctctaaagattgagaaagttctgtagagtcaatatgtctttttcaggatattagacttatttcatgaagttatcatatatgtgcagcaatatgaaagagcagatatttcatcaccaagagactgaaayattttgggagagctttccttgtaattaaaaaatartaggcataatggaacatttctctttcttgtttgaaggagaaacaggaaatggaatgagcactttctctcactgaaactcttctgagtggtttatgtgcatgtaatctttagaaaactattgtagtaatacrtgaatggtagagatatctaataactaccaccataagcatgcaggtattgctcagttaaatttgttacccttccttttttttacagaaagtataaaaacatttttatcaatctgtaatcaatagcaaagaagctggagtagatgataaaaactaagcttgtttatttagttctttgctttttttaaaaaatcttgtaatttgagattatgactcttacaggaaatttaaaagggcctttgtagcaaatgatccatcaccaaaacaagattacctattgtttctgagatttgaggctgctgg

SEQ ID NO: 24526 - DNA, 600 bp, Chicken  19866894238975_6
atctgtaatcaatagcaaagaagctggagtagatgataaaaactaagcttgtttatttagttctttgctttttttaaaaaatcttgtaatttgagattatgactcttacaggaaatttaaaagggcctttgtagcaaatgatccatcaccaaaacaagattacctattgtttctgagatttgaggctgctggtaatcttcagatccccagtgatggtaccacaccatgtacaagtatgttatggaagtgtatggtcactgtatatggatgataaaatctgcatatctttatttttttttwaatttcttcttctaccacttgatggtattatagggagtttttatgccttagcaccaaaatctgttgtgggtggaaagagttgagtgtattcacgcatgccatgaatatatctgttggtagtgaacagctaaaacttaatgtaaaaaaacttggaagggaggaggcaaacaccaaaagctgtttgcaagtcactagcacttgggttatgcagttttctgcattttgaagatgaaaatatattcatttgaaytttaaaaaaacaatttattatctagcagccattatcagtaagcatctcta

SEQ ID NO: 24527 - DNA, 597 bp, Chicken  19866894238975_7
atggtcactgtatatggatgataaaatctgcatatctttatttttttttwaatttcttcttctaccacttgatggtattatagggagtttttatgccttagcaccaaaatctgttgtgggtggaaagagttgagtgtattcacgcatgccatgaatatatctgttggtagtgaacagctaaaacttaatgtaaaaaaacttggaagggaggaggcaaacaccaaaagctgtttgcaagtcactagcacttgggttatgcagttttctgcattttgaagatgaaaatatattcatttgaaytttaaaaaaacaatttattatctagcagccattatcagtaagcatctctatgttcaaatcttatagagaactcctcataaatcatagcgtctagcagtattattttgtttttacaactatacagctatagcatgacatttcttgctggtatggtaatagacttctgcggtaatgtatgggtgatggttgttgtttaattactgttttttgtttgtgtgcatttctaacacagagaatcgtcctaattgcacagaattggctgtgacaggttctgctcttcctgtcatgttgactttt

SEQ ID NO: 24528 - DNA, 599 bp, Chicken  19866894238979_1
  misc_feature (1)..(201): n is any nucleotide
nnnnnnnnnnnnnnnnnnnnnnnnnnnnnnnnnnnnnnnnnnnnnnnnnnnnnnnnnnnnnnnnnnnnnnnnnnnnnnnnnnnnnnnnnnnnnnnnnnnnnnnnnnnnnnnnnnnnnnnnnnnnnnnnnnnnnnnnnnnnnnnnnnnnnnnnnnnnnnnnnnnnnnnnnnnnnnnnnnnnnnnnnnnnnnnnnnnnnnnnncgtgccatatctccacagcacagctctgcatgccagggctccatggcacagctccatacgccgtacctccgtggcacgtgggacttccacctctgcccygctgtcacccagctgaccctgtgtccccctgtcccacagggtgtttggcttcccggtgcactacacggacgtgtccaacatgagccgcctggcccggcagagactgctcggcagatcctggagcgtgccggtgatccgccacctctttgcgcccctcaaggagtacttcgcctgcgtttaggagagccggacggggactgtgccacggagcgcgtcggaaccgaaccatccatgccaagagaagagaaaacgcggagcgagagaagagccagcacccagcagagagacgggagcacggc

SEQ ID NO: 24529 - DNA, 600 bp, Chicken  19866894238979_2
gcgtttaggagagccggacggggactgtgccacggagcgcgtcggaaccgaaccatccatgccaagagaagagaaaacgcggagcgagagaagagccagcacccagcagagagacgggagcacggcgcggcggccgccggcacgcgcctccccgagcgcagggctcggggcctccccatccccaacgatcagctttcagcctatttaaaaccaggagaaaaaaaaaattaaaaaaaaaataagaaataaatcacaccaggacaaaaaaaaaaaaaaagaaagaaaacaaaaggaaaaatmaaaaaacccacaaaacagaaggaaaaaaaaaaacaaaaggaaaaaataaaatacggataaaacgcaacatgggaaatcaaaacacagaaataaacaaaaggaaaaaacaaaatacgaaaatagaaaacaaaaggaaaaaacgtaacatggaaaaacaccaaattatggcaaaacaaaatgtggaaagaaaacaaaatacagaaaaaaaacaaaacgcggaaaaacagaagatggaaaaacaaaagatggaaataaaatgtggaaaaaaaccaaagggaaaataacaaaatatggaataac

SEQ ID NO: 24530 - DNA, 600 bp, Chicken  19866894238981_1
accaaaatgaaacagaaacactcactagtttcatcatcacatcaggcatagtccacaataccactgccaaagagcagagtacagaataactggagtacaggtaaattaagaacattgtatgtaaatattttattctttcatattttgcaaatcagaaagcggtgttggtaataaaaataatacagaattattatttttcttccagtccacactcatatattaccaggtttcccgaattacagataaaactgcctcttatagtctaaacataacattcactttaagtatattctgtgcttytgccttgtttaatattattcttccgaactatttacaaatatattacaamctttagacctcaaagcaaaggagtatttcaataatcaatctgacgtaaggatcagtagctcctacataacttcagtgtttaagagaaactatacacgcagtgcggtaggtctgaataatttatatcttaaaaaaaaagaagaagaagaagaagaaaagcaacgaaagtttctgattacaaaactttcgcattgcagtggtacctatggacctgcctcgactggagggcaagagtgggatgtgatgtcgctg

SEQ ID NO: 24531 - DNA, 600 bp, Chicken  19866894238981_2
agtccacaataccactgccaaagagcagagtacagaataactggagtacaggtaaattaagaacattgtatgtaaatattttattctttcatattttgcaaatcagaaagcggtgttggtaataaaaataatacagaattattatttttcttccagtccacactcatatattaccaggtttcccgaattacagataaaactgcctcttatagtctaaacataacattcactttaagtatattctgtgcttytgccttgtttaatattattcttccgaactatttacaaatatattacaamctttagacctcaaagcaaaggagtatttcaataatcaatctgacgtaaggatcagtagctcctacataacttcagtgtttaagagaaactatacacgcagtgcggtaggtctgaataatttatatcttaaaaaaaaagaagaagaagaagaagaaaagcaacgaaagtttctgattacaaaactttcgcattgcagtggtacctatggacctgcctcgactggagggcaagagtgggatgtgatgtcgctgtgcttgtacagcgcctcgtccaagtccagcgccttgctcctcagcttca

SEQ ID NO: 24532 - DNA, 600 bp, Chicken  19866894238986_1
aatgttgtctttcttgacgtgcagaatcaaactctataaacacaaagtaattataaagtcaggtatgtttaatcaatgctgcacagacgctgaatgcaaggggggatagctcctcctaacttgcacaccttcaggaaaaagcgtgcgtacagatataggcgtgaactaatacataatcagtagttgacaggaattgggatacatattcattacattcccgagagctcattagcatgcagcccctccccccttgcacgtgcgtagtaagtcatgaaggatgaaggctcgtagtcttccttygcaaaggcttgtagtcttctttgctgcaaacttctgaccccaaagggggaagcatcccccaaaccagtttcagcttgccctgtggacatctaatcacctccctgtcagaagtcctcaggctgttctcaagtccttatctttatggctttcatcccccttgttattctagacctggtgtctgtgaaatacaatcccttattttctaacactctctacataaactatctctatttgctcctatctcagtttctgggaagctcctttcycttttcttactgtgaggttcttctgtcatttact

SEQ ID NO: 24533 - DNA, 600 bp, Chicken  19866894238986_2
agtcatgaaggatgaaggctcgtagtcttccttygcaaaggcttgtagtcttctttgctgcaaacttctgaccccaaagggggaagcatcccccaaaccagtttcagcttgccctgtggacatctaatcacctccctgtcagaagtcctcaggctgttctcaagtccttatctttatggctttcatcccccttgttattctagacctggtgtctgtgaaatacaatcccttattttctaacactctctacataaactatctctatttgctcctatctcagtttctgggaagctcctttcycttttcttactgtgaggttcttctgtcatttactgcagggtcctgttctcattcttcattctgacagaaatccacacatgttggacaggtttaagtaggagttcctaaacagttttgtcatttattcccttgtatctacctatttctgcctcagtcagtttcagcttttagaaaatctctggtgtaaacttgttcctttcacgcttatgttactgagagtagaagttggccttttgtgtacggatgttgcagtaaatgactgttgctagacagagattaatctatcaaattttgaaagat

SEQ ID NO: 24534 - DNA, 600 bp, Chicken  19866894238989_1
tttggcagcaaaagccacgtttaatagacacactgcctgtgaaatgggaaagaaacaaaagcagttttctacacaaatgtcatgtctcttttgcagtattttgccttgcccagctcccacaccctttgttttccaggttacagtgtccatgcagcacagtctctttcctcatcatcctcagccacctgttccttcaggctcaccagaacctgcccttttgggcaaggagaggatctagcacaccctgaaggctcccgtaccagctgggcagtcaggaagcacagaattatagaatcattrcaattggaaagacaacaaagatcatctagtccaaccattaacccaccacccatgccgactaacccrctaacccagtgccacatctttccttgaaaacatctaaggatggtgactccaccacgtcctcgggcagcctgcaaggctgtgcatacctcaccactcttctgagaggaaacttttcctaacatccaacctgaatctcctctggcacagcctgaggcccctacctcttgtccgatcactagttactggcaaaagaggccagcctccataccacactacaacctcctttcaggtagt

SEQ ID NO: 24535 - DNA, 600 bp, Chicken  19866894238989_2
ttctacacaaatgtcatgtctcttttgcagtattttgccttgcccagctcccacaccctttgttttccaggttacagtgtccatgcagcacagtctctttcctcatcatcctcagccacctgttccttcaggctcaccagaacctgcccttttgggcaaggagaggatctagcacaccctgaaggctcccgtaccagctgggcagtcaggaagcacagaattatagaatcattrcaattggaaagacaacaaagatcatctagtccaaccattaacccaccacccatgccgactaacccrctaacccagtgccacatctttccttgaaaacatctaaggatggtgactccaccacgtcctcgggcagcctgcaaggctgtgcatacctcaccactcttctgagaggaaacttttcctaacatccaacctgaatctcctctggcacagcctgaggcccctacctcttgtccgatcactagttactggcaaaagaggccagcctccataccacactacaacctcctttcaggtagttgtagagagcagtgaggtctcctctgagcctcctcttctccagactgaacaatcacagagtccttg

SEQ ID NO: 24536 - DNA, 600 bp, Chicken  19866894238989_3
tcctcgggcagcctgcaaggctgtgcatacctcaccactcttctgagaggaaacttttcctaacatccaacctgaatctcctctggcacagcctgaggcccctacctcttgtccgatcactagttactggcaaaagaggccagcctccataccacactacaacctcctttcaggtagttgtagagagcagtgaggtctcctctgagcctcctcttctccagactgaacaatcacagagtccttgagtgaaaggtaaaaaggtgagcctgtgttgtcccccatgcaaacaagagcagagtkcatacatgctgtcagcccctctcaggaacttttcagtctaattctccactgcccagtctggtggaagaaggtggtgaaataagacctcctctttggttacagtggtatgatagtgttttacactcgctttgcaccgaagtaaatgattgcatgaggtgtgaggcagtggagaatcaggcttctgaaggctttttgcaagatgcaaacaaataatgtctgcattgtgagtgcaatagcagtaggaatgaaatcaagactccttgcagaagagttgttcagtcattgaacgagcaaacaatt

SEQ ID NO: 24537 - DNA, 600 bp, Chicken  19866894238991_1
ggcttttaacagcagtctccaaatatcggggctcagttggacagtcatcaactgggcagtcaggacatactccccaaatatatctgggtggaacttttttattcaaacaaaacaatgccattagagtggaattctcagaaccatagggacatgctagcagtgtaggtcactccaaacacatctgtgcccccagcccaacccacctgaactccagagtagcaatatgttcatggtctcactctgcatttttgaaaatgtcattggattcagaggcacttcagcaaaaagctcaggctgcakagttcttatgcagctgctgttcttacttgcccttcacaaacccgtaaaaatactctttgggccacagggtaaaagcccagatagaagccataggtttcccaggcatgaaaacagctattctctgcattgctttgtgctgcaggactgctctggccttatgatcactgacctgagaaaaataggtcaggtgaaagctaatggagacaccgtgttgccataattacgactaaaatgcaaggtaaaactagatggcaaactacttttgcagtcctttttaaaagtgggtgtaataagtaaaga

SEQ ID NO: 24538 - DNA, 600 bp, Chicken  19866894238996_1
gcgaaggtgaactgttctccaagcatgactgtgacagaagcttcagctcctggaaaatgactacttgtagagacctcagtttggatacctttttttgaacagaattgcactggaaagtttccttttgttgcaaaataaaacatttcactctaggaaaatgaagggttgtattcccagcaatgccaggaaaagaaaactttcttttctgtattgtttcaggacttagagcattacagatttgtttccttccactgcttgtgaggactggaatacatatttcctacttgacaatgtataggratgtaatttgtcttttcagcacccatagttataaatcaagcttgtaaagcaatcttcatccagggagtgtccaaaatggtagacaagaatgtcatttgaatatgcttttgtgcctgtgactgtataagttgcttatgtccagaagaggaactttaataggaaagacccaagctgaagtttcaaaagaagtagcattccagtgtttcaagacattaatgccctacagctcattcccatattgtgaggtgtcaccgctcttctgtggtaccaacatagccgcctgtgtggctgcactgtgaa

SEQ ID NO: 24539 - DNA, 600 bp, Chicken  19866894238998_1
gaaaaacaatattgacttcagaactacagtgaactatgaagctttatgttttaatcagattaagagaaatcttcatcaggtttcctaactgtgctgaggttccacttcagtgatataagctctatctgctttaaaggaatttagcagagctatgagatgtggagtgtctgaatttggaagactgaagttctgaaactagctggggaaaagatcaagactctttttcgccatgatggtgcaatgtactgctgttgcaagcagagaggaaaaattgctgtccaaagtaatgagaatagtagstagatgctgcatgaggggcagtctttctgctactgrttatgctccacagaagcattcacaggacgtgaaatcacacagttggaatatggaaccaagcatccccctcatacaaggggcgttctgtgaatgtgttccttttctgactgcattgcctctctgttctcatccaactttcctgaaatgaatgaggaaggcttaagaatgccactgaaaaaatatggggcatgtggctgttggtgatttgtgtgaggttagggtctgtatttgtaagcatgaagttgcaagcaagagattatgaga

SEQ ID NO: 24540 - DNA, 600 bp, Chicken  19866894238998_2
tgaagctttatgttttaatcagattaagagaaatcttcatcaggtttcctaactgtgctgaggttccacttcagtgatataagctctatctgctttaaaggaatttagcagagctatgagatgtggagtgtctgaatttggaagactgaagttctgaaactagctggggaaaagatcaagactctttttcgccatgatggtgcaatgtactgctgttgcaagcagagaggaaaaattgctgtccaaagtaatgagaatagtagstagatgctgcatgaggggcagtctttctgctactgrttatgctccacagaagcattcacaggacgtgaaatcacacagttggaatatggaaccaagcatccccctcatacaaggggcgttctgtgaatgtgttccttttctgactgcattgcctctctgttctcatccaactttcctgaaatgaatgaggaaggcttaagaatgccactgaaaaaatatggggcatgtggctgttggtgatttgtgtgaggttagggtctgtatttgtaagcatgaagttgcaagcaagagattatgagatttttagatatgggttcttcacctcatctgtcaagc

SEQ ID NO: 24541 - DNA, 600 bp, Chicken  19866894239000_1
atcctacttggacactgacaaacatcacaatgccttcaatcccactaaggttcattttccaaatattccttggtttaggtggaaaaaacagatgaacaaaccatgattttgtggagtaacgtccctgatgaatcaatttaggaccagacatttccccaacaagaacttaatagcattcaagcttaaacagagaagaaaaagcacacaatcgtatatcttcctgagaaatttttgaatgtagtttagtaaaactgatcttcagaggatgcagcagatgaattgtgtttaaatgaaaccaaygtgttttaagcacagctgctgctttccagactttggaaatactgagtgaagttgagcaccatgctttgggtttactccatgtgctgcacaaagatgtaaggcacacacaggtagggcagcattcctggctcctctctgcagttttcatgccagaacttaaacattttcccctggaatggcagaacctatccatcattccagttatcagcttggatgcagatccaacttcatcactcggtaagttggaaaaactctcattagcatctgtgcatgcggggagccctaagaacacctcattaa

SEQ ID NO: 24542 - DNA, 600 bp, Chicken  19866894239001_1
gtatttgtgctagagattaacattgatgttattttctttaatgtctgtttattgtgtatgctactcatgttggcactcagaaaattcagccagaggagaaaaacaatagtattaattaggaatgtcagtcatgggtgttatgaaattcaaaactgccaagtttccagtgcagtttggtggtaattataatagactgtggagacaagctgttctttgttccctctaaagaaatgcacagtttgatgggcttgttatcaaagtgctaatgcaaatcccggtgaatgggatatagtttctagrgaaagttttggatgttttaaattttgttttcaaagatctgttgccacaactaattcatcaatagtagtgcctgcctccttttcagtgctgttcaccgcagggtctttccgtgttccatgaattatcctcatttcacaaatggcaattttggcatgataaagcaaagttaatttaatggagtttacccagtcatggactgagctggatgctggtgttggctttcacctgtgtattgccttttttttttccccaggagagttagaaatcaaagatgcatgctgctgaatttctgattaatgg

SEQ ID NO: 24543 - DNA, 600 bp, Chicken  19866894239001_2
tagtgcctgcctccttttcagtgctgttcaccgcagggtctttccgtgttccatgaattatcctcatttcacaaatggcaattttggcatgataaagcaaagttaatttaatggagtttacccagtcatggactgagctggatgctggtgttggctttcacctgtgtattgccttttttttttccccaggagagttagaaatcaaagatgcatgctgctgaatttctgattaatggttttcaaactgatctgcaggcttgcatgaggcatgtatgataaaagctacacaaaccgtattcrtggctgcttaaatttgctctacaggggtttyctctccaccagaataattatcacatcacacaaactgcaaaggttgtgacccactaggaaggaaagatggtactcggacaccgttagcgagccctgcaggcagcactgagctatctgcaggattgggctttgatcctgaactgttaaaaaaaaaaacaaacaaaacaccccattttactaagtatgcttaaaatgtgttgccatcattcactacaaagtaaagtcctcacaaagtcatgcaaatcaaaaacagtctgagatttttctttt

SEQ ID NO: 24544 - DNA, 600 bp, Chicken  19866894239001_3
cgcagggtctttccgtgttccatgaattatcctcatttcacaaatggcaattttggcatgataaagcaaagttaatttaatggagtttacccagtcatggactgagctggatgctggtgttggctttcacctgtgtattgccttttttttttccccaggagagttagaaatcaaagatgcatgctgctgaatttctgattaatggttttcaaactgatctgcaggcttgcatgaggcatgtatgataaaagctacacaaaccgtattcrtggctgcttaaatttgctctacaggggtttyctctccaccagaataattatcacatcacacaaactgcaaaggttgtgacccactaggaaggaaagatggtactcggacaccgttagcgagccctgcaggcagcactgagctatctgcaggattgggctttgatcctgaactgttaaaaaaaaaaacaaacaaaacaccccattttactaagtatgcttaaaatgtgttgccatcattcactacaaagtaaagtcctcacaaagtcatgcaaatcaaaaacagtctgagatttttcttttgcaagaggaaaacatcaggcttgagctgtat

SEQ ID NO: 24545 - DNA, 600 bp, Chicken  19866894239005_1
aattttactacaaactgaggaatgtatctgtaggtaaggtgaatgctaaaacagttttaacgctggaagcaaccagtgactggcacaatactgccatctaacagagggggaatgcaaaacatttggagatctttcaactgtatttacaaaacacttgctgatactaaaatacatggaggataaatattcacaaaatacagtaagccttcgtaaaccatctattacatatttgatttttgttcctgcacatcagcaaattcatctacaatacatgaatttcttgaggttttagctaaagcrtttactgaacatctgttcttactcttagcagttgtacttaatacaagttattatttgccagttatttacagttatttttttaaaaaaccaactcaattattttcaaaatatttttttccccatttatttcggcgtgctttcaargtttgatccagtcacatactctcaggtgttgaacccaaagaccagtgtgtttgtatgcacttggagtcactgaattaataagtgaggcaatgaagtgtatctacctgactgagggtgagacacaactgaaccatttttgttcacttttcattagac

SEQ ID NO: 24546 - DNA, 600 bp, Chicken  19866894239005_2
gcacaatactgccatctaacagagggggaatgcaaaacatttggagatctttcaactgtatttacaaaacacttgctgatactaaaatacatggaggataaatattcacaaaatacagtaagccttcgtaaaccatctattacatatttgatttttgttcctgcacatcagcaaattcatctacaatacatgaatttcttgaggttttagctaaagcrtttactgaacatctgttcttactcttagcagttgtacttaatacaagttattatttgccagttatttacagttatttttttraaaaaccaactcaattattttcaaaatatttttttccccatttatttcggcgtgctttcaargtttgatccagtcacatactctcaggtgttgaacccaaagaccagtgtgtttgtatgcacttggagtcactgaattaataagtgaggcaatgaagtgtatctacctgactgagggtgagacacaactgaaccatttttgttcacttttcattagacatagaaataaatgttctattcttgtctttttttttcccccacaagacttcttgtcttttcagacacatgggttgccttgtca

SEQ ID NO: 24547 - DNA, 600 bp, Chicken  19866894239005_3
acatttggagatctttcaactgtatttacaaaacacttgctgatactaaaatacatggaggataaatattcacaaaatacagtaagccttcgtaaaccatctattacatatttgatttttgttcctgcacatcagcaaattcatctacaatacatgaatttcttgaggttttagctaaagcrtttactgaacatctgttcttactcttagcagttgtacttaatacaagttattatttgccagttatttacagttatttttttaaaaaaccaactcaattattttcaaaatatttttttrcccatttatttcggcgtgctttcaargtttgatccagtcacatactctcaggtgttgaacccaaagaccagtgtgtttgtatgcacttggagtcactgaattaataagtgaggcaatgaagtgtatctacctgactgagggtgagacacaactgaaccatttttgttcacttttcattagacatagaaataaatgttctattcttgtctttttttttcccccacaagacttcttgtcttttcagacacatgggttgccttgtcaaataatctgtgtagttaccatttactcctgtttatg

SEQ ID NO: 24548 - DNA, 600 bp, Chicken  19866894239005_4
tacaaaacacttgctgatactaaaatacatggaggataaatattcacaaaatacagtaagccttcgtaaaccatctattacatatttgatttttgttcctgcacatcagcaaattcatctacaatacatgaatttcttgaggttttagctaaagcrtttactgaacatctgttcttactcttagcagttgtacttaatacaagttattatttgccagttatttacagttatttttttaaaaaaccaactcaattattttcaaaatatttttttccccatttatttcggcgtgctttcaargtttgatccagtcacatactctcaggtgttgaacccaaagaccagtgtgtttgtatgcacttggagtcactgaattaataagtgaggcaatgaagtgtatctacctgactgagggtgagacacaactgaaccatttttgttcacttttcattagacatagaaataaatgttctattcttgtctttttttttcccccacaagacttcttgtcttttcagacacatgggttgccttgtcaaataatctgtgtagttaccatttactcctgtttatgctgtttctaattaccttttccagatc

SEQ ID NO: 24549 - DNA, 600 bp, Chicken  19866894239006_1
aaacaaaacaaaacaaaacaaaaaaacctcatccagaaatacacaggtgcgttttcctcagtctttcttcattatttttgcaattatttttatttcactattatatgatatgacattttttaagaatttcaaatattacaaagataaaaataaataaacagaaaaaaaataaagacattacattttcagacataaatgtatagctttttgagactgaggaaaagtataatcataaaaatgcttgagttgggagggacccactttgctcacagccccacgcagcgcggtcctgaacaattycagaaagggggcatcctcccactcctctggacaacctgttacagtacatcatagccctcacattgaattatttcttcttaccatctaacttaccctcttttagattaaaaatctttacactacactctgtgataaacagtgtcttctcacacgtcctttaggcctcctttaagtactggaaggagacttgtaaggtattcctggagctttctctaagctgaacaaccagttcagccctctcatcatctttgttgacctttactgctctagcaggtcaacgtctttttatactgaagacac

SEQ ID NO: 24550 - DNA, 600 bp, Chicken  19866894239008_1
acacacaaaatcaaatgcaaaaaaaggaaaattctgagctgtaagctttaactatcactttagatgtgttgtaataatttcccttatgcagagtgaattaactggataaatatcagctgatactgatagtttaacgtttctggtagttttacctcaatgtaatagcatggaaatgaattatctatccactgttcggtcgcagatgtgtgttggaggtcagttgttcaaaaggattgggggagaggttttcttatcctatgccaaacatggattttggggtcctgagccaaattttcaacrtcggcaattggtttactcatagttgccaaccgtgtaatacaattaatggttaacacagcaaggatgagttatcagaggatcgcagtgagattaactaaatctcacctccttcaatcatggcaggaagtatgaatccctgcagttactgttatgtatagtgcatctcctacttaagaatgcattaaccagcggaagtctagtttaaatgtgtgtgcagcactattggagaacttgatttaacacttaaaaaactttgagttatattggatatggtgatgcatttccacgttctttgctgtt

SEQ ID NO: 24551 - DNA, 568 bp, Chicken  19866894239014_1
aaagggtggatagtgataggacatgggggaatggttttaaactgagacaggggaggtttaggttggctgttaggaggaagtttttcactcagaaggtggtgatgcactggaacaggttgcccaaggaggttgtggtgccccatccctggaggcattcaaggccaggctggatgcggctctgggcagcctggtctggtggttggtgaccctgcacattagcagggggttggaactggatgagcattgtggtccttttcaacccaggccattctatggttctgtgaacttctgcaatttacyatgatgccatgtttcaacacaacatttcttaactgctcttggctatgctcctctcactgcactgcattacatggacatctctggaagtgtcattatgcacttgttggctccccagcccaattttgatcaaatgataaagaggccgtgaacccactgagaggggtggcagatggaaatggactgtgagctggaggaattgctccgtgccaggagtgagaggtgagacaccgggacacgtgctctcctctccaattttctcccattattg

SEQ ID NO: 24552 - DNA, 600 bp, Chicken  19866894239016_1
ttcccttcctccctccctcccttcctcccttccttccttccttccttcctcccttcttttttccactttacgcaccaaccagcacccccacttatcatttccttgtttacagcaaggtgagtcgtatttacagtgctgggaaatttgtcaggagatgcattctgctcgtcatctgtttcttccccatttcagaaagcaattagcaggcggagcatgtgaataacaaaatgtgctggaaggggctgctcacccaactgtgccgaacaaaacggctgctgtcagttcctgcaagctgacagktctgacaccagggtataacccaggtcctgtaagcaaagatgccctgatctggcaagtcagcgggaaagagaagaaagaggtacacaagtaacagcaggtggatattagggattttgagagaacagtgttggggcaaagaatggccattaggaacatagagcgtaaagcttagtccttcctctttccagctgaagagctgggaaatatggggggaaataacttctgttgtactgacttctgctgcttctgatgcagcctgagctgaggtagtgtgtgaggctgaggtgtttcagctaggag

SEQ ID NO: 24553 - DNA, 600 bp, Chicken  19866894239020_1
caggtcacttccattatctgagtaattcatgtttgaccttctacaggttgttctttgttgaaggtgcactgtttttgttgggtttttttattgtgcatcttgttattaatgttgtctggctgcagtagtcttccaattaagtgccaatgttgatttgacagtttgcgttgctctggcttctaagtcttgtagacagcagctgttttctgtgcgcactctttaaatttaaccatagcaattaggaagtaatctctgaatgcctcagaatcctgttctttgtttgagtgtttagggggattratgctctatgccctgcaagcttacatacagatggagaatttctgtatgctgcatgctgttgttttctcccatatagcactgttatgacatgtaaaacttgtcataacttcatgatggagattactgtatctgtttgattttattatgagcatgatgggatttgcatctttattcttcatttaatgctgcaatttataaaaggccattgacttgatgtaagacgtggttttaatgctgcacactaaaattgagcaagactttacaagaagctctctgtgctttggaaccttctgtaactgg

SEQ ID NO: 24554 - DNA, 600 bp, Chicken  19866894239020_2
tgtatgctgcatgctgttgttttctcccatatagcactgttatgacatgtaaaacttgtcataacttcatgatggagattactgtatctgtttgattttattatgagcatgatgggatttgcatctttattcttcatttaatgctgcaatttataaaaggccattgacttgatgtaagacgtggttttaatgctgcacactaaaattgagcaagactttacaagaagctctctgtgctttggaaccttctgtaactggtgcctggagcagtcttgatgggtgtataattaaaagaaactrtaatatcaataatcaagctgtttgctttctcttctggtgcctgaataccaaagggctgggaagaaggaatgatggggatgaagaaaggaggacgacgctatctcattattcctccagcctgggcctatgggactcagggagtggctggccgtgtccctccagactctactttagtttttgaggtggaggttaggcgggtgagtgtcttctcccaagtatttatcttgcaactcctttgttgctggatggtaccatctgtctgcagaaacctgctgtttgcatgagaactgtagctcagaa

SEQ ID NO: 24555 - DNA, 574 bp, Chicken  19866894239021_1
cggatagctcatggaaggtgcgacacttattatttgtagaataaaatcggactttaaaaaaaaaacctaataacaacaagaacaaaccaaggacgcagcttcttgcttgcagcgcggggccgggcggggggccgggccgggtgctcacagcggggctgcccggcagcgggaggacgggcgcgcactgcggggctccgggacgcgcggtcccggaggtgcaacccgcggggagcggccgcagtcagcaacaggtcggcgcccgacggcagcgacgcttccccgcacaaaggcagccgctgycctcgctcggagcccgcagaaaacgcgcggctcgcttgggaacggcccggccggggcagtggggcggggggaggcggcggggcgctgctccccgtcagcccctcctggactgcagcgagcccggtgacgggagggagctcccgtgctcagacggcgcccaagtaccgacccgggcttgtttgccgtttggttacgtgccttcttcaccaagagaaggattcttccagtcaaggggcaactcgcatgccaccatctttattcaaaggcaggcaca

SEQ ID NO: 24556 - DNA, 600 bp, Chicken  19866894239027_1
gttggcatggttatgtggtttgggaatgggtgttgtgttttttaaactgatggagagcaaagctttaggaagcgggcaggagaaaagagcagcaaagggagccacaagttgcatgtctctaggcatgatcatttgcaagagcagtcagaccaagattccccaggtctttggaactgtggggaggtgaagacagctgttgttaacaaagcagtcttctgttactcccataagaactggaattactcatgggaatttatcataaagcttgtagggttagggagcctggcacacttttcttgyttctggactccttgtgcacataagtcccatcaaacacatgcatcatgatggctatctggaacatggatctgagattgagtgtttaaggtgttcagtcamakatctgtccatctttgattcatcttggtagctacagtctaaagataaataatctgagttgtgttcaggcatacttaagcttcagaacatctcttgttggatcactgtaattcattcctatagagtagatgaaggaaatgtagagtagatgaagattggatccacatgttccagtggggccctggactccaccaaggagct

SEQ ID NO: 24557 - DNA, 600 bp, Chicken  19866894239027_2
agccacaagttgcatgtctctaggcatgatcatttgcaagagcagtcagaccaagattccccaggtctttggaactgtggggaggtgaagacagctgttgttaacaaagcagtcttctgttactcccataagaactggaattactcatgggaatttatcataaagcttgtagggttagggagcctggcacacttttcttgyttctggactccttgtgcacataagtcccatcaaacacatgcatcatgatggctatctggaacatggatctgagattgagtgtttaaggtgttcagtcamakatctgtccatctttgattcatcttggtagctacagtctaaagataaataatctgagttgtgttcaggcatacttaagcttcagaacatctcttgttggatcactgtaattcattcctatagagtagatgaaggaaatgtagagtagatgaagattggatccacatgttccagtggggccctggactccaccaaggagctatgcagggacaccaaggaacatggtactggtcctctccccgctccagctggaggcaggaagcagcactagctggggaggaggtgataaatgctggccat

SEQ ID NO: 24558 - DNA, 600 bp, Chicken  19866894239027_3
ccacaagttgcatgtctctaggcatgatcatttgcaagagcagtcagaccaagattccccaggtctttggaactgtggggaggtgaagacagctgttgttaacaaagcagtcttctgttactcccataagaactggaattactcatgggaatttatcataaagcttgtagggttagggagcctggcacacttttcttgyttctggactccttgtgcacataagtcccatcaaacacatgcatcatgatggctatctggaacatggatctgagattgagtgtttaaggtgttcagtcamakatctgtccatctttgattcatcttggtagctacagtctaaagataaataatctgagttgtgttcaggcatacttaagcttcagaacatctcttgttggatcactgtaattcattcctatagagtagatgaaggaaatgtagagtagatgaagattggatccacatgttccagtggggccctggactccaccaaggagctatgcagggacaccaaggaacatggtactggtcctctccccgctccagctggaggcaggaagcagcactagctggggaggaggtgataaatgctggccatcc

SEQ ID NO: 24559 - DNA, 600 bp, Chicken  19866894239027_4
cagtctaaagataaataatctgagttgtgttcaggcatacttaagcttcagaacatctcttgttggatcactgtaattcattcctatagagtagatgaaggaaatgtagagtagatgaagattggatccacatgttccagtggggccctggactccaccaaggagctatgcagggacaccaaggaacatggtactggtcctctccccgctccagctggaggcaggaagcagcactagctggggaggaggtgataaatgctggccatccccacagagcggctgaaggccggagccatcccystgcttttcmaaacaccacagaaacggcagcagggctgtggctgcgtcccaggcagaatatatgttcccataaaactcagcttacgagctcttaccactatcaaaaaccactggaatgttaaaacaccttgttactagtggcaaccattttctgctagtctaatttttgtcctttcgaggagtgggaggagatcaagtcacatttcttgtttgcttgggaagccgtcgtgtcctttgctttttgctgtgcaggtcagccctcccacagcctttcacagtccgtgggcaaggatttacaag

SEQ ID NO: 24560 - DNA, 599 bp, Chicken  19866894239027_5
agtctaaagataaataatctgagttgtgttcaggcatacttaagcttcagaacatctcttgttggatcactgtaattcattcctatagagtagatgaaggaaatgtagagtagatgaagattggatccacatgttccagtggggccctggactccaccaaggagctatgcagggacaccaaggaacatggtactggtcctctccccgctccagctggaggcaggaagcagcactagctggggaggaggtgataaatgctggccatccccacagagcggctgaaggccggagccatcccystgcttttcmaaacaccacagaaacggcagcagggctgtggctgcgtcccaggcagaatatatgttcccataaaactcagcttacgagctcttaccactatcaaaaaccactggaatgttaaaacaccttgttactagtggcaaccattttctgctagtctaatttttgtcctttcgaggagtgggaggagatcaagtcacatttcttgtttgcttgggaagccgtcgtgtcctttgctttttgctgtgcaggtcagccctcccacagcctttcacagtccgtgggcaaggatttacaag

SEQ ID NO: 24561 - DNA, 590 bp, Chicken  19866894239027_6
ataaataatctgagttgtgttcaggcatacttaagcttcagaacatctcttgttggatcactgtaattcattcctatagagtagatgaaggaaatgtagagtagatgaagattggatccacatgttccagtggggccctggactccaccaaggagctatgcagggacaccaaggaacatggtactggtcctctccccgctccagctggaggcaggaagcagcactagctggggaggaggtgataaatgctggccatccccacagagcggctgaaggccggagccatcccystgcttttcmaaacaccacagaaacggcagcagggctgtggctgcgtcccaggcagaatatatgttcccataaaactcagcttacgagctcttaccactatcaaaaaccactggaatgttaaaacaccttgttactagtggcaaccattttctgctagtctaatttttgtcctttcgaggagtgggaggagatcaagtcacatttcttgtttgcttgggaagccgtcgtgtcctttgctttttgctgtgcaggtcagccctcccacagcctttcacagtccgtgggcaaggatttacaag

SEQ ID NO: 24562 - DNA, 599 bp, Chicken  19866894239031_1
  misc_feature (1)..(51): n is any nucleotide
nnnnnnnnnnnnnnnnnnnnnnnnnnnnnnnnnnnnnnnnnnnnnnnnnnnatctctgtgttcccagatgtctttgtgatgttgtgccagacaaataaatggttgctactgaagtacgctgctcctgtacatgtaaatatatatatatatttgttggtttttttcctgtgaagggaaaagaatgcctggtgcctaaaggaaacataaaggtaagttctgtgttaagaagctgtttttgtcacacgcagccaaaaatctattataggttagtgctctaacattggaagacctttaaaggtmgaaatgtttgccaaataaaatatatcatccaaccgaaaattcatttttgtccagaacacttggagctagaaaactgagtagatttgcaggtgttgtggttagaaacaatttcccctaagaaagaaaaagcacttttcttattacctgcttcctgcatggtagttttttttcttttatcataataagtcttgtgtgtgtagcagtgaagtgactgtcttttctcaggtcagtctgaaattgtaagcttcactgcatcctaaatcatctacagaccaaccaggtgtgagcaggggaaggct

SEQ ID NO: 24563 - DNA, 600 bp, Chicken  19866894239035_1
cttgcctacagctgctcgagtaattaagagctgcaaatcagtctctgctactttctgcttggcttcttccaacacaagtagtattgcatggctttttatccaggaatatgcaagtgctagcctaaaactcacgtgcatgaatttcagggttagttatcctcttagtggtgggagtcaaagtacaccagcagttccaaactcaggtacttcaggggctgaaggctatctattgcctgatccaacttttagtgtttgtcagtcattgcacaaaggataccattcacacttcattatttcatygactgtacatccaacatactgaaaaagcttcaacaaaatcccttccatttaacttgtcccaccaaatacaaccttagttacaagtgtttgtatgacgtcttccgaaacagaaaatgatggttcaaatgctgattatataaatgagttgttctgagaaaaatgtgtgttagaataagtcagagccacaggagaaattcaagagattgtaaacagacatagcaggtttcatactctattaccagtaatgtaagatacacatatgtaaggcaaagtacatatttaaaacacacttacttacat

SEQ ID NO: 24564 - DNA, 599 bp, Chicken  19866894239036_1
  misc_feature (1)..(1): n is any nucleotide
nacaaatatccaaaagcatattgctgacaccttgcacaagaatgttgcaaaatccagctatgtttaaggttagaaacagatttcttacatcaagtgtgaatttcttcattgcatttgctcttgtgccagccatgttccttaatctcttgtctctcctctgccgctgtctacagtgcatccatatatacagaccatgctgcctttgatttggttttgctatgccaatgcagccgttctctcagcctcctcatgtacaaggtccaagtttttctttaaaagattgactagagttgtccattrtgttccaggtaagctctcacctgtgtttcttacaacacacctcctagtttctttggaggatactgytcaggctgttagttctccatctgtaaggacatacacagggacaagctggtcagaccaaagataagttactgttggttgtcagtctgcaaagmtgatgtcctgctacattgcagtaacctatgtgcacctcagcagggacctacatttgcaagttctgtaatcagactttgaaattcttttgcaccgaaattgcttcaaccattaatttcttcagtttgatgctgttaacaggt

SEQ ID NO: 24565 - DNA, 600 bp, Chicken  19866894239036_2
aggttagaaacagatttcttacatcaagtgtgaatttcttcattgcatttgctcttgtgccagccatgttccttaatctcttgtctctcctctgccgctgtctacagtgcatccatatatacagaccatgctgcctttgatttggttttgctatgccaatgcagccgttctctcagcctcctcatgtacaaggtccaagtttttctttaaaagattgactagagttgtccattrtgttccaggtaagctctcacctgtgtttcttacaacacacctcctagtttctttggaggatactgytcaggctgttagttctccatctgtaaggacatacacagggacaagctggtcagaccaaagataagttactgttggttgtcagtctgcaaagmtgatgtcctgctacattgcagtaacctatgtgcacctcagcagggacctacatttgcaagttctgtaatcagactttgaaattcttttgcaccgaaattgcttcaaccattaatttcttcagtttgatgctgttaacaggtttgtttgttgtcagcactttcatctctgaaagtgctagtaatcatttatttcaatctttgcaatctt

SEQ ID NO: 24566 - DNA, 600 bp, Chicken  19866894239036_3
tgccgctgtctacagtgcatccatatatacagaccatgctgcctttgatttggttttgctatgccaatgcagccgttctctcagcctcctcatgtacaaggtccaagtttttctttaaaagattgactagagttgtccattrtgttccaggtaagctctcacctgtgtttcttacaacacacctcctagtttctttggaggatactgytcaggctgttagttctccatctgtaaggacatacacagggacaagctggtcagaccaaagataagttactgttggttgtcagtctgcaaagmtgatgtcctgctacattgcagtaacctatgtgcacctcagcagggacctacatttgcaagttctgtaatcagactttgaaattcttttgcaccgaaattgcttcaaccattaatttcttcagtttgatgctgttaacaggtttgtttgttgtcagcactttcatctctgaaagtgctagtaatcatttatttcaatctttgcaatctttcaatctttgcagtctttcagtcttggctcttacagattagtggttaagagtttgagaagttaataacacaagattagatttattgattata

SEQ ID NO: 24567 - DNA, 599 bp, Chicken  19866894239038_1
  misc_feature (1)..(164): n is any nucleotide
nnnnnnnnnnnnnnnnnnnnnnnnnnnnnnnnnnnnnnnnnnnnnnnnnnnnnnnnnnnnnnnnnnnnnnnnnnnnnnnnnnnnnnnnnnnnnnnnnnnnnnnnnnnnnnnnnnnnnnnnnnnnnnnnnnnnnnnnnnnnnnnnnnnnnnnnnnnnnnnnnnnnactcccatggacacatgatgacaccgacccactgtccgcttgatgcctccacactgtggcttggcagggctggctgggaaccacagccaaggggctgcagcagcagaaatcacagccaagttctgcactaagagcyttggaaagtgagtgagagctcaggccctttggcccagccccatcagagctgagctggagattagagaggcttcagtccctccgtgctgtccatgtgcatctatctcccagcacagtggatgccccatccttccctctcctctccctttatcaagataggtgacttccctttacatagggaaaaatgtactgattgggaagaggatcccactgacatgcccagcacagcagcgctgggtgtttgctgggaaaccaagkaaccaatgtgacctgccacctcctgcatgaccctgcacatct

SEQ ID NO: 24568 - DNA, 600 bp, Chicken  19866894239038_2
gctgcagcagcagaaatcacagccaagttctgcactaagagcyttggaaagtgagtgagagctcaggccctttggcccagccccatcagagctgagctggagattagagaggcttcagtccctccgtgctgtccatgtgcatctatctcccagcacagtggatgccccatccttccctctcctctccctttatcaagataggtgacttccctttacatagggaaaaatgtactgattgggaagaggatcccactgacatgcccagcacagcagcgctgggtgtttgctgggaaaccaagkaaccaatgtgacctgccacctcctgcatgaccctgcacatctccggacgtgtcctgctgccaagtgtctgccttgcacactgggaggaagggtgccttataaatccatccttagcagcggggagaggctggcaaacctccctaggatgctctcaggtccttctctggtagccatcggcatggcaacggtcgccatggaaaccacctcctccatggcgacgcagcatccatygagtgtgggggtgatgggtgatttccttgggcacacccaccccaaacagctctgggtttcgtttcccag

SEQ ID NO: 24569 - DNA, 600 bp, Chicken  19866894239038_3
ctgattgggaagaggatcccactgacatgcccagcacagcagcgctgggtgtttgctgggaaaccaagkaaccaatgtgacctgccacctcctgcatgaccctgcacatctccggacgtgtcctgctgccaagtgtctgccttgcacactgggaggaagggtgccttataaatccatccttagcagcggggagaggctggcaaacctccctaggatgctctcaggtccttctctggtagccatcggcatggcaacggtcgccatggaaaccacctcctccatggcgacgcagcatccatygagtgtgggggtgatgggtgatttccttgggcacacccaccccaaacagctctgggtttcgtttcccagtgaagtcatggggaaaggaaggggggaccccagttgggaaatggaactctgtgtgccccactgggatccggcagccagggcatccagggaggatgccaaagccagtagcattggaaagctcaaacggacgcagccctgcatgcagggtcagcaatctgtccgtggctgaatgccattgtctctgggaaaacacgttaaattaagaacagaccacaggagaagtgttgatta

SEQ ID NO: 24570 - DNA, 599 bp, Chicken  19866894239039_1
  misc_feature (1)..(169): n is any nucleotide
nnnnnnnnnnnnnnnnnnnnnnnnnnnnnnnnnnnnnnnnnnnnnnnnnnnnnnnnnnnnnnnnnnnnnnnnnnnnnnnnnnnnnnnnnnnnnnnnnnnnnnnnnnnnnnnnnnnnnnnnnnnnnnnnnnnnnnnnnnnnnnnnnnnnnnnnnnnnnnnnnnnnnnnnnaatttaaaaccagttgttttatggtcgttatggacatgatagctttctatacagaaggagttatagataagcagctgctgtaacctgtcacccctagctgctatccctcaccatcaacatcaggctggaakctagggacagaagtgtcagaactacrtaaataacttgcattaatcttagcaagaacactctggtacaggataactagcatgacaggcaactgcctccccagtracttcctcaatgaagtcttaaagctattgtaatatatcctcaattgattacaaggcatctgatccccacagcaatactcttycrtttacttaagacacacgacacagtaataattcgggtagaatacacaccagcctccacatctccccctaccccctcaacgttctcagcaactccagcaattagcaaatatgct

SEQ ID NO: 24571 - DNA, 599 bp, Chicken  19866894239039_2
  misc_feature (1)..(143): n is any nucleotide
nnnnnnnnnnnnnnnnnnnnnnnnnnnnnnnnnnnnnnnnnnnnnnnnnnnnnnnnnnnnnnnnnnnnnnnnnnnnnnnnnnnnnnnnnnnnnnnnnnnnnnnnnnnnnnnnnnnnnnnnnnnnnnnnnnnnnnnnnnnnnnnaatttaaaaccagttgttttatggtcgttatggacatgatagctttctatacagaaggagttatagataagcagctgctgtaacctgtcacccctagctgctatccctcaccatcaacatcaggctggaakctagggacagaagtgtcagaactacrtaaataacttgcattaatcttagcaagaacactctggtacaggataactagcatgacaggcaactgcctccccagtracttcctcaatgaagtcttaaagctattgtaatatatcctcaattgattacaaggcatctgatccccacagcaatactcttycrtttacttaagacacacgacacagtaataattcgggtagaatacacaccagcctccacatctccccctaccccctcaacgttctcagcaactccagcaattagcaaatatgctttgatgctgttaatcttaaagaattc

SEQ ID NO: 24572 - DNA, 599 bp, Chicken  19866894239039_3
  misc_feature (1)..(66): n is any nucleotide
nnnnnnnnnnnnnnnnnnnnnnnnnnnnnnnnnnnnnnnnnnnnnnnnnnnnnnnnnnnnnnnnnnaatttaaaaccagttgttttatggtcgttatggacatgatagctttctatacagaaggagttatagataagcagctgctgtaacctgtcacccctagctgctatccctcaccatcaacatcaggctggaakctagggacagaagtgtcagaactacrtaaataacttgcattaatcttagcaagaacactctggtacaggataactagcatgacaggcaactgcctccccagtracttcctcaatgaagtcttaaagctattgtaatatatcctcaattgattacaaggcatctgatccccacagcaatactcttycrtttacttaagacacacgacacagtaataattcgggtagaatacacaccagcctccacatctccccctaccccctcaacgttctcagcaactccagcaattagcaaatatgctttgatgctgttaatcttaaagaattccgataagcagaatrtgttttctccgcaagttttaattgagaaaaagaatcccacgattggttctattttttttcctt

SEQ ID NO: 24573 - DNA, 600 bp, Chicken  19866894239039_4
ttttatggtcgttatggacatgatagctttctatacagaaggagttatagataagcagctgctgtaacctgtcacccctagctgctatccctcaccatcaacatcaggctggaakctagggacagaagtgtcagaactacrtaaataacttgcattaatcttagcaagaacactctggtacaggataactagcatgacaggcaactgcctccccagtracttcctcaatgaagtcttaaagctattgtaatatatcctcaattgattacaaggcatctgatccccacagcaatactcttycrtttacttaagacacacgacacagtaataattcgggtagaatacacaccagcctccacatctccccctaccccctcaacgttctcagcaactccagcaattagcaaatatgctttgatgctgttaatcttaaagaattccgataagcagaatrtgttttctccgcaagttttaattgagaaaaagaatcccacgattggttctattttttttccttcccactgatcccacacaaactgctcacttaccgttctaaagtcctcctcaaatttgtaagctccacctcccgtggcacagagc

SEQ ID NO: 24574 - DNA, 600 bp, Chicken  19866894239039_5
ttatggtcgttatggacatgatagctttctatacagaaggagttatagataagcagctgctgtaacctgtcacccctagctgctatccctcaccatcaacatcaggctggaakctagggacagaagtgtcagaactacrtaaataacttgcattaatcttagcaagaacactctggtacaggataactagcatgacaggcaactgcctccccagtracttcctcaatgaagtcttaaagctattgtaatatatcctcaattgattacaaggcatctgatccccacagcaatactcttycrtttacttaagacacacgacacagtaataattcgggtagaatacacaccagcctccacatctccccctaccccctcaacgttctcagcaactccagcaattagcaaatatgctttgatgctgttaatcttaaagaattccgataagcagaatrtgttttctccgcaagttttaattgagaaaaagaatcccacgattggttctattttttttccttcccactgatcccacacaaactgctcacttaccgttctaaagtcctcctcaaatttgtaagctccacctcccgtggcacagagcgt

SEQ ID NO: 24575 - DNA, 600 bp, Chicken  19866894239039_6
ttaatcttagcaagaacactctggtacaggataactagcatgacaggcaactgcctccccagtracttcctcaatgaagtcttaaagctattgtaatatatcctcaattgattacaaggcatctgatccccacagcaatactcttycrtttacttaagacacacgacacagtaataattcgggtagaatacacaccagcctccacatctccccctaccccctcaacgttctcagcaactccagcaattagcaaatatgctttgatgctgttaatcttaaagaattccgataagcagaatrtgttttctccgcaagttttaattgagaaaaagaatcccacgattggttctattttttttccttcccactgatcccacacaaactgctcacttaccgttctaaagtcctcctcaaatttgtaagctccacctcccgtggcacagagcgtagtatgcaaactggagaagttcttttcactacccatctgtatgaacctgtgcatggcacagctgggaaagcggatgaagtgcaggtttcctttgcgtccacacatagtcaaattcttcagttctaggtggacatcacgaatgccagttttac

SEQ ID NO: 24576 - DNA, 600 bp, Chicken  19866894239048_1
gattttgatctcagagagagattttttttattagaggaacaacagcttgttgcgatgtttcatgcacttgtttcaagaagaataaagacataccataaaatgcagtctgcaccacttctgatgaagaatatgtctgttaatagtgtgatttgcctgttaatttttctgtctactaggttgttagtgagcagttaaaaaatcagtagcacttaaaaatgtttcacaatcatcaacattatgagctatgcaccacaaactccaagtactgaactgcacatcattaaagtcaatgaaagtatsatttctaaaccaaaaacccaatctgagtggttaattgtgaggtaaaggaacaaggaagtgaaaggtacccttgataagcaaaaatgttagtctaaacaaacgtccaagttccaaaatggtatacctcaattctcctgcctaaattttcagcagtttcagcacaatactcttctatttatccatccaaaagcaggtttaattttgcttccaatttaaaagaagatcaaactcagtgggacttgaactagatgcaaaataggtgcttttgatcttatttttacttgtacccattcatttctt

SEQ ID NO: 24577 - DNA, 600 bp, Chicken  19866894239057_1
attcggtgcacactgcagaagggaagatcaaacgaaaagcagcagctgcaatctgcacacacttgcttctctgatgagaactcaggtgggagataaatgaccaaaaatctggtgtaatttcttagctaagggctaaaaagctggagttgggtaaagatgattgcagctggagctctgggcaggaaggggatgctcattttagcctctctgaattttgacataggagaaacttaaaactacaagacacatgtgtgtatatatataatatatatatattaactgggtcttcttaacaggtcrttttgatttctggtagagttctgcacagccccaggtataacacaaccttccctctgctggatgtgatattgccaccttcatacaaggtactgctctcaccggcagccactgcctgtacccaagcgtgagtttaactcaacagagccatcaaatacatatttataatgctggagaagggagggggcgcccctcctgtgtctgtcagtgatctttggatgccttgatacttacaagtacaaaattgccagcgatgtttggcaagtgctatcaaagagacattagctgagcactgagataatt

SEQ ID NO: 24578 - DNA, 600 bp, Chicken  19866894239071_1
ctgcccacttgtaggagctccctgtgtcccaggagcccggcccagctcagcagcagaggatgtcatttttatccttcccactcatctcccctgagatgtccctgggtctccatggccaacagctcctgaaagacaacagcattgtgactgtactttgaaatctgctgcattaaccaccaaatgtccagtggagagtgataaattacagacattcagttattcctaccagagaatgtttgctgtaaccaaaagggcacacagagaagcacatggaggggtggacttcccctgggcagggcrgtgatccagctgaggcagtgcaggcatctcatccctgggtggaaaccctggggctgaaaygggattcagctccccacggacccacaggagctgggattcctctggttcagttcaggtgtgcacaaggagttgcctgcatgtgagctccgactctgagtccttggtccttcagaggggaatcagtcactcacacacagaccctgggcgatgaccaaggtgcctcagcagcttcaactgatgaaacctctgttttcwattggctcacatgtaaatggcgtcagaagcagccaagtatcatgc

SEQ ID NO: 24579 - DNA, 600 bp, Chicken  19866894239071_2
tgtcatttttatccttcccactcatctcccctgagatgtccctgggtctccatggccaacagctcctgaaagacaacagcattgtgactgtactttgaaatctgctgcattaaccaccaaatgtccagtggagagtgataaattacagacattcagttattcctaccagagaatgtttgctgtaaccaaaagggcacacagagaagcacatggaggggtggacttcccctgggcagggcrgtgatccagctgaggcagtgcaggcatctcatccctgggtggaaaccctggggctgaaaygggattcagctccccacggacccacaggagctgggattcctctggttcagttcaggtgtgcacaaggagttgcctgcatgtgagctccgactctgagtccttggtccttcagaggggaatcagtcactcacacacagaccctgggcgatgaccaaggtgcctcagcagcttcaactgatgaaacctctgttttcwattggctcacatgtaaatggcgtcagaagcagccaagtatcatgccagttcmctgggctgtccagcacactcatgtgcagcaacaaatgcaacacttggccttca

SEQ ID NO: 24580 - DNA, 600 bp, Chicken  19866894239071_3
acacagagaagcacatggaggggtggacttcccctgggcagggcrgtgatccagctgaggcagtgcaggcatctcatccctgggtggaaaccctggggctgaaaygggattcagctccccacggacccacaggagctgggattcctctggttcagttcaggtgtgcacaaggagttgcctgcatgtgagctccgactctgagtccttggtccttcagaggggaatcagtcactcacacacagaccctgggcgatgaccaaggtgcctcagcagcttcaactgatgaaacctctgttttcwattggctcacatgtaaatggcgtcagaagcagccaagtatcatgccagttcmctgggctgtccagcacactcatgtgcagcaacaaatgcaacacttggccttcaggaaagccatggcccagttgcaggcctgagctcttgtttggaccacagggacatggttaaatggcttccacaactggacggtcgcacaaggggaatacagagtctttacagaggatgtgatttttttctgccccactcacgttccctgagaattccctgggtctccatggccaacagctcctgaaagacaacagc

SEQ ID NO: 24581 - DNA, 600 bp, Chicken  19866894239071_4
agctgaggcagtgcaggcatctcatccctgggtggaaaccctggggctgaaaygggattcagctccccacggacccacaggagctgggattcctctggttcagttcaggtgtgcacaaggagttgcctgcatgtgagctccgactctgagtccttggtccttcagaggggaatcagtcactcacacacagaccctgggcgatgaccaaggtgcctcagcagcttcaactgatgaaacctctgttttcwattggctcacatgtaaatggcgtcagaagcagccaagtatcatgccagttcmctgggctgtccagcacactcatgtgcagcaacaaatgcaacacttggccttcaggaaagccatggcccagttgcaggcctgagctcttgtttggaccacagggacatggttaaatggcttccacaactggacggtcgcacaaggggaatacagagtctttacagaggatgtgatttttttctgccccactcacgttccctgagaattccctgggtctccatggccaacagctcctgaaagacaacagcatcatgattgcattttgtcttggatctgcaaatgatgtctagattgttggaa

SEQ ID NO: 24582 - DNA, 600 bp, Chicken  19866894239075_1
ccttcatgctggagccaaggtgtttggattagtgtaaaaaccacaaaatctcctatgctgtaaacacctcaaaaatttttgtctatttcaacacatcttcaagttacctctttgccacatggggcagagacagtgtgagcaggaattattctgaagagataccatgtttctcccatgaccactacacatctatgttgagaggatgactagagacctgcttgctccaaagaaaaatcctccacctgaggaggaataaccacacacatcagtacaggttggggtctgacttgctggggagamtctctgcagagaaggacctgggtgtcctggtggacaacaggttgtccatgagtcagcagtgtgccctcgtggccaagaaagccaatggcatccttgggtgcattaaaaagagtgttgccagtaggttgagggaggtgatcttccccctctactctgccctggtgaagtcagatctggagtactttgtccagttctggtttccacagttcaagaaagacaggaaacttccacagagtccaaccgagtgccagaaagattagtaaggatatggagtatctccattatgaggaaaatctgagc

SEQ ID NO: 24583 - DNA, 600 bp, Chicken  19866894239076_1
tttcaacatttctttaaattgatttcaaaataaacatactctggactgtatttttgttttccctgtatttcaaagatcatttgtttgctaactcaacgttatgtcattgctgacagtgcactataaatacctctgggttcacttggctggagattatctgcagatatctatggagagccggagatgttctgcaagcagtaaatctgcaagacacagtgcactcttcctctctactgctgcatcagagaaatgtcctgctgcctgcagctgacgtgctgcccaccatttgctccacagcaygtgcttccaggttgggaaaagctttgcagaaagcaaaagaaygcagcagaaggcaaacgggcagcaaacagaggatggtcgaaatcttgcagataayagatatactccagatatactcagaccaacttagggcatgagagcctgtaacttaaaacccagacttctctcatggctccagccttccaatcgtggcccactgctgggcagcatagcacagaggcacccagtgtgcattggatgcctcagctcrtaccagctctgctctgctttacrtgctccacatttaagacatggatgact

SEQ ID NO: 24584 - DNA, 600 bp, Chicken  19866894239076_2
ggactgtatttttgttttccctgtatttcaaagatcatttgtttgctaactcaacgttatgtcattgctgacagtgcactataaatacctctgggttcacttggctggagattatctgcagatatctatggagagccggagatgttctgcaagcagtaaatctgcaagacacagtgcactcttcctctctactgctgcatcagagaaatgtcctgctgcctgcagctgacgtgctgcccaccatttgctccacagcaygtgcttccaggttgggaaaagctttgcagaaagcaaaagaaygcagcagaaggcaaacgggcagcaaacagaggatggtcgaaatcttgcagataayagatatactccagatatactcagaccaacttagggcatgagagcctgtaacttaaaacccagacttctctcatggctccagccttccaatcgtggcccactgctgggcagcatagcacagaggcacccagtgtgcattggatgcctcagctcrtaccagctctgctctgctttacrtgctccacatttaagacatggatgactaagtacaagaagaagcactctgggatgcccagcttccccctc

SEQ ID NO: 24585 - DNA, 600 bp, Chicken  19866894239076_3
gttatgtcattgctgacagtgcactataaatacctctgggttcacttggctggagattatctgcagatatctatggagagccggagatgttctgcaagcagtaaatctgcaagacacagtgcactcttcctctctactgctgcatcagagaaatgtcctgctgcctgcagctgacgtgctgcccaccatttgctccacagcaygtgcttccaggttgggaaaagctttgcagaaagcaaaagaaygcagcagaaggcaaacgggcagcaaacagaggatggtcgaaatcttgcagataayagatatactccagatatactcagaccaacttagggcatgagagcctgtaacttaaaacccagacttctctcatggctccagccttccaatcgtggcccactgctgggcagcatagcacagaggcacccagtgtgcattggatgcctcagctcrtaccagctctgctctgctttacrtgctccacatttaagacatggatgactaagtacaagaagaagcactctgggatgcccagcttccccctccaaagctgtttgttctgtttgcccaaacctttagcaaccaaaaatgccgtgggtt

SEQ ID NO: 24586 - DNA, 579 bp, Chicken  19866894239076_4
tgtcctgctgcctgcagctgacgtgctgcccaccatttgctccacagcaygtgcttccaggttgggaaaagctttgcagaaagcaaaagaaygcagcagaaggcaaacgggcagcaaacagaggatggtcgaaatcttgcagataayagatatactccagatatactcagaccaacttagggcatgagagcctgtaacttaaaacccagacttctctcatggctccagccttccaatcgtggcccactgctgggcagcatagcacagaggcacccagtgtgcattggatgcctcagctcrtaccagctctgctctgctttacrtgctccacatttaagacatggatgactaagtacaagaagaagcactctgggatgcccagcttccccctccaaagctgtttgttctgtttgcccaaacctttagcaaccaaaaatgccgtgggttcagtaaatgtctcaggaagagtgggctgccaacccaggctgggatgtaacacatgggcttcactgactcctcgaaacagagacagggcagagcacgcatgaaaacagcaccaaattcttcacttacgatgag

SEQ ID NO: 24587 - DNA, 556 bp, Chicken  19866894239076_5
tgctgcccaccatttgctccacagcaygtgcttccaggttgggaaaagctttgcagaaagcaaaagaaygcagcagaaggcaaacgggcagcaaacagaggatggtcgaaatcttgcagataayagatatactccagatatactcagaccaacttagggcatgagagcctgtaacttaaaacccagacttctctcatggctccagccttccaatcgtggcccactgctgggcagcatagcacagaggcacccagtgtgcattggatgcctcagctcrtaccagctctgctctgctttacrtgctccacatttaagacatggatgactaagtacaagaagaagcactctgggatgcccagcttccccctccaaagctgtttgttctgtttgcccaaacctttagcaaccaaaaatgccgtgggttcagtaaatgtctcaggaagagtgggctgccaacccaggctgggatgtaacacatgggcttcactgactcctcgaaacagagacagggcagagcacgcatgaaaacagcaccaaattcttcacttacgatgag

SEQ ID NO: 24588 - DNA, 599 bp, Chicken  19866894239079_1
  misc_feature (1)..(68): n is any nucleotide
nnnnnnnnnnnnnnnnnnnnnnnnnnnnnnnnnnnnnnnnnnnnnnnnnnnnnnnnnnnnnnnnnnnnctcttatctcccctttgaggatgctcaggctcctctcacaacgggcagtttagaagagcacagcatagcaggaagctgcctcccagctgaggaaaagcaagctgacagctccaggaaggctgtatctcaaaatacatttatagttaagaacttttggtctactgtgctgaagggaatttaaataccaggagcaacagtagatgtggatgcgatgacagagatttgcagactygtaggcagaacatgaaggggtcttttatgagacacctatgtggatgctagaaagtgctagggaggagcatgaggtcctactacatgtcacaaattttaaagggaaatgtaagcgaaggatcctggaaggcaaagtcaaactgctggctagaagatttagccctagggtactgttgacagtttctccaaaacccttccagttacacacacaactccaattaggcagaggagaagatgatgctatccggaggtgacggtctccatcaaaagtcaaaagtgaaatcaggcttttcacaagga

SEQ ID NO: 24589 - DNA, 600 bp, Chicken  19866894239080_1
cgaaaattatctttacaactactttgtcttcattcatattcacagaatcatagaatcatagaatgggctgggttgaaaaggaccacaatgatcattcaacccccctgctatgtgcagcatcgccaaccacgagaccaggctgcccagagccacatccagcctgggcttgaatgcctccagggatggggcatccacaacctccttgggcaacctgttccagtgcgtcaccaccctctgtgtgaaaaaattcctcctaatatctaacctaaacctgccctgtctcagcttaaagccattccyccttgtcctatcattatccgccctcataaacagccgttctccctcctgtttgtatgctccctgcaagcactggaaggccgcaatgaggtctccccggagccttctcttctccaagctaaacaagcctggttccttcaacctgtcctcataggagaggtgctccagccctctgatcatcttagtggccctcctctggacccactccaagagctccacatccttcctgtactgggggccccaggcctggaygcagtactccagatggggcctcacaagagttgagtagaggggcacaatcac

SEQ ID NO: 24590 - DNA, 600 bp, Chicken  19866894239080_2
cctcctaatatctaacctaaacctgccctgtctcagcttaaagccattccyccttgtcctatcattatccgccctcataaacagccgttctccctcctgtttgtatgctccctgcaagcactggaaggccgcaatgaggtctccccggagccttctcttctccaagctaaacaagcctggttccttcaacctgtcctcataggagaggtgctccagccctctgatcatcttagtggccctcctctggacccactccaagagctccacatccttcctgtactgggggccccaggcctggaygcagtactccagatggggcctcacaagagttgagtagaggggcacaatcacctccctctccctactggccaccccttttttaatgcagcccagaacacagttggccttccgggctgcaagcgcacactgctgcctcatgtccaacttctcatctaccaggacccccaagtccttctccacagggctgctctcaaggagatcttcccccagtttgtatacatacctgggattgccccaacccaagtgcagcaccctgcacttagccttattgaaccttatattctataagggcatgctgta

SEQ ID NO: 24591 - DNA, 600 bp, Chicken  19866894239081_1
cgacagatggcagcagaggggcagtctgacaaaatggcatgttgacatgaaagtacgtacgaagcattgaaaaattgaattcctcaatgtggaaaaaatggcacccattgacattcaacacttgctgaatgcttatggagacaaaaacagtagatgtgaacacagtgagacaatgggtgctgtaaaacagtgggtcagctcctctgatgcagaattttagagtcacagcatgcaggctcttgttcatcattggcgtaaatgcatcgctagtggtggtggctgtgttgaaaaatagtattwtgtagtgagaatttatcaataagtgtttctgtactctttgtatctgttgtagtttccatagaaacaaataggaggcattacttttggagtgtcctatgtattacagtatgtcgtgtgttgtatgcaaatatctgtgttattactccatgatacctacagccttctactatatagaaaaaaagaataggtgtcttttgccaattttttcttggatttattgcatgtcttgtagcttgaacagcgttatggatcaaatcttccacttcctctgagtgaatcatgtaattcaaagagaccacg

SEQ ID NO: 24592 - DNA, 600 bp, Chicken  19866894239081_2
gtgttgtatgcaaatatctgtgttattactccatgatacctacagccttctactatatagaaaaaaagaataggtgtcttttgccaattttttcttggatttattgcatgtcttgtagcttgaacagcgttatggatcaaatcttccacttcctctgagtgaatcatgtaattcaaagagaccacgcttgattggtgagtcacacaatacatcatgaaaacttgattatcaactgtctggttggttgcctccagtttcttaatgctctgttatctcaattttagaaataagcttgacacyacttagctcatcctaagaatacaaacttgaggatgaactgactgtattatgatcagacataagaggcagaattactctagaaaattacatttaagtagcatagtggaagagagaacctaattagttagcttmatttattcatgtaggaaatttcattgcttaaatagaatgggtcagttgtaaaattttaggtattcaaagaatttcttctttgtttaaggtgtacaatagagtgcaaatgaactagaactgtgaaaagatactaataattggcagtattccaacttagacttctttctt

SEQ ID NO: 24593 - DNA, 600 bp, Chicken  19866894239081_3
tggatcaaatcttccacttcctctgagtgaatcatgtaattcaaagagaccacgcttgattggtgagtcacacaatacatcatgaaaacttgattatcaactgtctggttggttgcctccagtttcttaatgctctgttatctcaattttagaaataagcttgacacyacttagctcatcctaagaatacaaacttgaggatgaactgactgtattatgatcagacataagaggcagaattactctagaaaattacatttaagtagcatagtggaagagagaacctaattagttagcttmatttattcatgtaggaaatttcattgcttaaatagaatgggtcagttgtaaaattttaggtattcaaagaatttcttctttgtttaaggtgtacaatagagtgcaaatgaactagaactgtgaaaagatactaataattggcagtattccaacttagacttctttcttaacaaatgatttcaagtacaaggcattatctatgtaacatcagctgaaatggatagctgtgtcttccactgaattcagcaaatcaactttacttcagcaagcatttgtgatttaggttagggagcctggttg

SEQ ID NO: 24594 - DNA, 600 bp, Chicken  19866894239082_1
catgccatatcttcaaaggcgtaatccctccaggcaacaacttgaagaggctgatgcctgagtgctcttcaaggtccaggaacatggctgctcagccttgtaacacagacacagacatagacattctccctgtcagcacaaaatagaaatgcaatcaaagaatcatagaatcagtaaggttggaaaagacctcttagatcatctagtccaaccatccactgacagacgcaaaacccactactgagcaaagaatttaccatgagccctgcaagttggagacaaatgcagagcatcaaccargcaaacaacgcatcattatggactgcctcccttggacccaagtgattcagtttggaaccagccaaacgtgtatttatgaggccactaactcagggcatgtagagactgcatgatctgctcactgaccttcctgtctgatctacatgtgacacaggcatagcaggagttcgacagtgcagagggatccaagcagaactgcctgaggattagagagccagctttccacaaatttgtcagaaatcaagagaattaagaactcctggggtttcactttcgctttactcagagagctttctgttc

SEQ ID NO: 24595 - DNA, 600 bp, Chicken  19866894239088_1
ccgttcttgtaagttcacagcctgtttctctttagtcatagcttgacagcctgacatgttgtggcataatcctacttttctgaattgtgctgtaggctgagaggctcattacttgtccccttggccttggttttattttgttctgttgctctggatgtcttctgtctgtagtttaccttttgtcttgccatcctggatttgtagctacaagtattccagtacaaactgggcattgccttttgcccttatattatgtagctgtttgacagcagggtaaaaatccgtttgcactctgatccyaggtcttttacatttttatggcaagtaggcttctggctttcactctcttccctttccctgcactgttccttctctgaactctactgaggaagcagtcacgtttccctatcccttcattcaatgcttagtaactatctagtccttgggaaagtgccttgttggcatgtgatggtccatggtgcctgataagcagcatacttctgtcttctgtgtctttggcatcaatctcagggctgtctatactgctgatatatttatttttgcaggcatccaagagaaggtatgttgcacttgaattcc

SEQ ID NO: 24596 - DNA, 600 bp, Chicken  19866894239103_1
cactttaaattctgcacagaagtgcaaaatgcatggaaggaagttcacatggggagtgtcactgggatggtgttggatagtcacttttgcagtcacggtgtggtatcttttactgtattataaacaggatgggaggccacccaagatcctggctcgatgctataatgaggctgcacagctttaattccacaagtccatagcagtgctgggagctgggccaggacctgaagtcccaggcttgtggaagagcccctaccagcttggacgcagctttgtcatggcactaaacaggcagacacytctttgtgctgcttttcctatggatacctttgcaacaggctgttctgtttcctctttttcttcctcctgtgctgctctgcttygctttacgcagcagtttcctgaatgaagtgagatggaaagtagctatttgctcctcttctccttcaggctttgaagcagttcgtacccctacctttattgttttgatctcctggatttcttccaggaaaacatgtcaagcttgctagagaaagccaaacactttgtttttttttgtgctcagttgctggaggtaaccaaaatgctctgccacgttca

SEQ ID NO: 24597 - DNA, 600 bp, Chicken  19866894239103_2
cttttgcagtcacggtgtggtatcttttactgtattataaacaggatgggaggccacccaagatcctggctcgatgctataatgaggctgcacagctttaattccacaagtccatagcagtgctgggagctgggccaggacctgaagtcccaggcttgtggaagagcccctaccagcttggacgcagctttgtcatggcactaaacaggcagacacytctttgtgctgcttttcctatggatacctttgcaacaggctgttctgtttcctctttttcttcctcctgtgctgctctgcttygctttacgcagcagtttcctgaatgaagtgagatggaaagtagctatttgctcctcttctccttcaggctttgaagcagttcgtacccctacctttattgttttgatctcctggatttcttccaggaaaacatgtcaagcttgctagagaaagccaaacactttgtttttttttgtgctcagttgctggaggtaaccaaaatgctctgccacgttcagtaagcacagctttaatcacaggtagagcaggcacagagctgctgtccaggagctttaagayaaacaacagccactcctcygt

SEQ ID NO: 24598 - DNA, 600 bp, Chicken  19866894239103_3
cctcctgtgctgctctgcttygctttacgcagcagtttcctgaatgaagtgagatggaaagtagctatttgctcctcttctccttcaggctttgaagcagttcgtacccctacctttattgttttgatctcctggatttcttccaggaaaacatgtcaagcttgctagagaaagccaaacactttgtttttttttgtgctcagttgctggaggtaaccaaaatgctctgccacgttcagtaagcacagctttaatcacaggtagagcaggcacagagctgctgtccaggagctttaagayaaacaacagccactcctcygtgttacagactgagcatggctgggtcaggatgctccgagtcaggagcagtgggctccgttacaggttgatctcttctctttgagctgggctttcagaatctaaagtgcagcatgctgtataagtgctttcggacaagttgaatcttgtattccagggagtctttgtttttttttttttcccttcttcctttcttgtctgttctacctattgaaacgataaccatttggagagagatgctgctccatccacagcaactctggagatgcttccatgagggca

SEQ ID NO: 24599 - DNA, 592 bp, Chicken  19866894239103_4
tygctttacgcagcagtttcctgaatgaagtgagatggaaagtagctatttgctcctcttctccttcaggctttgaagcagttcgtacccctacctttattgttttgatctcctggatttcttccaggaaaacatgtcaagcttgctagagaaagccaaacactttgtttttttttgtgctcagttgctggaggtaaccaaaatgctctgccacgttcagtaagcacagctttaatcacaggtagagcaggcacagagctgctgtccaggagctttaagayaaacaacagccactcctcygtgttacagactgagcatggctgggtcaggatgctccgagtcaggagcagtgggctccgttacaggttgatctcttctctttgagctgggctttcagaatctaaagtgcagcatgctgtataagtgctttcggacaagttgaatcttgtattccagggagtctttgtttttttttttttcccttcttcctttcttgtctgttctacctattgaaacgataaccatttggagagagatgctgctccatccacagcaactctggagatgcttccatgagggcaccacagcagtg

SEQ ID NO: 24600 - DNA, 600 bp, Chicken  19866894239109_1
ttctctctgtttaaaaaataattaattcaacacccaagaaaagaaatctgtgctacagggtgaagcattcccacagtgccttgggatgcttgactttagttaatgggagaacaagcaaaaaactcttttctttactttcaagctaaccttgagagagaatgttcatcatatattaatgctagacagtttctaattagtataataaaaattacttgtctattcatagtctttttctagccaaggatatagctaattttgctcatcgttctgatagaaaaacagaagcgatatacggagggragaagatttttccaaggtcactcaatgtgtctctttgttgatatggggagtctttgaagcctttgtccccaagctgaatcactaagttttgctttaaaaactatgttctgtagcttgtgtactaaaactgggataaccccaccaaaaaaagggtcattcctcagtcttccccatggctaccttgtctcagtgcacaggaaatcagcacagcagaagcctggtacagtcccatgattaaataggagcacccacttgcttgactcttaaatacctaaaaaacactgtaaatgattaattact

SEQ ID NO: 24601 - DNA, 600 bp, Chicken  19866894239113_1
gtatcctcagcaaaaatacaaggtaaacaaacaagcaagacccgcctgatcctaaacttccattctgtattgctctccttctccatatgtgggaagaacaatttcttgcaggattgcccgaattctggcccatagttgttttctagtttaacctgcttcatttcatgactttaagaatattttaggtaataaaaaaattgttagatgagcatcaaccgtgttgcacggttttaatggcggacaacactgcatcagagcaaggctttggaaatctctagtctggtgagtaccacattgacyggcatactgagagcagctgaaaaagrtcacctggggtagctgggtctcacaaatgtcagcctgttcagcattaaagccacgcaactaaagaccacttttgtgcaaaaataaccagggcctttgcaattaaatggttgaagtctcaagaaggatttctatcgaacagtcctgcacagtcgcctcctgaatacattcggtaaggagaaacggaaggctgtggttcagtaccacagtgacagaaacaccacacagaaataccagggcctcgcaaagatgctgctgggtcaaaggcaaaactgc

SEQ ID NO: 24602 - DNA, 600 bp, Chicken  19866894239113_2
acaaacaagcaagacccgcctgatcctaaacttccattctgtattgctctccttctccatatgtgggaagaacaatttcttgcaggattgcccgaattctggcccatagttgttttctagtttaacctgcttcatttcatgactttaagaatattttaggtaataaaaaaattgttagatgagcatcaaccgtgttgcacggttttaatggcggacaacactgcatcagagcaaggctttggaaatctctagtctggtgagtaccacattgacyggcatactgagagcagctgaaaaagrtcacctggggtagctgggtctcacaaatgtcagcctgttcagcattaaagccacgcaactaaagaccacttttgtgcaaaaataaccagggcctttgcaattaaatggttgaagtctcaagaaggatttctatcgaacagtcctgcacagtcgcctcctgaatacattcggtaaggagaaacggaaggctgtggttcagtaccacagtgacagaaacaccacacagaaataccagggcctcgcaaagatgctgctgggtcaaaggcaaaactgcattagggcattagcgcacagctcttc

SEQ ID NO: 24603 - DNA, 600 bp, Chicken  19866894239133_1
tatcatatttctttaaaagcatcctgctgctcaaaaatttggcatatcattctttctaacatcctgatccctcgatgaaatgtatatgaattagtaaggaatactacccagaattcccaatcatagaattatgcctgcatgtttcagtgcactcagattattttcaatcattcagcatggataataaacttgatttttcaggaacagtaattgtgtatttttgccccatcccaggaggtgttcaaggcttagatgaatggggccttgggcaacttgatctagtgcctaatttagtggttrgtgagcctgtccacagcaggggaattggaattagatgatctttgagtttccttagaacccaagacatgctatgattctatgaaaaccaggagagttttgwttttggtcctaaacctttagaatttctttgacttttcttgaaatcattgaatgatgaattaaacttctatgtagaggaataacttgttattttcttaataagtttctcaagtgcaaatgggactggaaatatatttttctagtcttccattattttattgctttatcagttgcttactgacattatatagctggattctc

SEQ ID NO: 24604 - DNA, 600 bp, Chicken  19866894239133_2
atactacccagaattcccaatcatagaattatgcctgcatgtttcagtgcactcagattattttcaatcattcagcatggataataaacttgatttttcaggaacagtaattgtgtatttttgccccatcccaggaggtgttcaaggcttagatgaatggggccttgggcaacttgatctagtgcctaatttagtggttrgtgagcctgtccacagcaggggaattggaattagatgatctttgagtttccttagaacccaagacatgctatgattctatgaaaaccaggagagttttgwttttggtcctaaacctttagaatttctttgacttttcttgaaatcattgaatgatgaattaaacttctatgtagaggaataacttgttattttcttaataagtttctcaagtgcaaatgggactggaaatatatttttctagtcttccattattttattgctttatcagttgcttactgacattatatagctggattctctttgcaaaaataattttcaaatttgaacaagaaaatggttaacattttctatcatttctgttaaataattgctttccaactttgtgaatattaaakctct

SEQ ID NO: 24605 - DNA, 600 bp, Chicken  19866894239133_3
ttgwttttggtcctaaacctttagaatttctttgacttttcttgaaatcattgaatgatgaattaaacttctatgtagaggaataacttgttattttcttaataagtttctcaagtgcaaatgggactggaaatatatttttctagtcttccattattttattgctttatcagttgcttactgacattatatagctggattctctttgcaaaaataattttcaaatttgaacaagaaaatggttaacattttctatcatttctgttaaataattgctttccaactttgtgaatattaaakctctcaagtgccaacactgaaagaagatattgcagattaaatgtacatgcagagcaaaaatcttattatctgcagagacagcttattgtaaagcttgtcttgcaagctgtaaagcatgatagaagaagaataaatggacccaatctagtagaacatagtttcctcaaggcaaacattttcatgttttagggacatttgatcagaagtggcataatttatcaactgtttcaaatactacatggggaggagaaaagagaaaggagacgtgagtatatttgttagttctagcaggatatctat

SEQ ID NO: 24606 - DNA, 600 bp, Chicken  19866894239146_1
gtctaagtctaaatcatgtactgatgaatcctggattctcagccacagcacaatccacctgctgtactttctcagtggccgtagtcagatgtgctctgtcagcctaatcaaggagctaagtcaagaccctgttttggtaacaagagtctgttcactcatgtaaaggctctgttttggataataaaaatggagtactctaactctgtttattgacagaaatagaggttgtgcaatcaaaggcatgaattagaataggaaactgtgttcctcatgccacattctatgtttgcttgttttttygcggtcaggcactactttaaggaaatgacatgctccatttagtgaaagcaatggagcttcttcagtgtgaaacagaagtaatgaatgcagtgtgaagatggagacctcacaaactaaatatggctctgaataaaacatatttggtcatcaatgaggctgtgtgtatctacagcaggacagggtttactacagtgctttgtcttcattgttcattaatttggttaatctcctacttgtctccagagaaggagctatacaaatgtacaatgtgctttcatttattttttatggcacttatca

SEQ ID NO: 24607 - DNA, 600 bp, Chicken  19866894239152_1
ttgaattctggcagcttggggctatgatcacactgccctgggcagccttttccatgcccaaccaccctctcagtaaagaaccttttcctaatacccaacctgaccctcccctgatgcagctccatgccattccctcaggccaattcatccaatttagcaatctccatcataggataactgaggtactttagtgacttttctagggaaaacagaaaaaaaggaagtttacatttagtcatctccctttgccatcaaattatttttcacttccttctcgcagcaaagctcctatctgacgtygatggtggtctgatttttggcataaatgtgaagttttgtacagtctattctagagcttagtcttccattatccaatccaagaataaaacttgtgtccactctccagtgattccagcagccattgcattcattcaccctgagcagcaagcacatttggttttgttagttccaaatgtacgaccaacaatgatgaccttattacccactaaaagtaagcataattgtagcattttaaccaagaggcttaatctccargcaagatctctactagacacagttagcatgtattgcagataaagt

SEQ ID NO: 24608 - DNA, 600 bp, Chicken  19866894239152_2
attatttttcacttccttctcgcagcaaagctcctatctgacgtygatggtggtctgatttttggcataaatgtgaagttttgtacagtctattctagagcttagtcttccattatccaatccaagaataaaacttgtgtccactctccagtgattccagcagccattgcattcattcaccctgagcagcaagcacatttggttttgttagttccaaatgtacgaccaacaatgatgaccttattacccactaaaagtaagcataattgtagcattttaaccaagaggcttaatctccargcaagatctctactagacacagttagcatgtattgcagataaagtgactcaatttagctaaaaacagttcaagaagttagtgtgcaygtttaataagtcagtcacagaaatttacggttattttatctttccactgatttcactttgccatacatccttaagagatgcaccactcaaaagaatatcagcggatccctatgtagttctgacaggttatttcagactttgttaatgcaataactatttgaaatagaaatgttaaactaggtcagaatagactaggaaggtaaataggtttaa

SEQ ID NO: 24609 - DNA, 600 bp, Chicken  19866894239152_3
gtctattctagagcttagtcttccattatccaatccaagaataaaacttgtgtccactctccagtgattccagcagccattgcattcattcaccctgagcagcaagcacatttggttttgttagttccaaatgtacgaccaacaatgatgaccttattacccactaaaagtaagcataattgtagcattttaaccaagaggcttaatctccargcaagatctctactagacacagttagcatgtattgcagataaagtgactcaatttagctaaaaacagttcaagaagttagtgtgcaygtttaataagtcagtcacagaaatttacggttattttatctttccactgatttcactttgccatacatccttaagagatgcaccactcaaaagaatatcagcggatccctatgtagttctgacaggttatttcagactttgttaatgcaataactatttgaaatagaaatgttaaactaggtcagaatagactaggaaggtaaataggtttaatccaaagccagcaagttctgaagccatacacatgacctcacagcagcaacactttatctaggtgcacacagtcccatatctctttaa

SEQ ID NO: 24610 - DNA, 600 bp, Chicken  19866894239159_1
acactgagtttcccacttcataaattagttgggaagagacatttcctgatcctctagtcacatgcaagcagaagctataatctattctttggaacagaagcatgaccagtgattcttgtttgaattattgtatttgtattttttacaaaatgaacagttttgttgaagtaatgctttgagatttttgcattgaatttttgctgtgggcctctgtggatcacgtcagttaaatttggatgtattgccatagcagttcccttatttttaggtcaaaaaatcacctatctttctggtgctatragatcacatatctgtacagaactagtcttccctaaccagttcctatttactgtaaaaataaacttttccagaagaacaggaaatgtaaatgtgaattcacatatgcctcagcataccatgagctatctgattttgaagacaatctccttagaagcaatatgtggtgatttacccctcactgaagaagaaatcatgcattaaataaaccttactttacaatatttttctaaaacagaggcctaatctaatcttctttccagggcaaatctaatctatgatccttagagatgcagactgcaa

SEQ ID NO: 24611 - DNA, 600 bp, Chicken  19866894239168_1
gtccccagacacacgtaccccaggtgcaatcaaaccgtcgtcatccagtttgtcatagattgcatgtctcataccttgggagggagaaaaatttaaaaatagattcccgagctcttcaacataaagacttggatgttttgtagaaattcaaccagtctgcttacagttttagcctgaaatgtctgaagataacattaagtgaacatctcaggtgatgcatttttctattaacacacatttctgctatttaatttgtctcgaagactgaatcagttcaacagcaatcatccctacacaaaygtaatcaacaagctcagtctccataacctgctttatcttaccttggcaagtctcacgggtaggcttctcaaaaacttcctcttggtcatagcctttcttggactcttgctctttgtaggagcgatagaacacagacctgaaacaaagacaggtatgttctctgtgaaaccagcataattttccctcagctgtacatgccgacttcatttaaagcaccattttgccaagtattaaagctactgtcgctgatgacaaccaaaacaattcataggccacacaacttttcctttgaagtcttgt

SEQ ID NO: 24612 - DNA, 600 bp, Chicken  19866894239178_1
tgaagcctcatggcagctgcagctcctcacagggagtggatgggcagtactgagctctgctctccgtgacagcgacaggggctgagggaatggcatggagctgagttaggggaggggcaggttggggtaggaaaagattcttcactagggggtggttgggccctggaatgggctccaaagagcaatggccaatgcaccgagcccttcactttcccttccttttttccttccccttctcctttcccttccccttccccttccccttcccctttcccttctcctttctccttcttcataaayctgtaggaacacactgttatgacagaatatctgcagtcaacaaggaaggggaataagcattgcaactgtaacaatcccagtactgtttcactaagaaatacaagtaaatattatccaaaacctgcctcctgtgaaatgtctgatacaaagcacaacaggtcttacagaggaaggctgtttttaggagcaactcccttgtgtcctgggtaggtattgcgcagtcactgtcccgactgaaggctttgagttaggagcagaccttaagtgcctgaagatccagtaatgaccctgaaattgtct

SEQ ID NO: 24613 - DNA, 600 bp, Chicken  19866894239193_1
tcaaagatgctttctgatggatattcaaggattttgaatatcaaagggatgcttaaggctaggccaggccataaacatactgcaagaactgagacttggtcagcctttacaatccctgaggactgcagaacagaagggaaagagagaaaacaaaccaagtacgctgaatagatcttccagtttggcatttgccagaagaaaaatgctagcctcgtgctctggaaacatagggacattcacccttccctcaacaggagctccctattaagtctgcagaagggaagcgaacctgtagttctrtaattcagattcactcagatacaaatgaccacgtacattaacactctgcgaatgagtacttccttattagtacgaaaaagagaagaaaaatatttttagaagatgcacatattttccagctttgttagagcaacgtttttaggacaggttttcccatagaacaagagctaaatggagcataaaagagttctgaactggtcacaagcttaagtcttatgaccaaacagaacaattttgcttcctacagagcggagcagcagctggcattggaacagtttcagaaaatacacactgcagttg

SEQ ID NO: 24614 - DNA, 600 bp, Chicken  19866894239197_1
aacgggagaagactgctggtagggattgtgaaaaaggaagcaagtaaacacatactgtattcatgatctagttcttaatagttcctgaacgtgctcggtgtgcttctgctccatacaagattaaatccattgcctgagagagaacagagattcagaaatggtggaagtggtaacggaagccagttgttctgcctggaagaaggaagggaacagagggagatggccggcgggtgatgttacagccctgagatgtcccacggcaaaaggctgatctctgtggccacaaggaacacaggcagmagccctatctgcttctgtctttgccaggttccatgagcactgggagcctttcagaactgagagtgttttggtgcagcygcatgtcaaattataaatcctcatgagcaaacttagcagacttgcagcatgcctcaagtaggaaccttgacggtggtgtagagagaatgagcatcgacaaggatggcagtcagtcaggacgttatagctggagatcagggtagaaacaatgacttaaaaatgaggataagaggagcatgtctactgaatggtgagactggtgcggtcgcagggcagtaaata

SEQ ID NO: 24615 - DNA, 600 bp, Chicken  19866894239197_2
tagttcctgaacgtgctcggtgtgcttctgctccatacaagattaaatccattgcctgagagagaacagagattcagaaatggtggaagtggtaacggaagccagttgttctgcctggaagaaggaagggaacagagggagatggccggcgggtgatgttacagccctgagatgtcccacggcaaaaggctgatctctgtggccacaaggaacacaggcagmagccctatctgcttctgtctttgccaggttccatgagcactgggagcctttcagaactgagagtgttttggtgcagcygcatgtcaaattataaatcctcatgagcaaacttagcagacttgcagcatgcctcaagtaggaaccttgacggtggtgtagagagaatgagcatcgacaaggatggcagtcagtcaggacgttatagctggagatcagggtagaaacaatgacttaaaaatgaggataagaggagcatgtctactgaatggtgagactggtgcggtcgcagggcagtaaatagaactacttagcgaggtggtgtggcatggctgtaatgctagcaaaggaaggtgttcactgctgagatgaggaatggag

SEQ ID NO: 24616 - DNA, 599 bp, Chicken  19866894239206_1
  misc_feature (1)..(261): n is any nucleotide
nnnnnnnnnnnnnnnnnnnnnnnnnnnnnnnnnnnnnnnnnnnnnnnnnnnnnnnnnnnnnnnnnnnnnnnnnnnnnnnnnnnnnnnnnnnnnnnnnnnnnnnnnnnnnnnnnnnnnnnnnnnnnnnnnnnnnnnnnnnnnnnnnnnnnnnnnnnnnnnnnnnnnnnnnnnnnnnnnnnnnnnnnnnnnnnnnnnnnnnnnnnnnnnnnnnnnnnnnnnnnnnnnnnnnnnnnnnnnnnnnnnnnnnnnnnnnnnnnnnnnctactgttgcaagccaagaggatggtcaatgttttgacrgcatcagtccccttctgatgtgagtgtggagccctccatagcacatgtgattcagcactccctaattccaactgcttgcagcactggtttgctgtcaggtgtgtgagtcagcagccttgcagcttctccgtgtgctcggctgcattaatatttactgaggaatagaggctgtggtgggcagcacacactgggcctgtgctgggcgggaggcagttccaaggcctcaccaatatccttaggccgcgggcttttggtcatgggkctgagggagctcaactgaagcacgctaattgagtggt

SEQ ID NO: 24617 - DNA, 600 bp, Chicken  19866894239206_2
tactgttgcaagccaagaggatggtcaatgttttgacrgcatcagtccccttctgatgtgagtgtggagccctccatagcacatgtgattcagcactccctaattccaactgcttgcagcactggtttgctgtcaggtgtgtgagtcagcagccttgcagcttctccgtgtgctcggctgcattaatatttactgaggaatagaggctgtggtgggcagcacacactgggcctgtgctgggcgggaggcagttccaaggcctcaccaatatccttaggccgcgggcttttggtcatgggkctgagggagctcaactgaagcacgctaattgagtggttgtcatctacattaaaaccagagaaaggatatttcacctggcttttgagcttcaattagggtcttaccagtgtttgccttaagcaggaacaggtgtgtagcttgctggcctgcagcttggattataatatacgctgtgtatactttactgctctacccttgacttttgggaagacaagccatgtttttcccactgtgataccatgcctaaatgcgagtatcagcagatttcatggtgactctgtggagtaactgtcatgccat

SEQ ID NO: 24618 - DNA, 600 bp, Chicken  19866894239209_1
ttgacatagtcaccaagccactctcgatgatacttgaaaagtcatagcagtcaggcaaagtccctagtaactggaaaaaaaggcaacatcacacccatttttaagaagggtagaaaggattacccagggagctatcagtctgtaagcctcagctcagtgctgaggaatatcatgaaatagatcctcctgaaagctatgctaataaggcatgtggaagacagggaggagatatgcaataaccagcatggcttcaccaacagcagatccttcctgaccaacattgtcactttctatgatggwgtaactgtccatcagtagacaaggaaagagccactgatctcatctatctggacttcagtaaggcttctgacactgtcccccacagcattcttccctccaaattggaaagatatggatttgataggtggactgtttgatggatcaggaactgactgccatccaggcaggctcaagcagtgggcccagatgaacctcatgaggttgaacaaagccaagtgcagggtcttgcacctgggtcatgttaaaccctcctaccagtataagctcgggagatgtaaggatggaacatagtcctgacaa

SEQ ID NO: 24619 - DNA, 600 bp, Chicken  19866894239210_1
cataatcctgagcactcattttaaatcccccattaatgaggtgaacagactgttttaccactgtcttacgaaccttgccaaagagagctcattttctcagatcatttactgccatatcagttcactgtttcatcccagactggactgttatatttctgcttatgtctcacctggtagtttaaaattatacagatggacaaattagagtgctctgacattccagcactgagttttcagcttgaggaacatgctccaagttgtcactaaccaaaacagtgttttcaaaatattttttttttkattatttattttcatacataatgaagtcatgtgatgtttttcctcatctttcatacttactctcatgacttctgtttttatgtgcagataaataccttccttgttacaattttattttttaaatagatttaaaatgaggtttattttgacattcgaatcagagtttttccagtagcaatagtcatgaatgacatatattcttgtgcttcatgcatacagggtctgcaactgttgaatctcagacttctggtctccaactcaagttttaaagcatattacagtatgttttgtatgctgacc

SEQ ID NO: 24620 - DNA, 600 bp, Chicken  19866894239222_1
gtgtgtgcagctgtttggggaggtgtatggtagcactcatgcaggggaagagtcctttgagtgcctgagggaaagggttgcactctgctgtatttcttctgtgctttttcttgtttttttttttttcccctttgctcattggttaagctttactggcaaaagaagagtgaggtcaagaccgtgctgtttattttgtttctcagctaactgaaaaatacagcctttcgtagctgcagccttccagggaccaaacttaatggccagcttttggattttaccacgccagccattgtgcaatgktgtgaagggtaaggtgggtcagccctacctcaaggctttgccgcgcatcaaaggctcaaacacagcgtgcggtcccagaagacagctcgaaaaaggctgatgwgccaygctgtgctggtggctctactggtgagagcccacgggtgttgctgaggatgrggcttcagggcyggcctgggacttagctgcgtgcctgtgcccagccctctgcagaaacctctcgctaggagctcattagaaaagcgcagggaggagaagcwggctccttcctttcgctgatttcacaaaccagagcttttc

SEQ ID NO: 24621 - DNA, 600 bp, Chicken  19866894239222_2
ctttttcttgtttttttttttttcccctttgctcattggttaagctttactggcaaaagaagagtgaggtcaagaccgtgctgtttattttgtttctcagctaactgaaaaatacagcctttcgtagctgcagccttccagggaccaaacttaatggccagcttttggattttaccacgccagccattgtgcaatgktgtgaagggtaaggtgggtcagccctacctcaaggctttgccgcgcatcaaaggctcaaacacagcgtgcggtcccagaagacagctcgaaaaaggctgatgwgccaygctgtgctggtggctctactggtgagagcccacgggtgttgctgaggatgrggcttcagggcyggcctgggacttagctgcgtgcctgtgcccagccctctgcagaaacctctcgctaggagctcattagaaaagcgcagggaggagaagcwggctccttcctttcgctgatttcacaaaccagagcttttcttgtgctcagcgatcatcacatgccttctccagtgacagggaaggaggctgctcccctttcagcctctcccactcgtaagctgtttattcacattaagtggtg

SEQ ID NO: 24622 - DNA, 600 bp, Chicken  19866894239222_3
tcttgtttttttttttttcccctttgctcattggttaagctttactggcaaaagaagagtgaggtcaagaccgtgctgtttattttgtttctcagctaactgaaaaatacagcctttcgtagctgcagccttccagggaccaaacttaatggccagcttttggattttaccacgccagccattgtgcaatgktgtgaagggtaaggtgggtcagccctacctcaaggctttgccgcgcatcaaaggctcaaacacagcgtgcggtcccagaagacagctcgaaaaaggctgatgwgccaygctgtgctggtggctctactggtgagagcccacgggtgttgctgaggatgrggcttcagggcyggcctgggacttagctgcgtgcctgtgcccagccctctgcagaaacctctcgctaggagctcattagaaaagcgcagggaggagaagcwggctccttcctttcgctgatttcacaaaccagagcttttcttgtgctcagcgatcatcacatgccttctccagtgacagggaaggaggctgctcccctttcagcctctcccactcgtaagctgtttattcacattaagtggtgaagag

SEQ ID NO: 24623 - DNA, 600 bp, Chicken  19866894239222_4
aagaagagtgaggtcaagaccgtgctgtttattttgtttctcagctaactgaaaaatacagcctttcgtagctgcagccttccagggaccaaacttaatggccagcttttggattttaccacgccagccattgtgcaatgktgtgaagggtaaggtgggtcagccctacctcaaggctttgccgcgcatcaaaggctcaaacacagcgtgcggtcccagaagacagctcgaaaaaggctgatgwgccaygctgtgctggtggctctactggtgagagcccacgggtgttgctgaggatgrggcttcagggcyggcctgggacttagctgcgtgcctgtgcccagccctctgcagaaacctctcgctaggagctcattagaaaagcgcagggaggagaagcwggctccttcctttcgctgatttcacaaaccagagcttttcttgtgctcagcgatcatcacatgccttctccagtgacagggaaggaggctgctcccctttcagcctctcccactcgtaagctgtttattcacattaagtggtgaagaggctggatcatccatacttctccagcgtgtcctcagttaacacagggttctg

SEQ ID NO: 24624 - DNA, 600 bp, Chicken  19866894239222_5
gtcaagaccgtgctgtttattttgtttctcagctaactgaaaaatacagcctttcgtagctgcagccttccagggaccaaacttaatggccagcttttggattttaccacgccagccattgtgcaatgktgtgaagggtaaggtgggtcagccctacctcaaggctttgccgcgcatcaaaggctcaaacacagcgtgcggtcccagaagacagctcgaaaaaggctgatgwgccaygctgtgctggtggctctactggtgagagcccacgggtgttgctgaggatgrggcttcagggcyggcctgggacttagctgcgtgcctgtgcccagccctctgcagaaacctctcgctaggagctcattagaaaagcgcagggaggagaagcwggctccttcctttcgctgatttcacaaaccagagcttttcttgtgctcagcgatcatcacatgccttctccagtgacagggaaggaggctgctcccctttcagcctctcccactcgtaagctgtttattcacattaagtggtgaagaggctggatcatccatacttctccagcgtgtcctcagttaacacagggttctggcaattgtgtct

SEQ ID NO: 24625 - DNA, 600 bp, Chicken  19866894239222_6
ccagcttttggattttaccacgccagccattgtgcaatgktgtgaagggtaaggtgggtcagccctacctcaaggctttgccgcgcatcaaaggctcaaacacagcgtgcggtcccagaagacagctcgaaaaaggctgatgwgccaygctgtgctggtggctctactggtgagagcccacgggtgttgctgaggatgrggcttcagggcyggcctgggacttagctgcgtgcctgtgcccagccctctgcagaaacctctcgctaggagctcattagaaaagcgcagggaggagaagcwggctccttcctttcgctgatttcacaaaccagagcttttcttgtgctcagcgatcatcacatgccttctccagtgacagggaaggaggctgctcccctttcagcctctcccactcgtaagctgtttattcacattaagtggtgaagaggctggatcatccatacttctccagcgtgtcctcagttaacacagggttctggcaattgtgtctctgattattctctcaccatccctaccttttaaaaatatttctctttaattgctgctttgtcagctgtgtaatattgtacttggatccaa

SEQ ID NO: 24626 - DNA, 599 bp, Chicken  19866894239225_1
  misc_feature (1)..(102): n is any nucleotide
nnnnnnnnnnnnnnnnnnnnnnnnnnnnnnnnnnnnnnnnnnnnnnnnnnnnnnnnnnnnnnnnnnnnnnnnnnnnnnnnnnnnnnnnnnnnnnnnnnnnnncaatcccaatattattataatcttataatgggattatataatatgatatttaaatgactaaaatataaaagactcactggatttcttaatacatcatcatctacatcgaagtttgaggtgtcagatggactgctaacatctggaatgtaaggtgcttctaggtttcggatgttatcccagttaagtccttcaaaaaawgcatgagacttaaaatcctctattccattctgtcccagcctacgttccctactgcagataagtcgctgaataagatcttttgcttcttcagacacatctgtaacatgggatggaaactggaatcgttcctagaaaacaacacaaattgagaaatttttagaggaatycgttccataattttcagtgacagttttaaaaaagaaagtgataaattacaccaataaaactgcaaacaaatatacagaattgttccatatccactgagcagtggcagagtacaatgcagtatgaccactgat

SEQ ID NO: 24627 - DNA, 600 bp, Chicken  19866894239225_2
taaaagactcactggatttcttaatacatcatcatctacatcgaagtttgaggtgtcagatggactgctaacatctggaatgtaaggtgcttctaggtttcggatgttatcccagttaagtccttcaaaaaawgcatgagacttaaaatcctctattccattctgtcccagcctacgttccctactgcagataagtcgctgaataagatcttttgcttcttcagacacatctgtaacatgggatggaaactggaatcgttcctagaaaacaacacaaattgagaaatttttagaggaatycgttccataattttcagtgacagttttaaaaaagaaagtgataaattacaccaataaaactgcaaacaaatatacagaattgttccatatccactgagcagtggcagagtacaatgcagtatgaccactgatagatctgttgtcttaaaatagattttgaagataagtaatctcttcttgattcctttaatacaaatctgtttgaaaacagctgctgttacagtaacccttaagaaaaggcaacttttctttctgggaagacatacaggagttctgacaccttacagtacattaaagact

SEQ ID NO: 24628 - DNA, 600 bp, Chicken  19866894239228_1
gaaaattaggattcagttcctcatttctttcacattatttagatgtccaagatgttttggtttttttgttattgtgttgatcttatgttttaagtgtcactatacattactacagtgagcagagaagagcaacaatgctagtgaagggactagaaaataatacttatgaggagcagctgagggaacaggaatttactctaagaagaggaggcagaggggaggagacctcattgctgtctacaacagcctgagagggggctgcagtgaagaggtgttgctctcttttctcacatggcaaamattaggacatgatgaaatagttccaagctacgtcaggrggtttagattggatttcaggaacaatttcttcctgagtaaggtggtcaggcattggaacaagctgctcgggaaagtgatggaatttagtgatgggactctgtaggtcagatagagggttggacttgatgatcttgaaggctttttccaacctacgtgactgtgattctatgataagctatgtgataaaggactaatctgactgcaaaaatgtgagcttatggtttgtgattagaaaaaacacacaacaaaaacagctgctta

SEQ ID NO: 24629 - DNA, 600 bp, Chicken  19866894239228_2
ttagatgtccaagatgttttggtttttttgttattgtgttgatcttatgttttaagtgtcactatacattactacagtgagcagagaagagcaacaatgctagtgaagggactagaaaataatacttatgaggagcagctgagggaacaggaatttactctaagaagaggaggcagaggggaggagacctcattgctgtctacaacagcctgagagggggctgcagtgaagaggtgttgctctcttttctcacatggcaaamattaggacatgatgaaatagttccaagctacgtcaggrggtttagattggatttcaggaacaatttcttcctgagtaaggtggtcaggcattggaacaagctgctcgggaaagtgatggaatttagtgatgggactctgtaggtcagatagagggttggacttgatgatcttgaaggctttttccaacctacgtgactgtgattctatgataagctatgtgataaaggactaatctgactgcaaaaatgtgagcttatggtttgtgattagaaaaaacacacaacaaaaacagctgcttaacctgttagctatatgttgaattaagtcaataggacag

SEQ ID NO: 24630 - DNA, 600 bp, Chicken  19866894239235_1
tgcgggagtaattctcagggctttgaatgcaacttagaattgaaaaaaaaaaattaaaaaggaagagagttaactgcctgaaaagggtgtggatgtagagggatgcacaggaaaggccttttcacaaaggtaatcctttggctcagaagaaagatccatccatcagctgtcctagatgtaccaattcactctcactgtgcacagttcagctttcagatgcttgtgtcattgtgggccttctttgttgcttttaatttcagtgtaggaggaaataaaggaaagaaagccaccattgccttrccctgttctgtgtctgctgaggagaggggatggggcagtaaataccacttcagttccctctcctcagaggtgcactatgaaatcccatactctgcyatgtccctgcttttgtgaacaggctggccagcactgctagtccccaatacctctcagtgtgacagaccctgcatgtggcagtgctccaggcatggggactggtggcctaacagcagagaatgcagaatctgctcccaccctatgaagctgctcctattctgaccatgtgctgctcagagcagtggctgtcccacccatgttgtt

SEQ ID NO: 24631 - DNA, 600 bp, Chicken  19866894239235_2
agagggatgcacaggaaaggccttttcacaaaggtaatcctttggctcagaagaaagatccatccatcagctgtcctagatgtaccaattcactctcactgtgcacagttcagctttcagatgcttgtgtcattgtgggccttctttgttgcttttaatttcagtgtaggaggaaataaaggaaagaaagccaccattgccttcccctgttctgtgtctgctgaggagaggggatggggcagtaaataccacttcagttccctctcctcagaggtgcactatgaaatcccatactctgcyatgtccctgcttttgtgaacaggctggccagcactgctagtccccaatacctctcagtgtgacagaccctgcatgtggcagtgctccaggcatggggactggtggcctaacagcagagaatgcagaatctgctcccaccctatgaagctgctcctattctgaccatgtgctgctcagagcagtggctgtcccacccatgttgttggtttctttctgtttgtttgttttcctggcaacggccatcatggggaggggacctttgtgcttcaaccagtgtcctgagaccacagatccatcccc

SEQ ID NO: 24632 - DNA, 600 bp, Chicken  19866894239244_1
ggcacataggtttgtaaaaataaagaacaattgagtgatttcgtgagttaggacctttccaatccaactattccatgtctctgcgatctgtaaggacctttccaacccaactgttccatgtctctgcgatctgtaaggacctttccaatccaatctgatcattccatgtctctgggacctatgaggacctttccaacccaatccaacccaactgttccatgtctctgcgatctgtaaggacctttccaatccaatctgatcattccatgtctctgcaatctgtagggacctttccaaccsaatctgatcattccatgtctctgtgatctgtaaggacctttccaacccaacccaatcgttccatatctctggaatctgttacaacctttccaaccattccaaaccaaccattatgtgtctttggcatctattaggacctttccaactcaacgcaaccgttccatgtctctgcgatctgtaaggacctttccaacccaacctgaccgttccacgtgtctgggaactgagaggacctttccaacagaacccaacccawctgttccacgtctctgggatctgttaggacctttccaacccaac

SEQ ID NO: 24633 - DNA, 600 bp, Chicken  19866894239244_2
tgatcattccatgtctctgcaatctgtagggacctttccaaccsaatctgatcattccatgtctctgtgatctgtaaggacctttccaacccaacccaatcgttccatatctctggaatctgttacaacctttccaaccattccaaaccaaccattatgtgtctttggcatctattaggacctttccaactcaacgcaaccgttccatgtctctgcgatctgtaaggacctttccaacccaacctgaccgttccacgtgtctgggaactgagaggacctttccaacagaacccaacccawctgttccacgtctctgggatctgttaggacctttccaacccaackaccccattggaggcattcaaatcgggctggatggggctttgagcaacctggtctagtgagagatgtcccttgctctatcctatagcatggcggttgtaactagacgacctcgggagccccctcccacccaaaacatcccatcattctttatttctgcctcctggttgggggacggggggtggctgcagccctcacctgccgtggagacgttcaccgtgttgctggggtcgctgatgtagctgccagcgaaggcca

SEQ ID NO: 24634 - DNA, 600 bp, Chicken  19866894239244_3
atctgatcattccatgtctctgtgatctgtaaggacctttccaacccaacccaatcgttccatatctctggaatctgttacaacctttccaaccattccaaaccaaccattatgtgtctttggcatctattaggacctttccaactcaacgcaaccgttccatgtctctgcgatctgtaaggacctttccaacccaacctgaccgttccacgtgtctgggaactgagaggacctttccaacagaacccaacccawctgttccacgtctctgggatctgttaggacctttccaacccaackaccccattggaggcattcaaatcgggctggatggggctttgagcaacctggtctagtgagagatgtcccttgctctatcctatagcatggcggttgtaactagacgacctcgggagccccctcccacccaaaacatcccatcattctttatttctgcctcctggttgggggacggggggtggctgcagccctcacctgccgtggagacgttcaccgtgttgctggggtcgctgatgtagctgccagcgaaggccaccaggcggaactcatagaaggcgtcctgggggtgggggggcagag

SEQ ID NO: 24635 - DNA, 600 bp, Chicken  19866894239256_1
ttctgtggattccttttcttttacatttttttggttcactctttttattcaaaaataaaaactttagtgatatatatatatatttttaaccattctctctactttagcaatctattacaatcactttcatatgtatatgttctcagaaacaaatgtttagcaaatcaaggaaacctcattttcaaaggcccaataaggcttctatacttctgatataacactattccaagaaaactgaagttactaagttattttagacttgaaatgagagccgttcttcctctacagtgtcttaaaaakcagatcggacacttatggaaaagatgatcttatatatttttagataactgggtacaagaaaactgtcaagttgagatgtgaaaattgactatccaatttcattttactatttctttttgtgataaataatgacaaaagttcatttctgagcaatacaggcagcattagtgttggatgccttattaaaagttaaattatcatctcctagagtgaccattttcatcactgtctttgtgaatgacttcagcattactgtttttcatttatgcttcagcactgagaagcaaaccacctaggaat

SEQ ID NO: 24636 - DNA, 600 bp, Chicken  19866894239261_1
ggggctccagacctggacatagtactccagatggggcctcacaagagcagagtagagagggacaatcacctccctgtccctgctggccacccctctcatgatggagcccaggataccatttgctttccgagctgcaagagcacactgctggctcatgttaagtttgtcatccatcaggacccccaggtccttctctgcagagctgttctcaaggactgttccttccagtctgtatagatgcctggggttcctccagcccaagtgcaaaactctgcactttgccatgttgaacctcattargttcacctgggcccacctttcaagtctgtcaaggtccctctgaatggcatcccttccttcctccatgtcaaccgcaccactcagcttggtgttgtcagcaaatttgttgagggtgcacttgattccatcgtcgatgtcattgataaagatgttaaagagcaccagtccgaagacagacccctgggggactctgctcgttaccgacctccacctggacatagaaccattgatcacaaccctctgtctgcggcctttcaacgaatttcttatccaacgagtggttcacccatcaaattcaca

SEQ ID NO: 24637 - DNA, 600 bp, Chicken  19866894239266_1
ttcttcccttatttatcagtttcacatgatctgttccaggcttgacccatccttccattgcggagcagttggtttcaaatcttttggagccaacctgtgcttttttgcctctaccaaggagggtgattataaagaaattcaagtactcctacacaagttgaacttgctgtatctcttttcgctccatcttcctctcagtttttttctttgagctcttccctttctcaatgctattttcagcacttgcttttttttgtttcccactgtacatccttcttccagccctatttctgcctttcycctattgctgccttgctcacagcacccaggaccagctctgctccttcccctgctgctggccagaaccttattccctggctttcagagaccaggaaagctacatttcatgcttccatcacacctgctgcccatctttaaggaccaaagtgatgaacctgctggaggctctaggagctgtgctctctctgtgttgtggctttggtttcttggggatgcagggagaacgttgtggctctgccttggctcttccacggttaaacatagatggaatgtgcagttttgggtgagctcctgtttgta

SEQ ID NO: 24638 - DNA, 600 bp, Chicken  19866894239266_2
tttcttggggatgcagggagaacgttgtggctctgccttggctcttccacggttaaacatagatggaatgtgcagttttgggtgagctcctgtttgtagaatgaattctctttgtgaacaagtcttaagatcgttttatatgtaatttcagcagtgaatttgcatggaaaatcctggaatttcataggactaagtgcacctctgctgtggccagcgtttgttctcatcacgcgcacccatgtattcgaccaacagcaaagaggtgggagctcagcatcccacgcacagactgggcactgyactgccttgctaggatgtgtctgggagaaccatgctgtcaggcagcttgtactcctcaaggagcaaataaaaatacccactggccttgtcctgagggttgccatggtggttgtgagcagtgaaaatgagctctgaaggtcatgctggccagcacagcttcaagagtgctgtgattcctccctgtctgtgtgtcaccttcatcaatccactctggggttytgggggcactgggaccattctgaaatcttacatcatgaaactgtagattggtatcgacctgatttgaaagcgaggtcctcg

SEQ ID NO: 24639 - DNA, 600 bp, Chicken  19866894239266_3
gttctcatcacgcgcacccatgtattcgaccaacagcaaagaggtgggagctcagcatcccacgcacagactgggcactgyactgccttgctaggatgtgtctgggagaaccatgctgtcaggcagcttgtactcctcaaggagcaaataaaaatacccactggccttgtcctgagggttgccatggtggttgtgagcagtgaaaatgagctctgaaggtcatgctggccagcacagcttcaagagtgctgtgattcctccctgtctgtgtgtcaccttcatcaatccactctggggttytgggggcactgggaccattctgaaatcttacatcatgaaactgtagattggtatcgacctgatttgaaagcgaggtcctcgatggtatcatgggcttgtaggggaatgttgcctgtttactgtgcattagcatcttcatgatgaaatctgatagtggtaggggtcaatatgtgtccttctgtttcagagccacatctctgtgctcttatggagcccactgcttggctcattggggtcgttgactgcaactagtagggaaagcaataccaagatataagggttaagaacaactaatgctga

SEQ ID NO: 24640 - DNA, 600 bp, Chicken  19866894239266_4
agctgcgctgtgcatcagcagtgcacggtcctcctttgcttacctgctccagtcttatgggggaatgcacttcatgtccccagggtggtgcttgacatatgacatgaaacagtcatatttcacaacgtaatcatttcttgggtgaaagtaaagaattcctgaatttttcattttaaatagaaagtgaaaggggttttcctgctgctccgcgggggagggtgggattggtatgaatgcttttccgctggggtcagaggtgccagactgacctctcactgttaatctgagcatcttgtggtyggttgctggattttccctgcttccaggagtgctgagcaggcattgctcagccctgtggctgcacagccccatggaaaatgtggtcctacgtgtgtcaagctgcactctttaaaacttttaaagcccagacatcagcttgtgcacaggtatttatcctccttttgtacaggatctttaagcagatgtctgaattttcaacacatcagacttgatgacaaatagagagctttcatgccgtgaggtttgaggcctacagccctattgctcagacagcactgagagtgctcagccaccatgggt

SEQ ID NO: 24641 - DNA, 600 bp, Chicken  19866894239272_1
tgctcaaacatgatccaaagtgacagagcagggaaaaagcgcctggctgaagggatgcatggctatttattgtcgccctcggagcagggcagggacgaggcagctgggggcgaggacagccgtcttctcggagcagagcgccagcagccataggttgccttcacccatcttcagcatcccgagccggtgcttgtcttctcttgtatgttgcagcgcgtgggtacacgacagcttggagccagaacagcccctttggcgcagaacggatgctgtgcaggcaggggagggcctggcaggatyggtgccctcagctctccgaggaacctgtggtgggcgagactgatgcagcttcagccctgacaccgcgctctgtgccttgccgtgggctgtgtctgagctacctcragagcactggcaccacgctgggtctttgaccaaatttgacttcttttgaggtagagacctggtgaagccttgcctggcaccaggagctctcaggcttcacgcagagggagagaggagtcactgctgtgccatgtcctggaggatgggtgcccagccacagcggggatgcatggtctgcacatcccagccattccc

SEQ ID NO: 24642 - DNA, 501 bp, Chicken  19866894239272_2
gggggcgaggacagccgtcttctcggagcagagcgccagcagccataggttgccttcacccatcttcagcatcccgagccggtgcttgtcttctcttgtatgttgcagcgcgtgggtacacgacagcttggagccagaacagcccctttggcgcagaacggatgctgtgcaggcaggggagggcctggcaggatyggtgccctcagctctccgaggaacctgtggtgggcgagactgatgcagcttcagccctgacaccgcgctctgtgccttgccgtgggctgtgtctgagctacctcragagcactggcaccacgctgggtctttgaccaaatttgacttcttttgaggtagagacctggtgaagccttgcctggcaccaggagctctcaggcttcacgcagagggagagaggagtcactgctgtgccatgtcctggaggatgggtgcccagccacagcggggatgcatggtctgcacatcccagccattccctccaca

SEQ ID NO: 24643 - DNA, 600 bp, Chicken  19866894239273_1
ccttttgcgttacgcagctcattgctatgttaatccctcatacactagaaagcccagaggaggaactgcactgggcatatgccatgagcatctcttctcttaaggagagactgccgtgcatccatatctggcatggcctcataaggggcattcatatactcactcctggtgatactttttaacaggtgagttaccaattgctgttctccctgttttccatactcatggcaaaaacagatagaatgtgaaattcagggcccctaccaaaagcatgaggctgttttgtgcattacatgcacrcgctgagctggacctgctgtgctccgacctgaaactcagccacgcacctgctacagtgtagacagcagtgattgctagcaggcccgccacagcaatgtagaggtcccagtgcaaagcttgctgaatgaagagggccccagcatacatatcaacctatgaacaaaaatgaatgcagttgctagatgacattaccctgcccctatgagctggtgatgccagggaatggacacacggtggtttgcatcacagtgtgttcttaaggagcatccacaggaccccaggaatgcagtgctcccaggg

SEQ ID NO: 24644 - DNA, 600 bp, Chicken  19866894239276_1
tctgatgtacaaggagacctttaacgcgtactccatgactgctgttggccaccttttgctccttcatgctctttttttttggcgtgccagcaccaaaacagacagcttgtattcttgtttttggagtctaacatgtctaaaatgacaatgctgattttattcccaggtattatttcagagcaatctctgagccctgctctaaagctgtcaggaaggttccactaacactgggctgcttacacatgtagcacagtgcaagcccaaaacataaagcaacaacgaggaagctccaaggcagcyccagctttgtactgagtcactgcaccttcatccctttacaaccaygtcaccataccyctggggctctgggctcctaattagcagctgagctaatcaacaygcgtggattagggagggtctgcccagtgctcagaaaacacttccaataaaagggactgcaaaaggattttagagccttatatgtaggtgtcagcatgttccagcatgaaaaatatgttttctactgcccaatagaagggttcttggacaaagcagatcactgcaaagccttcctaatgaagaaaaattaccttggggggc

SEQ ID NO: 24645 - DNA, 600 bp, Chicken  19866894239276_2
tggccaccttttgctccttcatgctctttttttttggcgtgccagcaccaaaacagacagcttgtattcttgtttttggagtctaacatgtctaaaatgacaatgctgattttattcccaggtattatttcagagcaatctctgagccctgctctaaagctgtcaggaaggttccactaacactgggctgcttacacatgtagcacagtgcaagcccaaaacataaagcaacaacgaggaagctccaaggcagcyccagctttgtactgagtcactgcaccttcatccctttacaaccaygtcaccataccyctggggctctgggctcctaattagcagctgagctaatcaacaygcgtggattagggagggtctgcccagtgctcagaaaacacttccaataaaagggactgcaaaaggattttagagccttatatgtaggtgtcagcatgttccagcatgaaaaatatgttttctactgcccaatagaagggttcttggacaaagcagatcactgcaaagccttcctaatgaagaaaaattaccttggggggctacaaatagagccagttgtttctaagaatgagcaccgatgttctc

SEQ ID NO: 24646 - DNA, 600 bp, Chicken  19866894239276_3
gctccttcatgctctttttttttggcgtgccagcaccaaaacagacagcttgtattcttgtttttggagtctaacatgtctaaaatgacaatgctgattttattcccaggtattatttcagagcaatctctgagccctgctctaaagctgtcaggaaggttccactaacactgggctgcttacacatgtagcacagtgcaagcccaaaacataaagcaacaacgaggaagctccaaggcagcyccagctttgtactgagtcactgcaccttcatccctttacaaccaygtcaccataccyctggggctctgggctcctaattagcagctgagctaatcaacaygcgtggattagggagggtctgcccagtgctcagaaaacacttccaataaaagggactgcaaaaggattttagagccttatatgtaggtgtcagcatgttccagcatgaaaaatatgttttctactgcccaatagaagggttcttggacaaagcagatcactgcaaagccttcctaatgaagaaaaattaccttggggggctacaaatagagccagttgtttctaagaatgagcaccgatgttctcccaggcaaggga

SEQ ID NO: 24647 - DNA, 600 bp, Chicken  19866894239276_4
gacagcttgtattcttgtttttggagtctaacatgtctaaaatgacaatgctgattttattcccaggtattatttcagagcaatctctgagccctgctctaaagctgtcaggaaggttccactaacactgggctgcttacacatgtagcacagtgcaagcccaaaacataaagcaacaacgaggaagctccaaggcagcyccagctttgtactgagtcactgcaccttcatccctttacaaccaygtcaccataccyctggggctctgggctcctaattagcagctgagctaatcaacaygcgtggattagggagggtctgcccagtgctcagaaaacacttccaataaaagggactgcaaaaggattttagagccttatatgtaggtgtcagcatgttccagcatgaaaaatatgttttctactgcccaatagaagggttcttggacaaagcagatcactgcaaagccttcctaatgaagaaaaattaccttggggggctacaaatagagccagttgtttctaagaatgagcaccgatgttctcccaggcaagggaagggcatacaaatatacccactccgcccccacaaagctgatga

SEQ ID NO: 24648 - DNA, 600 bp, Chicken  19866894239278_1
catatcagacaaattcttctgtacaaaattatcttttcatttcagccactacatttctgaagcactcaatctaagaggcttccaataacaaggacagaagataaagaagttggcacgtatctgttcatgaaaacagacagcagtgaatattcccaggcagaaaaatgcacacattcctcatttaaaatcctcaaaaggaccctagaaatagtttaaacatttcattctttgattgagaggggaagaacaatgagagaagaaaggttttctctctccttagagtgattacaaacaataaayattaattcccagttgttcttatttgttttgcaattgtggttccaaatattctgaagtgcacttgacatcttttgtgccttgtcttggtgcactgcatcggcttcttatctcttcctgtctctacacccacgtcaacgtgcyggcmtcagtgaactccatgtcagagtgatgctgaggacctgggccgcggtgcctggaaagtctttgtgtgcccaccaaaactgcgatgctggagcagctctgccgcrggttcagaagcagccaccagcagagggagcggcaatctcagctcagatgtcc

SEQ ID NO: 24649 - DNA, 600 bp, Chicken  19866894239278_2
agtgaatattcccaggcagaaaaatgcacacattcctcatttaaaatcctcaaaaggaccctagaaatagtttaaacatttcattctttgattgagaggggaagaacaatgagagaagaaaggttttctctctccttagagtgattacaaacaataaayattaattcccagttgttcttatttgttttgcaattgtggttccaaatattctgaagtgcacttgacatcttttgtgccttgtcttggtgcactgcatcggcttcttatctcttcctgtctctacacccacgtcaacgtgcyggcmtcagtgaactccatgtcagagtgatgctgaggacctgggccgcggtgcctggaaagtctttgtgtgcccaccaaaactgcgatgctggagcagctctgccgcrggttcagaagcagccaccagcagagggagcggcaatctcagctcagatgtccccagaattctgtgattctgtgaaaactgacagtgctggggatctggggagttttcttgttggaagcgagtgtcccagaggaggatggacaattttgttcaataaacggtagcaaacagtgacactgctgctttgtcctaat

SEQ ID NO: 24650 - DNA, 600 bp, Chicken  19866894239278_3
aatattcccaggcagaaaaatgcacacattcctcatttaaaatcctcaaaaggaccctagaaatagtttaaacatttcattctttgattgagaggggaagaacaatgagagaagaaaggttttctctctccttagagtgattacaaacaataaayattaattcccagttgttcttatttgttttgcaattgtggttccaaatattctgaagtgcacttgacatcttttgtgccttgtcttggtgcactgcatcggcttcttatctcttcctgtctctacacccacgtcaacgtgcyggcmtcagtgaactccatgtcagagtgatgctgaggacctgggccgcggtgcctggaaagtctttgtgtgcccaccaaaactgcgatgctggagcagctctgccgcrggttcagaagcagccaccagcagagggagcggcaatctcagctcagatgtccccagaattctgtgattctgtgaaaactgacagtgctggggatctggggagttttcttgttggaagcgagtgtcccagaggaggatggacaattttgttcaataaacggtagcaaacagtgacactgctgctttgtcctaatggta

SEQ ID NO: 24651 - DNA, 524 bp, Chicken  19866894239278_4
aatgagagaagaaaggttttctctctccttagagtgattacaaacaataaayattaattcccagttgttcttatttgttttgcaattgtggttccaaatattctgaagtgcacttgacatcttttgtgccttgtcttggtgcactgcatcggcttcttatctcttcctgtctctacacccacgtcaacgtgcyggcmtcagtgaactccatgtcagagtgatgctgaggacctgggccgcggtgcctggaaagtctttgtgtgcccaccaaaactgcgatgctggagcagctctgccgcrggttcagaagcagccaccagcagagggagcggcaatctcagctcagatgtccccagaattctgtgattctgtgaaaactgacagtgctggggatctggggagttttcttgttggaagcgagtgtcccagaggaggatggacaattttgttcaataaacggtagcaaacagtgacactgctgctttgtcctaatggtaaaagaggcagagaggtaggtttcagca

SEQ ID NO: 24652 - DNA, 599 bp, Chicken  19866894239280_1
  misc_feature (1)..(218): n is any nucleotide
nnnnnnnnnnnnnnnnnnnnnnnnnnnnnnnnnnnnnnnnnnnnnnnnnnnnnnnnnnnnnnnnnnnnnnnnnnnnnnnnnnnnnnnnnnnnnnnnnnnnnnnnnnnnnnnnnnnnnnnnnnnnnnnnnnnnnnnnnnnnnnnnnnnnnnnnnnnnnnnnnnnnnnnnnnnnnnnnnnnnnnnnnnnnnnnnnnnnnnnnnnnnnnnnnnnnnnnnnnccattgctccccattggtggcactcccacagtgtggggtgcttacagcagctcccacctctgcacaatagggctctgtcacyccacaccctacctattttccgttggcagatgtagccgtgcttctcctccacgcagctccggtcatcccagcgccccgtgaagtgggggggtgagccatgccacaccaccacgcagttggtctgcaggccaagccacagaatcagaatggcccccagcctgtgtcccaccacacacaacccccagcccatggagcctacaaactgcaggaccagatcctgctctgccctcaaagagccacccctgcaatcttcaaccttcagcccatccctgtggtgggacaccatgctgaatccttctc

SEQ ID NO: 24653 - DNA, 577 bp, Chicken  19866894239280_2
caccaccacgcagttggtctgcaggccaagccacagaatcagaatggcccccagcctgtgtcccaccacacacaacccccagcccatggagcctacaaactgcaggaccagatcctgctctgccctcaaagagccacccctgcaatcttcaaccttcagcccatccctgtggtgggacaccatgctgaatccttctcagggtggtgggtgccccaacccctctccatcccagtgccaggggatgctatggggcaatggggtctcaccggcttgtcgccagggctggaagagctgcattcygagggctccccaggtgcccagctgacgtgtcgcagcggctcaccctccacccactggaactccttcttggcatcgtggaggccaatccacaggtcgaaggagatgttcagcagcatggatgtgatgaaagctgcgagggatggcgaaggtgctgagggccacctccagcagccctggggttggcgctggtggtggccggggggtgacgtaccctgctccagagggctggagatggtggccagcacggcgacctggctctcacaggcctgctttgcct

SEQ ID NO: 24654 - DNA, 600 bp, Chicken  19866894239281_1
ccacaaaaagaatgtcaaaaatagaaaatatggatccagaagacaaacaacatagaatagttggggtcctttgccaggacttgggatggagcagaggaagctgtgaagcaccgggaactgatcagcccttacatgcagaacttcatttgtcccactgtgggctcagcctcctgctctggagcttggcagctccccacctctgtcagggattctctcccttcaggatgtggcagtgatttttttctcttctgtttaggtttcttgacctcagaaaaatccctgtattggctaaaacatacraaaaagtagagccacagtacaattgttcaggaaaagaggagcagctggataatcctgtctgttaacactgaagtcagataagaatgtctgaagaaaactgaaatacagctgctcagacatgtctcatggagctgaggagatcaaaatgcttcataaagcattttcagtaaggtactgaatgcacaaatctctgagtgtttaagttaatttcccttgtgttttcatttcagataaaaagttaattacttttcctatagcatgcctagatcttcgtgttaaaaaactgggcaaaagtgagtg

SEQ ID NO: 24655 - DNA, 600 bp, Chicken  19866894239285_1
ctgacatgtaggtggtagatgaagagggtttgaaaattgttattttctatgccttagtcacttggaatttcctactgtccctcatccctgatgtgttgtaccttgatctgcacagcaaagacaagtatgtgtcatttgtgagttagaagctgaatttgatggcccatcttctctaaaatgttcaagaggcaaaactgctaaggcccaacgtgttggaaatgcagcctttgtttctgtagttccctgacagctgagatttgaggcaactggaaccagcttgcattggcaaacacacaataygatgctgagctattctgaaaatgcaagcctatcctgttggtcaggagctatcaatgctgctttttgaaatggccaggggagctgctgtaaagcaacaagacttcttctgtttccatttctttctttgatctaaacacatactgtcacacgtctcccagcatagggatgatggctctcaaactcaaatgttgcttacctattttccattcacttttaaaattgatctggcaatagatcagtggaattaaaatgagaaatttatgattcacaagaccttttgtaccgtggcttaatgttttt

SEQ ID NO: 24656 - DNA, 600 bp, Chicken  19866894239285_2
gaaatacaaatagttattagtttgtctgactgtattagacatttgtgctgagttattacagttagtgaattttttataaataatccagtaagaagtcaggcctcacttactgtaacctcttagaaaatactgtaaccactggttgcctgaataaatatatcatcacttaattcttcgccttctcagcttctgggaaagccagcacagtacagtgtgtaaaaaggatccttcaaccaaagaaacagagctcctgaagaaaaactcttgtcctaaatgctgtcccaccacatcttaaagatwtaaaacacatacatgatttgtggctctgtgacagtagaaaaggcaaaaaaaacagaggtgtgttagaagtatgttagtgccttagtgcattgcattgtacatgaaaaatgggtattgatgtgaatctgaggacacaattagcatgggctacagctaaggaaacaaaacgggggtatttctcaggtgctgagctttctcaccattcttccagcagagcctttgagattggctactcactcatgttgtggaggtttgaagctggacatgagccagcggtatgcacttgcatcctggaagacc

SEQ ID NO: 24657 - DNA, 600 bp, Chicken  19866894239287_1
ggttcgaacacttaaagaatgtctggaagcaatgtgtagaaagtgaaaaaaaatattcgaacaaccagagaagactattaatgaaaaataaattctgagaagaaaaacttaaagcaaaattagtataagcaagcttgctttaaggagacttgcttccaaaaaaagaaaaaaagaaaaaaaaaaaaaggatgatgtttattcttccaaaattccccatgcttgcctactgcagctaccaagatgggaacaatgatcttgtttaaagtagcctaaacatacttaaagactacatttcttacrttacttgcacacaggtgtggacacaactttgaaagctagtaatattttcacaaaaacagtgagtattcaaacacttgtgtactaccaaacaaatgtcttcaaaggtcactatcctgatggttaaaaggcatgctcagagctacaaacaccagcagatatagttaataagtatgcatgagaatgatgggcagggaaagcataaaagattgaaagaaaaaaacatcttgcagtactataaattaccacaatatttggaaaaggaaaagaaattttttaaagatcccccttcaataatcctaa

SEQ ID NO: 24658 - DNA, 600 bp, Chicken  19866894239287_2
aaaacagtgagtattcaaacacttgtgtactaccaaacaaatgtcttcaaaggtcactatcctgatggttaaaaggcatgctcagagctacaaacaccagcagatatagttaataagtatgcatgagaatgatgggcagggaaagcataaaagattgaaagaaaaaaacatcttgcagtactataaattaccacaatatttggaaaaggaaaagaaattttttaaagatcccccttcaataatcctaaaataatagcagataaaatattcacagagcaaataaagcacaacacaaagtamcttgaattcagactttaatctccattaatctaacaacaaagtacaaaatcatggctgccacatgacccagtcattccacagagtaatatcagagtaggatttcattaagaaaatctttgtgttgtaacctcagactactttcttctcctctgctgaaatattatctgaagaaaaaaaagaaacattcaaagtagtgtaactgaagtttttatgggtcacatgggatgccttctgccatgcaccagatgtgtgtaggaaaaagtggtcaacatatgatattaaaaaacagtgcagtttcga

SEQ ID NO: 24659 - DNA, 600 bp, Chicken  19866894239288_1
gatgatttcagagcctcctcatggccatcacatattcttggtggtatttaaaagaactggggaacttgagaccaatctcaactttcccttgtcctcaagacactttgcaacacaatgatgacttcttccctatttttcattttttctgccacgttggttgaccaaaaaacaggacaactgttttcatctacctgcatcaactgcaggatgcggggacattcctctaaatttgaatttttcagtttctttcaacatgtcaagaagaagcacacacattaatgtcactgcaaaatacagtgmtgtttggtgcggtgttggtattcacagcagctctaatcctaaccctaaactccagccagatgcaccaatccaaacacagtatatttttggcaaccctacccatggtagggggcttagaactagatgacctttgaggttccttccagttcaagccattccatgattctatgactctgtgcatccatccttgtgtgatttctgtgatcaagcagagatccaccgctctgtttccatcaggaccagcgatctggtgaaggatgcttcagttgctcctatggacactgtggtcccatatccctc

SEQ ID NO: 24660 - DNA, 600 bp, Chicken  19866894239288_2
cctgggacatcctctggacccatctccgcatgagaagtatccccaagccacagacaagtggatttggagacatctcccgaaggttaatttaactccatccccatcagggtattattccaccatttctaaccacgcttcattccctcactcttcgtaccaaacctaatttcttgtcctctgcaatgcatgcagatgtgtcctttgcggttcatgtcatacagtggatgtgatgctgcaagaacctgggatgtatcactttcaacggggcaggagcagcatcccagctgttgtttccattcyacagcaatgctcaggaatcagaggaagagaattccgtggctcaaaaaaagaaaatacaaaatcctttgaaatgggctccaaattaagagctgcatcgaggctgtcaagcccctgctagctgagtctacagcaccttccgtgcaaaaagggagcttagcccatttattagaatgatgaaagcaaagggatctaaaaattgcactccttcgttaatgagcagccgaagggatcggtaagcataatttcagaggctagtaatattttatataatcgccgagtggtttaaattgaaaaccccca

SEQ ID NO: 24661 - DNA, 599 bp, Chicken  19866894239295_1
  misc_feature (1)..(136): n is any nucleotide
nnnnnnnnnnnnnnnnnnnnnnnnnnnnnnnnnnnnnnnnnnnnnnnnnnnnnnnnnnnnnnnnnnnnnnnnnnnnnnnnnnnnnnnnnnnnnnnnnnnnnnnnnnnnnnnnnnnnnnnnnnnnnnnnnnnnnnnngtgttgagcaccactgtaaggggaatatttgagggcaaattctctgtgagttgccctttggaactggagtgagggagaggcccttgcttgtgaagtttctggcatgtttgcttgcctttctgcctatacagaggcaggagggaacatggggtttggctagaggygtgtgacacagtggatgtacacrgctgtgtggtggacagtgcacaggttggggaagagtgtgagctgtcatgygtgttagtttctcattaagaactggtgtcatacagaagaaaatccaggactaagggaacacagaaccactcttcttcctcatcacggtaatatgagctgttagaagactttgtctctggcattttgtcctcttacatagagtcatagaatggcttgggtcagaaggggccttaaagcccattcagttccaaactctctgccatgggcagggttggcagccactaga

SEQ ID NO: 24662 - DNA, 599 bp, Chicken  19866894239295_2
  misc_feature (1)..(113): n is any nucleotide
nnnnnnnnnnnnnnnnnnnnnnnnnnnnnnnnnnnnnnnnnnnnnnnnnnnnnnnnnnnnnnnnnnnnnnnnnnnnnnnnnnnnnnnnnnnnnnnnnnnnnnnnnnnnnnnnngtgttgagcaccactgtaaggggaatatttgagggcaaattctctgtgagttgccctttggaactggagtgagggagaggcccttgcttgtgaagtttctggcatgtttgcttgcctttctgcctatacagaggcaggagggaacatggggtttggctagaggygtgtgacacagtggatgtacacrgctgtgtggtggacagtgcacaggttggggaagagtgtgagctgtcatgygtgttagtttctcattaagaactggtgtcatacagaagaaaatccaggactaagggaacacagaaccactcttcttcctcatcacggtaatatgagctgttagaagactttgtctctggcattttgtcctcttacatagagtcatagaatggcttgggtcagaaggggccttaaagcccattcagttccaaactctctgccatgggcagggttggcagccactagatcaggctgcacagggctccatcc

SEQ ID NO: 24663 - DNA, 599 bp, Chicken  19866894239295_3
  misc_feature (1)..(63): n is any nucleotide
nnnnnnnnnnnnnnnnnnnnnnnnnnnnnnnnnnnnnnnnnnnnnnnnnnnnnnnnnnnnnnngtgttgagcaccactgtaaggggaatatttgagggcaaattctctgtgagttgccctttggaactggagtgagggagaggcccttgcttgtgaagtttctggcatgtttgcttgcctttctgcctatacagaggcaggagggaacatggggtttggctagaggygtgtgacacagtggatgtacacrgctgtgtggtggacagtgcacaggttggggaagagtgtgagctgtcatgygtgttagtttctcattaagaactggtgtcatacagaagaaaatccaggactaagggaacacagaaccactcttcttcctcatcacggtaatatgagctgttagaagactttgtctctggcattttgtcctcttacatagagtcatagaatggcttgggtcagaaggggccttaaagcccattcagttccaaactctctgccatgggcagggttggcagccactagatcaggctgcacagggctccatccaacctggctttgaacacctccaaggatggggcatccacaacttctccgga

SEQ ID NO: 24664 - DNA, 594 bp, Chicken  19866894239295_4
taagaactggtgtcatacagaagaaaatccaggactaagggaacacagaaccactcttcttcctcatcacggtaatatgagctgttagaagactttgtctctggcattttgtcctcttacatagagtcatagaatggcttgggtcagaaggggccttaaagcccattcagttccaaactctctgccatgggcagggttggcagccactagatcaggctgcacagggctccatccaacctggctttgaacacctccaaggatggggcatccacaacttctccggacaatctacataactgrgtacatccccctcaggagagagccaaaccttaccacacaagaggtgctggtattctcagatagatttcagtgccaaccagagcagtggtataggcatttgtgcatacctatcttcacatctagaagaacagacaggaggcagaaagccatactaacccaggtctcatatcatgttggttgggagtcaggatagatggtaataaaggaccactgtgctgctctcaccttcaacagccctctgcccagccatttttccaaggaaatatatgacatgctgaacaacggcttctttac

SEQ ID NO: 24665 - DNA, 599 bp, Chicken  19866894239297_1
  misc_feature (1)..(149): n is any nucleotide
nnnnnnnnnnnnnnnnnnnnnnnnnnnnnnnnnnnnnnnnnnnnnnnnnnnnnnnnnnnnnnnnnnnnnnnnnnnnnnnnnnnnnnnnnnnnnnnnnnnnnnnnnnnnnnnnnnnnnnnnnnnnnnnnnnnnnnnnnnnnnnnnnnnnntcacttttagcccacctgggttttgacaggaaggaacccattcaagagaatggacagggtgccgtaaaagatacgggtgaaacgtttattattatctatttgcatctgagtccctaggctaaagaagtctttcttcctttagaagaattcmgaattctatcacccgtgataatgatatgaactctggatcagttttgctctagaaaagaacagttcttattaatagtttttgcttactgctgagaaaatgtttagtaasaattctccaaattattcaggctattaaattagaatatacataaacatcttaggatgtttataatcctaattataagccataaaacatcttaggagaaaaatggggagcagagctggaagcagataatgttatatgtatatatatacacaacaaatctcacagtctggctgtttgtaaaacattctyctttc

SEQ ID NO: 24666 - DNA, 599 bp, Chicken  19866894239297_2
  misc_feature (1)..(41): n is any nucleotide
nnnnnnnnnnnnnnnnnnnnnnnnnnnnnnnnnnnnnnnnntcacttttagcccacctgggttttgacaggaaggaacccattcaagagaatggacagggtgccgtaaaagatacgggtgaaacgtttattattatctatttgcatctgagtccctaggctaaagaagtctttcttcctttagaagaattcmgaattctatcacccgtgataatgatatgaactctggatcagttttgctctagaaaagaacagttcttattaatagtttttgcttactgctgagaaaatgtttagtaasaattctccaaattattcaggctattaaattagaatatacataaacatcttaggatgtttataatcctaattataagccataaaacatcttaggagaaaaatggggagcagagctggaagcagataatgttatatgtatatatatacacaacaaatctcacagtctggctgtttgtaaaacattctyctttctaattttgttatgtrccggacagaacagattttacacagcttcccaatcaggaaacagtgtcttgataacgatgcaagacctcagtcttagcaagccttcgaaagcga

SEQ ID NO: 24667 - DNA, 600 bp, Chicken  19866894239297_3
aattcmgaattctatcacccgtgataatgatatgaactctggatcagttttgctctagaaaagaacagttcttattaatagtttttgcttactgctgagaaaatgtttagtaasaattctccaaattattcaggctattaaattagaatatacataaacatcttaggatgtttataatcctaattataagccataaaacatcttaggagaaaaatggggagcagagctggaagcagataatgttatatgtatatatatacacaacaaatctcacagtctggctgtttgtaaaacattctyctttctaattttgttatgtrccggacagaacagattttacacagcttcccaatcaggaaacagtgtcttgataacgatgcaagacctcagtcttagcaagccttcgaaagcgaccgctaatgttcagaaggatcattctacgaggtacatatatacattactgaatttttttttcctattcttgtcttactaattttaacactttttttggttttactttttagaatgcatgctccatttgtcccacagcttactgtttactcttatttcagacaaactagaaccttcacaggttgctag

SEQ ID NO: 24668 - DNA, 600 bp, Chicken  19866894239297_4
gtgataatgatatgaactctggatcagttttgctctagaaaagaacagttcttattaatagtttttgcttactgctgagaaaatgtttagtaasaattctccaaattattcaggctattaaattagaatatacataaacatcttaggatgtttataatcctaattataagccataaaacatcttaggagaaaaatggggagcagagctggaagcagataatgttatatgtatatatatacacaacaaatctcacagtctggctgtttgtaaaacattctyctttctaattttgttatgtrccggacagaacagattttacacagcttcccaatcaggaaacagtgtcttgataacgatgcaagacctcagtcttagcaagccttcgaaagcgaccgctaatgttcagaaggatcattctacgaggtacatatatacattactgaatttttttttcctattcttgtcttactaattttaacactttttttggttttactttttagaatgcatgctccatttgtcccacagcttactgtttactcttatttcagacaaactagaaccttcacaggttgctagctggtgtccacacaaaacaa

SEQ ID NO: 24669 - DNA, 599 bp, Chicken  19866894239300_1
  misc_feature (1)..(96): n is any nucleotide
nnnnnnnnnnnnnnnnnnnnnnnnnnnnnnnnnnnnnnnnnnnnnnnnnnnnnnnnnnnnnnnnnnnnnnnnnnnnnnnnnnnnnnnnnnnnnnnnaaatgcttttgacaaaattgggcatcaaatgaagtgcttttctcactgaatcgcagctttccaacacttcttttttttttttttttattcctcctgaaaaaccccactccccttcattacagtgtttttaatttccatatttttctctaaatttaggagtttggattcaaggatcccactgtgatgctgaatagtctctcttcrtgctttgacagaggctatattcccacagttcttgtgtcccagtgtcccaagaggacaaactctggtgcttaggggaaaccacagctgcccacagggaagaggcaaaggtttactttggacagtgcatgggagatgttgagtccccgatcttcctctgtattgcttcacagaaaagatgtttaaatcaagttgtttggcaactctatattaaaatatcttctactgggggaaaaaacatactgyttctgtaactttgcaggwgctacaccatagcaacactgtgctgtcaccggaagaga

SEQ ID NO: 24670 - DNA, 600 bp, Chicken  19866894239300_2
taaatttaggagtttggattcaaggatcccactgtgatgctgaatagtctctcttcrtgctttgacagaggctatattcccacagttcttgtgtcccagtgtcccaagaggacaaactctggtgcttaggggaaaccacagctgcccacagggaagaggcaaaggtttactttggacagtgcatgggagatgttgagtccccgatcttcctctgtattgcttcacagaaaagatgtttaaatcaagttgtttggcaactctatattaaaatatcttctactgggggaaaaaacatactgyttctgtaactttgcaggwgctacaccatagcaacactgtgctgtcaccggaagagaattaatatttcaactgatatgaagccaagcactgcataggacggacgttatcttgtctaattttagctaagtaaatttcagtgtgctgtctaaggctgcaatttgggtttctgctctgagaagcacaggaaaggccgaacagcatcagaattgtggccttttctccaatgcttccagacaagtcagcacagagcctaactgtgaagcagtgacatgaaagcagagtaatcccaccctcaccact

SEQ ID NO: 24671 - DNA, 600 bp, Chicken  19866894239300_3
ttcaaggatcccactgtgatgctgaatagtctctcttcrtgctttgacagaggctatattcccacagttcttgtgtcccagtgtcccaagaggacaaactctggtgcttaggggaaaccacagctgcccacagggaagaggcaaaggtttactttggacagtgcatgggagatgttgagtccccgatcttcctctgtattgcttcacagaaaagatgtttaaatcaagttgtttggcaactctatattaaaatatcttctactgggggaaaaaacatactgyttctgtaactttgcaggwgctacaccatagcaacactgtgctgtcaccggaagagaattaatatttcaactgatatgaagccaagcactgcataggacggacgttatcttgtctaattttagctaagtaaatttcagtgtgctgtctaaggctgcaatttgggtttctgctctgagaagcacaggaaaggccgaacagcatcagaattgtggccttttctccaatgcttccagacaagtcagcacagagcctaactgtgaagcagtgacatgaaagcagagtaatcccaccctcaccactacttgctctgctcctctc

SEQ ID NO: 24672 - DNA, 600 bp, Chicken  19866894239307_1
gcaaaagaataaggagtggtgtgggtatttgcaatgccaaaatgtattgctcaaggttttgcaatggatatgcatttttaatatcatcagtaaaggttgctaatagtacttcatggaggatccaactgcagaatctcttacgtgtgctcacatgtagttctgcaggcacttgtgttgctagtagggagtttgggtacatggatagttcctaaacatgtaacaaatccctagggaattttgaatatttaggagggctaaagccaagtgttactgataatcctggaaacggatgaagccagygcttgggttttgttcctgctattagttgtatgtatgatgttataggctgtgagatactactccaagtaattactttttctttctatgataaatagtctgaggagaatggagatgtattaaatgcactggtatgaaaatttgcaacttgattgctattgcttatgtatatttacaggacttcttaggaaaatagctaaattttctaaagacagctgactggggtatggcaaatacaaagacatccacttctgtctttccgggttctgttttaggtgctcatgcattgaagagaacagtgct

SEQ ID NO: 24673 - DNA, 600 bp, Chicken  19866894239310_1
gatttcagagtcagcatcacaggagagcaccccgctctgtgcatggcagaagagggctatactggaactagaggaggcattggtgggaggggaggagctgctattggagagaagttggctctgagatgagactgcatcacacacacggccacgggaccagcagacgtgcatgcagaaatcagaatggatgaggatgcaaaaagacctcaacctcgatttccaattgcgtccgaacgtttctgtttaatccctaattgagtttgatgtgctgctgggaaacgtggcgattgcagcatcgckgtgcgttcagctgtgctgctctggagctgctctgcacactgctctgcatggagcatcccaaccacaggcagtgctgaggagtcactgcactgtttgcagtccccccaaagcctgagatgaggagggcgcagctcccctgcttggctggaagtcccacagacactgaaatgagttcttccacttctcatcctggtagcaaagggtttttattccccacattgctcgtactgctctgttgatggcttttttttttcttggtaatttttaagccaaacaacatattttcctgctgcaatttgt

SEQ ID NO: 24674 - DNA, 600 bp, Chicken  19866894239311_1
gcgtggcataagtcaggtagcctctttgcaaaagatcaagcttcttttttgagattgctgtcttttggcgcaaccccaggagcgaagcacacaaacaggtcctgctgctttatgccagcatcaaatggggatcactttccacagaatcctcaaggaattcacaacattcagtggtttttaaacggagccatttaggaaccaacttcctctccctacgtgcactgttacttgctcaggctgtaccagctcagcactgaatgaaggctgctcatccatccattgccaggtgaggaagctggkaggtgactgcagagtgctgggctgtgcccctggggggagcagggctggctgctcggggggctcaggtggctcctgtgagcccatgagaggcatggctgagatgatggatgtgctgtgctgagccatgccagccttgaaagtgaacatttgtgtatctttttggaaattgtggtgtgaaacgaggcaggaaaaggggctctgggtgagcattaaattctgaaaggacaaacacaccgtgctgtgcaaaggggagcaaacccaaagggaggagctgtggaggctttggggcgggagcaaggt

SEQ ID NO: 24675 - DNA, 600 bp, Chicken  19866894239320_1
gaccaatgtaaatgtagaggtagtgtttgggggagttgttttctttcctttcctgttcttttttccttttttttttttttatctttctttctagatgactccttgagcatgcccagtgtggtaagtgaacaagaagcataccttatgggtgccattgggaggaggcggttctccagccatctctccagcgtgtctgcacctcaggctgaggtgggcatgttgcccagccaaaggtaacaacgtgagcttttcacctttcccattatattcatgagagcagaaatggtgcaggcatattaygtgtaattcatggatgtaaggcaggagaatcatcacccgcatagtgatgcatcctgaaaatagtgttggaccaaggatgctggtttggaaataatgattatccaggattatttgtgttgtataagttgcagaagaacaagctgtcatgtctagaaaccttccacataaacagctttggtaatttccagcagttatttccctctgctactacagtggatagcaaaaagagatgatgtgattcctgggttctgcactgaaccaccggactgtacacaatctgtattggtagtggggaggaat

SEQ ID NO: 24676 - DNA, 600 bp, Chicken  19866894239323_1
tctgccattttatttccaaatggctttatctctgtgtaggctgcggtaccaccagcaggtgcactgatgtgagctattgagctgtcagatccgtacaataggatagcttaaagtgctcaggaagatggaagtgctgttgcatttcctactgagctgttgctcttgttttaaaagcaatggtcctcctgacatctagagcctgtcctctgctttcagccacagctgctttggggtgcggggagacaagactgcagcaacagcctcagggtcaagaccattgacaggcaagttttcaagctmcttgttctcaaaaaatccctgtgggatttaataggctaggtgagtsagcaggtgaaaataagagtgaggcaggtatttttgatggtatcacagcagcattggaatcatacttctgtgctgtgtttttcagtgtatgtaatgtgacttagggcttctggctctgccccacrtcctatgctggcaggctcctctaaggcaggtatgtstgagcagtggtgctgtggctggggcaggtggctcagggaccagctggagactgctggtctggctggggaaactgcaggctgctcctgtgctctc

SEQ ID NO: 24677 - DNA, 600 bp, Chicken  19866894239323_2
taccaccagcaggtgcactgatgtgagctattgagctgtcagatccgtacaataggatagcttaaagtgctcaggaagatggaagtgctgttgcatttcctactgagctgttgctcttgttttaaaagcaatggtcctcctgacatctagagcctgtcctctgctttcagccacagctgctttggggtgcggggagacaagactgcagcaacagcctcagggtcaagaccattgacaggcaagttttcaagctmcttgttctcaaaaaatccctgtgggatttaataggctaggtgagtsagcaggtgaaaataagagtgaggcaggtatttttgatggtatcacagcagcattggaatcatacttctgtgctgtgtttttcagtgtatgtaatgtgacttagggcttctggctctgccccacrtcctatgctggcaggctcctctaaggcaggtatgtstgagcagtggtgctgtggctggggcaggtggctcagggaccagctggagactgctggtctggctggggaaactgcaggctgctcctgtgctctcagatgatcaggagccgattcacagctcagtgccaaccacagctgct

SEQ ID NO: 24678 - DNA, 600 bp, Chicken  19866894239323_3
aaagcaatggtcctcctgacatctagagcctgtcctctgctttcagccacagctgctttggggtgcggggagacaagactgcagcaacagcctcagggtcaagaccattgacaggcaagttttcaagctmcttgttctcaaaaaatccctgtgggatttaataggctaggtgagtsagcaggtgaaaataagagtgaggcaggtatttttgatggtatcacagcagcattggaatcatacttctgtgctgtgtttttcagtgtatgtaatgtgacttagggcttctggctctgccccacrtcctatgctggcaggctcctctaaggcaggtatgtstgagcagtggtgctgtggctggggcaggtggctcagggaccagctggagactgctggtctggctggggaaactgcaggctgctcctgtgctctcagatgatcaggagccgattcacagctcagtgccaaccacagctgcttttcatgctgggatcagaaggagagagtgggcagaggctcagggtttcacaacaaggctttgctttggagatgctgtcttcttatttacagtcttcttattttatttcagttgcatgtaaacac

SEQ ID NO: 24679 - DNA, 600 bp, Chicken  19866894239323_4
ctgctttcagccacagctgctttggggtgcggggagacaagactgcagcaacagcctcagggtcaagaccattgacaggcaagttttcaagctmcttgttctcaaaaaatccctgtgggatttaataggctaggtgagtsagcaggtgaaaataagagtgaggcaggtatttttgatggtatcacagcagcattggaatcatacttctgtgctgtgtttttcagtgtatgtaatgtgacttagggcttctggctctgccccacrtcctatgctggcaggctcctctaaggcaggtatgtstgagcagtggtgctgtggctggggcaggtggctcagggaccagctggagactgctggtctggctggggaaactgcaggctgctcctgtgctctcagatgatcaggagccgattcacagctcagtgccaaccacagctgcttttcatgctgggatcagaaggagagagtgggcagaggctcagggtttcacaacaaggctttgctttggagatgctgtcttcttatttacagtcttcttattttatttcagttgcatgtaaacactgacatttctttcaataagcttccagcagaggattg

SEQ ID NO: 24680 - DNA, 600 bp, Chicken  19866894239328_1
ggatctgagtgctgccaacttagtcgtgagctggtcttgtgactccaagacactctggctaacagagttaacaggaaggatggtttttgtccgctggagaggtttgtgacatcagtgtttgtctggatgtagcagagtggttgaggaactaccattagcaacagaagattatttccagttcaaacgtcacttctgtggaaatactaaacgtgttacataaaaggttgaaacagaataatcaaacagatctgtaccacagcctacaatacttgtcaggcccggagctgtttcacttctgcrggttttttaaaggctaacagctgtggaaagggaaatagagaacggggaaagcacttctgcaaataaaactgtaagaggttaaattaggaaatactgcagtgtcgtcctccaagggcccgcagtagtacccagtgctgttggtttttaccaacagttgctttaagtaatttctttgtctaatatatacctggttttgcttctgtgtagacaggcactctgtcagtcataccagtgagcatctcttaccatacaatgcaactgaaggcttaagttagaagaggacagagcagctttgatgta

SEQ ID NO: 24681 - DNA, 600 bp, Chicken  19866894239328_2
acatcagttgcctttatcagagaccatgtaatgcagttttcttcaatagccagaaggaaatacttgtttcagtagcttgcagagaataggcacatcacctatatgcacttctacagcccagagcactaatgcattcaaatacatctcccacatgagtgctgtgttgctgcagagtcaacatttagcctttcttgtgcacaaagagcacatccttaagtaactaaaggaaaaaggaaaaaaaagtaaggtgtattttcatacagattctttaagtgaataattttttttcttgttgtgctyattggtaaagcaacatccagatgctatgggagcagttgaccaggtagggaagcaggatattagcatatttgggtacctgttagtaaatgcatgaggggatacagaaggggcacgttaagcctgactggatgtgtttcatcttgttccatgccagcagatccttcgaaaggccataggatgcctgttgtagtcatcacagygccaattaccaaagtcaggtgtaatagaatagagagaactgattgagacaggtggtggctttctcttctttcgtccgttatatttaccctaatagttgtt

SEQ ID NO: 24682 - DNA, 543 bp, Chicken  19866894239328_3
aagagcacatccttaagtaactaaaggaaaaaggaaaaaaaagtaaggtgtattttcatacagattctttaagtgaataattttttttcttgttgtgctyattggtaaagcaacatccagatgctatgggagcagttgaccaggtagggaagcaggatattagcatatttgggtacctgttagtaaatgcatgaggggatacagaaggggcacgttaagcctgactggatgtgtttcatcttgttccatgccagcagatccttcgaaaggccataggatgcctgttgtagtcatcacagygccaattaccaaagtcaggtgtaatagaatagagagaactgattgagacaggtggtggctttctcttctttcgtccgttatatttaccctaatagttgttcaggccactggaaaattactgttctccataaggtaggagcctgatgttctgtcatcggccgcagtggtaaacagtaattttcccttgatatatgcctgtggagtgacacatgtcataaaactgcctcgctgcactgttttatt

SEQ ID NO: 24683 - DNA, 600 bp, Chicken  19866894239330_1
gtgtgtgactccagagtagcagggaaagaattaatgatcattatggaaatagcttatggtgagaaagaaccatgtctgttactatggggtaaggggaagcttaattttccaaatgctaaaataattattgctgaactgttcattttttatctaatcctcaacgaaactgaattccctcttcatctgccacatggcattacaagcccagtctgtacaatttagaggttttctctggatgaattgcaaagtgatttttcccttatgaattagattttatttgggttttataattgtcagtgrtttgaattcacttccttacagcttcttttttgaaggataatcaatacagcaaaatgatttgtttgtaggrcactacctattctggaggtttattcttgcttatgcttctgcatgctgtggatgattacaagacaggcactgtaagatttttgaatgtaatgaagtgtcarcatatcatttaagctggttacatagtaaaaatgcatgtattagagacatcaatatctcatttttgtttataacattaagaacttgatcacattctcttccttaggttcatggtcctgtctgttgctaaga

SEQ ID NO: 24684 - DNA, 600 bp, Chicken  19866894239330_2
catgtctgttactatggggtaaggggaagcttaattttccaaatgctaaaataattattgctgaactgttcattttttatctaatcctcaacgaaactgaattccctcttcatctgccacatggcattacaagcccagtctgtacaatttagaggttttctctggatgaattgcaaagtgatttttcccttatgaattagattttatttgggttttataattgtcagtgrtttgaattcacttccttacagcttcttttttgaaggataatcaatacagcaaaatgatttgtttgtaggrcactacctattctggaggtttattcttgcttatgcttctgcatgctgtggatgattacaagacaggcactgtaagatttttgaatgtaatgaagtgtcarcatatcatttaagctggttacatagtaaaaatgcatgtattagagacatcaatatctcatttttgtttataacattaagaacttgatcacattctcttccttaggttcatggtcctgtctgttgctaagaaacccttcctcaggtggctttgaaccttctcagcattttcatctgtcgttacactaccttgtcgagccat

SEQ ID NO: 24685 - DNA, 600 bp, Chicken  19866894239330_3
attccctcttcatctgccacatggcattacaagcccagtctgtacaatttagaggttttctctggatgaattgcaaagtgatttttcccttatgaattagattttatttgggttttataattgtcagtgrtttgaattcacttccttacagcttcttttttgaaggataatcaatacagcaaaatgatttgtttgtaggrcactacctattctggaggtttattcttgcttatgcttctgcatgctgtggatgattacaagacaggcactgtaagatttttgaatgtaatgaagtgtcarcatatcatttaagctggttacatagtaaaaatgcatgtattagagacatcaatatctcatttttgtttataacattaagaacttgatcacattctcttccttaggttcatggtcctgtctgttgctaagaaacccttcctcaggtggctttgaaccttctcagcattttcatctgtcgttacactaccttgtcgagccataggatactgctgctatgctgctgaaatttatgttccttgctgaaagtaataaaaccactgtgcagataagtagctacttcattgatctttcaaagcatta

SEQ ID NO: 24686 - DNA, 599 bp, Chicken  19866894239338_1
  misc_feature (1)..(24): n is any nucleotide
nnnnnnnnnnnnnnnnnnnnnnnntttaatcgttgccatttacaaaaccaaaccatctacccatttccaccccgttgaggttatgggaaaggtgacagctgcgaggaagtaagtgctgatctgttgcttcttccccctccagaagcgtgggaaatgcagcagtctgctcgtctgtcctccatgaaagatggtcttctgtcaggttcctgcacagcccgcgcagggcaggatgatgggcttatcacgtttctggatagattaggcaagaaagttgtgcaaatgtcaaagcacagggcttayaattctcaactatagcaaaaaaaaaaattccttatgcacttccttgaagataggtagaaaccaggacagaggcctgctgagatttgcttagttggaggattatttgtggaagaagttaaaaagaaaacaagaagtttccaccgatgaggataggttaaagattgttgttttaatacacagtaacgttaaggctaatcaatttaatccagaggtgagaggaggaaagaggcttggagacctccctcctctggttaacagatctgaatttatacaggaaacacttcttctgttttcctctc

SEQ ID NO: 24687 - DNA, 561 bp, Chicken  19866894239338_2
gtcaaagcacagggcttayaattctcaactatagcaaaaaaaaaaattccttatgcacttccttgaagataggtagaaaccaggacagaggcctgctgagatttgcttagttggaggattatttgtggaagaagttaaaaagaaaacaagaagtttccaccgatgaggataggttaaagattgttgttttaatacacagtaacgttaaggctaatcaatttaatccagaggtgagaggaggaaagaggcttggagacctccctcctctggttaacagatctgaatttatacaggaaacayttcttctgttttcctctctgggtgccrgatgaattctgccttctgtcctgctgactgactgtgttcaggttatctaggaagacacaaggctcacagcaccttgttccaagcagtaagacaggcagaccattacatagctcacttttctgaagcagttacttcactgtaaaaatctcttgccctgctgtactcattcccctgcaaagcacgtaatggcactggttagctaagtaaacccagccagaggcaatgcagagggcc

SEQ ID NO: 24688 - DNA, 560 bp, Chicken  19866894239338_3
tcaaagcacagggcttayaattctcaactatagcaaaaaaaaaaattccttatgcacttccttgaagataggtagaaaccaggacagaggcctgctgagatttgcttagttggaggattatttgtggaagaagttaaaaagaaaacaagaagtttccaccgatgaggataggttaaagattgttgttttaatacacagtaacgttaaggctaatcaatttaatccagaggtgagaggaggaaagaggcttggagacctccctcctctggttaacagatctgaatttatacaggaaacacytcttctgttttcctctctgggtgccrgatgaattctgccttctgtcctgctgactgactgtgttcaggttatctaggaagacacaaggctcacagcaccttgttccaagcagtaagacaggcagaccattacatagctcacttttctgaagcagttacttcactgtaaaaatctcttgccctgctgtactcattcccctgcaaagcacgtaatggcactggttagctaagtaaacccagccagaggcaatgcagagggcc

SEQ ID NO: 24689 - DNA, 559 bp, Chicken  19866894239338_4
caaagcacagggcttayaattctcaactatagcaaaaaaaaaaattccttatgcacttccttgaagataggtagaaaccaggacagaggcctgctgagatttgcttagttggaggattatttgtggaagaagttaaaaagaaaacaagaagtttccaccgatgaggataggttaaagattgttgttttaatacacagtaacgttaaggctaatcaatttaatccagaggtgagaggaggaaagaggcttggagacctccctcctctggttaacagatctgaatttatacaggaaacactycttctgttttcctctctgggtgccrgatgaattctgccttctgtcctgctgactgactgtgttcaggttatctaggaagacacaaggctcacagcaccttgttccaagcagtaagacaggcagaccattacatagctcacttttctgaagcagttacttcactgtaaaaatctcttgccctgctgtactcattcccctgcaaagcacgtaatggcactggttagctaagtaaacccagccagaggcaatgcagagggcc

SEQ ID NO: 24690 - DNA, 534 bp, Chicken  19866894239338_5
actatagcaaaaaaaaaaattccttatgcacttccttgaagataggtagaaaccaggacagaggcctgctgagatttgcttagttggaggattatttgtggaagaagttaaaaagaaaacaagaagtttccaccgatgaggataggttaaagattgttgttttaatacacagtaacgttaaggctaatcaatttaatccagaggtgagaggaggaaagaggcttggagacctccctcctctggttaacagatctgaatttatacaggaaacacttcttctgttttcctctctgggtgccrgatgaattctgccttctgtcctgctgactgactgtgttcaggttatctaggaagacacaaggctcacagcaccttgttccaagcagtaagacaggcagaccattacatagctcacttttctgaagcagttacttcactgtaaaaatctcttgccctgctgtactcattcccctgcaaagcacgtaatggcactggttagctaagtaaacccagccagaggcaatgcagagggcc

SEQ ID NO: 24691 - DNA, 600 bp, Chicken  19866894239346_1
tcttcccagcccagtgttaacctcgaagctgagttaaggtggtttggggccaggcttcttctcctgctccccctggcacagcagtgtcagctagggctgcagcgagagctgccctttggtggcagagcagtgccagcgctcatgcaggagaaccacgcttctgtcagggtggcttattttgctgaagggagctgggatttgcttgctcagcagaagctcagttttactgtcagcagctgcatctaccttgggaacgttcgctttctgagcagccattgtagctctgctgtctgaacatcyctggttttcagctacatgaggtaccccaactgttaaacccttagctatcgcagagctggctctctgagcttctctatcacatcctaggacaaagcactgcagaaacsatttatagctgtcaaatcaacaattttactttycttcacgtgcttaaattcccctccaatctcctactaaaaatgagaggaggaaagcagaggagattcagtgctaagagcatggacagtgcacagcaacctcagtatgtaatgccccaagaagtgccaaacttgtgaccttggctgtcctgtcgctgcctct

SEQ ID NO: 24692 - DNA, 600 bp, Chicken  19866894239346_2
gctgccctttggtggcagagcagtgccagcgctcatgcaggagaaccacgcttctgtcagggtggcttattttgctgaagggagctgggatttgcttgctcagcagaagctcagttttactgtcagcagctgcatctaccttgggaacgttcgctttctgagcagccattgtagctctgctgtctgaacatcyctggttttcagctacatgaggtaccccaactgttaaacccttagctatcgcagagctggctctctgagcttctctatcacatcctaggacaaagcactgcagaaacsatttatagctgtcaaatcaacaattttactttycttcacgtgcttaaattcccctccaatctcctactaaaaatgagaggaggaaagcagaggagattcagtgctaagagcatggacagtgcacagcaacctcagtatgtaatgccccaagaagtgccaaacttgtgaccttggctgtcctgtcgctgcctcttcccgcagctcggctttgaaaatgctgtaagaaagctttgcgcagtgcatgcactgctgtgctcacagacgggatgctgcctcagattgcctctgctggccagaagg

SEQ ID NO: 24693 - DNA, 600 bp, Chicken  19866894239346_3
catgcaggagaaccacgcttctgtcagggtggcttattttgctgaagggagctgggatttgcttgctcagcagaagctcagttttactgtcagcagctgcatctaccttgggaacgttcgctttctgagcagccattgtagctctgctgtctgaacatcyctggttttcagctacatgaggtaccccaactgttaaacccttagctatcgcagagctggctctctgagcttctctatcacatcctaggacaaagcactgcagaaacsatttatagctgtcaaatcaacaattttactttycttcacgtgcttaaattcccctccaatctcctactaaaaatgagaggaggaaagcagaggagattcagtgctaagagcatggacagtgcacagcaacctcagtatgtaatgccccaagaagtgccaaacttgtgaccttggctgtcctgtcgctgcctcttcccgcagctcggctttgaaaatgctgtaagaaagctttgcgcagtgcatgcactgctgtgctcacagacgggatgctgcctcagattgcctctgctggccagaaggacgtgaggacttcccgaggtttctctccagttt

SEQ ID NO: 24694 - DNA, 600 bp, Chicken  19866894239352_1
atctcatcctgcaatgaataagcagattttaaacaacaagcttggaaagattttcaagagcacggagatgccaaacactgttaaaactggagaggacagaaatatggtcaaggttaagcacttctgaaaaaaatctgcatttgaattccacagccgcaaaggatacaggatgagaaaactaaacagcagtgagcttaaatctgataaaatcactgaaagatggaccaaattaaaataacaattaagtgttgtcatgcaagaagcatcaagcagggaacagcatgacaaaagatgtaattyttcaatgccacgagyttaagaggactggaagtaagtcttccgaaggacctgcttaaaattcttaccttaacagaagttgagtcaccaacatctacctgctgggagcyacagataactttctctgtttgccggacctatctggcaccggctggatgcccagcaagcccaagacatgggtcatgtggattttggaattcctgtattttattgagcttgtgctttaccagagcccaacaacaagactctgcatygatttatgtgttggcacctgtgttacagactaacagagccaatgatcaa

SEQ ID NO: 24695 - DNA, 600 bp, Chicken  19866894239352_2
gaataagcagattttaaacaacaagcttggaaagattttcaagagcacggagatgccaaacactgttaaaactggagaggacagaaatatggtcaaggttaagcacttctgaaaaaaatctgcatttgaattccacagccgcaaaggatacaggatgagaaaactaaacagcagtgagcttaaatctgataaaatcactgaaagatggaccaaattaaaataacaattaagtgttgtcatgcaagaagcatcaagcagggaacagcatgacaaaagatgtaattyttcaatgccacgagyttaagaggactggaagtaagtcttccgaaggacctgcttaaaattcttaccttaacagaagttgagtcaccaacatctacctgctgggagcyacagataactttctctgtttgccggacctatctggcaccggctggatgcccagcaagcccaagacatgggtcatgtggattttggaattcctgtattttattgagcttgtgctttaccagagcccaacaacaagactctgcatygatttatgtgttggcacctgtgttacagactaacagagccaatgatcaatccttccataaagac

SEQ ID NO: 24696 - DNA, 600 bp, Chicken  19866894239352_3
tcaaggttaagcacttctgaaaaaaatctgcatttgaattccacagccgcaaaggatacaggatgagaaaactaaacagcagtgagcttaaatctgataaaatcactgaaagatggaccaaattaaaataacaattaagtgttgtcatgcaagaagcatcaagcagggaacagcatgacaaaagatgtaattyttcaatgccacgagyttaagaggactggaagtaagtcttccgaaggacctgcttaaaattcttaccttaacagaagttgagtcaccaacatctacctgctgggagcyacagataactttctctgtttgccggacctatctggcaccggctggatgcccagcaagcccaagacatgggtcatgtggattttggaattcctgtattttattgagcttgtgctttaccagagcccaacaacaagactctgcatygatttatgtgttggcacctgtgttacagactaacagagccaatgatcaatccttccataaagacactgtgtttacagcttagttgctgaataattgatggcttcagcttgtacacttggtacaagtccctctgccgatattttagaggactggatc

SEQ ID NO: 24697 - DNA, 600 bp, Chicken  19866894239352_4
tcatgcaagaagcatcaagcagggaacagcatgacaaaagatgtaattyttcaatgccacgagyttaagaggactggaagtaagtcttccgaaggacctgcttaaaattcttaccttaacagaagttgagtcaccaacatctacctgctgggagcyacagataactttctctgtttgccggacctatctggcaccggctggatgcccagcaagcccaagacatgggtcatgtggattttggaattcctgtattttattgagcttgtgctttaccagagcccaacaacaagactctgcatygatttatgtgttggcacctgtgttacagactaacagagccaatgatcaatccttccataaagacactgtgtttacagcttagttgctgaataattgatggcttcagcttgtacacttggtacaagtccctctgccgatattttagaggactggatcaggttccaacatgaatgggaatctgtgcactaatcaggcatggaaagatttactttagaagcaattctgtgtgaacgacatgttaaaagattaaggaaccataaaaaaaagagctgcataagtgacttataatcctatattgtg

SEQ ID NO: 24698 - DNA, 599 bp, Chicken  19866894239353_1
  misc_feature (1)..(117): n is any nucleotide
nnnnnnnnnnnnnnnnnnnnnnnnnnnnnnnnnnnnnnnnnnnnnnnnnnnnnnnnnnnnnnnnnnnnnnnnnnnnnnnnnnnnnnnnnnnnnnnnnnnnnnnnnnnnnnnnnnnnncttcctcagtctgttttgagaggtgttctagaagcttcgagaagaccaccagctcatgggatcgagcccttccagccatgggcattggcacaaaggactctccccacatgtgcaatatgctgctcgatttagtcttgggctgagcagttctggcttataaaagaacaatcacaacaaaaacartttttctaaacctctggctgaactgtaaacatgattttacaggacaggataaaagtgtaaatagatgtgtgaagccaacaaaaggttaataatcccagtacaaaaattcttagataaactctcctgcagttgagctgttagcaaagctattaaatttaattgcagtataattacatagccatatacctagctgatacccagctatcaagcacacacagcgcaggtttaaccgcacgcacacaatacatggggctttgcctcaggtgctacaaacatcctgcagccagatgtgcttctgc

SEQ ID NO: 24699 - DNA, 600 bp, Chicken  19866894239353_2
attttacaggacaggataaaagtgtaaatagatgtgtgaagccaacaaaaggttaataatcccagtacaaaaattcttagataaactctcctgcagttgagctgttagcaaagctattaaatttaattgcagtataattacatagccatatacctagctgatacccagctatcaagcacacacagcgcaggtttaaccgcacgcacacaatacatggggctttgcctcaggtgctacaaacatcctgcagccagatgtgcttctgccttcccagccagacttcctctcagttacaaacaygcttgggatgagacagggaggctcagtgcgggatgcattagtacagagaaggtcaagctgctttgcagagctgggacgagcagtgcgataaactatatgcctttataattgctgctgtggcactatttgctgtgcatgaagttaacacacctctgagtctttgcaggataagggccaaagcaaatagcacatttcgctttcctggacttgtcagatatgcttaaattttcctgttagggatgctgctgtctcctgaatcactctctgcacaagggcaaagmgcccagaaacactgctgca

SEQ ID NO: 24700 - DNA, 600 bp, Chicken  19866894239353_3
tcctctcagttacaaacaygcttgggatgagacagggaggctcagtgcgggatgcattagtacagagaaggtcaagctgctttgcagagctgggacgagcagtgcgataaactatatgcctttataattgctgctgtggcactatttgctgtgcatgaagttaacacacctctgagtctttgcaggataagggccaaagcaaatagcacatttcgctttcctggacttgtcagatatgcttaaattttcctgttagggatgctgctgtctcctgaatcactctctgcacaagggcaaagmgcccagaaacactgctgcatgcatgcagactgtgtctcccgaggacggggtttgtatggcaaacattccatggggcttcatggatggggaggtgctctgtggcaccttcctggcaagctcagggagccaggtgctggccacaggacagacctgcatgcagctcagagtggttcaatgccacgctgagcatgttctggagggtaggactgctgcagagctgtgtactgaacccatgctgaatccaaaacatattcccgagaccagaagaagaaactctctccttccttttatccactgctt

SEQ ID NO: 24701 - DNA, 521 bp, Chicken  19866894239353_4
ctgtgctgtttccagcacatccaaaagcacccgcaggaaggactggaaaagcttgtgagtaaatgtatgtcttctgtacaaacagcagttcaactgtgcggatattgggagcttggggaatgtacacaccaaagcttattgcagtgcaggggctccacaatgtgcaggatcaatgggggatgttgaggaggaatgttaggaaaaatgtcttctgagaaagagtggtgctgcagtggcacagctgcccagggagtgctggagccaccatccctggaggtgttccagacccatggagatgcrgcactgagggacgtgyccaatgggtttggtgggatgggttggggttggacttggggaccttagaggtcttttccaaccggaatgattctctcattctatgagtgaatgggcagaggaatctacatagtgtgtggagcttactaagtagaacaggaacacacatatggatgttaggtaccatgatttgccaacaggccatggagactcctttagcactaggg

SEQ ID NO: 24702 - DNA, 505 bp, Chicken  19866894239353_5
acatccaaaagcacccgcaggaaggactggaaaagcttgtgagtaaatgtatgtcttctgtacaaacagcagttcaactgtgcggatattgggagcttggggaatgtacacaccaaagcttattgcagtgcaggggctccacaatgtgcaggatcaatgggggatgttgaggaggaatgttaggaaaaatgtcttctgagaaagagtggtgctgcagtggcacagctgcccagggagtgctggagccaccatccctggaggtgttccagacccatggagatgcrgcactgagggacgtgyccaatgggtttggtgggatgggttggggttggacttggggaccttagaggtcttttccaaccggaatgattctctcattctatgagtgaatgggcagaggaatctacatagtgtgtggagcttactaagtagaacaggaacacacatatggatgttaggtaccatgatttgccaacaggccatggagactcctttagcactaggg

SEQ ID NO: 24703 - DNA, 600 bp, Chicken  19866894239357_1
tttctataggaaggtgaacaaaacattcgtaaatgtaactgaagggcacagttaatattttaacccagcagcctcgagcttcataattttaccacacaccaaacttcaatgaagcttctacattgttcagctcacagaactgtaaatgctgcacttgcagaactctgcagaggccttttctgtcctctgtagatgagaacactgatctcagcagtacagcaatcagagcaagcacttcctttgctcggtattaaacgtcatttccaagatttgttgtgctgtttgtgctctcataacgaraagggatatgagcagcagaggctgttcacactggagggagggtatggaattttttagcacacacacacgtgtatgagaatagygttcccttaagactgggactgtaagataacactgccctggactgagaaaacctctgccttccaaccatgggcctgagttcccttttgccagaagggaagataaygacatctaccatcttccaataactcttggagatcctttggcaatcctgggtgaacacgtgcacgatcctgcacaaacacatctacacataaaacccacacaggttggaatttc

SEQ ID NO: 24704 - DNA, 600 bp, Chicken  19866894239357_2
taattttaccacacaccaaacttcaatgaagcttctacattgttcagctcacagaactgtaaatgctgcacttgcagaactctgcagaggccttttctgtcctctgtagatgagaacactgatctcagcagtacagcaatcagagcaagcacttcctttgctcggtattaaacgtcatttccaagatttgttgtgctgtttgtgctctcataacgaraagggatatgagcagcagaggctgttcacactggagggagggtatggaattttttagcacacacacacgtgtatgagaatagygttcccttaagactgggactgtaagataacactgccctggactgagaaaacctctgccttccaaccatgggcctgagttcccttttgccagaagggaagataaygacatctaccatcttccaataactcttggagatcctttggcaatcctgggtgaacacgtgcacgatcctgcacaaacacatctacacataaaacccacacaggttggaatttctactcgctttcagacaaaacagttcttgattcatcttaaaacccaatcactaaagatataggcatggctatactaaaattaaa

SEQ ID NO: 24705 - DNA, 533 bp, Chicken  19866894239357_3
tgtagatgagaacactgatctcagcagtacagcaatcagagcaagcacttcctttgctcggtattaaacgtcatttccaagatttgttgtgctgtttgtgctctcataacgaraagggatatgagcagcagaggctgttcacactggagggagggtatggaattttttagcacacacacacgtgtatgagaatagygttcccttaagactgggactgtaagataacactgccctggactgagaaaacctctgccttccaaccatgggcctgagttcccttttgccagaagggaagataaygacatctaccatcttccaataactcttggagatcctttggcaatcctgggtgaacacgtgcacgatcctgcacaaacacatctacacataaaacccacacaggttggaatttctactcgctttcagacaaaacagttcttgattcatcttaaaacccaatcactaaagatataggcatggctatactaaaattaaaacgttgttccatgtacagaagaggagcattcagcaaa

SEQ ID NO: 24706 - DNA, 600 bp, Chicken  19866894239359_1
acattctcttagtgccagccagcgcaggatgggatccaagtctgctttgaaaagaagccatttctagaaattcagcaaatctttcagctgtcttggcaaatccagtctgtatggcttcatgttccttcttttttgttctctcagtcttcattgtttacaagacttgagcatgttgggatgtgaatccacgttactcagttttccatttctgggcacagtgtgctttcctgaagagagagttgtttgcaagagtgatttttcagagtacagtgttttgtctgaagtgtattattttaccayrttttaaatgaacagtcgggtccctggttttgcaaacagatttcttttggcagaccctcacgtgcagagtcctgtgctagtcactgaagttctccatggacatggagtctgcataaagagtctacatgcttaggcttttgagctgcttcttgccagtcacgaatgtttcgctttccagatgattgcttgccctgtagtctaaagcttccccttattaaagatgtaaaatctttaaaagtgcctaagtcctgttgttacccaataaggtttaagaacgaaagaagaactgttatttaggaa

SEQ ID NO: 24707 - DNA, 600 bp, Chicken  19866894239359_2
cattctcttagtgccagccagcgcaggatgggatccaagtctgctttgaaaagaagccatttctagaaattcagcaaatctttcagctgtcttggcaaatccagtctgtatggcttcatgttccttcttttttgttctctcagtcttcattgtttacaagacttgagcatgttgggatgtgaatccacgttactcagttttccatttctgggcacagtgtgctttcctgaagagagagttgtttgcaagagtgatttttcagagtacagtgttttgtctgaagtgtattattttaccayrttttaaatgaacagtcgggtccctggttttgcaaacagatttcttttggcagaccctcacgtgcagagtcctgtgctagtcactgaagttctccatggacatggagtctgcataaagagtctacatgcttaggcttttgagctgcttcttgccagtcacgaatgtttcgctttccagatgattgcttgccctgtagtctaaagcttccccttattaaagatgtaaaatctttaaaagtgcctaagtcctgttgttacccaataaggtttaagaacgaaagaagaactgttatttaggaac

SEQ ID NO: 24708 - DNA, 600 bp, Chicken  19866894239359_3
tgtagtctaaagcttccccttattaaagatgtaaaatctttaaaagtgcctaagtcctgttgttacccaataaggtttaagaacgaaagaagaactgttatttaggaacagaatacacttaaattctgtgtggtgtatagcagtgtcgggaaataagtttgtagttcttggaagaactgtccatctcctacaggctcgcccttcttgttaggttctcgtggtcttcagaggtcatggctgaaagctctggaaaatggagatcttgcggtcagagcagttggatgtctgtgaatgccttaycttgttctgtgtgatatggctgaaagtgtatggcrctggtgtgtaacaaaaattgtgtcaaaaataggtgcagtagaatccagtgaaagatactgttaaataagtagctcttacatcaaacgttatgaaacactattttacaccagaacatgggtgtttggatgcttggtaaagaaaatagaagactgcaagaaggttacaatgttgaacgttctctgtgagtgtgtgtgtgtgtgtgtgtatatataaatactctcagcttaattttatcgaacaaacacatgttgcatggtttgtttt

SEQ ID NO: 24709 - DNA, 600 bp, Chicken  19866894239359_4
atctttaaaagtgcctaagtcctgttgttacccaataaggtttaagaacgaaagaagaactgttatttaggaacagaatacacttaaattctgtgtggtgtatagcagtgtcgggaaataagtttgtagttcttggaagaactgtccatctcctacaggctcgcccttcttgttaggttctcgtggtcttcagaggtcatggctgaaagctctggaaaatggagatcttgcggtcagagcagttggatgtctgtgaatgccttaycttgttctgtgtgatatggctgaaagtgtatggcrctggtgtgtaacaaaaattgtgtcaaaaataggtgcagtagaatccagtgaaagatactgttaaataagtagctcttacatcaaacgttatgaaacactattttacaccagaacatgggtgtttggatgcttggtaaagaaaatagaagactgcaagaaggttacaatgttgaacgttctctgtgagtgtgtgtgtgtgtgtgtgtatatataaatactctcagcttaattttatcgaacaaacacatgttgcatggtttgtttttttgcctcattgatcatcagtgttgattaaaagat

SEQ ID NO: 24710 - DNA, 532 bp, Chicken  19866894239364_1
tagtagcttttcttggtgtgcatttaataaagttgtaaccactgtgactataactcatggctctcggtcgctccgcagtggtgcaaccagcggttcggcattccagtgacatcagttcaaagggaagtatgaaaggctcagatgtgtgccagagcattgtgacttttattactcctctcctcccgcgctgctctgttaggaagatacattctctagctgcagaaataagaagtacaaagcatcctcggaccttgtagtgcaaaatgtaaaaagtgatgttatctgcagaaagtggacttyagattctatcagcrcgcatttagcataaagcatttcctatggtaatgtctctcactttcccagacttttacgggctccaagtggcacagaggctgcagacctctttgtaatgttaatgaatcatcttaatggactgttttagcagcaacattcatcaccttttgtaccacaatgattttttttgttatacttaaatggttaagtagcccataaatgcctatcagaccaacca

SEQ ID NO: 24711 - DNA, 518 bp, Chicken  19866894239364_2
ggtgtgcatttaataaagttgtaaccactgtgactataactcatggctctcggtcgctccgcagtggtgcaaccagcggttcggcattccagtgacatcagttcaaagggaagtatgaaaggctcagatgtgtgccagagcattgtgacttttattactcctctcctcccgcgctgctctgttaggaagatacattctctagctgcagaaataagaagtacaaagcatcctcggaccttgtagtgcaaaatgtaaaaagtgatgttatctgcagaaagtggacttyagattctatcagcrcgcatttagcataaagcatttcctatggtaatgtctctcactttcccagacttttacgggctccaagtggcacagaggctgcagacctctttgtaatgttaatgaatcatcttaatggactgttttagcagcaacattcatcaccttttgtaccacaatgattttttttgttatacttaaatggttaagtagcccataaatgcctatcagaccaacca

SEQ ID NO: 24712 - DNA, 600 bp, Chicken  19866894239367_1
gaaggcccccaaccggctgcggaaatggggctgggtccggcctaggagagtggaaatctggatccattattggacaaaactttttttaaaagggagaggctgaacacagaggctctcctgggccacgtggaatggatgatattagcagaaatgtctcaaaccctaccagactgagcaaactagagcggcaactgggctgacgctggttgagccggtcagctcgaggtgggtggtggtgacaggagaacatgggcacatccagacctggggaagtcagcctggtaaacaggcaccagggcwaaaagtcrgstgtgaggttgggtgggctgctactgcctacccacctcaggggtaccccactgcaccataaacaccaggaactggggcttgcgccatcaatttgcaaattctccttagagttgtgcctcgactgggcaaattatctacaggcagctggtctgcagtgaaaagctgtcccgcttcctggggcagtacaattaaaggtggtcacagcccggggctgtttccagcccggctgtgagagatctgaagcctcaagacccctgtggatcagatcatgtggacgtgaaatataaatga

SEQ ID NO: 24713 - DNA, 600 bp, Chicken  19866894239367_2
ccaaccggctgcggaaatggggctgggtccggcctaggagagtggaaatctggatccattattggacaaaactttttttaaaagggagaggctgaacacagaggctctcctgggccacgtggaatggatgatattagcagaaatgtctcaaaccctaccagactgagcaaactagagcggcaactgggctgacgctggttgagccggtcagctcgaggtgggtggtggtgacaggagaacatgggcacatccagacctggggaagtcagcctggtaaacaggcaccagggcwaaaagtcrgstgtgaggttgggtgggctgctactgcctacccacctcaggggtaccccactgcaccataaacaccaggaactggggcttgcgccatcaatttgcaaattctccttagagttgtgcctcgactgggcaaattatctacaggcagctggtctgcagtgaaaagctgtcccgcttcctggggcagtacaattaaaggtggtcacagcccggggctgtttccagcccggctgtgagagatctgaagcctcaagacccctgtggatcagatcatgtggacgtgaaatataaatgatcccatct

SEQ ID NO: 24714 - DNA, 600 bp, Chicken  19866894239367_3
aaccggctgcggaaatggggctgggtccggcctaggagagtggaaatctggatccattattggacaaaactttttttaaaagggagaggctgaacacagaggctctcctgggccacgtggaatggatgatattagcagaaatgtctcaaaccctaccagactgagcaaactagagcggcaactgggctgacgctggttgagccggtcagctcgaggtgggtggtggtgacaggagaacatgggcacatccagacctggggaagtcagcctggtaaacaggcaccagggcwaaaagtcrgstgtgaggttgggtgggctgctactgcctacccacctcaggggtaccccactgcaccataaacaccaggaactggggcttgcgccatcaatttgcaaattctccttagagttgtgcctcgactgggcaaattatctacaggcagctggtctgcagtgaaaagctgtcccgcttcctggggcagtacaattaaaggtggtcacagcccggggctgtttccagcccggctgtgagagatctgaagcctcaagacccctgtggatcagatcatgtggacgtgaaatataaatgatcccatctgc

SEQ ID NO: 24715 - DNA, 600 bp, Chicken  19866894239376_1
aagagaagcattatttgttaaataaagcaaataaaaatggttaagtaaagcaaataaatatcggagtaagaagtcttaagagaaaaagtcaaaaaactacagtgcatatctaatacacagatttgcctactaattagttgcctctggcaagtgatttataaatatctgtgggccttctgcttcccctctgggcttcacagtctttctcatgtgcgtatgacagcctttacgcttctacacttgtcatactctgcataaccccagaactacaccagagtgaccacactgaaatatttagayaaagccctgtcctgcagtggacactgagcagtgaggttgcttgtgccagagctaaaaggctttcagtgacgtctatgcaacagtgaaattgaaaggagtgcaattatgaatgatgataatccagcattcaatctgctctgcctatgtattcagaaaaaaaataataaaaatagtccactttttgaattagggaactctgcagaattttctagaacagacttctagtaaagttattcttctagaagagatagtagaaatatctcagcatgggagaaagtgaaaaaaaaaatataaccctgt

SEQ ID NO: 24716 - DNA, 600 bp, Chicken  19866894239376_2
tatgcaacagtgaaattgaaaggagtgcaattatgaatgatgataatccagcattcaatctgctctgcctatgtattcagaaaaaaaataataaaaatagtccactttttgaattagggaactctgcagaattttctagaacagacttctagtaaagttattcttctagaagagatagtagaaatatctcagcatgggagaaagtgaaaaaaaaaatataaccctgtgggaatgttcaagtgcacatatttcttaggtctcagtgaaaaatgggaaaagatgtcagaaaaatatatgtgstaggggaggaaatctctaagtgattcagtctggcaagcaacaggcgtagcttgaatttcaatttttctacatctagcatatttcagttttttccccttaagttcatttcatactcctaattattcacactcagtcttatatggctattgcattatttttgtagcaaacgatgtttttttctcagacatcactaatatttatagcagtatgtgcaaaagcataagattttcagatattgaaaagatacatgtttgtgcatacaggaattttttcaatttagtagcatttaatacagaaaat

SEQ ID NO: 24717 - DNA, 600 bp, Chicken  19866894239376_3
actgcaaacactatcttcagtgccagaaaatactctgctctctctgtgcaactctacagccctgttgaactgcagttttaaagctgcctggctatattttcatgcctatagattgcagtattctgtgtcctgatgttagaagtttcttcagtaacaattctctgtgaccagtggatcatatgaactgggttgctataacatttacatccatatttgtagcataccaatgaagaggaaaacccaggcttaacttcattcttgtttactccatcatttcttacttcagacaagattttctgyggaagggtcaaattaaacaggccacaacacttctctgaaataacctgcacttctcccaaaatatgtataaatgtaaaagtatttcactgtaaaagtgaaaagaactaaataagacaattaaaatgactgcaataaactcagtcatagtaggttgagcgtattcttatgttaaattatagtctgcacaaccagaagaaaacaaagaaataaaatcttttttttaagtttacagtttcttaagggaagccgtaatttttgttcacaactctcctttgcaccagttgagaaagatctgttgtt

SEQ ID NO: 24718 - DNA, 599 bp, Chicken  19866894239383_1
  misc_feature (1)..(27): n is any nucleotide
nnnnnnnnnnnnnnnnnnnnnnnnnnntcagcatagcttgtagcaaactttgtgcagccattaattgagttaatctcaatttactgcaacagttcattcaataaagttcaggctcttgcataaacatgtgactgttttgtacataaacatggatctagctttaagtgcctttgagctgcctgttttcaatatgccttctatacagctgacaaattttcatttcctcccctatttgtacaaagagtaatgcatcagagtcaatcaacttaattaacttaattgttgagctgaattgagatkctctgggctgctggggatatgtataatatggtattcataggaatccttacatttgataaactaataatagtagaaaggtgtaatactggtataaatagtcactggtattctttatctatgctgttgtaaaatttcttaacaatctgtccccagtactactggtctcttttcagctctttatagccattagccaatgtattctctcctatgctgtgcaaccagctttcttcccttagtgtcagtccagtcttggtcattatgccaaaaatgctcttttgccagattacttggtagacttg

SEQ ID NO: 24719 - DNA, 600 bp, Chicken  19866894239391_1
aattagtaaccctaatgtctccaaggatcttagccttatcataatgaggtcctccaccttggtgagagcatgttcccttgcagacacagcgagagatgtgcctggagtgctgcaaggtcacagaggtgcccattgccaaacagccaggagtaaaggctgcaacatgctgcataaaacatttgcaattgatcggttgaccaacttcaattccagagcttgtttgcatccatcacggtctcgttatcaggcaggaaaaggcaaactcacaaaaacatactccaattaagggcttgtagctcrctgaggttttggcttatgattcagttccatgaactatgagagtaccaatggaaaccttcygaagtagtcaatgattgttttaacaattcaacttattttcaaacaaattattcaagaaaacagcaattgctaacttccttggattcactgagccaatgcataataatatgtcatataattaaactattcattaagacttctgctggatagaaaactgaaatctcagaggcatccgacctttggggcattgcagactttcacacttcagttatccagttgccttaaaattgcctattagta

SEQ ID NO: 24720 - DNA, 600 bp, Chicken  19866894239391_2
ggtgagagcatgttcccttgcagacacagcgagagatgtgcctggagtgctgcaaggtcacagaggtgcccattgccaaacagccaggagtaaaggctgcaacatgctgcataaaacatttgcaattgatcggttgaccaacttcaattccagagcttgtttgcatccatcacggtctcgttatcaggcaggaaaaggcaaactcacaaaaacatactccaattaagggcttgtagctcrctgaggttttggcttatgattcagttccatgaactatgagagtaccaatggaaaccttcygaagtagtcaatgattgttttaacaattcaacttattttcaaacaaattattcaagaaaacagcaattgctaacttccttggattcactgagccaatgcataataatatgtcatataattaaactattcattaagacttctgctggatagaaaactgaaatctcagaggcatccgacctttggggcattgcagactttcacacttcagttatccagttgccttaaaattgcctattagtaactgcttgactttatgggcttcgagcagttttttgaacagcaaatttaatactagataaa

SEQ ID NO: 24721 - DNA, 600 bp, Chicken  19866894239391_3
tgggcttcgagcagttttttgaacagcaaatttaatactagataaatctgatgctaatagcttcttatttttaataacggagtcctgaaaaataataaagcataattctcctgtaggtgcaccttgccattttaattaattctgcactgatagaagcttggcaaatacaacattttctttttgctttccatacatagctgttcttaagggaacctaagagaagaacagtacattctcctaaacaaacacccccatgttgttttcaggtagataggaacgtacaactgaaaggcagggagrtccatgagctgcattcatggctgtgccrctgttcctgtgatggtaatttttgctttttgcygtagaaggtacctcccatgtgggaaagagagaccccaagctgcacagagcccacctgcagctgcttctggagccaggctgggacacactactgccctgcttggtgctgataacacagcgagacagagtggaccctgagccatcctctgcatgtagcacaaagagcatcccgttggtttagatgcagttttagtccagatcttccatgtacaacctgataggtttggatttttttttttt

SEQ ID NO: 24722 - DNA, 600 bp, Chicken  19866894239391_4
aatttaatactagataaatctgatgctaatagcttcttatttttaataacggagtcctgaaaaataataaagcataattctcctgtaggtgcaccttgccattttaattaattctgcactgatagaagcttggcaaatacaacattttctttttgctttccatacatagctgttcttaagggaacctaagagaagaacagtacattctcctaaacaaacacccccatgttgttttcaggtagataggaacgtacaactgaaaggcagggagrtccatgagctgcattcatggctgtgccrctgttcctgtgatggtaatttttgctttttgcygtagaaggtacctcccatgtgggaaagagagaccccaagctgcacagagcccacctgcagctgcttctggagccaggctgggacacactactgccctgcttggtgctgataacacagcgagacagagtggaccctgagccatcctctgcatgtagcacaaagagcatcccgttggtttagatgcagttttagtccagatcttccatgtacaacctgataggtttggattttttttttttttgcctttttttaatgttttagtaaaaa

SEQ ID NO: 24723 - DNA, 600 bp, Chicken  19866894239391_5
ttcttatttttaataacggagtcctgaaaaataataaagcataattctcctgtaggtgcaccttgccattttaattaattctgcactgatagaagcttggcaaatacaacattttctttttgctttccatacatagctgttcttaagggaacctaagagaagaacagtacattctcctaaacaaacacccccatgttgttttcaggtagataggaacgtacaactgaaaggcagggagrtccatgagctgcattcatggctgtgccrctgttcctgtgatggtaatttttgctttttgcygtagaaggtacctcccatgtgggaaagagagaccccaagctgcacagagcccacctgcagctgcttctggagccaggctgggacacactactgccctgcttggtgctgataacacagcgagacagagtggaccctgagccatcctctgcatgtagcacaaagagcatcccgttggtttagatgcagttttagtccagatcttccatgtacaacctgataggtttggattttttttttttttgcctttttttaatgttttagtaaaaaaatataaaataagaaatgaagttttgttactta

SEQ ID NO: 24724 - DNA, 600 bp, Chicken  19866894239392_1
tcctttggttatcttgttttgaatgcaggatggaattttctaagtagctaaatattctcttcttccctttccctcctttctgttctcgcacattacctccaaaacctagaatcatttcttctttgattctctggtatgtcttgcagttgaataaagtcttttgattaaaagtatttgtattgctctttttttttcaatttcttgtagttgagtcacctcctttccagatttggtctgtaattacaagagctcagttgatcaactaattgtggggaaaaaaggagaagaaaaattgcttcyctaatatcatggtttaattataagcctggtataaatctatttatgcaacakttagagtgttctgggttttgatggtcttgggatgcttctctacaagtaaaaattggagactgccagtcaggattgtctttactcccctcagtttatcactgaatagctgttacrtgcatggtaatagacagatgctgtcctacagaaacaaactcgctgtgtctgctttgtcgcaggcacttcaggaggcctatcgtgtgctgaagccaggagggagatttctctgccttgaatttagtcatgtcagca

SEQ ID NO: 24725 - DNA, 600 bp, Chicken  19866894239392_2
atattctcttcttccctttccctcctttctgttctcgcacattacctccaaaacctagaatcatttcttctttgattctctggtatgtcttgcagttgaataaagtcttttgattaaaagtatttgtattgctctttttttttcaatttcttgtagttgagtcacctcctttccagatttggtctgtaattacaagagctcagttgatcaactaattgtggggaaaaaaggagaagaaaaattgcttcyctaatatcatggtttaattataagcctggtataaatctatttatgcaacakttagagtgttctgggttttgatggtcttgggatgcttctctacaagtaaaaattggagactgccagtcaggattgtctttactcccctcagtttatcactgaatagctgttacrtgcatggtaatagacagatgctgtcctacagaaacaaactcgctgtgtctgctttgtcgcaggcacttcaggaggcctatcgtgtgctgaagccaggagggagatttctctgccttgaatttagtcatgtcagcaaccctcttctttccaggtaggaacatggtgacaccttatgccatggcataa

SEQ ID NO: 24726 - DNA, 561 bp, Chicken  19866894239392_3
taaaagtatttgtattgctctttttttttcaatttcttgtagttgagtcacctcctttccagatttggtctgtaattacaagagctcagttgatcaactaattgtggggaaaaaaggagaagaaaaattgcttcyctaatatcatggtttaattataagcctggtataaatctatttatgcaacakttagagtgttctgggttttgatggtcttgggatgcttctctacaagtaaaaattggagactgccagtcaggattgtctttactcccctcagtttatcactgaatagctgttacrtgcatggtaatagacagatgctgtcctacagaaacaaactcgctgtgtctgctttgtcgcaggcacttcaggaggcctatcgtgtgctgaagccaggagggagatttctctgccttgaatttagtcatgtcagcaaccctcttctttccaggtaggaacatggtgacaccttatgccatggcataagacttttacatgcactcacagtaagagatgacgacgctttgggccttttcattgtgcatttaaatcaaattcaga

SEQ ID NO: 24727 - DNA, 599 bp, Chicken  19866894239395_1
  misc_feature (1)..(6): n is any nucleotide
nnnnnnatattggtggctgagcgcgagtggtgggcatgagggcatcctgctcctggcctgagctggcacctgggctgggaccagccatcagccagggcagggggctttgggcagggcagggcagagctgggtgcccccagggcagtgggctctgaggggctccttcacagcatgcactgtgagaggggcaggcggtgggtgagggtaggaggctgagggtgcaggggggttgagggaaggcagaaggatggagcgggacagcagcagtgttgtcctctgacagaatgtgggtttgtgtgkggaaaaaagtagtactcacccttgtaaacattcagcgagatggtctttaatggaacatagttgytgctatacacacaggaatatatccctgagtcctctgcctggaggtcagacatggtgatagatacagtcctgttgtaatcctttattgtaatgtggccctgcatggccctgtctgaatacctatactgcactgagtcaagcgtcagcacttcaagctgacatcgttcatttctcatgcggcaccaggctttcagttgctcrttttcaggctgtgttgtgtaaggacactggataga

SEQ ID NO: 24728 - DNA, 600 bp, Chicken  19866894239395_2
ggcacctgggctgggaccagccatcagccagggcagggggctttgggcagggcagggcagagctgggtgcccccagggcagtgggctctgaggggctccttcacagcatgcactgtgagaggggcaggcggtgggtgagggtaggaggctgagggtgcaggggggttgagggaaggcagaaggatggagcgggacagcagcagtgttgtcctctgacagaatgtgggtttgtgtgkggaaaaaagtagtactcacccttgtaaacattcagcgagatggtctttaatggaacatagttgytgctatacacacaggaatatatccctgagtcctctgcctggaggtcagacatggtgatagatacagtcctgttgtaatcctttattgtaatgtggccctgcatggccctgtctgaatacctatactgcactgagtcaagcgtcagcacttcaagctgacatcgttcatttctcatgcggcaccaggctttcagttgctcrttttcaggctgtgttgtgtaaggacactggatagagaacgtgcttccttcctgttggctcatctcagcttcaggcgtttcggcttggagacctgcaagta

SEQ ID NO: 24729 - DNA, 600 bp, Chicken  19866894239395_3
cagtgttgtcctctgacagaatgtgggtttgtgtgkggaaaaaagtagtactcacccttgtaaacattcagcgagatggtctttaatggaacatagttgytgctatacacacaggaatatatccctgagtcctctgcctggaggtcagacatggtgatagatacagtcctgttgtaatcctttattgtaatgtggccctgcatggccctgtctgaatacctatactgcactgagtcaagcgtcagcacttcaagctgacatcgttcatttctcatgcggcaccaggctttcagttgctcrttttcaggctgtgttgtgtaaggacactggatagagaacgtgcttccttcctgttggctcatctcagcttcaggcgtttcggcttggagacctgcaagtatatggtctgatgaggctacagctctgcacgcacagaacggcttcagctggaagcattgaggagcctggtgtgggaaggtgagagctggggctgctgcccctggcctgccctgcactgccctcccctgcccttcctctgcactgcagtactgggaaaggtgtcccatgggaagcccctggcatgcccagcccttctcttac

SEQ ID NO: 24730 - DNA, 599 bp, Chicken  19866894239402_1
  misc_feature (1)..(111): n is any nucleotide
nnnnnnnnnnnnnnnnnnnnnnnnnnnnnnnnnnnnnnnnnnnnnnnnnnnnnnnnnnnnnnnnnnnnnnnnnnnnnnnnnnnnnnnnnnnnnnnnnnnnnnnnnnnnnnngtgtaagaactgaccccagccagcagtgacattgcctgctcccttggggttctgatacagctgtgatgggtttgtcctccccttctgccccatcaggtcatcacactggagggctgggtggacatcatgtacttcgtcatggacgcacactccttctacaacttcatctacttcatcctactgatcatygtgagtgtcctcatggggacgcgcggttgtggagtggccyakgggggacaggcagagagcacagtgaatgtaaaggctgctctcacgtgggagaggtagaaaacatgaaggaaagatgctcttaagctttggtagatacacttgctgttgcttctaacacctctctctttgtcctccatgctcccaccccatagttgcccccttgaatttaagtttaaagcaggcaaatttcccccatcatgttttcagatctggaggaggggaggttggcctggagctcccctgtgtccaagagccca

SEQ ID NO: 24731 - DNA, 599 bp, Chicken  19866894239402_2
  misc_feature (1)..(71): n is any nucleotide
nnnnnnnnnnnnnnnnnnnnnnnnnnnnnnnnnnnnnnnnnnnnnnnnnnnnnnnnnnnnnnnnnnnnnnngtgtaagaactgaccccagccagcagtgacattgcctgctcccttggggttctgatacagctgtgatgggtttgtcctccccttctgccccatcaggtcatcacactggagggctgggtggacatcatgtacttcgtcatggacgcacactccttctacaacttcatctacttcatcctactgatcatygtgagtgtcctcatggggacgcgcggttgtggagtggccyakgggggacaggcagagagcacagtgaatgtaaaggctgctctcacgtgggagaggtagaaaacatgaaggaaagatgctcttaagctttggtagatacacttgctgttgcttctaacacctctctctttgtcctccatgctcccaccccatagttgcccccttgaatttaagtttaaagcaggcaaatttcccccatcatgttttcagatctggaggaggggaggttggcctggagctcccctgtgtccaagagcccaacaggcgcagaagggacgtttaggggaggcagccccaaca

SEQ ID NO: 24732 - DNA, 599 bp, Chicken  19866894239402_3
  misc_feature (1)..(69): n is any nucleotide
nnnnnnnnnnnnnnnnnnnnnnnnnnnnnnnnnnnnnnnnnnnnnnnnnnnnnnnnnnnnnnnnnnnnngtgtaagaactgaccccagccagcagtgacattgcctgctcccttggggttctgatacagctgtgatgggtttgtcctccccttctgccccatcaggtcatcacactggagggctgggtggacatcatgtacttcgtcatggacgcacactccttctacaacttcatctacttcatcctactgatcatygtgagtgtcctcatggggacgcgcggttgtggagtggccyakgggggacaggcagagagcacagtgaatgtaaaggctgctctcacgtgggagaggtagaaaacatgaaggaaagatgctcttaagctttggtagatacacttgctgttgcttctaacacctctctctttgtcctccatgctcccaccccatagttgcccccttgaatttaagtttaaagcaggcaaatttcccccatcatgttttcagatctggaggaggggaggttggcctggagctcccctgtgtccaagagcccaacaggcgcagaagggacgtttaggggaggcagccccaacatc

SEQ ID NO: 24733 - DNA, 600 bp, Chicken  19866894239407_1
ctggagaaggctccagggagatttctagtgaccttccagtacctggaaggggcctacaagaaagatgggaagagatttcatcaagaattgcagtgatgggacaaggggtaatggctctaagctaaaagagatttagattagataaaaggaataaattatttacaatgagggtagtgaggcactgaacagcttgcccaaagaagttgtagatgccccatcctcctggatatgttcaaagccagactgaatggggctttgaacaacatgatttagttttaggtgtccctgcccatggaactrgatggtctgtagtatcccttctaatcactctatgaaagaacacacttcaaaatacatttgttatactccatcgacatcayttggagcttttctagtgactatgcatttactgtgtgtttaacaacatatttaatgtgtaagatacagcacatgacctattgagtgttattgcctatttagttacagctggcaagctagcatttttaataaccgaaccagatgcttccctgagacttaatgcaatatcaaaggatgctgaaacccagtagcatttaaaagagcaagctaaatatccagaaa

SEQ ID NO: 24734 - DNA, 600 bp, Chicken  19866894239407_2
tcaagaattgcagtgatgggacaaggggtaatggctctaagctaaaagagatttagattagataaaaggaataaattatttacaatgagggtagtgaggcactgaacagcttgcccaaagaagttgtagatgccccatcctcctggatatgttcaaagccagactgaatggggctttgaacaacatgatttagttttaggtgtccctgcccatggaactrgatggtctgtagtatcccttctaatcactctatgaaagaacacacttcaaaatacatttgttatactccatcgacatcayttggagcttttctagtgactatgcatttactgtgtgtttaacaacatatttaatgtgtaagatacagcacatgacctattgagtgttattgcctatttagttacagctggcaagctagcatttttaataaccgaaccagatgcttccctgagacttaatgcaatatcaaaggatgctgaaacccagtagcatttaaaagagcaagctaaatatccagaaatagtctgggataatcaggtattctgaggtgggccagaactccatgagaatgggagataggtggaataggtcaggaaagaa

SEQ ID NO: 24735 - DNA, 599 bp, Chicken  19866894239409_1
  misc_feature (1)..(133): n is any nucleotide
nnnnnnnnnnnnnnnnnnnnnnnnnnnnnnnnnnnnnnnnnnnnnnnnnnnnnnnnnnnnnnnnnnnnnnnnnnnnnnnnnnnnnnnnnnnnnnnnnnnnnnnnnnnnnnnnnnnnnnnnnnnnnnnnnnnnntgtgtgggatttggcctttcctttgctgccgctgccggtttacttcagttcaacttcagcagagctctgcctgctgagaatgctcctccaggacctttcccaagggcagtgcagtgcatgcaggtaccagagaggcatgtggtgttacgcacagtgcttccctctgrcctggctccccagggctggctgtgcactgctgctagcagttaactttccccaatggggatttttccgcattcattgcataggagaaacrtggggaagaaggatgctgaacccattgctgtagcctggagaatgaggggagatgggctggggcctggggcttgttcctggctgctcatgcaaggtttgtttgctcaggctcattccttccattaaacggttgccctgagggacatcccacttgctatctcgtttctgtaatagttttctctgtgttattttgttggttttcttatccccg

SEQ ID NO: 24736 - DNA, 599 bp, Chicken  19866894239409_2
  misc_feature (1)..(44): n is any nucleotide
nnnnnnnnnnnnnnnnnnnnnnnnnnnnnnnnnnnnnnnnnnnntgtgtgggatttggcctttcctttgctgccgctgccggtttacttcagttcaacttcagcagagctctgcctgctgagaatgctcctccaggacctttcccaagggcagtgcagtgcatgcaggtaccagagaggcatgtggtgttacgcacagtgcttccctctgrcctggctccccagggctggctgtgcactgctgctagcagttaactttccccaatggggatttttccgcattcattgcataggagaaacrtggggaagaaggatgctgaacccattgctgtagcctggagaatgaggggagatgggctggggcctggggcttgttcctggctgctcatgcaaggtttgtttgctcaggctcattccttccattaaacggttgccctgagggacatcccacttgctatctcgtttctgtaatagttttctctgtgttattttgttggttttcttatccccgctgctgtcatttctattatccaagctcctaactgactgcccagtgctggtcacgcacagcaccagggctcagtttttattcttatgctc

SEQ ID NO: 24737 - DNA, 600 bp, Chicken  19866894239409_3
ggggctgtaagaaaggaggggactgactcttttatcagggtcttctgtgacgggacaagaagaaaaggtttcacattaaaagaggggagatttagattggacataagggagaagttttttataatcagggtggtgaggcactggcacaggttgcccagaggggtggtggtgtcccatccctggggacactcaaggttaggctggatgaggctctgagcacctgatggagctgtaggtgtccctgctcgttgcaggggggttggactgatggcctttagggctcccttctaactccaaacygccagcatctgtgtaatccatgcttcaggtccagtcttgacagcttggatattagatagtggtaggtggaccattggacttgatgatcttagaggtcttttccaaccttaatgattttatgatgtaggcacggggttggggaggggtctgagggacaggatgtaggccatatggggaaataagagatggagtaataagaccaatgcccctcctgtgctagggggcatcaggacaccctgcatatcatgctgtgcaggtgtttctggttatttaaatgaatggtgtgcaggtgtggatctg

SEQ ID NO: 24738 - DNA, 600 bp, Chicken  19866894239411_1
tccccacacttcattttctgctgctttacaaattcaattaccttgaagaatctgataagtgctagagccagtacaaacaaagcctggaaaaggaggaaatctgacttcccaccattcaacagcagctcacatctgtcaggtcacgtcaggtcctcactcataccagggctatgtttgattttcagccctgttatccagcttcccattgatacaagctggatggtcagtacagctatcacagtaacaaaggttaccctacatttaagtaagcatttgttttagagatggatagttcacatragaagaacctcagactgtgcactttgtatctgaaacaygctgcttctgacatttttccctataatacagatttcatttaacttcctttgtacatgtgcaaaggtttaactaccttgcttgagattctataaattaaacagtagtttgattcagtattccatgctgtggtgcccaggttgagcaagaagcacctgaagatcagagcagtccattaccagctttccttccactactgtacgtggcagcaactgtgcttgtatcttgtttagctacctcagtttcatgtatttaatttcccat

SEQ ID NO: 24739 - DNA, 600 bp, Chicken  19866894239411_2
taccttgaagaatctgataagtgctagagccagtacaaacaaagcctggaaaaggaggaaatctgacttcccaccattcaacagcagctcacatctgtcaggtcacgtcaggtcctcactcataccagggctatgtttgattttcagccctgttatccagcttcccattgatacaagctggatggtcagtacagctatcacagtaacaaaggttaccctacatttaagtaagcatttgttttagagatggatagttcacatragaagaacctcagactgtgcactttgtatctgaaacaygctgcttctgacatttttccctataatacagatttcatttaacttcctttgtacatgtgcaaaggtttaactaccttgcttgagattctataaattaaacagtagtttgattcagtattccatgctgtggtgcccaggttgagcaagaagcacctgaagatcagagcagtccattaccagctttccttccactactgtacgtggcagcaactgtgcttgtatcttgtttagctacctcagtttcatgtatttaatttcccatatggttgggaaggtaatattagggaatatgacctggaa

SEQ ID NO: 24740 - DNA, 600 bp, Chicken  19866894239411_3
ttgtatcttgtttagctacctcagtttcatgtatttaatttcccatatggttgggaaggtaatattagggaatatgacctggaatattgcttttcactgtacaactggagctccattcttcaaagtctagacatcacatacaaggagctgcaatattagccagagttcagcttcaaaataattacagctttagacagagatcagttaaaccccaaaggagcagaatttggtatgaaatacatttccaagttcagtaaataaacaaggatccaatttcaaatccacttctatcacaaagtratatcgctcagctctcctataacagaaagtttggccttaactccytgaactttggaaaaaggtcaacccataaatagacactttttacttaggtgtcagaaaaaaaaaaaaaaaaggtcagaagaggaagttctgacacaaaaatgcaacctagttttacatcagtaaacttaaggagacagatttcagtgtagaggacattattattgtggacactctttccatgaggactcaaaatacaacattctgaaatatttcaggtacactgcaaaactgatcacgcaaaaattcccctgagac

SEQ ID NO: 24741 - DNA, 600 bp, Chicken  19866894239411_4
tatggttgggaaggtaatattagggaatatgacctggaatattgcttttcactgtacaactggagctccattcttcaaagtctagacatcacatacaaggagctgcaatattagccagagttcagcttcaaaataattacagctttagacagagatcagttaaaccccaaaggagcagaatttggtatgaaatacatttccaagttcagtaaataaacaaggatccaatttcaaatccacttctatcacaaagtratatcgctcagctctcctataacagaaagtttggccttaactccytgaactttggaaaaaggtcaacccataaatagacactttttacttaggtgtcagaaaaaaaaaaaaaaaaggtcagaagaggaagttctgacacaaaaatgcaacctagttttacatcagtaaacttaaggagacagatttcagtgtagaggacattattattgtggacactctttccatgaggactcaaaatacaacattctgaaatatttcaggtacactgcaaaactgatcacgcaaaaattcccctgagacacacatttaagaaaatttcccttgtacaagttcagttcccctaag

SEQ ID NO: 24742 - DNA, 600 bp, Chicken  19866894239414_1
agagaaaagcttaaaaaaatattcaagaaaattgaacttgccagaggaactatcagaaaatatgtgttcctcgataacattgaatatacactttaagtataattcataggttactttttatctattagttcatcacagaaatgaaatattctgtggaatagtggaaagtatattttcagcagttaagcaggtacttcttttaagaaaggtgagagttaataaattacattaatttttgatagaaatttgtattcatattttcagggatactctttaaaaaaccagcatagccaaagttcyttaatcttaaataattaattttctcttacataaaggatgatcaaacttgtgcttcctttctgactaaagaggagcccataactgccaaactagaattaatattctagtttaaattggaatatttcctctgttggtttcactgttgttgctgtttgtttgtttgtttaaacaaaataaaagaaaatctaaagaaaattctgaaacttggccctttttgtatcatgacttccctatattagagccaaaataaaactcgtaacagaataaagtggcacactttactcagtatccttactgatc

SEQ ID NO: 24743 - DNA, 600 bp, Chicken  19866894239415_1
ttccccagaaggtgtaaggcagcttggaaaccctgttttctaaaaacagaaaattccttctagagggtctgtgggacactgggagaattaaaccgaacctcaggtcaaggaaaactgattctgaaggtggaccaacaactgtataaataaagcataaccttaccagggtgtgcatactgctagaaaggaaaaatcctgccttggtatctgaatctccactccaaatgaagagcgagggtcctaaaggctccatagtgttatttccgtgtgcatcagtgccttagaagagggtgtgaatgrcagactgaagcttgctgaaaggttcagccctatcaactgtaaagcacaaaggctgttcagacattgggtaacatcaaacacatacactaaaattcagtagttcaatacagactaatctgttgcctgtgaaatagtacagattgcataaacaagactttctcaaggacctgaaattgtaagatctcatggggaaaagaaaactcagcaagcatttagaataatttctggttcgctgttctctggaatggtagtgtgaaaaagcaggagtgattggatgcatggcagcagaatgggagtggg

SEQ ID NO: 24744 - DNA, 600 bp, Chicken  19866894239416_1
ggacttccttgaatcatctgctcttgtctgaggcccatgtagtgacagatcattttctcccatcagttccatctcctttgagactgccttttttgaatgatttagaagatttgattgagctgtcctcgctctgctttggtccctggagttctgtcttgctcacagtgttgctcttcagatgtgatctagcatgcacttaatgtatatgagtagtaattttaaagtcattaatgaacaaccgatgttttttatgtaagataaatgcttaagtcattatctgaatgggaacataagagatgrggggtgaaatcaggttgacaaggatctcctttatggaccacgggggttactaagtatcatccaggcttatcaatgacagttacttctttcaatgtgttaaaaccaaattcagcttcaccgaaagaaagagggccccaaactcaatgttgggtgtcccacagagaagaacaatctacaggtcgctgatctgaacatgcttgtcagttctagataggtgatgttttggcctaccacataggtgagtacgagagggcagagaagtgataggaaaataatacaggtatgtagtgtgtgacaagc

SEQ ID NO: 24745 - DNA, 600 bp, Chicken  19866894239422_1
aacgaatacaaatctgaaaaaacagcctcggggatagcaaataccatggagacaatccagacacagccagctttacagcaggtcttcaggagtgcgtccgaggtctgcagctccaggggcttaacaatggctctgtacctagaagcaaccaacgccattgtcaaatatggtagtagtgcaagctctagtcatgcacactcactgcagataacggcatctctgttttggctaaagttgtaagaatcatcttggaaatggaacatatagtagctctttataattcagatgtaagtgcaaagrttgattttgaatgtattattttaatgagttggttggcagaactcgtcatcaaagcctttctaagtaaaggygccttctactgtttggattagaatcagtaaaaggggtcatctatcctactttcatgaacatctcttattttcatggcactgcaccgaaagttaaataagtatgagaactggcttattattacttgaaaccaagcatgtatgctgttgttctcctcagtgttcataagaccccagcaaatatagtgatcttactcaaagtaatgctcaggtgttcattcacatttataaa

SEQ ID NO: 24746 - DNA, 600 bp, Chicken  19866894239422_2
tttacagcaggtcttcaggagtgcgtccgaggtctgcagctccaggggcttaacaatggctctgtacctagaagcaaccaacgccattgtcaaatatggtagtagtgcaagctctagtcatgcacactcactgcagataacggcatctctgttttggctaaagttgtaagaatcatcttggaaatggaacatatagtagctctttataattcagatgtaagtgcaaagrttgattttgaatgtattattttaatgagttggttggcagaactcgtcatcaaagcctttctaagtaaaggygccttctactgtttggattagaatcagtaaaaggggtcatctatcctactttcatgaacatctcttattttcatggcactgcaccgaaagttaaataagtatgagaactggcttattattacttgaaaccaagcatgtatgctgttgttctcctcagtgttcataagaccccagcaaatatagtgatcttactcaaagtaatgctcaggtgttcattcacatttataaaatatgagctaatactgttgttgattcatggcttgtgattcagccacatgcggactgagtcacacatatgag

SEQ ID NO: 24747 - DNA, 600 bp, Chicken  19866894239423_1
cgagatcccgagagctgagctccgccggggtcacccacctgggcagcacgattaactcctaagctttcctgtctgcacagtgagttatctggggacaccgagctgcactctgctgcctcttgttattaaatgagtgcccttggcaggacagaggtccctgcctggcacagaaaactgaaccgaaagggatcctgctgccatttcgggagagcttggtctgacctctttggattttaagggctgtggcctcctgtgctgccagggagtcagggcttctgtggaagattttccttgcagttyttctttctacctctgagcctcttcccatctcacacagtgtgatgggggtgattatggggcttctctaacgtgtttataaggcctgagctccattaagtctgaataatgacacgagcgtgatgttgtgggtgtgatgccatctgtgtgtcatggggtgagaaattttttagcctatcattgtctcccttgcaaccatcatcttctccctcagcaactatcttcctgctcccccgcaacatctttctttgcacctacccaccatcatctttgtttccccttacccaccatcatcttctggag

SEQ ID NO: 24748 - DNA, 600 bp, Chicken  19866894239429_1
tgcgaatttggtgtcagaaaaccttacctgtttgttaatctaggaggttcagagagctgtgatattctttttaatattcccaacggctctggagaagttgcagtgcataggtaacttctggcttctcctttcagactctttaaattgaagaaacgctacaggaatgtcctggacactatgtttgagctgtttcctaggatggccaggtactgattcactctctttgaatgtagaagagggggtgaagtttagtgtctggggctgtagtccttttttttttttggagcaacttgtgatggraagctcttctgggacaccttctgcttctataaggataagtaagagttgatgtttaactttcctaccccctgacttttggtgagagagaggcccatttgtgaggagtattggcacgaatgcactcaatctcaggtgtttccttgtccttcatacagacacttcagagcattattgtgaaatggtggggcagaaggagcttggtgtttgagtggagcatcgttggatgttattttcttggagcagatctgggcagagcgttttaggtagagagcattgttcttggcactgtcccagcatcta

SEQ ID NO: 24749 - DNA, 599 bp, Chicken  19866894239433_1
  misc_feature (1)..(207): n is any nucleotide
nnnnnnnnnnnnnnnnnnnnnnnnnnnnnnnnnnnnnnnnnnnnnnnnnnnnnnnnnnnnnnnnnnnnnnnnnnnnnnnnnnnnnnnnnnnnnnnnnnnnnnnnnnnnnnnnnnnnnnnnnnnnnnnnnnnnnnnnnnnnnnnnnnnnnnnnnnnnnnnnnnnnnnnnnnnnnnnnnnnnnnnnnnnnnnnnnnnnnnnnnnnnnnnatgacgggtccttaccccgcagcagctcttcgtgggcgcacacggtgcggacgcagatctccttgttgatcacgtagacccggcggaggctgsggggaagaggtggacttttggggttaaaaaacaaaacaaamaacaacccaaatgcggcgctgtgccaatggggatgggggtaggggggaaaggggcagcccctgcgcttgcctgtagaagcagatctcgttcaggcactgcttgcagggcttgtggacggagtagagcctggtgcaggggtactgctcctcccggcagtctgcaatgagagccagggctggttcgggttgtttgccccccccaaaaatgcaagcaggttcggataggggggaaaaatccatgagccctgaggttgtgtt

SEQ ID NO: 24750 - DNA, 599 bp, Chicken  19866894239433_2
  misc_feature (1)..(166): n is any nucleotide
nnnnnnnnnnnnnnnnnnnnnnnnnnnnnnnnnnnnnnnnnnnnnnnnnnnnnnnnnnnnnnnnnnnnnnnnnnnnnnnnnnnnnnnnnnnnnnnnnnnnnnnnnnnnnnnnnnnnnnnnnnnnnnnnnnnnnnnnnnnnnnnnnnnnnnnnnnnnnnnnnnnnnnatgacgggtccttaccccgcagcagctcttcgtgggcgcacacggtgcggacgcagatctccttgttgatcacgtagacccggcggaggctgsggggaagaggtggacttttggggttaaaaaacaaaacaaamaacaacccaaatgcggcgctgtgccaatggggatgggggtaggggggaaaggggcagcccctgcgcttgcctgtagaagcagatctcgttcaggcactgcttgcagggcttgtggacggagtagagcctggtgcaggggtactgctcctcccggcagtctgcaatgagagccagggctggttcgggttgtttgccccccccaaaaatgcaagcaggttcggataggggggaaaaatccatgagccctgaggttgtgttcagcattgcatcgttccctacccccaaagaggaaggctgaa

SEQ ID NO: 24751 - DNA, 600 bp, Chicken  19866894239433_3
ttgccccccccaaaaatgcaagcaggttcggataggggggaaaaatccatgagccctgaggttgtgttcagcattgcatcgttccctacccccaaagaggaaggctgaaaacatgggggggggatgcatgggtgagttgtgttagcaggagagaggtgagagccacacttacccaaaggtccgggctctgtgggctcagtctcggggacagcagctgatggggggaagaacagagctttggggttgggcatagggagcatcccattgctccccccacccccagtcaggttttagggccgrggcagtgctgggatatggtcgctgttttgcacccacccatggtcggcgctggcacaacttcctgctgggattgctgctgggactggaagcgaaactgctcctcgggggtgcgtggggtcacatctgtggggacagagcagtgagggtgtgcacccccagcccccaacctgccccagggctgcactcaccgtggtagtcgtagtaatcctgaatttctgggggggggraaaaagggagaaaaacrgagcgtaaggatggtgggttctcctgtgttatcgcatagcacagctcatggggact

SEQ ID NO: 24752 - DNA, 600 bp, Chicken  19866894239433_4
gaacagagctttggggttgggcatagggagcatcccattgctccccccacccccagtcaggttttagggccgrggcagtgctgggatatggtcgctgttttgcacccacccatggtcggcgctggcacaacttcctgctgggattgctgctgggactggaagcgaaactgctcctcgggggtgcgtggggtcacatctgtggggacagagcagtgagggtgtgcacccccagcccccaacctgccccagggctgcactcaccgtggtagtcgtagtaatcctgaatttctgggggggggraaaaagggagaaaaacrgagcgtaaggatggtgggttctcctgtgttatcgcatagcacagctcatggggactgggagcaatgggaaacggggcgggaggagggttggggtgggaaagggaacggagcagggcatggaagaaggcattggggaaagcaaagctgggaggaagaggaggtgggtgaaggatctcacctgcctgctggtcgtactgggagtattgcaccggttccgggtaggtaatgccctcaaacctgctgtattggccctggaccaggagagctggggaggtgagggggg

SEQ ID NO: 24753 - DNA, 584 bp, Chicken  19866894239433_5
tgggcatagggagcatcccattgctccccccacccccagtcaggttttagggccgrggcagtgctgggatatggtcgctgttttgcacccacccatggtcggcgctggcacaacttcctgctgggattgctgctgggactggaagcgaaactgctcctcgggggtgcgtggggtcacatctgtggggacagagcagtgagggtgtgcacccccagcccccaacctgccccagggctgcactcaccgtggtagtcgtagtaatcctgaatttctgggggggggraaaaagggagaaaaacrgagcgtaaggatggtgggttctcctgtgttatcgcatagcacagctcatggggactgggagcaatgggaaacggggcgggaggagggttggggtgggaaagggaacggagcagggcatggaagaaggcattggggaaagcaaagctgggaggaagaggaggtgggtgaaggatctcacctgcctgctggtcgtactgggagtattgcaccggttccgggtaggtaatgccctcaaacctgctgtattggccctggaccaggagagctggggaggtgagggggga

SEQ ID NO: 24754 - DNA, 600 bp, Chicken  19866894239449_1
tcctcccttgggttgaccacaacaagcaaacacattgaaaagcacaaatccaatctacgccaagattttgtgtgctagttgaatgtgttgtataacacattttctaacataagtccaataacttactgatttctgatttctttttttaaaaaatagcatgtgattttggggagctatatgagaatcctttatttctaggaatgctgcaaagtttcacaaggtgaataaaataggtagaacactttacacaagaaaatctgacagcttctaaaatatacatgaaactccagagggaaacaytgctttacatcagcaagatttttcttatgtatgggaatgaactaaagaatatcattgccacttctgagtaaattaacacacttgtaaagagaatgtgaactccaaaaaatccacaaccagttgcatttattgtttctaaaattatacctaacaaaaactattatatagtttagattgactgtcaccatgtattagctttctcagattaactggaaaagaactctacaggagacaattcttgaataaccaaaaacaaaaaataagcrcaagtagtcagcagaattctaaagagagaaaaac

SEQ ID NO: 24755 - DNA, 600 bp, Chicken  19866894239449_2
tctaaaatatacatgaaactccagagggaaacaytgctttacatcagcaagatttttcttatgtatgggaatgaactaaagaatatcattgccacttctgagtaaattaacacacttgtaaagagaatgtgaactccaaaaaatccacaaccagttgcatttattgtttctaaaattatacctaacaaaaactattatatagtttagattgactgtcaccatgtattagctttctcagattaactggaaaagaactctacaggagacaattcttgaataaccaaaaacaaaaaataagcrcaagtagtcagcagaattctaaagagagaaaaaccttaatcctatttagctgtgagttaggcatgcaggaaacctacaagcactaatataatattaattcataaagttataaaattaattcataaaattcactaatatagtttaaattcatgtgcactgtcattacaggcagacctgtgttgtttctttgttttcacaacatgaaatgttgttgtgttgtttttctcttgggtgggataagtttttgtgatagtattattatcttcacattgcactatataaataaataacgtctcaacc

SEQ ID NO: 24756 - DNA, 599 bp, Chicken  19866894239452_1
  misc_feature (1)..(89): n is any nucleotide
nnnnnnnnnnnnnnnnnnnnnnnnnnnnnnnnnnnnnnnnnnnnnnnnnnnnnnnnnnnnnnnnnnnnnnnnnnnnnnnnnnnnnnnnnggcttgtgccccacagggcagggtcagacccttaggtggtcgcccacaggagcatccccaacctgctcggtgcctagggctgtggagtgggagccttggtcccttgccatgccggctggagtgcgtcgtattttaaaatgcacttatttgttttttaatctgataatatcttctggttcaataataaacgaattgcatacttaaaatagcrcaggagaggggtcctgtttcagattagtcacataacagagatgcccagggctgctttggagatagtttgaaggcttgtttttacgagaaggtcctgtgtgcctgtgccagctatggaagggcttactcgggcctgatcaaactcgggtcagtcagtgtatcagatacattcctctgtcagtcgcatgttagccataactgtcaccagatttgcaataaaatagctgcagctcagcacttagaattaacacagcccatgcacrtagygatccatcatttcagagtcaggccacctcagag

SEQ ID NO: 24757 - DNA, 600 bp, Chicken  19866894239452_2
tggttcaataataaacgaattgcatacttaaaatagcrcaggagaggggtcctgtttcagattagtcacataacagagatgcccagggctgctttggagatagtttgaaggcttgtttttacgagaaggtcctgtgtgcctgtgccagctatggaagggcttactcgggcctgatcaaactcgggtcagtcagtgtatcagatacattcctctgtcagtcgcatgttagccataactgtcaccagatttgcaataaaatagctgcagctcagcacttagaattaacacagcccatgcacrtagygatccatcatttcagagtcaggccacctcagagctggcactttgtggagccgcgtgcagggcggttaatgcactygagtaaggcaggagcccttggaggctttgcaacacaaatgttgaccttgctcctctgccactgtgcagtgggatttactgggagtccarttgcatttcccaggcctagaaagtgttaaaaaaarcacatagccacaaaaaacttctcaaaacttcacagaagggttgaagttggcagggacctctgggtccatctggtccaacccctgcccaagcagaggc

SEQ ID NO: 24758 - DNA, 600 bp, Chicken  19866894239452_3
tcaataataaacgaattgcatacttaaaatagcrcaggagaggggtcctgtttcagattagtcacataacagagatgcccagggctgctttggagatagtttgaaggcttgtttttacgagaaggtcctgtgtgcctgtgccagctatggaagggcttactcgggcctgatcaaactcgggtcagtcagtgtatcagatacattcctctgtcagtcgcatgttagccataactgtcaccagatttgcaataaaatagctgcagctcagcacttagaattaacacagcccatgcacrtagygatccatcatttcagagtcaggccacctcagagctggcactttgtggagccgcgtgcagggcggttaatgcactygagtaaggcaggagcccttggaggctttgcaacacaaatgttgaccttgctcctctgccactgtgcagtgggatttactgggagtccarttgcatttcccaggcctagaaagtgttaaaaaaarcacatagccacaaaaaacttctcaaaacttcacagaagggttgaagttggcagggacctctgggtccatctggtccaacccctgcccaagcagaggcaccc

SEQ ID NO: 24759 - DNA, 600 bp, Chicken  19866894239452_4
tgcccagggctgctttggagatagtttgaaggcttgtttttacgagaaggtcctgtgtgcctgtgccagctatggaagggcttactcgggcctgatcaaactcgggtcagtcagtgtatcagatacattcctctgtcagtcgcatgttagccataactgtcaccagatttgcaataaaatagctgcagctcagcacttagaattaacacagcccatgcacrtagygatccatcatttcagagtcaggccacctcagagctggcactttgtggagccgcgtgcagggcggttaatgcactygagtaaggcaggagcccttggaggctttgcaacacaaatgttgaccttgctcctctgccactgtgcagtgggatttactgggagtccarttgcatttcccaggcctagaaagtgttaaaaaaarcacatagccacaaaaaacttctcaaaacttcacagaagggttgaagttggcagggacctctgggtccatctggtccaacccctgcccaagcagaggcacccagagcagggtgtccaggcccatggccaggtggcttttggcaccactacgtttgtataaatacagacttagaatag

SEQ ID NO: 24760 - DNA, 600 bp, Chicken  19866894239452_5
gcctgatcaaactcgggtcagtcagtgtatcagatacattcctctgtcagtcgcatgttagccataactgtcaccagatttgcaataaaatagctgcagctcagcacttagaattaacacagcccatgcacrtagygatccatcatttcagagtcaggccacctcagagctggcactttgtggagccgcgtgcagggcggttaatgcactygagtaaggcaggagcccttggaggctttgcaacacaaatgttgaccttgctcctctgccactgtgcagtgggatttactgggagtccarttgcatttcccaggcctagaaagtgttaaaaaaarcacatagccacaaaaaacttctcaaaacttcacagaagggttgaagttggcagggacctctgggtccatctggtccaacccctgcccaagcagaggcacccagagcagggtgtccaggcccatggccaggtggcttttggcaccactacgtttgtataaatacagacttagaataggtgaatcagcactgacaagcttttgtcatcttccatgggaagctactatttttagtgtatttagtgtattataagcagtagcatcactc

SEQ ID NO: 24761 - DNA, 600 bp, Chicken  19866894239452_6
acattcctctgtcagtcgcatgttagccataactgtcaccagatttgcaataaaatagctgcagctcagcacttagaattaacacagcccatgcacrtagygatccatcatttcagagtcaggccacctcagagctggcactttgtggagccgcgtgcagggcggttaatgcactygagtaaggcaggagcccttggaggctttgcaacacaaatgttgaccttgctcctctgccactgtgcagtgggatttactgggagtccarttgcatttcccaggcctagaaagtgttaaaaaaarcacatagccacaaaaaacttctcaaaacttcacagaagggttgaagttggcagggacctctgggtccatctggtccaacccctgcccaagcagaggcacccagagcagggtgtccaggcccatggccaggtggcttttggcaccactacgtttgtataaatacagacttagaataggtgaatcagcactgacaagcttttgtcatcttccatgggaagctactatttttagtgtatttagtgtattataagcagtagcatcactcacgtgtatgtataaaggcatgaaagaatgcccgta

SEQ ID NO: 24762 - DNA, 599 bp, Chicken  19866894239458_1
  misc_feature (1)..(138): n is any nucleotide
nnnnnnnnnnnnnnnnnnnnnnnnnnnnnnnnnnnnnnnnnnnnnnnnnnnnnnnnnnnnnnnnnnnnnnnnnnnnnnnnnnnnnnnnnnnnnnnnnnnnnnnnnnnnnnnnnnnnnnnnnnnnnnnnnnnnnnnnnntgtaacaacgtaatcaccagaacttaaaccaacaggtgttcagtggatcacatactgaaactcaaggtagaaaaggcaaagcctgactctcacacaggagctacaagtactcagggaaataacactggccttaccatgagtactagcagcctccagtaacawacaagaatacaagcccagttgtgaaaagactacaaactccttccatccacagaaagtcaactactgaagcaattagtcatcttcttcctttcttttccaccagttgctgtgcttcatttctcagccctgggtggactgctggtgcaatacagtgtgagcacagctcaccttcctcatgcagataactggaaacagcacacccaagaaactgcagctctgggccaagtttcttgctcctcatttctcaacagaaaaggaaggatcgcagagtatcgctatcacaaaaacaacagtggatc

SEQ ID NO: 24763 - DNA, 546 bp, Chicken  19866894239459_1
tcgatcaatgtaggtaagatgttttgtcgaaggctgcttagaagcacacgtgttcagagtgtttagcagacatatatttctcaacaaagactcagctttcttcatttttgggtttaaaatggttgcttaccatgagaatatcataaaattgcacattttttccccagtaagagtctgtgcttgctcggaacacaagcagttacctgttagctggtaaatttgggtatgaactgcagacagattgccctggtgtttgaatctaattaattgcattaattccttcagatgaatgtctctcasttggcagttttaaagcaagattaaaatattctggtgtttgctgtgatgtgaaacggtttgcctcacctgtaccccacactcgactctcacactgatactgagcattaatcaaaactgctgtctgcctgctgctaagacgattctcaaggaagaagggtggactggaggaacagcttttggctctgactgagaaaagcacttccagctttaatcaggaaatcatgcaagcatgttcttaactctggg

SEQ ID NO: 24764 - DNA, 600 bp, Chicken  19866894239461_1
atttggacagcatctacccctttgctccccagtgctctcccacctgattgcagagacccaacccaatatactgcttcaggaaagaagatacgagggaaaacaaatcattccaatgttaacagagccaggtatccatccctgaagggatggactccaaagaataattgtagtcttaacaaagccaggtatccatcccggtgagggaaggacgccttaagtactttgctaattgcaacagctgttaagagggtatcaggcagtgcattaagtgacaatatggagagatggctcttggtggakcctgtaggagtgttagcttacaaacgggcaattggaaacaatcacaggcttagcttttatttgaaaggaatggcttttcagttactttgccttcaagattattaattgtaccaccacagcaccatgaattctccttgactgcccagacattggagggctgtagtatctaattggtctttctcttgctaatcctcaccttcacatttcartcttctgctgctgccttttctggtgtggcatcctttcagtggctcttgtgcatgaatagctgtaaagagttcttttccctttattaggatg

SEQ ID NO: 24765 - DNA, 600 bp, Chicken  19866894239461_2
cgccttaagtactttgctaattgcaacagctgttaagagggtatcaggcagtgcattaagtgacaatatggagagatggctcttggtggakcctgtaggagtgttagcttacaaacgggcaattggaaacaatcacaggcttagcttttatttgaaaggaatggcttttcagttactttgccttcaagattattaattgtaccaccacagcaccatgaattctccttgactgcccagacattggagggctgtagtatctaattggtctttctcttgctaatcctcaccttcacatttcartcttctgctgctgccttttctggtgtggcatcctttcagtggctcttgtgcatgaatagctgtaaagagttcttttccctttattaggatgtggtttccagtgcttgcagtcttactgatgtcactggcctggtggcagattgggacctgttaagttctaccgtgcttctgggccaggttttgctttgtagaaaagtatcacaaataaatggtttccccttctccatcaagctcagcagctcatggatgtgtgaagtccaaagtgcctctgcccagcagaagtgacccagaatgggtcac

SEQ ID NO: 24766 - DNA, 600 bp, Chicken  19866894239462_1
gtttcatgctctagggagcaagctcatcatcaactgtgttgagaaactctcttttctcctttagggaatagaattacataatcagttaagtacattacagttccttagctctttctaagcccttgctacagtaacttttattggggtaggaccagtggtctttgtaacaatgccaactgttcaccagtatgttacaaaataaatacattagcagtattctatctatgctgctcttacactcttattccatttaatttcatccattaaaaactatcacctcttttctatatgtgctcttcraccatgaaacagaccatgcttgcaatcacacaccccagtgctcccctgaacaaccaacaaatctaagagcacacgcgtatttcaggactcctaccagtaccttccctttgtcatacagggatggaaagcaggaaaaaaaaagttccaaagctacattcattattatggtcatatcttaygggagatacagccaccgtcgccaattcgtgttgctacttgaactgaacacgcagccatgtgataagagatataatgagatttttaacagagggctgcatctgagtgtttgacaaagaaaaa

SEQ ID NO: 24767 - DNA, 442 bp, Chicken  19866894239462_2
ttcaccagtatgttacaaaataaatacattagcagtattctatctatgctgctcttacactcttattccatttaatttcatccattaaaaactatcacctcttttctatatgtgctcttcraccatgaaacagaccatgcttgcaatcacacaccccagtgctcccctgaacaaccaacaaatctaagagcacacgcgtatttcaggactcctaccagtaccttccctttgtcatacagggatggaaagcaggaaaaaaaaagttccaaagctacattcattattatggtcatatcttaygggagatacagccaccgtcgccaattcgtgttgctacttgaactgaacacgcagccatgtgataagagatataatgagatttttaacagagggctgcatctgagtgtttgacaaagaaaaaaaaagattcagctggggtaca

SEQ ID NO: 24768 - DNA, 600 bp, Chicken  19866894239475_1
tgtcctgtcctcaatgaaaatcaacatatttaacaaaaattaagtaagatacaatgctaactgtcttaagatcagctcttcaagttgagagacactgatgctaatcaaatgacagtagaaacatattcaggtaacaccaacaactgaactgcaattttctaacctcttgtaatacactcattcagcggttagcttaagtagaagtagatagcttacatagactatctctatgaaaacataagacaaagcagaactataaatctgcttatttctaggcttagactttcctttaaacacagmtgagaacataacatttgacaaatctggttatgaaatgagctgctaaacctggtatttgtaatgacacacatggaatctactgtgtatttaatacctagcaagagatacctttgcagcagctgctacagcctccttacttctttttctttcttcatccaaacatttgtccagcatttcctgtaaatattacaaaaaattaaactacaatattcaatagaggagtagctaaaaataatttcagtcaactgcttgagaaaaatccattttcctgtcaaaaattgtgacagaatcatttcctat

SEQ ID NO: 24769 - DNA, 599 bp, Chicken  19866894239477_1
  misc_feature (1)..(42): n is any nucleotide
nnnnnnnnnnnnnnnnnnnnnnnnnnnnnnnnnnnnnnnnnntgccttctggcagattgatcgttattccgcgggcagcctttgttctcactgcattttagttacatactggagatcggtggtactgagctgcaaattctgagttaaatccctgcagtgtttgagggctctcagccactcgtgtttggtttatcctggtgacagctcagtacactttacatacctgcctgaatttgttgcaaacatttttctccttactactgaaagcaaattccacagcaagcataaatacaagtgtaycccccaaagagcaaatcctctgcctttttatttgtatggggtagttaacacgtgtcccatggctgccaacagtcaggagagcctttggctcagggcctccaaggagccctgtgggtttgaatgggttctgagcatgggccccagtcttctccttagcaaaacccacataaaccrcagtcctgagcacaagtgctgacactgatcatgcaaaaaatagggaaggaaatggattaagaacccttttctgctggaggaacccaagagcacrgcagggactggtaggtcctctgtacagcagg

SEQ ID NO: 24770 - DNA, 600 bp, Chicken  19866894239477_2
ccactcgtgtttggtttatcctggtgacagctcagtacactttacatacctgcctgaatttgttgcaaacatttttctccttactactgaaagcaaattccacagcaagcataaatacaagtgtaycccccaaagagcaaatcctctgcctttttatttgtatggggtagttaacacgtgtcccatggctgccaacagtcaggagagcctttggctcagggcctccaaggagccctgtgggtttgaatgggttctgagcatgggccccagtcttctccttagcaaaacccacataaaccrcagtcctgagcacaagtgctgacactgatcatgcaaaaaatagggaaggaaatggattaagaacccttttctgctggaggaacccaagagcacrgcagggactggtaggtcctctgtacagcaggatgggagtcgcggggtgaatgcagctctccccggggacaatggtaggagatgggggggtccacctggaggcttcaaggcctgtctcctgtatgggcttccaccctcagacagcaggttgctcagctgttcattccccttgtagaaataaacacagagagacttttcctcttccat

SEQ ID NO: 24771 - DNA, 569 bp, Chicken  19866894239477_3
aaattccacagcaagcataaatacaagtgtaycccccaaagagcaaatcctctgcctttttatttgtatggggtagttaacacgtgtcccatggctgccaacagtcaggagagcctttggctcagggcctccaaggagccctgtgggtttgaatgggttctgagcatgggccccagtcttctccttagcaaaacccacataaaccrcagtcctgagcacaagtgctgacactgatcatgcaaaaaatagggaaggaaatggattaagaacccttttctgctggaggaacccaagagcacrgcagggactggtaggtcctctgtacagcaggatgggagtcgcggggtgaatgcagctctccccggggacaatggtaggagatgggggggtccacctggaggcttcaaggcctgtctcctgtatgggcttccaccctcagacagcaggttgctcagctgttcattccccttgtagaaataaacacagagagacttttcctcttccatctaagcactgagagatctggtcagaaagacagcttttattctggcaccgcacgaccttgtgag

SEQ ID NO: 24772 - DNA, 600 bp, Chicken  19866894239487_1
agtgtagaacgtatctctcagaactgacacttggagtctccaaacatttcctatggttacttacagttaatgagaattagactcaaacttctctgacactcattttcaagcagtgttcctgagatacgcaacagaatatgacacagtttgtttcatgagacacagtccaaaaggcacaaacaatgttcagtgagtgtctgtagttctggaacaaccctctcgcattaaatgtctgccactgtgcaatacacctaaatcatccttttcagtcttctaaagccagatgaaataagttcccckgttgtcaagccagtgaaaattttaggttttgcatcacaaagtactgagacttcttccagtttctgcttccccaaatggtgtcccctgctgaagcataagagctggcataatgccctccttgccctattcctgaagctgggttggaaaagaagcagggtgtcatggagcatgtacatcgcatttgcacccacatgaaagatgtcctctaaatgaagtagctagtgagtttctgtgtggaaatacaacatttgaaacaacttcagacgagacattttaagcatggatcatgcctagcaagct

SEQ ID NO: 24773 - DNA, 600 bp, Chicken  19866894239487_2
tcacaaagtactgagacttcttccagtttctgcttccccaaatggtgtcccctgctgaagcataagagctggcataatgccctccttgccctattcctgaagctgggttggaaaagaagcagggtgtcatggagcatgtacatcgcatttgcacccacatgaaagatgtcctctaaatgaagtagctagtgagtttctgtgtggaaatacaacatttgaaacaacttcagacgagacattttaagcatggatcatgcctagcaagctaccccagctctactgaaaacaatccttgaaacscttgcttgagcatcaagaacacagcgtacacttgtctcaacagcaaatccttaaagtcaggttttcttttggccaaaataaaagagagtaaggacttcaaataatggaagaacttccaacatccctccaaaaataattactgcagggtagaggctgagcgtgtaaagctacgtgaaactgaagacaaggaaatgccacttatggctccaaccttcaactgtacgtacaatatgcaagtccatgaaaggccaagcattttctgaaggaaaaccacattcaggctttatttaatgttttttg

SEQ ID NO: 24774 - DNA, 599 bp, Chicken  19866894239499_1
  misc_feature (1)..(81): n is any nucleotide
nnnnnnnnnnnnnnnnnnnnnnnnnnnnnnnnnnnnnnnnnnnnnnnnnnnnnnnnnnnnnnnnnnnnnnnnnnnnnnnnnttcttttgcatcattgcctcaaagcttgctgaggacacagatgggcgagtctaggcaagccctggtcaaagttggcaaaatcttttgtctgaagatttgcagttcaggggcaatatgagagatataagcacagcttagtggctgggaagcagtcttttgtgtgggcttctctcgaggaagatggccatctcaggggatactgcacatgactgttacccragcacccaggaatgccacgttggcagaagaatgaataggtgtctgacatcagaagcctcacagcttgatgcctgcatgctgatggactctcctgggcctgcttcctgagacccgccgcttcctccaggacttaccctgtcgctgtacctgcttgctgcctaaggccagctatactgctgctgctctccccctgcgcttttgccttggaccattggaacggcatgcaatgggacgctgctggatcttggtagcaactagccctgctttacgcaattcttgcttctttcctatcttttcta

SEQ ID NO: 24775 - DNA, 600 bp, Chicken  19866894239501_1
gatttagttctgtaactgagctttttgaggacagtggggaagagaacaagcagtattaaatgcttctgtagtgcatagatctaggtgtggcagggcttatataaggaagatcccaaaagggaaaatgctgtttagaataagctctgctttcttctgtcattacacaagaacagctgttttctgtttcccagaaggagtaatcacatgagtgacaatgggcttttctcgtagctaagaaaacaaaggttactaacagctccaggaagcaatgtcagtccccacagaaaggttccctgttcrgtcccaggcagtcgccccgcaatgtggagtggccaagcagtgatttcactgcagattcttcgatcgattctctgcgctgcttcgttttctgaatctcacagccctataaactcttcattccttttccctttaaggagtcgaatactctgtgctcagcttgtgcccagaactactaggaaatattcaggatctttttctcactcaagattcccgagtccagctatgaaggatttactaaccctgcgttgccagcctgagtacacattaccattgctgcaccatatcttggactcagtgaac

SEQ ID NO: 24776 - DNA, 600 bp, Chicken  19866894239516_1
gcgtcactcttttagatgataagctctggacatgtcttgaggcaaacagccatttaaataagtgaaggaaccagatactggttggggcttttcatttgcagcaaagaaagggaaggctggggagccttcatgttggcactggttcttcacatgcaatgctcctgtagcagtgttttcacctgtttaggttgtgattggtccatgttattttcaacaaaatcacaactgtatctcaagagagatgcaatctgtttcattggaagtaattttcaaaatacagtcagaatataggatttactyttttacttaattggttgaggaggagataagatgctgcttctcataaacacattttttatttttcttgaaaatctgttcgattctgttccttcacttaaatatttataagatctaaataacctcttaaagcatccttggagaagactcttctgttacttgaatgtttccgattttttttctagtaggaaaagtagtagggggaattgtttaagaactcagtaagccaaataattccctgcattaatcacagtatttttatactcaaatgtcagtgtaagcagagaaatgcggcagatgaac

SEQ ID NO: 24777 - DNA, 600 bp, Chicken  19866894239522_1
tgttgcttacggcagcttaaaaacataccttttgtaacaaatattcagaatgaggaaaggactgttaattctttctcacttgatgtgaagatgttaggagaggtatttggtgtctcttctagctattgtttatgtagacctaaggcagtaaaaataccttgaaacataggtcttgaatgagttttgagtgtttttgtagcattcattatctgcccttgaagtatctaggctccaggatgaaaataagtcgtttctaataccaaagttttgttaagggaagttgtcctaaacagaactgarcgtgacttactcagtaaaagtctgcatgcagcctgagaccctcactctatgaaacattgtttaccacaatgttgcctacacttcgaatgtaataacacagaaatgtttgtcaacttgytaattgtcgaggacattcaggtagtgtattaagtctggaaacmagaaaaacttgtacttcttcgtctagtggcagagcaagaagagaactgcagaagttttccatctgataactttggccacataaaccactgtcattaccaagctcttctgcagacaagagtacacattgtgggagagtta

SEQ ID NO: 24778 - DNA, 600 bp, Chicken  19866894239522_2
ctagctattgtttatgtagacctaaggcagtaaaaataccttgaaacataggtcttgaatgagttttgagtgtttttgtagcattcattatctgcccttgaagtatctaggctccaggatgaaaataagtcgtttctaataccaaagttttgttaagggaagttgtcctaaacagaactgarcgtgacttactcagtaaaagtctgcatgcagcctgagaccctcactctatgaaacattgtttaccacaatgttgcctacacttcgaatgtaataacacagaaatgtttgtcaacttgytaattgtcgaggacattcaggtagtgtattaagtctggaaacmagaaaaacttgtacttcttcgtctagtggcagagcaagaagagaactgcagaagttttccatctgataactttggccacataaaccactgtcattaccaagctcttctgcagacaagagtacacattgtgggagagttaaattgcacttattttcagaaaatacttgagagtaggttattcttttctttgctattgtagcaaagtagttaattttcaagattgactcagtgctgcaagaagtgtagagaagaaatgg

SEQ ID NO: 24779 - DNA, 600 bp, Chicken  19866894239522_3
aaacataggtcttgaatgagttttgagtgtttttgtagcattcattatctgcccttgaagtatctaggctccaggatgaaaataagtcgtttctaataccaaagttttgttaagggaagttgtcctaaacagaactgarcgtgacttactcagtaaaagtctgcatgcagcctgagaccctcactctatgaaacattgtttaccacaatgttgcctacacttcgaatgtaataacacagaaatgtttgtcaacttgytaattgtcgaggacattcaggtagtgtattaagtctggaaacmagaaaaacttgtacttcttcgtctagtggcagagcaagaagagaactgcagaagttttccatctgataactttggccacataaaccactgtcattaccaagctcttctgcagacaagagtacacattgtgggagagttaaattgcacttattttcagaaaatacttgagagtaggttattcttttctttgctattgtagcaaagtagttaattttcaagattgactcagtgctgcaagaagtgtagagaagaaatggcatgactcaggattaaggtagcagagtgattggattcttgcat

SEQ ID NO: 24780 - DNA, 600 bp, Chicken  19866894239531_1
tttccagttgttcctgtcaaaaaataaataaaaatcaataaatcctagatccatgtaatctattcataaaatggaatgggaccttgtaagtaatgctttaccctacactggtagtttgctatcagcttggtcaaggacagtcaaattacttaattacacataacagttattctgtaaagacttgggaaaacacagataaatgtaactaatccctctttatttattccctgcaaacaaaagcctaagggtttctggaaggaaaaaaaaaaaagcagcgcaattaacataattagagatggrtgtcactcaaatcttcaccacggcccacagacatcctggttattttgattrtgtagttaagtcacgaccagatacaactttctcaaagatggtgttgcccaaagccgattgcgttgcttgytcttgtagtgataccttcctgccactggatggcatcttctgcaggctcctgaagtgccatcatgcttggtaggggtctgaaagggcttgttgcttttctaattgggtcatactgggggagctatgcacttctgtgtgcaacaccttcccatgtttccatgtgtcgtatggggtaataca

SEQ ID NO: 24781 - DNA, 600 bp, Chicken  19866894239531_2
catgtaatctattcataaaatggaatgggaccttgtaagtaatgctttaccctacactggtagtttgctatcagcttggtcaaggacagtcaaattacttaattacacataacagttattctgtaaagacttgggaaaacacagataaatgtaactaatccctctttatttattccctgcaaacaaaagcctaagggtttctggaaggaaaaaaaaaaaagcagcgcaattaacataattagagatggrtgtcactcaaatcttcaccacggcccacagacatcctggttattttgattrtgtagttaagtcacgaccagatacaactttctcaaagatggtgttgcccaaagccgattgcgttgcttgytcttgtagtgataccttcctgccactggatggcatcttctgcaggctcctgaagtgccatcatgcttggtaggggtctgaaagggcttgttgcttttctaattgggtcatactgggggagctatgcacttctgtgtgcaacaccttcccatgtttccatgtgtcgtatggggtaatacatacggggtcgtatgtgtaacacaggcttattttagtggggatttagaagaa

SEQ ID NO: 24782 - DNA, 547 bp, Chicken  19866894239531_3
tcagcttggtcaaggacagtcaaattacttaattacacataacagttattctgtaaagacttgggaaaacacagataaatgtaactaatccctctttatttattccctgcaaacaaaagcctaagggtttctggaaggaaaaaaaaaaaagcagcgcaattaacataattagagatggrtgtcactcaaatcttcaccacggcccacagacatcctggttattttgattrtgtagttaagtcacgaccagatacaactttctcaaagatggtgttgcccaaagccgattgcgttgcttgytcttgtagtgataccttcctgccactggatggcatcttctgcaggctcctgaagtgccatcatgcttggtaggggtctgaaagggcttgttgcttttctaattgggtcatactgggggagctatgcacttctgtgtgcaacaccttcccatgtttccatgtgtcgtatggggtaatacatacggggtcgtatgtgtaacacaggcttattttagtggggatttagaagaaaggactagattagaact

SEQ ID NO: 24783 - DNA, 600 bp, Chicken  19866894239547_1
gagcccgctacccctgctaagggcctgcgcccacaccctcacagcaacctcctgcaccctgcaaggcgcctcatgcactgagctctcatctctgtgtcactgatggcacatgggctcaccagccatggctcctcttctcatgtcaccaaacagggaagcatggaacaacatcagaccttgccgcctggaaacatgaccacctcaactttcttctttcttttcatttgaaattgtgctctttccacctggtgatctccaactggatccttccttttagtgtgtttctctcaataaagttcwcatgctcttcagccacagaktcctcctcttcattccttcgcacgatgcccttyccacttcacccactgcaaagacatggctctagaaaccatcctgtctggtacaaaagggccccaagacctcctcttgcatccatgtcaccaacaacagcattgatggcttgcagacagccttcatctcataataaagtacctacacctacccaaagattggggcacactgaggctcttctcatacagcatcacagagctctctagaccagcaccaggcgtgagttgacagcatcctgctctcacaaac

SEQ ID NO: 24784 - DNA, 600 bp, Chicken  19866894239547_2
gggcctgcgcccacaccctcacagcaacctcctgcaccctgcaaggcgcctcatgcactgagctctcatctctgtgtcactgatggcacatgggctcaccagccatggctcctcttctcatgtcaccaaacagggaagcatggaacaacatcagaccttgccgcctggaaacatgaccacctcaactttcttctttcttttcatttgaaattgtgctctttccacctggtgatctccaactggatccttccttttagtgtgtttctctcaataaagttcwcatgctcttcagccacagaktcctcctcttcattccttcgcacgatgcccttyccacttcacccactgcaaagacatggctctagaaaccatcctgtctggtacaaaagggccccaagacctcctcttgcatccatgtcaccaacaacagcattgatggcttgcagacagccttcatctcataataaagtacctacacctacccaaagattggggcacactgaggctcttctcatacagcatcacagagctctctagaccagcaccaggcgtgagttgacagcatcctgctctcacaaacagccctcccctgccggcttg

SEQ ID NO: 24785 - DNA, 600 bp, Chicken  19866894239547_3
gcaccctgcaaggcgcctcatgcactgagctctcatctctgtgtcactgatggcacatgggctcaccagccatggctcctcttctcatgtcaccaaacagggaagcatggaacaacatcagaccttgccgcctggaaacatgaccacctcaactttcttctttcttttcatttgaaattgtgctctttccacctggtgatctccaactggatccttccttttagtgtgtttctctcaataaagttcwcatgctcttcagccacagaktcctcctcttcattccttcgcacgatgcccttyccacttcacccactgcaaagacatggctctagaaaccatcctgtctggtacaaaagggccccaagacctcctcttgcatccatgtcaccaacaacagcattgatggcttgcagacagccttcatctcataataaagtacctacacctacccaaagattggggcacactgaggctcttctcatacagcatcacagagctctctagaccagcaccaggcgtgagttgacagcatcctgctctcacaaacagccctcccctgccggcttggacagctgcaaggagggccccaggcaggcacgg

SEQ ID NO: 24786 - DNA, 600 bp, Chicken  19866894239561_1
tgtgttgatttagtgagcagacaaatacatactaacaaacacatttttaattaaaatatttccttagcagactaaatgtttgcaatacttccactctatctcattttttttttcctaaacttgaatttccctcaaaaatcctcagaattaggatttgaggtttattttgcctcatgtatatatactgtaatcttcacgcttgtactggttcagtaggtcctgacaaacttacacatggtgttctttctcttcctgtgtgagcaattgtcccacctggaacaaactttgggttattccaayactgccaccatcgttwccaacacattgaagatgatattcacctccatactcggttccctgattataattcaacatttctcacagaatgagctgattgagacgctcttcattccatggtgttacagctatgcatggctgtccagaatgtgttttgtcttccacatcaccatgtccacagctgaaacacaccacccatcgcctcactgtgctcacatccactgtttggtcatcacaaatattcagcaaacaacaatgaatgtgaatgagtgtcatttttttgacatggaggaattctgtgat

SEQ ID NO: 24787 - DNA, 600 bp, Chicken  19866894239561_2
gcagacaaatacatactaacaaacacatttttaattaaaatatttccttagcagactaaatgtttgcaatacttccactctatctcattttttttttcctaaacttgaatttccctcaaaaatcctcagaattaggatttgaggtttattttgcctcatgtatatatactgtaatcttcacgcttgtactggttcagtaggtcctgacaaacttacacatggtgttctttctcttcctgtgtgagcaattgtcccacctggaacaaactttgggttattccaayactgccaccatcgttwccaacacattgaagatgatattcacctccatactcggttccctgattataattcaacatttctcacagaatgagctgattgagacgctcttcattccatggtgttacagctatgcatggctgtccagaatgtgttttgtcttccacatcaccatgtccacagctgaaacacaccacccatcgcctcactgtgctcacatccactgtttggtcatcacaaatattcagcaaacaacaatgaatgtgaatgagtgtcatttttttgacatggaggaattctgtgatacgccttttcttcata

SEQ ID NO: 24788 - DNA, 600 bp, Chicken  19866894239561_3
aacaacaatgaatgtgaatgagtgtcatttttttgacatggaggaattctgtgatacgccttttcttcatatgcacttccatgtcagatgccatttcgtcagactgtccctataggagtcattacttttggagtagcttgcatataatgaaaagcattgaacttaaaatagctttagtagaaaattatgaaatttgagatattcagacttatttcacctctgtggtccactctaatgttggccactatggtgtttgcaaataatggttcaccggttaagatgtatcagctgtatttcacwctcactgctaaatgctttgtttcacattagtttttcaacaaaatcaagtacttaataaagtacctgaagtgagaattttcatatatgtaggcagcagaagctcattatatcttacatttaaataatgcgatttattttattcttaaaatatatatatatatattgagacttgcagctttgactacttgtcagatattctctaacttctgcagtaagtcctttagcttttttatcgtatgagtttcattccaaggtaacttaccaagatgtttgtattccatttttttcattagcagccat

SEQ ID NO: 24789 - DNA, 599 bp, Chicken  19866894239568_1
  misc_feature (1)..(124): n is any nucleotide
nnnnnnnnnnnnnnnnnnnnnnnnnnnnnnnnnnnnnnnnnnnnnnnnnnnnnnnnnnnnnnnnnnnnnnnnnnnnnnnnnnnnnnnnnnnnnnnnnnnnnnnnnnnnnnnnnnnnnnnnnnnnttgtatgcgccgtcctggagatggcacacctggatcacactgctgtacttggacaattacagaaagcagaaggaaaagaccctgcttctcttcctcactagaaattctgacatatatcctatgattgtttcttcactgcttcctcaatgaattgcagaaaattcattgggaattcmttcactgggaacccagagaaaggcactgggaagcaccagtctctgaatggttgaatctgtgttgtcatagcaaaagtctgagcaacaccacccagcttaacaagagactgcttctgtgaatgggaatggtgcaaagggagaggtaaaagatgaacttcaggataacagtgaaatgagaaagatcagctttacattgaagacagtactacatagtctactctttgccaagcttcgaaatatggaccatttctttgatcaggtctttgtcactgatctgactgcttgtgctattagcagag

SEQ ID NO: 24790 - DNA, 600 bp, Chicken  19866894239572_1
ttttagtcatgttaatatttagcttctcttttttccatctttacgtatttatttttatgaggggctaggatatgactaagatcgttacacgtgtaacactgcagcaaagtgataatgtgtttaaggttaactgggagaaacatggcatttgactaataaactttttcctgtgttgtgactccataaacaaagggaaacacagtgctgctgatgcagagaggaaaggggatctgttttcccttttttttttgcagggcattgtctcctacacaccgtaccgttagatacaaagaggctgcrctgaatacaacagatatgaaatgtgtgatgttcattttaaaattacaagtacagcccgctattgaccatctaattatgctgagttccatttataaacatagctaaccactaagtttatagagactttttgtgctgctttaataggatattgatcgagagcaaggtttgagtggactgccattgaattgtgtaatggcatacaaaaggcaaggtcacggcaactgttcactctatgcctgcagtctattttttattataatctttttttcttcctctcatagccaagcccaaatagaatat

SEQ ID NO: 24791 - DNA, 600 bp, Chicken  19866894239572_2
attgatcgagagcaaggtttgagtggactgccattgaattgtgtaatggcatacaaaaggcaaggtcacggcaactgttcactctatgcctgcagtctattttttattataatctttttttcttcctctcatagccaagcccaaatagaatatttgggatagcagcgctttgctaaggaatatagagtatctttttaaatgttaatttttgtgctgctgacttctttaacaaccttcactagcgcgatgcttagtatagcagaaaacatacaggctgctgctgggagagagctgctttaygatgccrtggctttccctcacgcgcttagtgctgggatctctgcacaggaaagtttctcccctcccaggctgcgggaaggcagcagtgtcctcacagccctttgcagccctgcctggcccagaccccgcacctcgcggtggggctggcagaacattccccacaatttgttttggctgtgcctggcctcttgacgagaggtggggaggaagtcgtgtttcctccgctgcacccacgctacgtgctgggagtggcagcaattactttcacttctcgcatgcgtgtgcccgtgcggcagtgag

SEQ ID NO: 24792 - DNA, 600 bp, Chicken  19866894239572_3
gagagcaaggtttgagtggactgccattgaattgtgtaatggcatacaaaaggcaaggtcacggcaactgttcactctatgcctgcagtctattttttattataatctttttttcttcctctcatagccaagcccaaatagaatatttgggatagcagcgctttgctaaggaatatagagtatctttttaaatgttaatttttgtgctgctgacttctttaacaaccttcactagcgcgatgcttagtatagcagaaaacatacaggctgctgctgggagagagctgctttaygatgccrtggctttccctcacgcgcttagtgctgggatctctgcacaggaaagtttctcccctcccaggctgcgggaaggcagcagtgtcctcacagccctttgcagccctgcctggcccagaccccgcacctcgcggtggggctggcagaacattccccacaatttgttttggctgtgcctggcctcttgacgagaggtggggaggaagtcgtgtttcctccgctgcacccacgctacgtgctgggagtggcagcaattactttcacttctcgcatgcgtgtgcccgtgcggcagtgagaccagcg

SEQ ID NO: 24793 - DNA, 600 bp, Chicken  19866894239573_1
gcctgtggccctcttcaaaaaacaaacaaaaactgctggtgtttggggagcttaaacaggttatatgagatctgtagcatgtgtttgttgtgaggtctctgctttgctttttctttctgtctgtctgtctttcaactttcctgaccacctctcctaataccagctctacctgccattcctctgttctgctcctggtctcttttctattgactctcaagagagcagtggtgttgcagtgaggcttcttgcagcatctgggtgaaattaagtgctatagccaaggacaattgtgttttcccktcttttaaagcaggaaatgcctgctatggggaaatttggcttcgcactaattcatattttatttgaatcctaatctcctggactgtctaaatagttataatactaaaatatacttaaccaagggacttagcaggacattcttgtctaccaatgggtctcagctttccctcttcgtatgatgagtatatgacctgcctctggcatttctcagtgctctcagcccaaaatgggcacgtgaggagaacaggttattggcattcaccattacttagttatactgcaagggacacagccttcctt

SEQ ID NO: 24794 - DNA, 600 bp, Chicken  19866894239574_1
tgtgggttgtagtgttgaatggttacaaactgttgtgaagattcaacctgaacttagtttgtggatttcctcctttaaaggtgaaacacacaatctccaaacgctccatactatattgtctacaggatcgcctctcaaatctcaaagctatgagtatgtctacaaacacataaagagcagtgtcctcctgggatccatttcaggtgatgcttctatgctatatgcttcttaattctgttcattgcctttgtatttcctttttgcttgtttgctactgtgcatttaagaaacctagacatyggagcattygggcttgggtrtagttaaactggaattaattctctcttgtgaatatatcttatgagtaattcagtatgccataatgaagctcatacacaaaagcttttacattgaatgtttctgatgtggtggatattctgcatttcagcttcatttttttttgaagcaggatcatttattttgacccactgtccttaggggtaacagggcgagatcaagaaaagagtcyattaacctacagaacgtagtgctctgaaaatagctgacttcagcaagaaatgcctcttggagaggtttttc

SEQ ID NO: 24795 - DNA, 600 bp, Chicken  19866894239574_2
tagtgttgaatggttacaaactgttgtgaagattcaacctgaacttagtttgtggatttcctcctttaaaggtgaaacacacaatctccaaacgctccatactatattgtctacaggatcgcctctcaaatctcaaagctatgagtatgtctacaaacacataaagagcagtgtcctcctgggatccatttcaggtgatgcttctatgctatatgcttcttaattctgttcattgcctttgtatttcctttttgcttgtttgctactgtgcatttaagaaacctagacatyggagcattygggcttgggtrtagttaaactggaattaattctctcttgtgaatatatcttatgagtaattcagtatgccataatgaagctcatacacaaaagcttttacattgaatgtttctgatgtggtggatattctgcatttcagcttcatttttttttgaagcaggatcatttattttgacccactgtccttaggggtaacagggcgagatcaagaaaagagtcyattaacctacagaacgtagtgctctgaaaatagctgacttcagcaagaaatgcctcttggagaggtttttccatgctcct

SEQ ID NO: 24796 - DNA, 600 bp, Chicken  19866894239574_3
ggttacaaactgttgtgaagattcaacctgaacttagtttgtggatttcctcctttaaaggtgaaacacacaatctccaaacgctccatactatattgtctacaggatcgcctctcaaatctcaaagctatgagtatgtctacaaacacataaagagcagtgtcctcctgggatccatttcaggtgatgcttctatgctatatgcttcttaattctgttcattgcctttgtatttcctttttgcttgtttgctactgtgcatttaagaaacctagacatyggagcattygggcttgggtrtagttaaactggaattaattctctcttgtgaatatatcttatgagtaattcagtatgccataatgaagctcatacacaaaagcttttacattgaatgtttctgatgtggtggatattctgcatttcagcttcatttttttttgaagcaggatcatttattttgacccactgtccttaggggtaacagggcgagatcaagaaaagagtcyattaacctacagaacgtagtgctctgaaaatagctgacttcagcaagaaatgcctcttggagaggtttttccatgctcctgcttcaattct

SEQ ID NO: 24797 - DNA, 600 bp, Chicken  19866894239574_4
taattctgttcattgcctttgtatttcctttttgcttgtttgctactgtgcatttaagaaacctagacatyggagcattygggcttgggtrtagttaaactggaattaattctctcttgtgaatatatcttatgagtaattcagtatgccataatgaagctcatacacaaaagcttttacattgaatgtttctgatgtggtggatattctgcatttcagcttcatttttttttgaagcaggatcatttattttgacccactgtccttaggggtaacagggcgagatcaagaaaagagtcyattaacctacagaacgtagtgctctgaaaatagctgacttcagcaagaaatgcctcttggagaggtttttccatgctcctgcttcaattcttttgtgccacgtaattggcactgcagacagatttttgtaaattacataattagagaaatatcaagcccacgtactgtgtagtttgttgtgaggagtgctggctgaggcaacttctgtacrtagaaggtccctcacaactcctcatgctgctttgtaatgaaggctgagttttcccagggcttttaagcttcgtttagtttgatgctata

SEQ ID NO: 24798 - DNA, 600 bp, Chicken  19866894239574_5
catttcagcttcatttttttttgaagcaggatcatttattttgacccactgtccttaggggtaacagggcgagatcaagaaaagagtcyattaacctacagaacgtagtgctctgaaaatagctgacttcagcaagaaatgcctcttggagaggtttttccatgctcctgcttcaattcttttgtgccacgtaattggcactgcagacagatttttgtaaattacataattagagaaatatcaagcccacgtactgtgtagtttgttgtgaggagtgctggctgaggcaacttctgtacrtagaaggtccctcacaactcctcatgctgctttgtaatgaaggctgagttttcccagggcttttaagcttcgtttagtttgatgctatagtctgactgttctgcttctgaagtcacttctaactctgctcttagtaagagtagtgctgaattttagacttgctactacagacagtgatggtctcaaatgtgcgagactgttttgataactaaagctaacagtattgatcttgtcttagaattctacmtctttaaagccctgtaagcattcyagttgagtgtgcactttctcagtacctat

SEQ ID NO: 24799 - DNA, 600 bp, Chicken  19866894239574_6
cacgtactgtgtagtttgttgtgaggagtgctggctgaggcaacttctgtacrtagaaggtccctcacaactcctcatgctgctttgtaatgaaggctgagttttcccagggcttttaagcttcgtttagtttgatgctatagtctgactgttctgcttctgaagtcacttctaactctgctcttagtaagagtagtgctgaattttagacttgctactacagacagtgatggtctcaaatgtgcgagactgttttgataactaaagctaacagtattgatcttgtcttagaattctacmtctttaaagccctgtaagcattcyagttgagtgtgcactttctcagtacctattttttattgagagaactgtttgtcctctgagtatggttgcctcctccttggttgccaatgaggagaagaaatagaagctatgtattgagtggaacagttgaagctaatgaaaacamacaagcaaagatttccaagcgatcttgaatatcgaagtcagtgcagcagggcctgtttgttttctcattcatacagaatgggattttttttaatgaggttgacgaacctactgatacggaactactggaag

SEQ ID NO: 24800 - DNA, 600 bp, Chicken  19866894239574_7
ggagtgctggctgaggcaacttctgtacrtagaaggtccctcacaactcctcatgctgctttgtaatgaaggctgagttttcccagggcttttaagcttcgtttagtttgatgctatagtctgactgttctgcttctgaagtcacttctaactctgctcttagtaagagtagtgctgaattttagacttgctactacagacagtgatggtctcaaatgtgcgagactgttttgataactaaagctaacagtattgatcttgtcttagaattctacmtctttaaagccctgtaagcattcyagttgagtgtgcactttctcagtacctattttttattgagagaactgtttgtcctctgagtatggttgcctcctccttggttgccaatgaggagaagaaatagaagctatgtattgagtggaacagttgaagctaatgaaaacamacaagcaaagatttccaagcgatcttgaatatcgaagtcagtgcagcagggcctgtttgttttctcattcatacagaatgggattttttttaatgaggttgacgaacctactgatacggaactactggaagaaaagttatgccttaaggaatatt

SEQ ID NO: 24801 - DNA, 600 bp, Chicken  19866894239574_8
ttctaactctgctcttagtaagagtagtgctgaattttagacttgctactacagacagtgatggtctcaaatgtgcgagactgttttgataactaaagctaacagtattgatcttgtcttagaattctacmtctttaaagccctgtaagcattcyagttgagtgtgcactttctcagtacctattttttattgagagaactgtttgtcctctgagtatggttgcctcctccttggttgccaatgaggagaagaaatagaagctatgtattgagtggaacagttgaagctaatgaaaacamacaagcaaagatttccaagcgatcttgaatatcgaagtcagtgcagcagggcctgtttgttttctcattcatacagaatgggattttttttaatgaggttgacgaacctactgatacggaactactggaagaaaagttatgccttaaggaatatttctgcatgaaaggcatacatgtttaaagagatgcacacacaaagcaggggaagaaacttctgttatgagaaatcatacaacagtgataatactgactgttattctgtgctgcataatgtggattagaaacatttgacaaacgtgg

SEQ ID NO: 24802 - DNA, 600 bp, Chicken  19866894239588_1
aggtcagcagaaaacccgatttttttctgcagtaaaagatttgcataacaaagacgccagaaacagcgctgtaggtcccggttcgtctagaagaaagctgtaaaggaaaaacatttcttctgcaatctttttccttgtgcggacctttaacctttttaaaatgatcaaggaaagctatactatactgagtgatagagtctgcggcatataaatgtttctaaatgagtgcggaggggatgaatcattaacaggctcgctgtaatcctcaccagtgtttcatgttttagcggtattaattcyagacaccgccgatgtgcaaagggcatctgcaaaggagtaggcaggtgcaatacccgctgctaccagcagagggagsggaggagatggagtacacgctgtggcgatgtgacgaacgaagtcggatcacccgtttggtccgacccactctgatttyatgtgacagctmawaaataccatccagatttatcttttctttctaactgatctcagaagcctcatgaaggttttcacccaagtattttaactcatcttgtaggtccatctgctgacttcccagcaccttaagcctctcagtagatt

SEQ ID NO: 24803 - DNA, 600 bp, Chicken  19866894239588_2
cccggttcgtctagaagaaagctgtaaaggaaaaacatttcttctgcaatctttttccttgtgcggacctttaacctttttaaaatgatcaaggaaagctatactatactgagtgatagagtctgcggcatataaatgtttctaaatgagtgcggaggggatgaatcattaacaggctcgctgtaatcctcaccagtgtttcatgttttagcggtattaattcyagacaccgccgatgtgcaaagggcatctgcaaaggagtaggcaggtgcaatacccgctgctaccagcagagggagsggaggagatggagtacacgctgtggcgatgtgacgaacgaagtcggatcacccgtttggtccgacccactctgatttyatgtgacagctmawaaataccatccagatttatcttttctttctaactgatctcagaagcctcatgaaggttttcacccaagtattttaactcatcttgtaggtccatctgctgacttcccagcaccttaagcctctcagtagattctgattcccacactcctctctcttaacctcatcattatcatgccttagttccaaatttaactcccgttccccgaaa

SEQ ID NO: 24804 - DNA, 600 bp, Chicken  19866894239588_3
tttaaaatgatcaaggaaagctatactatactgagtgatagagtctgcggcatataaatgtttctaaatgagtgcggaggggatgaatcattaacaggctcgctgtaatcctcaccagtgtttcatgttttagcggtattaattcyagacaccgccgatgtgcaaagggcatctgcaaaggagtaggcaggtgcaatacccgctgctaccagcagagggagsggaggagatggagtacacgctgtggcgatgtgacgaacgaagtcggatcacccgtttggtccgacccactctgatttyatgtgacagctmawaaataccatccagatttatcttttctttctaactgatctcagaagcctcatgaaggttttcacccaagtattttaactcatcttgtaggtccatctgctgacttcccagcaccttaagcctctcagtagattctgattcccacactcctctctcttaacctcatcattatcatgccttagttccaaatttaactcccgttccccgaaactctcctattgaaatagaaatttattcctctgtaaactgcagttgccggtgatgacaaagctggtcatacacagcgga

SEQ ID NO: 24805 - DNA, 600 bp, Chicken  19866894239588_4
aaggaaagctatactatactgagtgatagagtctgcggcatataaatgtttctaaatgagtgcggaggggatgaatcattaacaggctcgctgtaatcctcaccagtgtttcatgttttagcggtattaattcyagacaccgccgatgtgcaaagggcatctgcaaaggagtaggcaggtgcaatacccgctgctaccagcagagggagsggaggagatggagtacacgctgtggcgatgtgacgaacgaagtcggatcacccgtttggtccgacccactctgatttyatgtgacagctmawaaataccatccagatttatcttttctttctaactgatctcagaagcctcatgaaggttttcacccaagtattttaactcatcttgtaggtccatctgctgacttcccagcaccttaagcctctcagtagattctgattcccacactcctctctcttaacctcatcattatcatgccttagttccaaatttaactcccgttccccgaaactctcctattgaaatagaaatttattcctctgtaaactgcagttgccggtgatgacaaagctggtcatacacagcggaattgcttattag

SEQ ID NO: 24806 - DNA, 600 bp, Chicken  19866894239588_5
ggaaagctatactatactgagtgatagagtctgcggcatataaatgtttctaaatgagtgcggaggggatgaatcattaacaggctcgctgtaatcctcaccagtgtttcatgttttagcggtattaattcyagacaccgccgatgtgcaaagggcatctgcaaaggagtaggcaggtgcaatacccgctgctaccagcagagggagsggaggagatggagtacacgctgtggcgatgtgacgaacgaagtcggatcacccgtttggtccgacccactctgatttyatgtgacagctmawaaataccatccagatttatcttttctttctaactgatctcagaagcctcatgaaggttttcacccaagtattttaactcatcttgtaggtccatctgctgacttcccagcaccttaagcctctcagtagattctgattcccacactcctctctcttaacctcatcattatcatgccttagttccaaatttaactcccgttccccgaaactctcctattgaaatagaaatttattcctctgtaaactgcagttgccggtgatgacaaagctggtcatacacagcggaattgcttattagct

SEQ ID NO: 24807 - DNA, 434 bp, Chicken  19866894239591_1
  misc_feature (1)..(51): n is any nucleotide
nnnnnnnnnnnnnnnnnnnnnnnnnnnnnnnnnnnnnnnnnnnnnnnnnnntatgagactacgttattcactgccttagaaacgtctacgtgtgaataaacgtaagaggtataatcttgagttggatccactagtcctcagctgttctaattgtggtgtgtaatccacagagataagtgtgcacagacacaggaaaggttatttaatctcagcatctcagtgaattataacattttatgaaatacatacaaaaaaaatgcatggcttagactttgaatcccacagaaggcatgtgctacrtatttgccaaccacctgaacaggttccaagcaattttgaacatcttaatgtttttgaaggcatcaattgtttcatgggagctaggatgacaaatttgaaacaaatattctgcagtcatgctgatgggaaggtgg

SEQ ID NO: 24808 - DNA, 599 bp, Chicken  19866894239596_1
  misc_feature (1)..(217): n is any nucleotide
nnnnnnnnnnnnnnnnnnnnnnnnnnnnnnnnnnnnnnnnnnnnnnnnnnnnnnnnnnnnnnnnnnnnnnnnnnnnnnnnnnnnnnnnnnnnnnnnnnnnnnnnnnnnnnnnnnnnnnnnnnnnnnnnnnnnnnnnnnnnnnnnnnnnnnnnnnnnnnnnnnnnnnnnnnnnnnnnnnnnnnnnnnnnnnnnnnnnnnnnnnnnnnnnnnnnnnnnntgtctgggataatgtggggcataaaaaaaaaagtttgtgaatttttacattgtcacagtgaaattaaatgtctgaatgttcakattatgccaaattcagaaaataatggggaaaaaaaatgtatgtttgtaattattttgcaaaatagaatcagggtaacctgggctatttgattaaaaaacaaactgttacgttctttgtggcttttagtctaataactcacataatctagataggaaaatgaaagctgatgatgacagggyatgcaactgttctgcagtaaggcttccagtcattctgattctagtattctgttacctcgagacaatagaataccgaagtatagaattcatatatgaatacaaataagcaggttttacca

SEQ ID NO: 24809 - DNA, 599 bp, Chicken  19866894239596_2
  misc_feature (1)..(37): n is any nucleotide
nnnnnnnnnnnnnnnnnnnnnnnnnnnnnnnnnnnnntgtctgggataatgtggggcataaaaaaaaaagtttgtgaatttttacattgtcacagtgaaattaaatgtctgaatgttcakattatgccaaattcagaaaataatggggaaaaaaaatgtatgtttgtaattattttgcaaaatagaatcagggtaacctgggctatttgattaaaaaacaaactgttacgttctttgtggcttttagtctaataactcacataatctagataggaaaatgaaagctgatgatgacagggyatgcaactgttctgcagtaaggcttccagtcattctgattctagtattctgttacctcgagacaatagaataccgaagtatagaattcatatatgaatacaaataagcaggttttaccatcttcrtaattttggggaactggaactgaaaagtgttagcctactaactcaattttagcagtggctgtttggtttttatatatgtatacagggcttgcaagaaagatggagatgagtaccagggcctgaagcaacacaacgaggggcaatggttttaaaactgaaaggaggtagatttag

SEQ ID NO: 24810 - DNA, 600 bp, Chicken  19866894239596_3
gccaaattcagaaaataatggggaaaaaaaatgtatgtttgtaattattttgcaaaatagaatcagggtaacctgggctatttgattaaaaaacaaactgttacgttctttgtggcttttagtctaataactcacataatctagataggaaaatgaaagctgatgatgacagggyatgcaactgttctgcagtaaggcttccagtcattctgattctagtattctgttacctcgagacaatagaataccgaagtatagaattcatatatgaatacaaataagcaggttttaccatcttcrtaattttggggaactggaactgaaaagtgttagcctactaactcaattttagcagtggctgtttggtttttatatatgtatacagggcttgcaagaaagatggagatgagtaccagggcctgaagcaacacaacgaggggcaatggttttaaaactgaaaggaggtagatttagattggatataagaaatacatttttacaatgagtttgtcagtcagtggaacaagttgcctggggaagctgtagatgcttcagtattggaagtgttcaaaagcagatttggatggggctttgagcaac

SEQ ID NO: 24811 - DNA, 599 bp, Chicken  19866894239603_1
  misc_feature (1)..(93): n is any nucleotide
nnnnnnnnnnnnnnnnnnnnnnnnnnnnnnnnnnnnnnnnnnnnnnnnnnnnnnnnnnnnnnnnnnnnnnnnnnnnnnnnnnnnnnnnnnnnnatccatgctaagtaaattcagtgctggcacatggatgcccaggaagccagaaggcagtgacagagcaggtgtccagcagcacctcacagcagcatggagccctgcacaggactgaaacccagatccagacccagaccccaccatacgctggagaataggagatgcatctgccacaaactgcatttctccaagccaggccaccaactytcaaagtctccaagtccccttaagatcacagattttcctctaagttaaagcaactggacacagatagaccctgctgagattgatctgagtgagagtgggtcagcatttacttttgctgtttcctttgtgccgatacatttgagaccgtgcatcctcaaagacatcttgatagaaagctctgtgcacttatttgtcaagagacacagccaayagctgaaggaaaggaattgtttccaacacttcaaataaaagaacaatgcatatatatcaacagaaagttcttactagctaattgttca

SEQ ID NO: 24812 - DNA, 442 bp, Chicken  19866894239603_2
atccatgctaagtaaattcagtgctggcacatggatgcccaggaagccagaaggcagtgacagagcaggtgtccagcagcacctcacagcagcatggagccctgcacaggactgaaacccagatccagacccagaccccaccatacgctggagaataggagatgcatctgccacaaactgcatttctccaagccaggccaccaactytcaaagtctccaagtccccttaagatcacagattttcctctaagttaaagcaactggacacagatagaccctgctgagattgatctgagtgayagctgaaggaaaggaattgtttccaacacttcaaataaaagaacaatgcatatatatcaacagaaagttcttactagctaattgttcacaaaacatgatctgaaatttatcaccttgacgagtgttgacaagtaacaatggg

SEQ ID NO: 24813 - DNA, 600 bp, Chicken  19866894239611_1
tagagaaaactcaggagcaaaaagagaaaaatattcaaaatgatataagttaacggtaaatgtgtttcaaaaaatggaaatcctgtgttttaacggtaaatgtgtttcaaaaaatggaaatcctgcgttttgtcagattaaaatttggatgcaagatagaaatgcagattggccatactgttaaaatggcttttagttaagctaattaatatcattgtctttgcacttgagaaagtgtgtttcttcattgatttttcccaaaatgttaaacattaatctgttctctgacactatgtgggrtttttaaagatcccttccaactctaaggattctatgatacttatttatttatatatttgattgtttactagtttgtaatggaaggcaagcaataggacactaattttcattatagtgcaaagacataaggggaaggaaatgctgaagaaagtattcccctgcagtgctgggaaatactttcatgaaaaggagcaataggcacaaaacagaggaacacaagtttttctgtcaggaagcacttattcactgtgtaggtctctgagctatggaacagttttctaagatagattgtggaccttc

SEQ ID NO: 24814 - DNA, 599 bp, Chicken  19866894239619_1
  misc_feature (1)..(58): n is any nucleotide
nnnnnnnnnnnnnnnnnnnnnnnnnnnnnnnnnnnnnnnnnnnnnnnnnnnnnnnnnntggccgtgtggaaactggtgtcctgaagccggcatggtggtcacatttgcccccgtcaacgttacaactgaagtaaagtctgttgagatgcaccatgaagcccttagcgaagctctgcctggtgataacgttggcttcaacgtcaagaacgtgtctgtgaaagatgtccgccgtggtaacgttgctggtgacagcaagaatgatcctccaatggaagctgctggctttactgcgcaggtgasttttgcaactgttkgaagacattagaaatgtagatctagattgtgaaatacagaaccttgctcttagttatcatgggctaagctgtaaggtgatacagacttgtgctctgagatagggtttgccttaagcaaatacatgaaagctgtggctttctaagtcataccagtctgtggrgagcttttcagaattgccctggtgtaacgcatttgcttgcttttttaggttattatcctgaaccaccctggccaaatcagtgctggttatgcccctgtgctggattgccacactgctcacattg

SEQ ID NO: 24815 - DNA, 599 bp, Chicken  19866894239619_2
  misc_feature (1)..(44): n is any nucleotide
nnnnnnnnnnnnnnnnnnnnnnnnnnnnnnnnnnnnnnnnnnnntggccgtgtggaaactggtgtcctgaagccggcatggtggtcacatttgcccccgtcaacgttacaactgaagtaaagtctgttgagatgcaccatgaagcccttagcgaagctctgcctggtgataacgttggcttcaacgtcaagaacgtgtctgtgaaagatgtccgccgtggtaacgttgctggtgacagcaagaatgatcctccaatggaagctgctggctttactgcgcaggtgasttttgcaactgttkgaagacattagaaatgtagatctagattgtgaaatacagaaccttgctcttagttatcatgggctaagctgtaaggtgatacagacttgtgctctgagatagggtttgccttaagcaaatacatgaaagctgtggctttctaagtcataccagtctgtggrgagcttttcagaattgccctggtgtaacgcatttgcttgcttttttaggttattatcctgaaccaccctggccaaatcagtgctggttatgcccctgtgctggattgccacactgctcacattgcctgcaagtttgct

SEQ ID NO: 24816 - DNA, 600 bp, Chicken  19866894239619_3
cctggtgataacgttggcttcaacgtcaagaacgtgtctgtgaaagatgtccgccgtggtaacgttgctggtgacagcaagaatgatcctccaatggaagctgctggctttactgcgcaggtgasttttgcaactgttkgaagacattagaaatgtagatctagattgtgaaatacagaaccttgctcttagttatcatgggctaagctgtaaggtgatacagacttgtgctctgagatagggtttgccttaagcaaatacatgaaagctgtggctttctaagtcataccagtctgtggrgagcttttcagaattgccctggtgtaacgcatttgcttgcttttttaggttattatcctgaaccaccctggccaaatcagtgctggttatgcccctgtgctggattgccacactgctcacattgcctgcaagtttgctgagctcaaggagaagattgatcgtcgttccggcaagaagctggaggatggcccgaagttcctgaaatctggagatgctgccattgttgatatgatccctggcaacccatgtgtgttgagagcttctctgattatcctcctctgggtaaggcatctcctaaaa

SEQ ID NO: 24817 - DNA, 524 bp, Chicken  19866894239625_1
aatgtgtgccacaccataacagctgactggagttgccccagcctttcacaaacccccacaggagtaatggaggaactgaccgaaatttcaggaggcgaacagttatcaaggctccttgatgacatctcccccctggcacaacagatacaaaatggtgagtcttcaccagaagcttgccatttgatgataccctaagacacagctagaaaacaaagctgagttttctcattcctcaggatacccatagtccaggctgctcttgtgctacagcctggatgcatctctcagccctgtgatgarcyagatgagagctgtggattttgtttcccttctgatcccaggagagagaggttgtagccaaaagcaggctttattgtagggttggttttacaattactattaatgacaagccaatttctctcccttgatgtctgctgcatgtgataatgcaatgtttcctcaaacatcatgtcataaactagcaaaggtgagcaactggcgaggcggaaaaagtgaggagaaga

SEQ ID NO: 24818 - DNA, 522 bp, Chicken  19866894239625_2
aatgtgtgccacaccataacagctgactggagttgccccagcctttcacaaacccccacaggagtaatggaggaactgaccgaaatttcaggaggcgaacagttatcaaggctccttgatgacatctcccccctggcacaacagatacaaaatggtgagtcttcaccagaagcttgccatttgatgataccctaagacacagctagaaaacaaagctgagttttctcattcctcaggatacccatagtccaggctgctcttgtgctacagcctggatgcatctctcagccctgtgatgayagatgagagctgtggattttgtttcccttctgatcccaggagagagaggttgtagccaaaagcaggctttattgtagggttggttttacaattactattaatgacaagccaatttctctcccttgatgtctgctgcatgtgataatgcaatgtttcctcaaacatcatgtcataaactagcaaaggtgagcaactggcgaggcggaaaaagtgaggagaaga

SEQ ID NO: 24819 - DNA, 600 bp, Chicken  19866894239628_1
atttgcttcagagatagaaagctaatgtctagcctaacctgcaaagccacagaagttgtttttcctctgagcagctacttgctggtgcaataaaccacctcatctttgcacaccagcactgcctgaccattaaggtatacaaggtgtttcctgctgctcaaatccctctccccgggacagctgactgtagtgcattttcatcctgcttattcatgatgagtatcttgaaaaaagcaacacactgggctcttgataacagcgagctctccaaaggaaaagaattgcttttaaaacagtttytcacatatgcaccttcagaaaatacaaaacaaaccaggaactgaacatactatgcagttgatgcatgttgtctggacttctcagttgagataaaactttttccctatgagaaaaaaagaaaacagtcatgactatatatatacacatgactgtatataacaagcgatgcacaagaaactgctcaccacgcatgtgcagctagctccccgagcagcggaagagagatcaactcccacccccttcaaaattccttccacatgatgtagaaaatccctttggccagtttaagtcagctgtcct

SEQ ID NO: 24820 - DNA, 600 bp, Chicken  19866894239650_1
aaaagcaaatgaaactgcatgcaagagcaggtgaacactgaaaaacaggactacacttatccaggaagcaaccagtatgccagtgccacccagaaagattatgaaacaagtagaataagccttcatactcacactaaaaataatgggtgtcaaactggctctttcaaggtgtcgtaacctcatagaaacactcagaatgaatttgacatttatatctttataaataatgcataaataaaagcaaaggaaaaaaaccagcatttgcagtttagggaaggccatcaaaacaaacatgtccayagcactcaaatgctaaactacatgtgagaatcttctgagtggctgaaatctgggacacaaaggaaaggtctttttgcttttaaattaattattaatcaaccctttcagccatcaaatctctacagtgattcatctattttctttaccaaagtctacactattatgagaagatagcaattccagtggtgcatcaccctcctgagagcaatacttaaacctgtgtatgagaaagaattttaggaggttcatttctctctcccatggaaagatcatcttctcactgaccctaaaaataatatt

SEQ ID NO: 24821 - DNA, 600 bp, Chicken  19866894239652_1
taaggattatattaagcctagatttgtattctgacatgaagtttaacacaggataatacacttccttcaaactgagactaaaaggaaaccttcacatttcacatagccaatgccagaagaatcactccacaccagacatgaaaactcttatcacatctattaaattcattaataattttttttgtgattacatgaattacactttccataatttgtagtttcagaagagtctcttatggaaccctatatctagctgaaatattataattccattggcaatgacaccgctgtaggcaaaaraaagtagatttgtccaatattttgtccaaaatagttaagggtaattgattattagtaaaggggatgaagggagggagggtgaggagagagagagagagagagaagggagaaccgccattatgtcagtgattgatataggctcctttctaattacatcagcactttccaatggagacaggtcactgtacttatagatctgcagctacagatttaagagtatttgacaaataaccataatttaaaatacaataacttaagagataagatggatgctatacaacttttctgcacatgtagggc

SEQ ID NO: 24822 - DNA, 600 bp, Chicken  19866894239655_1
cggtggcggctgcagggaagtgaagccccgatccacggcctgatggagtttgtcattaagaaggatttcagaaatgctttgcagccaattccctgggcctgattggtactttccagcttaatgcaaaccagtgaggaaacaagcttccagacctagttaggccaaactgcacagggcggttgcaggcgagagataacgtaacattgcccggggctgcagaactgtaactgggactgcgaggcttcgtaagcacatgggtaggttctctctccccatctcaagcaaacagcttttatctcrtctcccaaaatagcaacctcccacccttcaaaacaaacaaacaaaaaacragaatgtcttgagacaggcacacaaagccgacagaagtggaacgcagagctgatagaaaacagattccagcrtcaagtccaaagttggtctcagcccatttcttaagaaactgagaaaacagagcaattacctgccaagcagattttactgtcacttagcacttgtacttctctgacacatgtgagcctggcgatttgatggaatctgttgcggttcagtgcagtgcgtcagttgggttgatcttgggga

SEQ ID NO: 24823 - DNA, 600 bp, Chicken  19866894239655_2
tgtcattaagaaggatttcagaaatgctttgcagccaattccctgggcctgattggtactttccagcttaatgcaaaccagtgaggaaacaagcttccagacctagttaggccaaactgcacagggcggttgcaggcgagagataacgtaacattgcccggggctgcagaactgtaactgggactgcgaggcttcgtaagcacatgggtaggttctctctccccatctcaagcaaacagcttttatctcrtctcccaaaatagcaacctcccacccttcaaaacaaacaaacaaaaaacragaatgtcttgagacaggcacacaaagccgacagaagtggaacgcagagctgatagaaaacagattccagcrtcaagtccaaagttggtctcagcccatttcttaagaaactgagaaaacagagcaattacctgccaagcagattttactgtcacttagcacttgtacttctctgacacatgtgagcctggcgatttgatggaatctgttgcggttcagtgcagtgcgtcagttgggttgatcttggggaggttctggcttatttaattctggatttatagctcaaggaaaactgataag

SEQ ID NO: 24824 - DNA, 600 bp, Chicken  19866894239655_3
gcaaaccagtgaggaaacaagcttccagacctagttaggccaaactgcacagggcggttgcaggcgagagataacgtaacattgcccggggctgcagaactgtaactgggactgcgaggcttcgtaagcacatgggtaggttctctctccccatctcaagcaaacagcttttatctcrtctcccaaaatagcaacctcccacccttcaaaacaaacaaacaaaaaacragaatgtcttgagacaggcacacaaagccgacagaagtggaacgcagagctgatagaaaacagattccagcrtcaagtccaaagttggtctcagcccatttcttaagaaactgagaaaacagagcaattacctgccaagcagattttactgtcacttagcacttgtacttctctgacacatgtgagcctggcgatttgatggaatctgttgcggttcagtgcagtgcgtcagttgggttgatcttggggaggttctggcttatttaattctggatttatagctcaaggaaaactgataaggcaacactaactgggtgtgtgcttctgttctgcttcactctggccattcaccttccccattctgattgaagc

SEQ ID NO: 24825 - DNA, 599 bp, Chicken  19866894239676_1
  misc_feature (1)..(37): n is any nucleotide
nnnnnnnnnnnnnnnnnnnnnnnnnnnnnnnnnnnnnttatacatttatctttgtttcaacaaagcctatttctttttcatacttcaaatgcatgaaagaggggggtcaacctgaaatggtttatttaatccaaaatagaacatcttggttttggcctgcttaatcctaataaaagaaataaatatgaagagtcagtctctaactgaaaacatctcctaaacaccaatttgagaatgtttcagtttgagataatacatctaggctgtaaaagaaataaaataaataaataaataaatttwaaaaaaacctattatttctggcacccaaaaaatcttgtttaaaaataagaaaaatctgttgcagggtgagagcagagaagtccactctctggtgcttgcagttaggtaatgaccagatatacagagcaggactcttccccagctggaagatccagaggcacacacaataagacagttcaccaggccatgacacctgcagataaggcaaatttgatgttctcgaggagctggggcctttcaacccattgttggtgatccctgatgtttgaattgaccaagctaaggccctccaggggagg

SEQ ID NO: 24826 - DNA, 599 bp, Chicken  19866894239681_1
  misc_feature (1)..(53): n is any nucleotide
nnnnnnnnnnnnnnnnnnnnnnnnnnnnnnnnnnnnnnnnnnnnnnnnnnnnnccagcctggctcataagctgcttgtcatcagaacccctgccccctcacagaagaaggttgtttaatctctgttataaatgtttatttaaaagctcttccttgctgctgtctttaatccattgtcctgtcaggaaaaagtaatggatggtttgctgctagattagcagatgaatccagctgcctagactcaattttgaacacattggctgcttctcttggaagtacctcactctgagttagcttgtgytgaagttgatccagctatctgggagccaagtatagtggcaggtttgcaagaagatggggaagtgctgtgtgcttggattttagtctgcctgtcattcccaagtctgttttaaaaattgctcttcctactgtctgtcacactcttttcttaacagcttatcttctggaaaaaatcatctttacatgaagyctttccactggaattccatgctgaattcacatgtttaatggcctttcaacattttctttctaaactagrtactgtgatccctgatatatgatatcgctggtaaggagtgt

SEQ ID NO: 24827 - DNA, 600 bp, Chicken  19866894239681_2
agtaatggatggtttgctgctagattagcagatgaatccagctgcctagactcaattttgaacacattggctgcttctcttggaagtacctcactctgagttagcttgtgytgaagttgatccagctatctgggagccaagtatagtggcaggtttgcaagaagatggggaagtgctgtgtgcttggattttagtctgcctgtcattcccaagtctgttttaaaaattgctcttcctactgtctgtcacactcttttcttaacagcttatcttctggaaaaaatcatctttacatgaagyctttccactggaattccatgctgaattcacatgtttaatggcctttcaacattttctttctaaactagrtactgtgatccctgatatatgatatcgctggtaaggagtgtatctggtgcctttaatggcagatgccccgggagtagttcaagaaatggaaggagagggcaaatacagatgatagatatccaggcaaggcacaagaaagcttgaatcatatatatgactgagaactgaacctattccactgccagaatgattgccagagtagaagttcatgttgttctccttcccagcttg

SEQ ID NO: 24828 - DNA, 600 bp, Chicken  19866894239681_3
gctgcttctcttggaagtacctcactctgagttagcttgtgytgaagttgatccagctatctgggagccaagtatagtggcaggtttgcaagaagatggggaagtgctgtgtgcttggattttagtctgcctgtcattcccaagtctgttttaaaaattgctcttcctactgtctgtcacactcttttcttaacagcttatcttctggaaaaaatcatctttacatgaagyctttccactggaattccatgctgaattcacatgtttaatggcctttcaacattttctttctaaactagrtactgtgatccctgatatatgatatcgctggtaaggagtgtatctggtgcctttaatggcagatgccccgggagtagttcaagaaatggaaggagagggcaaatacagatgatagatatccaggcaaggcacaagaaagcttgaatcatatatatgactgagaactgaacctattccactgccagaatgattgccagagtagaagttcatgttgttctccttcccagcttgtagtgaatgctaggatattgcttttccacatttgtagccctttctgaattgtcactgtactgcacagaa

SEQ ID NO: 24829 - DNA, 600 bp, Chicken  19866894239682_1
agaagcagctgaccttggtgaaagagggcagctttttcaaataaaaggagacctgtctgttgctagcagtgtggcttgtttcttatttacctcatgtcagaataaacgatgatggtaaaagaacttgctgctctagctgttgtgagcactgtgaaccaagttcaccctctgtttagcttcagtgaaaacagcagatttaaagctgggaggaatctggactggtacacgcttacagctgtcctggcagatggaccgctgacagatgaggcccctcaggcccatgcctggatgccagcattkagtgctgctagcttttcacctggagccagccctgctgctgagcaggcactggtgctcccagagttggaccttttgagtggactatgccgctctcaggagtagatgcacacaccagctaactgggagcaatggccatcctttcccctygccagctcctcccagctggtggtgttgagctcttctggttattcaaggagccttggggcttggcgctgcatcccacataaataagagctgtggctctgatctcctggtttctctgttaggctgtgggaagatttcctccagctcttagagttt

SEQ ID NO: 24830 - DNA, 600 bp, Chicken  19866894239682_2
actgtgaaccaagttcaccctctgtttagcttcagtgaaaacagcagatttaaagctgggaggaatctggactggtacacgcttacagctgtcctggcagatggaccgctgacagatgaggcccctcaggcccatgcctggatgccagcattkagtgctgctagcttttcacctggagccagccctgctgctgagcaggcactggtgctcccagagttggaccttttgagtggactatgccgctctcaggagtagatgcacacaccagctaactgggagcaatggccatcctttcccctygccagctcctcccagctggtggtgttgagctcttctggttattcaaggagccttggggcttggcgctgcatcccacataaataagagctgtggctctgatctcctggtttctctgttaggctgtgggaagatttcctccagctcttagagtttagtgttcttttgcctgtttttttttgtctctttattggtcatctcaccaaacagagcttcaggggtggctgcctttgcagctctggtgtgttgagcatgtccaagtggtttgcctactgctgtatctctttagtgctccatgtaaag

SEQ ID NO: 24831 - DNA, 600 bp, Chicken  19866894239682_3
ccatcaatatttaatgcagaaattctgctcctgttatctttgctgtacctgtcttcccttctgaattagtctctcctttacctcatctgcttgatcgtgttggcttcgtgcttctatctcttcctcctttagtaaagataactggactacagtgctggtgaggaagaatatgccaggaacaatgtactgactcttcaggagtaaataagcacccagctgtctgcatctaagatatcagaagtacttctttaagatgtccaaagtatttttgggttgactgtggttacttttgatagctcrtagtacttttctctttctgtagtggggttgtagagggaaaatgtgtgatatggcagcttttcaccgatgtgtcctgctagctgacaccgctggaggtgggcagagctctgaataatgcagaagtgcagcaaatggactacatgtgagcaataactgcctgcctggcagccaggctcctggggccggatgggctgtacgctgcagagcagggctgcatgcaggatggtgcagcgtgtcaggctcccgcctgctgctcagcaccacggcagcgtcagcagctgtgcgccttatctcggcact

SEQ ID NO: 24832 - DNA, 600 bp, Chicken  19866894239684_1
cttcctttactcaactgcgttcaccacaaccagtgtttgcagtactggtaatggcatgaaccaaacacagccaggaacaagtcagaaggacacaaaaacctgaccctcaattcatgcacattctataatatttcagcagcagaaggaagaaggaggcttttaagaagtgtgccagcagacattaaaggagaactgttattaatatgtgctcaagagcaattatttcattaaaaaaaatgaatggatcataaatactgcactgaagagtatggctttctgtaagtgcacataatgccccamacatctactctgacgctctgagcaagtcacacacatggacaaggaggacatgagggatccagtctacccagattccctcgaggcatttgccagggcccctcacccaaggttctctaaggaactctactgctatccaacacaaatcagatcctctcatggatggacacttggctgaaagagagcaaacagggtatgaatatacactccatgttcagagcagaaagatcaccagtggaaccacacagtgatcagtgccaggaagtatgctagcattcctaagtggatccagaagaaaatatt

SEQ ID NO: 24833 - DNA, 473 bp, Chicken  19866894239684_2
ctctcatggatggacacttggctgaaagagagcaaacagggtatgaatatacactccatgttcagagcagaaagatcaccagtggaaccacacagtgatcagtgccaggaagtatgctagcattcctaagtggatccagaagaaaatattcaatactaatttaatagtcacagcaaattgctaagagcaataaagaccgaagagagtaggagaaataatggcacatatgttttccctattaagtgatgtgtaaccatgagaactacagcccatagattccattctctccagacgtgcagmcctctgatccatgggatatcagcaggcaccatcctatccactgcactgatcagctccaaatccaagccaagagaaactaggattttaactgctagtggaccccagacaattccaacatttgactgtatgactctgaacataacagttctacaaagcattctcctactttaatg

SEQ ID NO: 24834 - DNA, 599 bp, Chicken  19866894239688_1
  misc_feature (1)..(136): n is any nucleotide
nnnnnnnnnnnnnnnnnnnnnnnnnnnnnnnnnnnnnnnnnnnnnnnnnnnnnnnnnnnnnnnnnnnnnnnnnnnnnnnnnnnnnnnnnnnnnnnnnnnnnnnnnnnnnnnnnnnnnnnnnnnnnnnnnnnnnnnnggtaaattgtagttgctatatgaacagcctgtaacagggcttgtgagaagttaacgcatgagatgaatataaaccttttgtatttatcatcttgccttttttgtttttttttttgttccctgggcatgcagaagatctgcacctcattctgcctaaaggttgcrctgggatggatggagtccaggaggtgtacctaagatcttagagggccgtaaacacctctcacctcgctgggtgccatctgagctcattgcagagcagctgttggtgacacgtggaggtgtacctgggggctcctgtcacctcaacgctgtgttctgtcaccgtgctggaggcggttccgtgtggctcctgctgtgcagtactgaactgaggtgttcacatttgccttaaggcaggagcagacttctgaaatacatacagtgaaaaatactcgtgttaaagcgtgctctcttggcttgtt

SEQ ID NO: 24835 - DNA, 600 bp, Chicken  19866894239689_1
gaatttgtgcaaagaggaaggtaggagcacagaaactcactgataaagctcgttagcagcacacacagcacagtgctggctgtcacccttacttaaattctgtgcagtctgaactctcagtgtcccctcagtatttttatccactccaaggaagtgtattattttatgtctataggcagatacaggcagaaatagccatactcacaggatttgcaaaacaaaccaacaatgctttctatgacttctacaatagcttatgccaatataacagaatcttacgagacaccaatgttaatttcrattttcaaagcagttttttattagtttcagttttacattagggaacaataaaaaacccacatacatgatgtacagtacatagcttgcattgtcccctgcttttaaagtcatatgtcaaggttcaggctgtagaacagagttcactgctcttaaaattacagcaggcacatacagtactaccttgatgcagtattagcgcagactcgtttgggcaaatgcaatggtaggagcaccacctgccattagaatactgcatgtaccaatggaatactgttatggaactgtaacattctgcccttc

SEQ ID NO: 24836 - DNA, 600 bp, Chicken  19866894239689_2
ttttgctttgaactggagttactcagatcgctgccattcagtgttcaaaccacccagccattccagatacccttccctttggttacttctggtaacatttcttaacctttcattcctcctacagtaatatgctgttccagacatcccctgcctccctttagctactcctttttattttcttcagcttctccttcctcttcagccacttacactcttgtcagttactcttctcaacatctctgggccctttctcatgctcacccattctgattttctctctgagaaagagaaaataccacrttcttctccccgttacacccaactgccattattatttggaatactgcttttaaatcctttatcagcattcacctctaaggtcctgattcttttcatatttacatgtggttgtaacctcaataattcagtggttttacatgcaaactgaacggtgaaaatccaatccacttacttgaatcagctcaaaagaaaacagaactaacagaaggaagctgaatgagagattaaaatcttaatgcagtagyacaagttccttctctcaagctcactttgtttatttcttggtgtggagctaaacat

SEQ ID NO: 24837 - DNA, 600 bp, Chicken  19866894239689_3
cctttctcatgctcacccattctgattttctctctgagaaagagaaaataccacrttcttctccccgttacacccaactgccattattatttggaatactgcttttaaatcctttatcagcattcacctctaaggtcctgattcttttcatatttacatgtggttgtaacctcaataattcagtggttttacatgcaaactgaacggtgaaaatccaatccacttacttgaatcagctcaaaagaaaacagaactaacagaaggaagctgaatgagagattaaaatcttaatgcagtagyacaagttccttctctcaagctcactttgtttatttcttggtgtggagctaaacattttcacacagtatcctcttactgtcacactttgcagtttcagtaatattaaacaagtttgcttctttaatcccttggcacaggatggcctaaatttccattgttctctgctaaatccttttaatctagtgcctagcaccaagaagatctgcctcctacctgttggcaccaacrtgggaggaggggagtaattcatatgcctcccatgtaatgcagaggctgctgtgataagcacactttaaaaaa

SEQ ID NO: 24838 - DNA, 509 bp, Chicken  19866894239689_4
tgaatcagctcaaaagaaaacagaactaacagaaggaagctgaatgagagattaaaatcttaatgcagtagyacaagttccttctctcaagctcactttgtttatttcttggtgtggagctaaacattttcacacagtatcctcttactgtcacactttgcagtttcagtaatattaaacaagtttgcttctttaatcccttggcacaggatggcctaaatttccattgttctctgctaaatccttttaatctagtgcctagcaccaagaagatctgcctcctacctgttggcaccaacrtgggaggaggggagtaattcatatgcctcccatgtaatgcagaggctgctgtgataagcacactttaaaaaatactgtcgagcagcctgggtcactgattgcttatggcaagagcagttttgcaagcaagttttgcacacccactgggtaggaaatgaaaaggtgttcttcacagtttcttagactttttattttgaagtaaaagcaag

SEQ ID NO: 24839 - DNA, 600 bp, Chicken  19866894239691_1
ctctaatttgataaggtttgcctcttcagttttgccagtgggcaagtttatgcatcacgatgctctttaaaataagtaaagcctgcaaccaaatttctgcatgaatttatattagtatttaatgttcacccaaatttttatgttcacatgtaaaacaaagaatatgaaataatacttgtagtatggatgtttcacttttgctgctgacttagcagcactgttctggctatattgccctttgcaagataaagtgctgccttttgcaaagatctagcttctatgtatatgatgcttatgatrcatactatgtgtgtgcacaactaacatctgcacacgctcaaagcgggtaaaaaagagatctgcacaggatagcatggcaccatgcctgcaccagctgagaccagatgcagtactattctactgctgtatgaatgagattttcagttccaattgctgccaggatgagataatatgtgtttgatgtatagcgaaaaaatatcctttttgctagacagaaaccatattagatatgcttttccatatacttactatgtttttttttcatttgaaataatacgtattaattagttaatgacttaa

SEQ ID NO: 24840 - DNA, 600 bp, Chicken  19866894239708_1
ggcctgattcatgctgatcactaaattgaagaagtctttaccaactctgctccgactaccgtatgtgttcttttccttgcaaagctctgtaaaaagctatgtttttcccattgagctgcaaggactctggcatgttcaattgaaatggtttatctcctaccttgatctgtttctggtaagcagatgctctgaagcttaggatgtctttatagtacaacaaatcatcttgctgtaaatagctgaactgagggggatacttaactgcctgaaattaatagtgaatgctttgctctgagaccrttttgtaattgttccaaagctttttaagtctagaaggttaacagaaaaactgaaaatatcatgggaataaaatagtgccatgggaatgggcatatatttataaagcagagcagaattccagagagcctgagctgttgatgtgatagataaaagtactctgtgcttgcatttgtatttaaaactctagtgttcagaagttttggagtagctggatccctagtgtatcccttcatttatggctggctgcatctcatgtcaagataaccagagcgttaatccattagttaggaaggtaagcat

SEQ ID NO: 24841 - DNA, 600 bp, Chicken  19866894239708_2
ataaaagtactctgtgcttgcatttgtatttaaaactctagtgttcagaagttttggagtagctggatccctagtgtatcccttcatttatggctggctgcatctcatgtcaagataaccagagcgttaatccattagttaggaaggtaagcatctctctgtcctgctgagggaaaagtgcccgtattgtcttctgcatgaagaagcataattatgcctgctgattgtaggacaagatgccactctgcagttctaggccaggttagtgccagggacagcatagccagatctgagcagacrtgcttgtcttgccctaataaggagctgtgttgcacctgagttttggcatatgctcagtatctgacctactctgtctagctgacctctttgttgcaatctctttccccctttatttctcttcattctggctacagtccgtcttgtgttattaggctgcttggggaaagagtcataactaagacaaatgatgaatgcttgagttcaggaaagggtgctttcttgaaggaggcagtgaggcatatcctaccaaatgtgtttcagttctctctgttgtctctaactgtggtgattccctttgag

SEQ ID NO: 24842 - DNA, 600 bp, Chicken  19866894239708_3
tgcagtctggcagcctgatttgttttggttgttgcttcctatacagtgttttcacatgtactgtacagctctcaggaaatctctctcttctcctcctgccaatgttttgttcctttatcctaatcaatgttccaacagctgaacttgcctgtaggcttccaagtgtgctgtagccaacaccttgttgacagcctttgtccatgtgccataggccttgggaatgccagatagttcttctggttctttctgcagaacaacacatgagtcatttgcagcagcctgatggtttttctcccagcytaagcaaattagttgcaccgaaactttaaaaattgtagcayccagtctgcattaatatgcacctccttggaaaggcaaaactcccaatagtgtgatttcagaagtcttataatgaagctggtgtcagctttggggtgtaaaaccgaggatttgagctcatacaagcattaaagargggacagtgaggactgtcctgtcagtgccatgcatctgaagtccatgaatagtttgcagttagctatattacagcttagtaatgtttgttggggtgagacttctaaaggatataaatgatttttc

SEQ ID NO: 24843 - DNA, 600 bp, Chicken  19866894239708_4
tacagtgttttcacatgtactgtacagctctcaggaaatctctctcttctcctcctgccaatgttttgttcctttatcctaatcaatgttccaacagctgaacttgcctgtaggcttccaagtgtgctgtagccaacaccttgttgacagcctttgtccatgtgccataggccttgggaatgccagatagttcttctggttctttctgcagaacaacacatgagtcatttgcagcagcctgatggtttttctcccagcytaagcaaattagttgcaccgaaactttaaaaattgtagcayccagtctgcattaatatgcacctccttggaaaggcaaaactcccaatagtgtgatttcagaagtcttataatgaagctggtgtcagctttggggtgtaaaaccgaggatttgagctcatacaagcattaaagargggacagtgaggactgtcctgtcagtgccatgcatctgaagtccatgaatagtttgcagttagctatattacagcttagtaatgtttgttggggtgagacttctaaaggatataaatgatttttcctttctgcacttgacaattgataagaggacaaggaaaggaa

SEQ ID NO: 24844 - DNA, 600 bp, Chicken  19866894239708_5
aacaccttgttgacagcctttgtccatgtgccataggccttgggaatgccagatagttcttctggttctttctgcagaacaacacatgagtcatttgcagcagcctgatggtttttctcccagcytaagcaaattagttgcaccgaaactttaaaaattgtagcayccagtctgcattaatatgcacctccttggaaaggcaaaactcccaatagtgtgatttcagaagtcttataatgaagctggtgtcagctttggggtgtaaaaccgaggatttgagctcatacaagcattaaagargggacagtgaggactgtcctgtcagtgccatgcatctgaagtccatgaatagtttgcagttagctatattacagcttagtaatgtttgttggggtgagacttctaaaggatataaatgatttttcctttctgcacttgacaattgataagaggacaaggaaaggaagaggagtcatgtttctttgtaagaattaccagatttgagcacactgttcccatagcatcccccagaatagcagtaagaagctgtagggaggctgatgaattgatctctaacctagggcatacctttcccgttac

SEQ ID NO: 24845 - DNA, 600 bp, Chicken  19866894239712_1
tgtgggtttttttttgtttgttttcatttattgtaatgcacacaaagggaaaccccatgagctgtcactgagcaagcgagcacccctgctggggtgcactgcagcaaggtttgctgcagctggagtcatccacacagtggactgctgactaggaaaaacagctctgtaagggtgaagaatgcacagagtgctgccctcgagatgacgtagttcctcatgcagatcggttcaggcgtcatggcagaggaccagcctaatgatctcattccagagctaccacaggacaggatttgtgtgaarcctgccactgtgtttaggagatgcagtgaggcacgaggcgctgaaggtattccctccaaaataatgggcaagctaaatgaatattaaatgcagtgcttgaactggagcaccacacaccagctctgcttcgtgagaaacgatgatgatttgtggaaagatagtaatgtgtgatatacaaatattttgggtgaaatatataatcagttaattggtttattacattataaaacctttgtttgcttgaaagagcaataaaactaactgacaaaatgaatattcgcccctttgaagacttcttac

SEQ ID NO: 24846 - DNA, 389 bp, Chicken  19866894239712_2
ttgaaaatggttagctcagccagagcttatttgatttgtttcttcagggattacaaagaataggattttatctatgaactgacaaaagaggcaatctctgcatttttgcctatgaaatagcagatccactaagccattgctccttcacatagtgaatgtattagtcacggggttgctttttattcattttcaaagtttttattccacacggtatggggtgtcaagcttctttgttcttaaaaaaattaatctgaaaaaataatactgtcaaatggagtttggggagattcagtagcccawtagatttaaagcagattttgaaaacaaacaaactctttctcacccgtaatggacatcttaaacaaatgctcttcagctaatgcaaagga

SEQ ID NO: 24847 - DNA, 599 bp, Chicken  19866894239715_1
  misc_feature (1)..(59): n is any nucleotide
nnnnnnnnnnnnnnnnnnnnnnnnnnnnnnnnnnnnnnnnnnnnnnnnnnnnnnnnnnnaaacacatacaactgcctttccctttaagtgaagtgccagagtgaactaacgttgatctgaacaataggcagaactggaccttgatctttttaaaggctttaataactggagtgcttaatccaaagctgttccatagataaatcaattactgcattgagtgaatctgacactagaacaatgagagaatatacctgagctatttatgtacaagcatatttgtattaaacacagtaaatgaamtggttgtaaggattagtttgtttgcttgtttgtttacttctttattcagtttttctttgtttatctatatattatttaaaagaaataaaaatacaaatatgctccaaaccaataaaattcatattcaggctttgaaaaacagctatcactttgtctatgctgtgtctattcatttttctcagaaatgtaacaattaaacagatttgtgaagaactgagtatgaggcccttgaggtcacactggacatgttttctcagtttgctcatgctgagctaaaaagctgttgtctaaagcagtag

SEQ ID NO: 24848 - DNA, 600 bp, Chicken  19866894239720_1
agctggctcccctctcacagcactccctagagctacattcccttcacagaaaggcttgacttgggtgccagagcctaaaaaggcttctggaagggggttgtgggtctggaaggtagctctccctttctcatctctgtgcaatgatctgggatgggggggagaggggtgttccaggactgggtccagacctacagggcaccaggagggctctctgggctgagtcccaggcgtggggaatggggagcctgggtgaggagctgcagatgggaaggggaggtgagccctgctgggcacccagcrccaggagggtggcttgcaggcagagcacagctgtgtgttggtgtgcagctcctacctggcaggtgtcgatgccgccctgcgggtaaccagcacacacgttgtggatatggacagccccagcataccagttgctgctgttgcagatgttgaggtcaatgagctggaccttggcctcctgcaggacacggtatggttcgacatattcctgtagagctgtgagcacaaagcaggattggcaccatcagctcctcgcctgttaccctgttggtgggtgaaccccttccctacgtcttgagatgc

SEQ ID NO: 24849 - DNA, 600 bp, Chicken  19866894239725_1
gagcagaaaagccctgagaatctggagatgaagcattatgggcagtgatgtgcaatctgtcccactgctgaggccagcgcagtcctccagtgtgccccagaatacagccaggtattcagcaacatttgtttcctaagctgaattctgttgtgttttttttttttttttttgcacaaaaataaatggagtttttggtttgcataacaggcaccatgtttcattctaattaatgaacgtggaccagatcctcaactaacagaaactggtgtagttgtatttctgtctgtggccagattttcmgtttcatttcttccagtggaccttttagtacacagctgatttcagttttgttttatttgaaagaaactgtctttcagcatctaaaaagccatatatgtgtaaaactgcgattttatgttctcatactacttattaaaaaaactaaaaattggattatcaagggaagaaaatgatgtattgattaattcaaaaccattgcaatgggaagaatgatctccagtggttatctgcgacagctaactctgcctcaaagaacatcatcttgtcagcaggcagataaagaaaaagacaagacagtac

SEQ ID NO: 24850 - DNA, 600 bp, Chicken  19866894239730_1
actataaacagagattgaaacttttatccacaggagacatacctcccgcaagcagcaacatgacaatgtatttaggagtcccattaaacaaaaaatgcaacatgaattaatagtgtgttacaataacaagtgctgcttaatgcagaaagagcatggcaaagcaaaaagagtttttacaaggcattgttaagaacaaaagtaggatgctgcaagttggggtgtctactttaataacaaagatgatggagaagatgatggaaaggcttaaacctatattgaagtaaggtagataccagttastgctgaagtgcwgtgacctttagatcatctaatatcccttccaagctttaactgcttgaggagttcataatgtaattattttcaagcatctagaaagatataatgggcaaagtctaacatgatcaacatgratatctattttcaagatagactttttctgtccagtggcctgtacagtctcataacccttctgtctgaagccctatgagttgttctgtcactcactctcttgcacagttcttactctgcattattttagatagcaagtactgtcacacttagttcaaaggccaaaagagg

SEQ ID NO: 24851 - DNA, 600 bp, Chicken  19866894239730_2
gattgaaacttttatccacaggagacatacctcccgcaagcagcaacatgacaatgtatttaggagtcccattaaacaaaaaatgcaacatgaattaatagtgtgttacaataacaagtgctgcttaatgcagaaagagcatggcaaagcaaaaagagtttttacaaggcattgttaagaacaaaagtaggatgctgcaagttggggtgtctactttaataacaaagatgatggagaagatgatggaaaggcttaaacctatattgaagtaaggtagataccagttastgctgaagtgcwgtgacctttagatcatctaatatcccttccaagctttaactgcttgaggagttcataatgtaattattttcaagcatctagaaagatataatgggcaaagtctaacatgatcaacatgratatctattttcaagatagactttttctgtccagtggcctgtacagtctcataacccttctgtctgaagccctatgagttgttctgtcactcactctcttgcacagttcttactctgcattattttagatagcaagtactgtcacacttagttcaaaggccaaaagaggaaagtgattact

SEQ ID NO: 24852 - DNA, 600 bp, Chicken  19866894239730_3
gctgcttaatgcagaaagagcatggcaaagcaaaaagagtttttacaaggcattgttaagaacaaaagtaggatgctgcaagttggggtgtctactttaataacaaagatgatggagaagatgatggaaaggcttaaacctatattgaagtaaggtagataccagttastgctgaagtgcwgtgacctttagatcatctaatatcccttccaagctttaactgcttgaggagttcataatgtaattattttcaagcatctagaaagatataatgggcaaagtctaacatgatcaacatgratatctattttcaagatagactttttctgtccagtggcctgtacagtctcataacccttctgtctgaagccctatgagttgttctgtcactcactctcttgcacagttcttactctgcattattttagatagcaagtactgtcacacttagttcaaaggccaaaagaggaaagtgattactgctcaacatcaagcatttctgcactaggctcctcaaggcctgcaaagttatagacagagagagatgttaatcaaaagaagtcataaggtacaaaaagagtcaactctgaattacagaat

SEQ ID NO: 24853 - DNA, 600 bp, Chicken  19866894239736_1
agaaaacttgaacttcagaaataaaagtctgaaatggatctgaagtgccttttttttttcagggcaggtacatacactgattacacagacatgggctgaaatgcatttcccagacattcaatcatgtacatacccaggtgatggtgcagtaagtgggctgtgtgccaaggctgacagatgtggttgaggagatagcttgtgaattcacagacttttcttcctccatgctgaatccctgtaatctttccagagctcccagaactgggttgttcatttttccaggaaataaatttcagtcamacagttaaatcacttatgctgccaacgtgcagktaatagaggtgtagcagagggttgttctgcttcctttcaatgtaagctcggttcttgtgaattttattctcagactttcttttcccttctttcttaccaccttcccttctattcctaccatattaactcaatattaactttgttgctttctttccaattgcctcttcttgtttcttttctttccaagatagcatyggactttgcttaattactgtttttgtttggggctgggtgttgttttgtcagatgtttattgagcaaaacaag

SEQ ID NO: 24854 - DNA, 600 bp, Chicken  19866894239736_2
atggatctgaagtgccttttttttttcagggcaggtacatacactgattacacagacatgggctgaaatgcatttcccagacattcaatcatgtacatacccaggtgatggtgcagtaagtgggctgtgtgccaaggctgacagatgtggttgaggagatagcttgtgaattcacagacttttcttcctccatgctgaatccctgtaatctttccagagctcccagaactgggttgttcatttttccaggaaataaatttcagtcamacagttaaatcacttatgctgccaacgtgcagktaatagaggtgtagcagagggttgttctgcttcctttcaatgtaagctcggttcttgtgaattttattctcagactttcttttcccttctttcttaccaccttcccttctattcctaccatattaactcaatattaactttgttgctttctttccaattgcctcttcttgtttcttttctttccaagatagcatyggactttgcttaattactgtttttgtttggggctgggtgttgttttgtcagatgtttattgagcaaaacaagatgaaaaggcaaagccaactgcttctgcaaaat

SEQ ID NO: 24855 - DNA, 600 bp, Chicken  19866894239736_3
tgaatccctgtaatctttccagagctcccagaactgggttgttcatttttccaggaaataaatttcagtcamacagttaaatcacttatgctgccaacgtgcagktaatagaggtgtagcagagggttgttctgcttcctttcaatgtaagctcggttcttgtgaattttattctcagactttcttttcccttctttcttaccaccttcccttctattcctaccatattaactcaatattaactttgttgctttctttccaattgcctcttcttgtttcttttctttccaagatagcatyggactttgcttaattactgtttttgtttggggctgggtgttgttttgtcagatgtttattgagcaaaacaagatgaaaaggcaaagccaactgcttctgcaaaattctgctcctgatcagcagcttttgaaggctttggatgacaatgctaagctaacccatacgttagaagaagagaggctkcaacatcagcaaaaggtaaaactgcttctcatttcatgcagaaaccttcsaaagcttcttgaactgaaggatgaattaatgctgtggtttgccaactacaggtcaaagaattagaag

SEQ ID NO: 24856 - DNA, 600 bp, Chicken  19866894239736_4
cttttcccttctttcttaccaccttcccttctattcctaccatattaactcaatattaactttgttgctttctttccaattgcctcttcttgtttcttttctttccaagatagcatyggactttgcttaattactgtttttgtttggggctgggtgttgttttgtcagatgtttattgagcaaaacaagatgaaaaggcaaagccaactgcttctgcaaaattctgctcctgatcagcagcttttgaaggctttggatgacaatgctaagctaacccatacgttagaagaagagaggctkcaacatcagcaaaaggtaaaactgcttctcatttcatgcagaaaccttcsaaagcttcttgaactgaaggatgaattaatgctgtggtttgccaactacaggtcaaagaattagaagagcagctagaaaaccaagcactgcataaggagattagtcgtcttaaacagcaactggaactcttagaagaagataaaaaggaactagagcttaagtgtcagaactctgaagaaaaagcaagagacctaaagcatacaggtaaaattgtgtaatgagtttacttttagaagtataatagagtga

SEQ ID NO: 24857 - DNA, 600 bp, Chicken  19866894239736_5
caatattaactttgttgctttctttccaattgcctcttcttgtttcttttctttccaagatagcatyggactttgcttaattactgtttttgtttggggctgggtgttgttttgtcagatgtttattgagcaaaacaagatgaaaaggcaaagccaactgcttctgcaaaattctgctcctgatcagcagcttttgaaggctttggatgacaatgctaagctaacccatacgttagaagaagagaggctkcaacatcagcaaaaggtaaaactgcttctcatttcatgcagaaaccttcsaaagcttcttgaactgaaggatgaattaatgctgtggtttgccaactacaggtcaaagaattagaagagcagctagaaaaccaagcactgcataaggagattagtcgtcttaaacagcaactggaactcttagaagaagataaaaaggaactagagcttaagtgtcagaactctgaagaaaaagcaagagacctaaagcatacaggtaaaattgtgtaatgagtttacttttagaagtataatagagtgagtgaatgatacacatctaatgaaattacacgtgctggatttgagacccaa

SEQ ID NO: 24858 - DNA, 600 bp, Chicken  19866894239736_6
aggtgctcagagccccatccagcctgaccctgaaatgtctccagggatggggcatccaccacctccctgggcagcctgtgccagtgcttcagtatctttactgtgaaaaacatttttcttaaatccaatctaaatcccctctgttttaatttgaaaccttttccccttgtcctgtcccagaagaccctgctaaagtgtctttctttcttatagacctttcttttcttctttcacgtagtccccctttagctactgaaaggtcactctcggatctccctggagccttctcttctccgtaaygaacagccccagctccctcagcctgttcttgtagggaggagttccattctgtgcatcgcttttgtggcccttgtctggatgctctccagcaggtccctgactctcctgtactgaggattccccatttggatctcaagatccagacatgaacttcccatgacaagaggttcagcagttgccttcagcttagaacagtcatgtatagaatgcacgtgaaggataaacattgtaaaacttatgtaacatataaaaactctgttcttagattgttcttagaatggtttaatgggytttctgtgc

SEQ ID NO: 24859 - DNA, 600 bp, Chicken  19866894239736_7
ctccgtaaygaacagccccagctccctcagcctgttcttgtagggaggagttccattctgtgcatcgcttttgtggcccttgtctggatgctctccagcaggtccctgactctcctgtactgaggattccccatttggatctcaagatccagacatgaacttcccatgacaagaggttcagcagttgccttcagcttagaacagtcatgtatagaatgcacgtgaaggataaacattgtaaaacttatgtaacatataaaaactctgttcttagattgttcttagaatggtttaatgggytttctgtgcatctaggaggctgctgttagtagaacatgttgccaaaaataggayttagtagcaattgagtgttttttttttttaattagtagctttttttgcttaagccgtcaaagtttttagagcagatgtgagaagcagagaactcactcaaggttttttctcttccacagttgatgaacttcaaaaacgaatacaccaatctgaaaatcctgcacctcctcctccgccgccaccaccgcctcctcttcctcctccacctcctcctaaccctatacggtaagtgcttaaatcaggagt

SEQ ID NO: 24860 - DNA, 600 bp, Chicken  19866894239736_8
attctgtgcatcgcttttgtggcccttgtctggatgctctccagcaggtccctgactctcctgtactgaggattccccatttggatctcaagatccagacatgaacttcccatgacaagaggttcagcagttgccttcagcttagaacagtcatgtatagaatgcacgtgaaggataaacattgtaaaacttatgtaacatataaaaactctgttcttagattgttcttagaatggtttaatgggytttctgtgcatctaggaggctgctgttagtagaacatgttgccaaaaataggayttagtagcaattgagtgttttttttttttaattagtagctttttttgcttaagccgtcaaagtttttagagcagatgtgagaagcagagaactcactcaaggttttttctcttccacagttgatgaacttcaaaaacgaatacaccaatctgaaaatcctgcacctcctcctccgccgccaccaccgcctcctcttcctcctccacctcctcctaaccctatacggtaagtgcttaaatcaggagtcagtgctcttcactgaagaataagtcagaatacagaatacctcatgagtttgca

SEQ ID NO: 24861 - DNA, 599 bp, Chicken  19866894239739_1
  misc_feature (1)..(18): n is any nucleotide
nnnnnnnnnnnnnnnnnnctgtgcggttgctgcccggtcctcccggagcacagaggtggcttttcccgctgggaaacggttctggaatgatcctccccgtgataacttgatgtgctaaagacagaaataattagggagccatctgagccgtggcgtgggaggttcatttcgttccacctgccgcacgccgaacgcaattagaggaagcgcctgccgtgcgagcagcgccgtcctcatcgccgtgctgcaaggggaaggggaaaggagcaccagcatggggagcaaccacagagcaccacmaggtgtgcccagacagcccctgcttgagggctgtaagtgcctgggggtcctgcatgcagagcccaccgcagggcagacggctcccagcgctcccctcctctccgccggctgcgtggcaggcagggagcactgagctgtcactcagctggggctgctgagccacaaatcccagagctgagattttcctatttgctcgtcagcagaacaaagagaagtttctactaccttgtcttcggctgagctcgttattccaagccaaatcacctccatctctctgacagcttatccagaaacggtaa

SEQ ID NO: 24862 - DNA, 600 bp, Chicken  19866894239739_2
cttgagggctgtaagtgcctgggggtcctgcatgcagagcccaccgcagggcagacggctcccagcgctcccctcctctccgccggctgcgtggcaggcagggagcactgagctgtcactcagctggggctgctgagccacaaatcccagagctgagattttcctatttgctcgtcagcagaacaaagagaagtttctactaccttgtcttcggctgagctcgttattccaagccaaatcacctccatctctctgacagcttatccagaaacggtaaacatttacggagcaattaaaagmatactttattcaatgtcactgcaataattataataccgttaatgctataataacgtacctacctaattatgctatgctagaacagcactaattatacacacaatacccatctcagagcttcttccacacccggttcatcagaagcagtgcagaattttcccctcctcctccatataaacccctctccaagggaggatgctgcagctatggaccaaccacatactcacccagctgaaggaaagcctcggtgcctctcacctttttctcagcgctggggtccttcttcgtgcctttaatgaa

SEQ ID NO: 24863 - DNA, 600 bp, Chicken  19866894239739_3
ctcacccagctgaaggaaagcctcggtgcctctcacctttttctcagcgctggggtccttcttcgtgcctttaatgaaatcattcttccccttcaagtgctgttcgtactctgcaggcgtcatatcaccttcttccattaagatgtgaggcatgtggggctctggaaatgcaggagaaccaccttagctcagctccgggtttggaagagcagcacgcacccatggttgcaatggcttttgaaggggtctggggttatcttgtaggagtctgacccctggcagtgtgtgcaaaaccaacaygggacccaaggaggggcagagcccacgtaccactcgggtggatgaggatctccacgggtcggtcaaatgtgtgcctgttggccaacgtgatgacgatgctcttcgctgagcgggcagaggggtcggcatctgctcggatctcatgcgtggggctctcaacgcctgcatggagggaccagggggtggtcagggagggccagaggaccccacgcaggggaaggaaaggaggatgatgagtgtgggcatcacaggcagccccgtacctgccagcaagcacggccctcggatctccaggtggaa

SEQ ID NO: 24864 - DNA, 600 bp, Chicken  19866894239741_1
agctggaagggtccattgctgcctggctggcaggaagctgctggtgctcaccctgcacagtatctgctctctgggtgcctttttctttcccattcacgtccctttctctctgtctctcataggttctgtggccctgaactgccagatggggtggttttaactgtggagaggggcgagcaccgctgtatggctgggcacccagaaacgtggccttgcacacgtcgggcacagacacactgctcctgggaggtctcattcccttgtgagaggtaaatgtgggcaggaataaagggatgggayggagctgacacctggggcagccccaacacccacatctggcagctgcctggaaacgtctgctgctgccggcccggccgatccgcgcgaaactctgcaattccctttttttataaacttgctgtgtatttcacttttcttctgaagatgtgctccttcccctaaagcactgctgttaggaagccaggggcgaggtgagcgtggtggcagctgtccctgctgacttggctgtctgtctgtctgtccggccatagggccgctggcgacagcagagctccaggtgagctcagcacagctggcaaa

SEQ ID NO: 24865 - DNA, 600 bp, Chicken  19866894239741_2
cgatccgcgcgaaactctgcaattccctttttttataaacttgctgtgtatttcacttttcttctgaagatgtgctccttcccctaaagcactgctgttaggaagccaggggcgaggtgagcgtggtggcagctgtccctgctgacttggctgtctgtctgtctgtccggccatagggccgctggcgacagcagagctccaggtgagctcagcacagctggcaaaggagccagcagagccgcagctcagtgctgagcgccacgaagagggctcagctcccggcctggcagtggggtcccrcacgcgtgggtttcgctttgctttacgataaggaggaagagaaactccatgctctgggctcctgcagggaagcgagcgccgactgtaagcgccggcggtggcttttccttggggatgccctctgtgctgctcctcccgggaccctgcagcatgtagctgtcccgaaccctgctgtcctttccctttgagcaacagagggatgaaagccaaaggatgtgtgtgtgttgtgctgcagttctccatgcgttccccacaagttcccccggggctcagggagatgctgtgcagaaggtgctgctc

SEQ ID NO: 24866 - DNA, 599 bp, Chicken  19866894239744_1
  misc_feature (1)..(113): n is any nucleotide
nnnnnnnnnnnnnnnnnnnnnnnnnnnnnnnnnnnnnnnnnnnnnnnnnnnnnnnnnnnnnnnnnnnnnnnnnnnnnnnnnnnnnnnnnnnnnnnnnnnnnnnnnnnnnnnnnctctctgtgctgcttctgtcttccgaattgacactacatattgcacttccacacactcaagtgggcaaagtaaaaacccgtgaaattgtttgtttgagggtttcctggttgttgtgggttctgtcacatattaaagccaagacatttttaggagaggtaacaactcgacctcctacaggtatttctkcatcgctgtataaacttggccaagtggcatttttgcttcctgattaatgacacccgaaacccaaggggatttttatccgtataagtaccttagaattgctggaatatataaaatgtaggcctgtctaaaagacaaatgcacgcttgttttggtattttgggttttaggtttccggtagtattcatttcatcaygaacttttgtttcctttggtactgagaatgagatcattattgcagcgattcattgtgcgctcacattatccacagattaccagattataaaggcagaaggggagtg

SEQ ID NO: 24867 - DNA, 600 bp, Chicken  19866894239744_2
tgaaattgtttgtttgagggtttcctggttgttgtgggttctgtcacatattaaagccaagacatttttaggagaggtaacaactcgacctcctacaggtatttctkcatcgctgtataaacttggccaagtggcatttttgcttcctgattaatgacacccgaaacccaaggggatttttatccgtataagtaccttagaattgctggaatatataaaatgtaggcctgtctaaaagacaaatgcacgcttgttttggtattttgggttttaggtttccggtagtattcatttcatcaygaacttttgtttcctttggtactgagaatgagatcattattgcagcgattcattgtgcgctcacattatccacagattaccagattataaaggcagaaggggagtgctctgaccgctcagcctgacctcttgcatcacattggtcaaaggattcccttgaattaaatcttttgaagttaagcctttagactcatctcgtttggtttgagagttgccagaggtggccgatcagctgcataccttggtgaagtcagctaaaaaatgagcaccaaaaaaaaaaagcagctgaaactgatattt

SEQ ID NO: 24868 - DNA, 600 bp, Chicken  19866894239744_3
aacttttccatgtgctggcagtctccatgtgttaaattatcattgtttttctttctgcttcaaagaaaacatttatctcaggattgtataaattttgagcacatattaagtactatctgcagttttcagctgttgttgtatgttctcctgaactgttccagctctgaaaaggagtttcaaaacaactgcctgtttttacaactacttcctgctgataattgtgctcacaatattcacagtaaaggccaacccgttgctactgcatgactcaaatttcccctttgcttttgctttgctgtwgcagctacacatctaatcattgaggagattgctggaggctatgttaaatgaaatccagaaatgccacatttttactgtgacctttgcttaccgtttcagtggacacttgaagtaacttctctatggagcaaactgtatgctaaagcatctctagtgtggctctgaatcgctgcctgaaccctgcaagtgaatttcccaacctcttagctctaatcttctgtctctrcaactgtgtgcaccttctctgtttctccttacttagattagaaggtaggtttatttttcttgcagtcataaaga

SEQ ID NO: 24869 - DNA, 600 bp, Chicken  19866894239744_4
acaatattcacagtaaaggccaacccgttgctactgcatgactcaaatttcccctttgcttttgctttgctgtwgcagctacacatctaatcattgaggagattgctggaggctatgttaaatgaaatccagaaatgccacatttttactgtgacctttgcttaccgtttcagtggacacttgaagtaacttctctatggagcaaactgtatgctaaagcatctctagtgtggctctgaatcgctgcctgaaccctgcaagtgaatttcccaacctcttagctctaatcttctgtctctrcaactgtgtgcaccttctctgtttctccttacttagattagaaggtaggtttatttttcttgcagtcataaagacggagcacttgtagtatcaacttgggctcttttccaccagttgcagtttgatgagagtgaagaataaattactgtacagatttcacacagctctaactgaaatacctctgttaggtgagccagaaagctacttttctaagatgtgcattattctctggcagtgattgtgtctcaagtggcagtaggcagcttctagggccatgcgaccgcttgcttcagcatttca

SEQ ID NO: 24870 - DNA, 600 bp, Chicken  19866894239745_1
tggggctggcttgtggttttgcacccatggtgtttctcatgtcatagcgtgcctttctgacaccatcttggtgaaacccaagcactgctacctccgtaccgtttcaggaaagggtaaaaagctgccaggtgtgccatacatcagttttatttcatggggctttagcgcggacaggctgagtgatactggtgtctacatgctgtctagatgggcaggaccatgggttttgacagggtcctcctcatgagatcccacaaatgctggccaggggctgtgcccaggttgggggaatgacattgrtctcctagtccatgtctcctagtctcctagacatggcaacccaatggtctttggagagtggtgaggacacgtttatagagagatttgggttcacctcctatgaattttgagcaggcaggaaaggagccagcagggaagtgggtgggaggatgttggtggccatgcggccagtgggttttctcatccctgaaacacaccatcccccatgggaggtgagggacagcctgatgggttggcggtctcatggctcccagaaatctttcacsctatgatggaaacctgtgggcaggtcccagggca

SEQ ID NO: 24871 - DNA, 600 bp, Chicken  19866894239745_2
aggggctgtgcccaggttgggggaatgacattgrtctcctagtccatgtctcctagtctcctagacatggcaacccaatggtctttggagagtggtgaggacacgtttatagagagatttgggttcacctcctatgaattttgagcaggcaggaaaggagccagcagggaagtgggtgggaggatgttggtggccatgcggccagtgggttttctcatccctgaaacacaccatcccccatgggaggtgagggacagcctgatgggttggcggtctcatggctcccagaaatctttcacsctatgatggaaacctgtgggcaggtcccagggcattcagcataggagaacccacaagggctaaaaacaatttgtgggaagggaaagcgaagcaggtctcatcacttcaaaactctcgtttgttccctctgttgtccccaaagattagatgacctccagagatcccttccatcccctatgattttgtgattctctgctctgcggctttgcagggctgtttgcagagccatgctttctctggatgggtgtgagtgggggagcagcctctgggaggcaagaaaggagacagcagcagccatga

SEQ ID NO: 24872 - DNA, 600 bp, Chicken  19866894239749_1
ggcgtcgaccgagtggccctgatggggcaccacgagatcattttcttagacaggtctgtggaatatttgcttaaaactatggcattgttttgggaattacaaataaaatataatagtgtagtgtatttgtactgtatcttccagcttccaattacttatccgtctgcagaagaagacgtggcttctcatgaagatgctgttccaactgcgatgaccacccgtctgcgaagacagagtgagagggagagagaacgtgaacttagggaactaagaatgaggaaaatgccagagagcattaayttgttaccagtggtgcagtcagacccttcggtatggactgttgatgaagtttgggcgtttatacattctttgcctggtatgtaatgtgcagttacttgttgcagatttttaacagtatatctcctggtttttagcatctctctgaggagcaggtggtatggtaacagcacgaatgtactcgytagttgctgatagagactggaatgtgatttgtttcctcttgcttgttccttcagcacaaatcccgtgttgatagaactagtcccacttctgctgttgcaccccagctgatggagatta

SEQ ID NO: 24873 - DNA, 600 bp, Chicken  19866894239749_2
ttctcatgaagatgctgttccaactgcgatgaccacccgtctgcgaagacagagtgagagggagagagaacgtgaacttagggaactaagaatgaggaaaatgccagagagcattaayttgttaccagtggtgcagtcagacccttcggtatggactgttgatgaagtttgggcgtttatacattctttgcctggtatgtaatgtgcagttacttgttgcagatttttaacagtatatctcctggtttttagcatctctctgaggagcaggtggtatggtaacagcacgaatgtactcgytagttgctgatagagactggaatgtgatttgtttcctcttgcttgttccttcagcacaaatcccgtgttgatagaactagtcccacttctgctgttgcaccccagctgatggagattagaggtgttcttcccttcagtctgatttctcttaagaggtcagtagagagatcagacacgcttcttcccctttacatttatttcttcagttccctctttactgcttattcagtaggaaaagcaagaagggagtctcttccttttatgcaagtgaaaaatttgaaaggcttatcataatatcaa

SEQ ID NO: 24874 - DNA, 600 bp, Chicken  19866894239751_1
gaatttgccattcatttcatcactcttctgaagcaaatgtgaatgacaaccactggaactgaaaagctgcagaaatccttgcacatggcagaagatggtccaaaccagggaactcagcagtgcctgggcaccttctcagctgtgccatgaggccaagaggcttggtggactctgatgtctaacaaggattaaattaattctacagctcggaggcactaagaagtatgtgcttctatttcattattctgttttgtttaatttgcagagagtcactgaatgcctttcaagtgctttgaatgmtcaacgcctccactaaattgggctggaattgtccaatgggttcacagggtagagtagatgaaagaaagatagaatggaagctagaaaacaatactgccacaaaagtcttattttgtaggaaaatcagactaaaatacaaatttaaatggatgagttaaatataaacttgaattaaatataactataggaattgttaagtgaatttgtatgcaactgcacaccagtcatgtcacagtcacactaaatttgggcaggatgttgctacagctttcgctgagcagcacagaatgaacaggatgg

SEQ ID NO: 24875 - DNA, 600 bp, Chicken  19866894239754_1
tttggctttatgcatgtttacacacacgcaaaaatacagagacatatttactctgcatttacaaacaaatgatttcacattcagcacaccactgctccatagcgtcagcgtaaagtgcttatgattaggaaggttcctcatttcaaacctgttgacagtagcatagctacgctggttttcaaaggatgatgttgatttattcagtatgagcacatgacctgtcaggattcagtgatgagctgtcaaattcaactgggtaagtttaaggtgcacccactctacacagactatgccaaagawgtccaacaacctttaattaaatagtgatgaatcgagcttagraaggctgatttcagctaaatctacatacraaggactgctctggcattgcccaagacaaatacaagtattaagaaaattaatgaatgaatggaaggaacagtcaaaggctgttgctaggttgcctcaacaaaccagtgcagattgatagcatttgcaatgaattagcgacagaatgtttccattagctgctttacttttcacttcctttccctattagctcacatcaggcttaaaacacgctttgttgatgcattatgt

SEQ ID NO: 24876 - DNA, 600 bp, Chicken  19866894239754_2
catatttactctgcatttacaaacaaatgatttcacattcagcacaccactgctccatagcgtcagcgtaaagtgcttatgattaggaaggttcctcatttcaaacctgttgacagtagcatagctacgctggttttcaaaggatgatgttgatttattcagtatgagcacatgacctgtcaggattcagtgatgagctgtcaaattcaactgggtaagtttaaggtgcacccactctacacagactatgccaaagawgtccaacaacctttaattaaatagtgatgaatcgagcttagraaggctgatttcagctaaatctacatacraaggactgctctggcattgcccaagacaaatacaagtattaagaaaattaatgaatgaatggaaggaacagtcaaaggctgttgctaggttgcctcaacaaaccagtgcagattgatagcatttgcaatgaattagcgacagaatgtttccattagctgctttacttttcacttcctttccctattagctcacatcaggcttaaaacacgctttgttgatgcattatgtcctgtggtccagtaaattgccacagcactcaggatcacagat

SEQ ID NO: 24877 - DNA, 600 bp, Chicken  19866894239754_3
atttcacattcagcacaccactgctccatagcgtcagcgtaaagtgcttatgattaggaaggttcctcatttcaaacctgttgacagtagcatagctacgctggttttcaaaggatgatgttgatttattcagtatgagcacatgacctgtcaggattcagtgatgagctgtcaaattcaactgggtaagtttaaggtgcacccactctacacagactatgccaaagawgtccaacaacctttaattaaatagtgatgaatcgagcttagraaggctgatttcagctaaatctacatacraaggactgctctggcattgcccaagacaaatacaagtattaagaaaattaatgaatgaatggaaggaacagtcaaaggctgttgctaggttgcctcaacaaaccagtgcagattgatagcatttgcaatgaattagcgacagaatgtttccattagctgctttacttttcacttcctttccctattagctcacatcaggcttaaaacacgctttgttgatgcattatgtcctgtggtccagtaaattgccacagcactcaggatcacagatctcagacaaccccttgacaaggcatagcc

SEQ ID NO: 24878 - DNA, 600 bp, Chicken  19866894239757_1
gccagctgtggtgacatggggacctcggaccgcatggtggtgactttgctcccaccgcccaaagccttgcacagctcctccacataacctgctttctttgtgctctgttcccagacaacagtttgtccctagttaaaaaggtaaagcacaaaacatagtcataaactcaatgttttatggcaccgaatagcatcctgtgtgggaatttatcactgaagatgttcctggcagaacaaacctgaagttttatggccctagcacacaaatctcaattaaaatagctccagttttttccttcgsatgcgttccatctgcagatagtacaagattaagcaggcactgctatgttttaattggttacaggtaatttatttattttgctatagactataacagcccaaagcaacaacacagcgacatctaaatacaattagtaaggcactaggcaagcactcagttggctctgtgctacatggagagctatgtgaccagagggagttgctaacactacaaacgcagagagcattctgcccactgtaaaccctaatcattttcctctctactcttcttatgctttgcaccattttctgctctgccaag

SEQ ID NO: 24879 - DNA, 600 bp, Chicken  19866894239759_1
cttttgcacacattttagaagcaccactttcccatcacttaatttgccatcaaagtcctgctgctctctagcaggttttgagatcttggcatctgcacagaacgaatggctccttacaaagtgactactcacttgtgaaagccctaagatggctgtgcaccagccctgctaacagacatccaaaggctggatgttgaagttctggaagtgaagttctggaattaaaaaatctgtaatgagaatgaggaataatacattatttgtaagatgactgctttctggatgaacaaaatacccaaygcatctccctgaatgcctcctggaagctwtaagtacaggatcaaaccttcctttttccatatctcatccgtcaccacttactgagaaactaaattaataaccatatwgattaattaacctgttccctagattggggcacctaaattctgtttgcgatyttgatattcaaagaaagcctcaaaatccatcagcgccggtttatttatctgttgatttccaygttccaaagccgacgagtacaaaagcaaagagcaggagaggcacaaacagcacagagygctgagccccacagctggcttc

SEQ ID NO: 24880 - DNA, 600 bp, Chicken  19866894239759_2
tcccatcacttaatttgccatcaaagtcctgctgctctctagcaggttttgagatcttggcatctgcacagaacgaatggctccttacaaagtgactactcacttgtgaaagccctaagatggctgtgcaccagccctgctaacagacatccaaaggctggatgttgaagttctggaagtgaagttctggaattaaaaaatctgtaatgagaatgaggaataatacattatttgtaagatgactgctttctggatgaacaaaatacccaaygcatctccctgaatgcctcctggaagctwtaagtacaggatcaaaccttcctttttccatatctcatccgtcaccacttactgagaaactaaattaataaccatatwgattaattaacctgttccctagattggggcacctaaattctgtttgcgatyttgatattcaaagaaagcctcaaaatccatcagcgccggtttatttatctgttgatttccaygttccaaagccgacgagtacaaaagcaaagagcaggagaggcacaaacagcacagagygctgagccccacagctggcttcacaggagtgctcccacatgtgatcctttt

SEQ ID NO: 24881 - DNA, 600 bp, Chicken  19866894239759_3
ggctccttacaaagtgactactcacttgtgaaagccctaagatggctgtgcaccagccctgctaacagacatccaaaggctggatgttgaagttctggaagtgaagttctggaattaaaaaatctgtaatgagaatgaggaataatacattatttgtaagatgactgctttctggatgaacaaaatacccaaygcatctccctgaatgcctcctggaagctwtaagtacaggatcaaaccttcctttttccatatctcatccgtcaccacttactgagaaactaaattaataaccatatwgattaattaacctgttccctagattggggcacctaaattctgtttgcgatyttgatattcaaagaaagcctcaaaatccatcagcgccggtttatttatctgttgatttccaygttccaaagccgacgagtacaaaagcaaagagcaggagaggcacaaacagcacagagygctgagccccacagctggcttcacaggagtgctcccacatgtgatccttttgtgaggttaccaggaaactggataccaactgcgctaactctgcgagacagatgaggtgacattcacagacacgggatg

SEQ ID NO: 24882 - DNA, 600 bp, Chicken  19866894239759_4
accagccctgctaacagacatccaaaggctggatgttgaagttctggaagtgaagttctggaattaaaaaatctgtaatgagaatgaggaataatacattatttgtaagatgactgctttctggatgaacaaaatacccaaygcatctccctgaatgcctcctggaagctwtaagtacaggatcaaaccttcctttttccatatctcatccgtcaccacttactgagaaactaaattaataaccatatwgattaattaacctgttccctagattggggcacctaaattctgtttgcgatyttgatattcaaagaaagcctcaaaatccatcagcgccggtttatttatctgttgatttccaygttccaaagccgacgagtacaaaagcaaagagcaggagaggcacaaacagcacagagygctgagccccacagctggcttcacaggagtgctcccacatgtgatccttttgtgaggttaccaggaaactggataccaactgcgctaactctgcgagacagatgaggtgacattcacagacacgggatgacaaactcaatcttaytggaaacacagagaggaaataggaagttttcttta

SEQ ID NO: 24883 - DNA, 600 bp, Chicken  19866894239759_5
attaaaaaatctgtaatgagaatgaggaataatacattatttgtaagatgactgctttctggatgaacaaaatacccaaygcatctccctgaatgcctcctggaagctwtaagtacaggatcaaaccttcctttttccatatctcatccgtcaccacttactgagaaactaaattaataaccatatwgattaattaacctgttccctagattggggcacctaaattctgtttgcgatyttgatattcaaagaaagcctcaaaatccatcagcgccggtttatttatctgttgatttccaygttccaaagccgacgagtacaaaagcaaagagcaggagaggcacaaacagcacagagygctgagccccacagctggcttcacaggagtgctcccacatgtgatccttttgtgaggttaccaggaaactggataccaactgcgctaactctgcgagacagatgaggtgacattcacagacacgggatgacaaactcaatcttaytggaaacacagagaggaaataggaagttttctttactgctgagccaagaaaagattgcccagccgatacgcaccataacatacaaggctctgcttgg

SEQ ID NO: 24884 - DNA, 600 bp, Chicken  19866894239759_6
ctggatgaacaaaatacccaaygcatctccctgaatgcctcctggaagctwtaagtacaggatcaaaccttcctttttccatatctcatccgtcaccacttactgagaaactaaattaataaccatatwgattaattaacctgttccctagattggggcacctaaattctgtttgcgatyttgatattcaaagaaagcctcaaaatccatcagcgccggtttatttatctgttgatttccaygttccaaagccgacgagtacaaaagcaaagagcaggagaggcacaaacagcacagagygctgagccccacagctggcttcacaggagtgctcccacatgtgatccttttgtgaggttaccaggaaactggataccaactgcgctaactctgcgagacagatgaggtgacattcacagacacgggatgacaaactcaatcttaytggaaacacagagaggaaataggaagttttctttactgctgagccaagaaaagattgcccagccgatacgcaccataacatacaaggctctgcttggcttcagtgctcatccagaacagtagaaacaactgaaaatcatctaaatccctgctgtt

SEQ ID NO: 24885 - DNA, 600 bp, Chicken  19866894239759_7
ccctagattggggcacctaaattctgtttgcgatyttgatattcaaagaaagcctcaaaatccatcagcgccggtttatttatctgttgatttccaygttccaaagccgacgagtacaaaagcaaagagcaggagaggcacaaacagcacagagygctgagccccacagctggcttcacaggagtgctcccacatgtgatccttttgtgaggttaccaggaaactggataccaactgcgctaactctgcgagacagatgaggtgacattcacagacacgggatgacaaactcaatcttaytggaaacacagagaggaaataggaagttttctttactgctgagccaagaaaagattgcccagccgatacgcaccataacatacaaggctctgcttggcttcagtgctcatccagaacagtagaaacaactgaaaatcatctaaatccctgctgttactttttttttyccctccctctcattccaaacccaattcagaactcacgcaacacacatcctgcaacaatatcccttgtctggatccagaggcagcagtgatgtgataaaccctggcatgtttttagcatcgtctcccagagctg

SEQ ID NO: 24886 - DNA, 600 bp, Chicken  19866894239759_8
agctggcttcacaggagtgctcccacatgtgatccttttgtgaggttaccaggaaactggataccaactgcgctaactctgcgagacagatgaggtgacattcacagacacgggatgacaaactcaatcttaytggaaacacagagaggaaataggaagttttctttactgctgagccaagaaaagattgcccagccgatacgcaccataacatacaaggctctgcttggcttcagtgctcatccagaacagtagaaacaactgaaaatcatctaaatccctgctgttactttttttttyccctccctctcattccaaacccaattcagaactcacgcaacacacatcctgcaacaatatcccttgtctggatccagaggcagcagtgatgtgataaaccctggcatgtttttagcatcgtctcccagagctggagtaaataacgtgacaggctcctcaccaacaacttgctcctcatctttaccccagatgctaccagagaaacatgcggtgtttttaaatccccctaaccaccaccaagctacacacaactacattaaagcatatttccttatttactccgtagaatatttttttgaa

SEQ ID NO: 24887 - DNA, 600 bp, Chicken  19866894239760_1
atcaccaatacttttctttgaaacagtgattgctgttggatcctaactagctacctttaagcagagatttgtatgctccttaggtgtatgtccagtgtcttttgttttcattccttttcacatcactgattcctcaaaagacctgtgacacctcagctggaaaagtaatatcaagaatgagttcaacaaagctgagacagcccaatggaaatagagaggaaagagcagcctgggactgatttttcacactgttgagtatccatcggggtttgtatttcttagctcatgaaattttacccratatatctcagtcaaattgccccagtatttgcagttttgtatagtagtgaatataaaagaggaagtgtggttgcagattttagcattggagggcactttgatttcttgtgatgaatgcctgtttaactgcgtgaacaaatgagtgaatatagatagtagatacatatgtgatagatggatggacagatagatagctaggggaatagtatgaatagatagatggatgtgtagtgctgtacatgctgagaaaagagtgatgactacagactatatgtggaaaaactggaaagtatctcttgc

SEQ ID NO: 24888 - DNA, 600 bp, Chicken  19866894239770_1
ggaataaagcttcatactacatcatctcattcctcagtctgtttaatatttgattaatgcagagatagggaattaggaaaggttaagtttaataagcgctttaggattttgttctaaaatatgcacttcaaaatatgaatggagcttggggtgggggggaagccttacaagctctgttttctttctataaactctacagggcagataccatggatatactgcagtgcctgcctgatatgactttatgcttttgtggattgtagtacataaaattgtattagtggcagaattagtaacaarcagttcataaccatgtagaattatattttaaattattactttaaaagaccttttttttcctcttctattttatgcagaaagagcaacttactaacrtgcctgtacctgtacttttcctgttcatagttttctttcagtgtgctcctcagtcccctttctcttccaaatgatctccaccagtctgcaggtttttctgctcagcatacctgtaccctgtctgaggcacacattctcacaagcaagccacraagaatgatgtttgcttgctaagcagaacccatttctgtttcagaaggcatg

SEQ ID NO: 24889 - DNA, 600 bp, Chicken  19866894239770_2
cgctttaggattttgttctaaaatatgcacttcaaaatatgaatggagcttggggtgggggggaagccttacaagctctgttttctttctataaactctacagggcagataccatggatatactgcagtgcctgcctgatatgactttatgcttttgtggattgtagtacataaaattgtattagtggcagaattagtaacaarcagttcataaccatgtagaattatattttaaattattactttaaaagaccttttttttcctcttctattttatgcagaaagagcaacttactaacrtgcctgtacctgtacttttcctgttcatagttttctttcagtgtgctcctcagtcccctttctcttccaaatgatctccaccagtctgcaggtttttctgctcagcatacctgtaccctgtctgaggcacacattctcacaagcaagccacraagaatgatgtttgcttgctaagcagaacccatttctgtttcagaaggcatgagctcatcagtacattacggcaaccaaattggtggttcttatcttcaagacagaagtttttaaaacgtgtgatgcaatctacagccctttctgcaa

SEQ ID NO: 24890 - DNA, 600 bp, Chicken  19866894239770_3
ttttgtggattgtagtacataaaattgtattagtggcagaattagtaacaarcagttcataaccatgtagaattatattttaaattattactttaaaagaccttttttttcctcttctattttatgcagaaagagcaacttactaacrtgcctgtacctgtacttttcctgttcatagttttctttcagtgtgctcctcagtcccctttctcttccaaatgatctccaccagtctgcaggtttttctgctcagcatacctgtaccctgtctgaggcacacattctcacaagcaagccacraagaatgatgtttgcttgctaagcagaacccatttctgtttcagaaggcatgagctcatcagtacattacggcaaccaaattggtggttcttatcttcaagacagaagtttttaaaacgtgtgatgcaatctacagccctttctgcaaatgagtactgagcagcacagagatgtggagaattacttctgtgtaggagctaattagacaaacctgcgttaggagtcagactaattgataccattaatgacttgtaagtctacaaacgtgtcctagagtcttaagttccataggtagatgtg

SEQ ID NO: 24891 - DNA, 497 bp, Chicken  19866894239771_1
acaatgagctgtggactcccttgcatgcagcagccacgtgtggtcacatcaacctggtgaaaatcctcatccagcagtaggtggcttgttgtgtctgtccctcttagcaagtctgatttcacccacagcttctgtgggtggaatttgggactgtttgggacctctcggaggtggttattgcctgctcccaggctgttggtgagaacccttcctgcattgaggaagaggagaaggagcaggagggctgaggaaacacagtaaaaccccagttggcttgactcagtttcatgaagcttttgrgactgaactgaaattggccaaatttggggtaaaaaagaaaaaggacctgaaatctaaatgcaggtgaatactgtccattgtctttccagtgctggtaactgtccaaatagatcagaggtcaactaaggaccacttaatagagaattaaaatgatgtggttcagagggtgctggaaattttctgccctgtgggttaga

SEQ ID NO: 24892 - DNA, 599 bp, Chicken  19866894239772_1
  misc_feature (1)..(53): n is any nucleotide
nnnnnnnnnnnnnnnnnnnnnnnnnnnnnnnnnnnnnnnnnnnnnnnnnnnnntggatttggcagtgctgattttgcagcctctaaatttgcaagtgtttgcatctatgcatgaaggacttgttttggtttgttgtattttttttccttcttttttcttttaatgagaaatgccttgactttcaggtcccagcagctacagaagagcagtgcagccatatttgcacgtattaggcatccagcttgactcttcatcctcttcatccccgcagggcaatccatgtccattctcctattggtrgtaatcaggtgtttgagaaagtggcctggttatgccatctcttcctcactcagatcagtcttgttactgcgttaagaagcatgtgtaacagatcaggaaaagcagcagcatccctgccagtcagggrtgttttcctttactttctgtattatatggggtagtgataaaggcaggagagatgctggcaaagggaaaagtgaagaattcatcctcttcttactactgagtttaacacaccaatcacataagttttcccactatttcttacttaccattacattcactttgaatctgcatct

SEQ ID NO: 24893 - DNA, 600 bp, Chicken  19866894239772_2
gtttgttgtattttttttccttcttttttcttttaatgagaaatgccttgactttcaggtcccagcagctacagaagagcagtgcagccatatttgcacgtattaggcatccagcttgactcttcatcctcttcatccccgcagggcaatccatgtccattctcctattggtrgtaatcaggtgtttgagaaagtggcctggttatgccatctcttcctcactcagatcagtcttgttactgcgttaagaagcatgtgtaacagatcaggaaaagcagcagcatccctgccagtcagggrtgttttcctttactttctgtattatatggggtagtgataaaggcaggagagatgctggcaaagggaaaagtgaagaattcatcctcttcttactactgagtttaacacaccaatcacataagttttcccactatttcttacttaccattacattcactttgaatctgcatctcagtggaatcagatgttaagaaaacagatactgacaaattatattaacatatatcagtctggaagaaagctagacaaactttgatgagaacatacttagtgatttaaaatggcattatttatgtgggg

SEQ ID NO: 24894 - DNA, 600 bp, Chicken  19866894239776_1
cagcagcccggagcaggctgtgtgcagagggaaatgtgtctgcacagaggcaagcctggttcccccggcagactgctggagcttcactaatgctgttagagctggagcctgtccctgctctgcttaatgacaaaggtctgccaggggatagatgctgataactggcagcatttcaattgtgtgttcaaacccctgctgccatgtaaagcagaagctcgagagagtcatggtaagggcttgttttgctgcacaaaagctgtgtgatttgatcaagtgatagcagtccaaactggcattgcrgagagctgcatctcagtcacccttgcattgctgatctcgacaacatggttctgcacctttttttttyccccctctcatcctttgctttctgttatcgtgaaagtctgtaggtctttattaatgtatgctctyatttgcttgtgctcatttgtttgtgcttaaagtgtgtcgccttgctcctgggccccagtgccccttccaggctctgacttcagggtcactcacaaacacacccccaaacatgcctggggacactgccaccctccttacgctagctcttgtcccacacagcgtaaggat

SEQ ID NO: 24895 - DNA, 600 bp, Chicken  19866894239776_2
gcagactgctggagcttcactaatgctgttagagctggagcctgtccctgctctgcttaatgacaaaggtctgccaggggatagatgctgataactggcagcatttcaattgtgtgttcaaacccctgctgccatgtaaagcagaagctcgagagagtcatggtaagggcttgttttgctgcacaaaagctgtgtgatttgatcaagtgatagcagtccaaactggcattgcrgagagctgcatctcagtcacccttgcattgctgatctcgacaacatggttctgcacctttttttttyccccctctcatcctttgctttctgttatcgtgaaagtctgtaggtctttattaatgtatgctctyatttgcttgtgctcatttgtttgtgcttaaagtgtgtcgccttgctcctgggccccagtgccccttccaggctctgacttcagggtcactcacaaacacacccccaaacatgcctggggacactgccaccctccttacgctagctcttgtcccacacagcgtaaggatctcttgttcttgctgcaagacttctttgtaccctgagttcaccacaagcatctgtctaaaggtaaaa

SEQ ID NO: 24896 - DNA, 600 bp, Chicken  19866894239776_3
aaggtctgccaggggatagatgctgataactggcagcatttcaattgtgtgttcaaacccctgctgccatgtaaagcagaagctcgagagagtcatggtaagggcttgttttgctgcacaaaagctgtgtgatttgatcaagtgatagcagtccaaactggcattgcrgagagctgcatctcagtcacccttgcattgctgatctcgacaacatggttctgcacctttttttttyccccctctcatcctttgctttctgttatcgtgaaagtctgtaggtctttattaatgtatgctctyatttgcttgtgctcatttgtttgtgcttaaagtgtgtcgccttgctcctgggccccagtgccccttccaggctctgacttcagggtcactcacaaacacacccccaaacatgcctggggacactgccaccctccttacgctagctcttgtcccacacagcgtaaggatctcttgttcttgctgcaagacttctttgtaccctgagttcaccacaagcatctgtctaaaggtaaaaaaaaaaattaaacttggatttgccagattttcctgggcttcttcctattcacaccgctgagaagt

SEQ ID NO: 24897 - DNA, 600 bp, Chicken  19866894239784_1
aatcctacaagttgggctcggaggaaagtcacagattaggaagagatatggaatgaacctttaaactgttatgtggtatgctcctgaagctccagcatggaaggctctgcagcaaagttactatctgaggcagggagaacacgttgcatgatagggcctcactcagcagcacacctacatctgcattgctggactgtggcctttcctctgctgcttgatgtaaatgatcaataatttggaaaccagaccaacaactaaagccagcactgggagttttgtgggagctacagtccagtcccmtaaatgaaaaagattcagtccaggctagacgggaatgtgagtccagttttgaagagtccagctctgtcagagtgagagagacatctcttcccatgcccacattaatcaacagaggaacatgttttcttatttcttacttctcatttcaggcttttgcctgaatatattttaatagatcgatagcaatcctctctcagctttatctttgagagagaagattgtactcctcagattactttcttcttctacatctctcctccccttgttaatcttgctgccaaacatctttctccaagtctt

SEQ ID NO: 24898 - DNA, 600 bp, Chicken  19866894239787_1
acaacaaaacaaagtgcttcatcagcggctggggacgcatagcagaaaaaggtaaacgtttgttgaatgcaccatcagctccggtgctgaggtgaggtttcagtccctgggggtcgctgtgtttgctcgggttgtgctctcaccccatagcatcatttcacccttctgcagctgacgatctgctctcagtgctttttccactgaaagcagattaaggctgcccaggtgtaactgaaggcatcaatgcgtggccttcctgccgaggataatgcaagtaaaggaacagaaacacagctttcrgggtcatgatacacttaaaagttcttctaaaagagctcttctaaaagagcttttatctcgaaaaataacagctctcacagagtgccctctcagctcagaggtccccgctggtttcaggagaggccgctctccctcaaatttcctctaactgcattgagtgcaggtgatgcaaccccagctggcactgagcagggagaggggatttggaggacagctgaaggctgcgtgccatcatcagtacagcagctgtggcatttccagtaaggctaaggagccaccctgtgccatgggcaggcagac

SEQ ID NO: 24899 - DNA, 600 bp, Chicken  19866894239789_1
aaaaaatgaattcagcagggggagggtttgtgtaccaaagccaactcatgaaccgagcccctccaggcagcgccttgcattgggaaaggagcggggcgagggcacagatagcagtgcccttccttggagctgttgtgcagcagggctgtgctcggtcactgcagctgcacccatccaacagagcacgtgtgcaggcaggctggggcgcagggacacacagctccaccttttacaggcaactgcatccaggactgatgtcacagctcagggctgacgctgaccagggcgcctgcagggtgrtggcagtttacccagcccaacaggagactacaggacacagaggggctgatgaatgggtgtaattaaattagactatgctgacaggcacacccactggcctcggtgggagaaaatggcagcccatgcctaaggtaacagaggaaaacttagagcaaagtcaacaactttaacaacacaggctgagcattacttttggaagaaggaaactccttgactcgctgcaaggagcacacygacttgctcctgcttgctcccagcagcacattccagggattcacaacagcagtgcccctctctgcc

SEQ ID NO: 24900 - DNA, 600 bp, Chicken  19866894239789_2
ggcaactgcatccaggactgatgtcacagctcagggctgacgctgaccagggcgcctgcagggtgrtggcagtttacccagcccaacaggagactacaggacacagaggggctgatgaatgggtgtaattaaattagactatgctgacaggcacacccactggcctcggtgggagaaaatggcagcccatgcctaaggtaacagaggaaaacttagagcaaagtcaacaactttaacaacacaggctgagcattacttttggaagaaggaaactccttgactcgctgcaaggagcacacygacttgctcctgcttgctcccagcagcacattccagggattcacaacagcagtgcccctctctgcctgctgtcactctttggtcttcttcttatgcttctttttcttcttcttctgagccttgctggccttccccgaatgcttggccctcttgctggctggctgagccccatcgctgtctgagtcagagctgtccgagtcagactcggaggactgcttactcttgtgcttcttttttttcttcttttcctatcgaatgaagcaaaacaaataaagctttgcacgtgggaaaaccgtcact

SEQ ID NO: 24901 - DNA, 453 bp, Chicken  19866894239793_1
tttctgagggaatattttgaactgtttaacaagtacaaaggatgagctgatattcattaacttctagatttttcatccgaaaataaagaatacaaatcacttaaagaagacagaatgtgtgaaaaatgctacataggaaggaactgagactcagaaaattatttctaaatgattatttaaattattaaagagcaagaaaagtagaaaaaaaggccatgtcttttgcagcacacataaatgtactggataaaatatggtaaataatatattatttattttgttttttataggttaaataaktaaaatgcagatattctaaagtatacataatacaatattcagcaagataggcaactccaaacccctttcagcatccaggaatgcaagtgataagaaaacaaaaacaaaacaaaacaaaacaaacaaacaaacaaaaaaaacacaaaagacata

SEQ ID NO: 24902 - DNA, 393 bp, Chicken  19866894239814_1
ccctgtcctgtcctctcctcactgtcaccgtgctcggttggcacagccactgcctctccagcagccgggatggccgagcagcaacgccacctccagccaccccagcagtgacgccgccactgctcgcagctgatgctgctgactcagacacaccacagctgggctgcagctgtccccctgtcgtgctgctggagcaccgtagggccacgtgctgtcccctaaggatgcacagcgccacgatgcctcagcctggcgtcacccggtgtcaccacggctccctgcaacacctcgacccgctcyttctcctgcctgtcccrtctgccaccaaccacagcacaaagtcaccccggagggcacgcagggactccacggcacggagggatgtggggtcgg

SEQ ID NO: 24903 - DNA, 376 bp, Chicken  19866894239814_2
ctcactgtcaccgtgctcggttggcacagccactgcctctccagcagccgggatggccgagcagcaacgccacctccagccaccccagcagtgacgccgccactgctcgcagctgatgctgctgactcagacacaccacagctgggctgcagctgtccccctgtcgtgctgctggagcaccgtagggccacgtgctgtcccctaaggatgcacagcgccacgatgcctcagcctggcgtcacccggtgtcaccacggctccctgcaacacctcgacccgctcyttctcctgcctgtcccrtctgccaccaaccacagcacaaagtcaccccggagggcacgcagggactccacggcacggagggatgtggggtcgg

SEQ ID NO: 24904 - DNA, 600 bp, Chicken  19866894239822_1
tggttgttcactttactgggactgccagcatgtttaaaatatgaacgcaattagaaattctaagctacaaatcagctggaaaactcattttcctttctcctaaagctgaacatcctctttgttggctgggcttttattaccagaacgcttcctctgaatgaacttttaaccacctactttttatggcccatctcagctgctgcgtgaataggcaactgccagttatcctcattgcagtagagatttggatctgcccctttcgataataatagctccacacacttggcatggccctcctgygcagcgatcagtagcggagtggctctgtctttggcctggcagttgacatctgcacctgacagaaagacttcaggttacttggtgtamaataaacaacaaattaacattaacaagcaactggttttyagggagtgactttacaacacaagtcttttccacagtaataaggaaaygttcactagcttcctgctaactttttcaacagtcggtgcattaatgttagcttccccaaatgataacgaaagtgctggaggaaaggcaatggtcaagacaattgtttgcttgcaattaatttttgag

SEQ ID NO: 24905 - DNA, 600 bp, Chicken  19866894239822_2
ttttcctttctcctaaagctgaacatcctctttgttggctgggcttttattaccagaacgcttcctctgaatgaacttttaaccacctactttttatggcccatctcagctgctgcgtgaataggcaactgccagttatcctcattgcagtagagatttggatctgcccctttcgataataatagctccacacacttggcatggccctcctgygcagcgatcagtagcggagtggctctgtctttggcctggcagttgacatctgcacctgacagaaagacttcaggttacttggtgtamaataaacaacaaattaacattaacaagcaactggttttyagggagtgactttacaacacaagtcttttccacagtaataaggaaaygttcactagcttcctgctaactttttcaacagtcggtgcattaatgttagcttccccaaatgataacgaaagtgctggaggaaaggcaatggtcaagacaattgtttgcttgcaattaatttttgagatgttctccccagctattggtagttctgttagcatgcttcctctggttaggtcgaggcaccctcagctttartatgcctaacgcata

SEQ ID NO: 24906 - DNA, 600 bp, Chicken  19866894239822_3
tgggcttttattaccagaacgcttcctctgaatgaacttttaaccacctactttttatggcccatctcagctgctgcgtgaataggcaactgccagttatcctcattgcagtagagatttggatctgcccctttcgataataatagctccacacacttggcatggccctcctgygcagcgatcagtagcggagtggctctgtctttggcctggcagttgacatctgcacctgacagaaagacttcaggttacttggtgtamaataaacaacaaattaacattaacaagcaactggttttyagggagtgactttacaacacaagtcttttccacagtaataaggaaaygttcactagcttcctgctaactttttcaacagtcggtgcattaatgttagcttccccaaatgataacgaaagtgctggaggaaaggcaatggtcaagacaattgtttgcttgcaattaatttttgagatgttctccccagctattggtagttctgttagcatgcttcctctggttaggtcgaggcaccctcagctttartatgcctaacgcatatgattttgtttgtaaggatacatgcactcagacacatga

SEQ ID NO: 24907 - DNA, 600 bp, Chicken  19866894239822_4
ctactttttatggcccatctcagctgctgcgtgaataggcaactgccagttatcctcattgcagtagagatttggatctgcccctttcgataataatagctccacacacttggcatggccctcctgygcagcgatcagtagcggagtggctctgtctttggcctggcagttgacatctgcacctgacagaaagacttcaggttacttggtgtamaataaacaacaaattaacattaacaagcaactggttttyagggagtgactttacaacacaagtcttttccacagtaataaggaaaygttcactagcttcctgctaactttttcaacagtcggtgcattaatgttagcttccccaaatgataacgaaagtgctggaggaaaggcaatggtcaagacaattgtttgcttgcaattaatttttgagatgttctccccagctattggtagttctgttagcatgcttcctctggttaggtcgaggcaccctcagctttartatgcctaacgcatatgattttgtttgtaaggatacatgcactcagacacatgacacttgcagattgtgcggatgaaaccactgctgtcactttatcacta

SEQ ID NO: 24908 - DNA, 600 bp, Chicken  19866894239822_5
ggttacttggtgtamaataaacaacaaattaacattaacaagcaactggttttyagggagtgactttacaacacaagtcttttccacagtaataaggaaaygttcactagcttcctgctaactttttcaacagtcggtgcattaatgttagcttccccaaatgataacgaaagtgctggaggaaaggcaatggtcaagacaattgtttgcttgcaattaatttttgagatgttctccccagctattggtagttctgttagcatgcttcctctggttaggtcgaggcaccctcagctttartatgcctaacgcatatgattttgtttgtaaggatacatgcactcagacacatgacacttgcagattgtgcggatgaaaccactgctgtcactttatcactagagagaggactcttcacttagcctaaacaatatcctatcagaagagtagcagcaccaaaatagtactaacacagtgctcttggaggttttctgaagactgatgatccttaatctctccatagttgaactatttcctactatcacttgatgaaaactgcactacgctactgaaacaacttttaattaagatggtgttgca

SEQ ID NO: 24909 - DNA, 600 bp, Chicken  19866894239822_6
ctgaagactgatgatccttaatctctccatagttgaactatttcctactatcacttgatgaaaactgcactacgctactgaaacaacttttaattaagatggtgttgcatctatctgcaactgatatcacatttaattatttatatgtgaatttatgaagtgcacaggtagaattaaaattgtatctgatgacaagcatctgatgtaagcttaaaaataacaaagcccaacaaaagactgctattaccatggtttataagcgttcttaagctctccagcattccatactgagcagcaacraacagtggtgtaattccaaagtcatccttacactcgatgtttgctcttttctccaggagtattttcattatctcaacatgttgctgaaataaatatttttatttgtaacaaaaaaaaaaaaaaaaaccaaacaaacaaaaaaaaacatagggaaatgacatcatctatgttccccccacattctaaacagaaatgagaaaaatgcaatatactcactattctaaagatatgatagaaaaagtgttggaaaaaatttgatgagtttaatttatttttttcacatttgctcatttgcaaatg

SEQ ID NO: 24910 - DNA, 600 bp, Chicken  19866894239831_1
gctttaacttatctactaacacctcaatcacttcatcccaaaagcagagaatttcagaactgatttacgaatccacaacacaaactcaaccatgacactgccttgggtgtgtgagcagagcaacatggagaagcagccgagcacagagagcccaaatcactgtcagaaacatcctcacagcgtggtcagtgagcagaggacaaacccactgcccagcacagcacaactgcagagctcccttggcttctcctgggctcagacctaccttcttgctgcagaaagacaacgagggggaagggraagcaggggagattgctttgctcattactttttatgaagacaacacacagcttttgggtcattttccaggcaccaggtctggaaaatgaaaaagggctctggtgaatacagtaacccagacatgtttgcactggctgttgcactagacagtaaacaggtgactcaagcacagcttggctccccagcgggatgaagtctgcacaaaggcccggagtaaccagacctggagggtctgccctaagacagacactcatggatgttagctctgattttcacaacctcccgagggaacctgctgcc

SEQ ID NO: 24911 - DNA, 600 bp, Chicken  19866894239835_1
gtcaaagtataaaagaaaaaattagatgtatcttcagtaagcaaacccataccaaaagtattatttcattcagtcagataacataaagagtcatctaattagtagtttccaggaaaggtaattctgaatatcatggaaatcaatgggcataaatctgctgagataatctgtgaatatgggagcatccaaactgaagaggagaaataaaatgatcagattaatttaatgatatacagatatctgcaaaatagatgttttttagacttttccctagcccttttttttttttttttttttttyccctgtattttttccctcatttcaattaaactgttctgaaaagtttggttaatatcttttcccttcctttttcccggtttgtctctgcctctctcactggccggtctgcagtatttgttgccatagcttcagaactcaatgtgctgtttttttcctctattatcagctttttatgcattcattggcgcttgttgtttatgtgattataagtagtcacctcaaagctaaatatgcattaacaaaagtgttgatgagttaccagaatcttctttcattctgatcctgccctcgattcttcat

SEQ ID NO: 24912 - DNA, 567 bp, Chicken  19866894239838_1
agtagcaaattaggcacttactaaataattgacaaaaacacttaattctagggatgtcctgaggaacatactattatctggcagtttttaaaacttttccttgcattagtgattatatttttgaattgttttcatgccactttttcccagcataggaaactgcacagcttgagacttcaaccttctcattttcagtaactaaccatcttctcacacaaaaatagagagggagtcatgcagaggattcattaaaaagtagatatacagggtgaagaattcacataggcaggggtacacacrttcaggcatcattacataatgaattaagtttgcatgcctatttccatgmagacattgcaaaaagtagaatttcaagggtgcaaacttgaatgtattgaatgacttgtatgttttaaaacattttcttaagaaataacatagtaaatgtcaacaattttaaaaatatatgaatacagttttgtaggcaacttgaagaagacagttttaaataatacagcaaaccatacctttaaaaatctgtgctagaaaagcatgttcatagtttca

SEQ ID NO: 24913 - DNA, 518 bp, Chicken  19866894239838_2
agggatgtcctgaggaacatactattatctggcagtttttaaaacttttccttgcattagtgattatatttttgaattgttttcatgccactttttcccagcataggaaactgcacagcttgagacttcaaccttctcattttcagtaactaaccatcttctcacacaaaaatagagagggagtcatgcagaggattcattaaaaagtagatatacagggtgaagaattcacataggcaggggtacacacrttcaggcatcattacataatgaattaagtttgcatgcctatttccatgmagacattgcaaaaagtagaatttcaagggtgcaaacttgaatgtattgaatgacttgtatgttttaaaacattttcttaagaaataacatagtaaatgtcaacaattttaaaaatatatgaatacagttttgtaggcaacttgaagaagacagttttaaataatacagcaaaccatacctttaaaaatctgtgctagaaaagcatgttcatagtttca

SEQ ID NO: 24914 - DNA, 599 bp, Chicken  19866894239841_1
  misc_feature (1)..(66): n is any nucleotide
nnnnnnnnnnnnnnnnnnnnnnnnnnnnnnnnnnnnnnnnnnnnnnnnnnnnnnnnnnnnnnnnnnccaagccagggactttccttgctcctaggtcagaaagcagactcaattcaatgattaacagtttgacttacaccaaagtaagatagcttggtgctataaagagttatatgaatgtactttgcagaggtgaaggctgataagggtcaataacatccaattgtcttcagcagatggagaagatttgatctctgtgataataaaaagggattctgaggtgtcattgctgtggcccascaattgtgtccttgcayacgttcctaccttcaaaggcccacctctttggaaacttagtctttgaatgtgggtgtgctcaggaagatttattctcttttgattttaagtagtcttcaaagaaaaatgtgaatctatgcctctgttctgaacttaaagctttatttcctttggcatcatctgttttatttttttttcttctactacacagaaattcaccagtggcgtagcactgccacgtaggaattctccacgccttatttgaattgcacttcatttactaattaggttaygtttaacat

SEQ ID NO: 24915 - DNA, 599 bp, Chicken  19866894239841_2
  misc_feature (1)..(49): n is any nucleotide
nnnnnnnnnnnnnnnnnnnnnnnnnnnnnnnnnnnnnnnnnnnnnnnnnccaagccagggactttccttgctcctaggtcagaaagcagactcaattcaatgattaacagtttgacttacaccaaagtaagatagcttggtgctataaagagttatatgaatgtactttgcagaggtgaaggctgataagggtcaataacatccaattgtcttcagcagatggagaagatttgatctctgtgataataaaaagggattctgaggtgtcattgctgtggcccascaattgtgtccttgcayacgttcctaccttcaaaggcccacctctttggaaacttagtctttgaatgtgggtgtgctcaggaagatttattctcttttgattttaagtagtcttcaaagaaaaatgtgaatctatgcctctgttctgaacttaaagctttatttcctttggcatcatctgttttatttttttttcttctactacacagaaattcaccagtggcgtagcactgccacgtaggaattctccacgccttatttgaattgcacttcatttactaattaggttaygtttaacatcttaagcaaatgctcct

SEQ ID NO: 24916 - DNA, 600 bp, Chicken  19866894239841_3
tgtggcccascaattgtgtccttgcayacgttcctaccttcaaaggcccacctctttggaaacttagtctttgaatgtgggtgtgctcaggaagatttattctcttttgattttaagtagtcttcaaagaaaaatgtgaatctatgcctctgttctgaacttaaagctttatttcctttggcatcatctgttttatttttttttcttctactacacagaaattcaccagtggcgtagcactgccacgtaggaattctccacgccttatttgaattgcacttcatttactaattaggttaygtttaacatcttaagcaaatgctcctttccttcctatttatccgagagattgttttcctgggggtgttccttgaactctgtgtgttgatgtatcaaagttgggaggtgggtacgtcaagattcagaagccttaaaaatcgactgtgtctactgcttccctggtgttctcagcagcaatgagaatggttggacttgagctgtagcattactgtctcttcaaacacgttatattgcagcctgcaatcagcttatcgaagcaattgagagcagtcaagaagccacaaccttagactgtcttgt

SEQ ID NO: 24917 - DNA, 600 bp, Chicken  19866894239850_1
aatatttgattgtgttcttatatatgtcttctgtaagtagaagagttacagaaagctctacagaaatgtagggacgtagatcttggattctcagtttcttatatatgctccttttcttgttgatggagaaagatgagttcttatagaacacagtttttttttagttttaaggtagacatccaagatatgtctgatatctaaaaaagaaattcagtgaattgttatcctgtgtcttgttctttttactgattgcaaagggaccctggaaaactaggtctatggtagtcatctgcagttagraggttagcctgacttacttttttgtcagcctgaaattctgaagatgggggagttgtgctgtttcttcccaatctgaaatacacttttatcagaaatagtgtgatcagcaggactaaggaggtgatggtccctctgaattgggcactggtgaggcctcagagactcgacagagaccttataactctctacagtgacctgaaagctcattctagtgaggtggaggtaggctcttctcctaggcaactagtaatagaatgagaggtaatagccttaaattgttctagaggagggtcagattgg

SEQ ID NO: 24918 - DNA, 600 bp, Chicken  19866894239850_2
ggtaggctcttctcctaggcaactagtaatagaatgagaggtaatagccttaaattgttctagaggagggtcagattggatatcagaaaaaaaaattattctcagaaagagtggtgaggcattggtacaggctgcccacagaggtggtggagtcatcatcccttgaggctttcaagaagtgtatagatgtggcactgagggagatagtttagtgggcatagtggtgatgggccaatgattgggctagatggtatttgtgttcttttccaaccttcatgatcctgtgatagtttatctccrgaacttatttaatgctgttaggtcaaggcttcaagagttgctagaaacagcgttagagctctccaggtttcaggacaatagtttgataccgttgagacatgtattgatgtgaagagaaaggtccagctaataacaaccataaatgtgtagctatgctcctgttagttgtttcagtgtatgctgagtttcacctgccgtactaagctaaaagagatgggaggccgaatgcaagccatgaaagatcatgaaagygtgctgaggaaaatctatacttaactatcagrgaggaggagggatgtc

SEQ ID NO: 24919 - DNA, 600 bp, Chicken  19866894239850_3
atttgtgttcttttccaaccttcatgatcctgtgatagtttatctccrgaacttatttaatgctgttaggtcaaggcttcaagagttgctagaaacagcgttagagctctccaggtttcaggacaatagtttgataccgttgagacatgtattgatgtgaagagaaaggtccagctaataacaaccataaatgtgtagctatgctcctgttagttgtttcagtgtatgctgagtttcacctgccgtactaagctaaaagagatgggaggccgaatgcaagccatgaaagatcatgaaagygtgctgaggaaaatctatacttaactatcagrgaggaggagggatgtctgcaggcaatggaaaaataactgctaaatagtgtctggaggcaggcaccaaagaacagggctccaccatagcaaaaatgcattatctatgtggaaagataagcctggttttggattgtaagtcagacagctgtcccatttatgcagtgtatacaattcagacttcatcctcctctttggggggaaattcttcaatggcaagttaccagactgcagatgatttctaggtctcaaggagttactcttccacttg

SEQ ID NO: 24920 - DNA, 600 bp, Chicken  19866894239850_4
tgatagtttatctccrgaacttatttaatgctgttaggtcaaggcttcaagagttgctagaaacagcgttagagctctccaggtttcaggacaatagtttgataccgttgagacatgtattgatgtgaagagaaaggtccagctaataacaaccataaatgtgtagctatgctcctgttagttgtttcagtgtatgctgagtttcacctgccgtactaagctaaaagagatgggaggccgaatgcaagccatgaaagatcatgaaagygtgctgaggaaaatctatacttaactatcagrgaggaggagggatgtctgcaggcaatggaaaaataactgctaaatagtgtctggaggcaggcaccaaagaacagggctccaccatagcaaaaatgcattatctatgtggaaagataagcctggttttggattgtaagtcagacagctgtcccatttatgcagtgtatacaattcagacttcatcctcctctttggggggaaattcttcaatggcaagttaccagactgcagatgatttctaggtctcaaggagttactcttccacttgcttagaattagagggaaggttattactccctt

SEQ ID NO: 24921 - DNA, 599 bp, Chicken  19866894239853_1
  misc_feature (1)..(6): n is any nucleotide
nnnnnntgaacaagcatttcttaatgttcaaggggatcctccctcccattgcctcttgttctgaataacttctcttgtcctttgatctttctttctccccctgacttcctgtgataaaaatgctcacctgaatcttgaaaaatcttttgctttaaatcagggattgacaaaaacactgagaatgtttttttgtgtaaatcctttctagggacaaaacatttgactataatccttcagggcctgaccaaaggcagaggaatgcatgaataacgcagctgaagtcagtggcactggttgacrttagcaccaatagattttaaccagtagaatatrtgtatatgtatattttatgtcggtgctaatgcttttagagcaagactacaggcattgaaaaagacagcagaatgaacacactgacagaggtgatcgataacatttccctacttaaaatttatcttaccctgttgaaataggtattgaagcagattgactgctgagcttgcttgcaacaagtatttttaacaaagtcctgagtgctgtatgctttaacgtactggggtacatttcagtttcctctgtaagtaatgcctcttattctg

SEQ ID NO: 24922 - DNA, 600 bp, Chicken  19866894239853_2
ggatcctccctcccattgcctcttgttctgaataacttctcttgtcctttgatctttctttctccccctgacttcctgtgataaaaatgctcacctgaatcttgaaaaatcttttgctttaaatcagggattgacaaaaacactgagaatgtttttttgtgtaaatcctttctagggacaaaacatttgactataatccttcagggcctgaccaaaggcagaggaatgcatgaataacgcagctgaagtcagtggcactggttgacrttagcaccaatagattttaaccagtagaatatrtgtatatgtatattttatgtcggtgctaatgcttttagagcaagactacaggcattgaaaaagacagcagaatgaacacactgacagaggtgatcgataacatttccctacttaaaatttatcttaccctgttgaaataggtattgaagcagattgactgctgagcttgcttgcaacaagtatttttaacaaagtcctgagtgctgtatgctttaacgtactggggtacatttcagtttcctctgtaagtaatgcctcttattctgttggcccaagatgttagaggtggatgttggtggt

SEQ ID NO: 24923 - DNA, 600 bp, Chicken  19866894239856_1
atctccactaacactcagcccagtctctgctcccaggagagagcacagtatcgggcagcaccgtgctctgctgggctggatgtgaggtgcggggcaaggggccccgaatacacagcggggtgagcctggcttgctgtgggcagccccagccatggctcaggaggaggctccgcagcaccaaagacaaaaacagccacagcatgaagtttgctatagcaaaactggcaagagcttttgcaattcctctcacgagcagcactgcaccttggctgtgctccacgaccctggaggacagcagckctgcccgagcacatggcgctgctttggggtgaaccaagcagcactgcccagagctaaaaggacagcagcctaccccacaccacggctccaggccatggaccctatcctaccagcaccaccctcccccagggtgctgcagccaccggaatgagttcccaaaccttggtgcagctgctgggccattgtgaagcagggctctctagtgaggctgtagggatgcacacaagaccaggggcacaccaaacaccctctattccctgctccctcccaaccccaagattggctgcaggcaacccagct

SEQ ID NO: 24924 - DNA, 600 bp, Chicken  19866894239862_1
aaagtaaaccaagataacttcagcctgtactattaatagtgcttgttatttatgcgtcaatcatttgataacgaagtcaagattatttatgaaagaattctaacattaatctaaatctcccctcttatagtttaaaacgtttcccccttgtcctatcattatcagactgtgtaaaagtcagtcttctccctgtttataagctgtaagagatcttgatttaacctcctgatgacattttttacaatagcagatgggtaagtattttgcaaaacaatgatgtcaggcagaagtaacaatagyagagtacttgatttaagagtagcattattttagaagaagatagctaagtacacttcagaagcccctacctatttgctttgttttcatgggagggagcttttgtccactagaacaaaagtaaacaagacagctctgagtaatctgtattaaattattctatctaaaacaagtgaatgctacccctgaaacacacatatagcaggaaaattaaggcgaacagacattaagtgacttgcccagaagcacataaagcggccaaaatgactggaattctgaattagaaaactacattcagttttg

SEQ ID NO: 24925 - DNA, 600 bp, Chicken  19866894239863_1
gccggtgctgattcctcaccttcgctctcccagcccagcactcagggcagccttactgcacttagcatcaatagtaccaagggaacgggtgcagcgctaatcccaccttcccactgcatcacgcagaaagcatcagtgctgcagggagctgcaacccaaactgtctgctctgagcagccctgtgggagtggggggctgcaccaggagtcctccagaggcgcccccatccagccagtgctttttgggctctgcgccatgcctccgagccgcagccacagccacccacatccccgggcccayggtgagacccggtcggtggcagcgctggaaggagccrcctgcggtacaggaggaggcatttcggacacggctcttggggatatggggggcgggggggtcaggctgcctgtcagcttctgcattggtgtgctggcagagataaacaaaaggagctggaagtcttaatgcatgatcaagattatgatttaattggcataacaaaggcttggtgggctcagccacatgactggaatattaatatcggaggattcagcttgttctggaaagacaggcaggggattaaggaggaatgtgttgctt

SEQ ID NO: 24926 - DNA, 600 bp, Chicken  19866894239863_2
gcactcagggcagccttactgcacttagcatcaatagtaccaagggaacgggtgcagcgctaatcccaccttcccactgcatcacgcagaaagcatcagtgctgcagggagctgcaacccaaactgtctgctctgagcagccctgtgggagtggggggctgcaccaggagtcctccagaggcgcccccatccagccagtgctttttgggctctgcgccatgcctccgagccgcagccacagccacccacatccccgggcccayggtgagacccggtcggtggcagcgctggaaggagccrcctgcggtacaggaggaggcatttcggacacggctcttggggatatggggggcgggggggtcaggctgcctgtcagcttctgcattggtgtgctggcagagataaacaaaaggagctggaagtcttaatgcatgatcaagattatgatttaattggcataacaaaggcttggtgggctcagccacatgactggaatattaatatcggaggattcagcttgttctggaaagacaggcaggggattaaggaggaatgtgttgctttgtatattaaggatgcagacatttgttctgcactcca

SEQ ID NO: 24927 - DNA, 600 bp, Chicken  19866894239871_1
aaggctacttaagtcagtgcatagttttatctgttcagacaaaaatctcttttgatgagctgttctccaacacctctggttcataaaatcatagaatggcctggattgaaaaggactgtaattatcatctagtttcatcccctctgctgtgggcagggtcaacaaccactacaccaggctgcccagagtcacattcagccttgctttgaatgcctccagggatggggtatccacaacttccttgggcaacctgttccctaggcatcaccaccctttttgtgaggctgagagattcctagracaacagaatcctttagactggaagggaccttaaatatgaacgagcttcaacctatcacctctgatcttccctggaaatattggttttatgcagcatgagggtgaatgatttrgaaagatttcactggcaggattcactcctaggtaagtaacctccttattattcagggggctctgctggctcttaaattcagctctcccagtggcctgggtgggctgatatgaacagctaaatgcacaccccctcctggtaagtgtatgtaaaagtgtatgtatgtacatatgtatgaatgtatagct

SEQ ID NO: 24928 - DNA, 600 bp, Chicken  19866894239871_2
gactgtaattatcatctagtttcatcccctctgctgtgggcagggtcaacaaccactacaccaggctgcccagagtcacattcagccttgctttgaatgcctccagggatggggtatccacaacttccttgggcaacctgttccctaggcatcaccaccctttttgtgaggctgagagattcctagracaacagaatcctttagactggaagggaccttaaatatgaacgagcttcaacctatcacctctgatcttccctggaaatattggttttatgcagcatgagggtgaatgatttrgaaagatttcactggcaggattcactcctaggtaagtaacctccttattattcagggggctctgctggctcttaaattcagctctcccagtggcctgggtgggctgatatgaacagctaaatgcacaccccctcctggtaagtgtatgtaaaagtgtatgtatgtacatatgtatgaatgtatagcttggttatgtaacttcttgaagacatgtatgtgcatgaagaataaacaactaaccataaatgagcaacaccttataaaatgttcataacaaattctaagtaatgcacttggcat

SEQ ID NO: 24929 - DNA, 600 bp, Chicken  19866894239873_1
aataccagttgaaaggtgaggctgtcataaacctctttaggcttcaagacattactggagtataatagcacagtggcattttcttgcacaactcttaaagctgttatgtgtcttatgtgaatcaccatatcgatccttggaacacttatgtaaaaatacgtttcattttagtttggcggttctttcatggcagcgcatccccagcaatcaccaccaggctctctgggaaacaggagaaaaggaagaaaaggaacattttttggaatccctttctctcgcccaactcagtctgaaccagtrcaggcaataacgaaggggctgcaggactgctctccactattattgtgcctggctcgctctcagcatgactcactgcagacaatatgtaacaccactcacaaggggaatgaacagtaaatacttggccctggattttttttttttttaatctcttcaggtttttctctctgatttgtatccctttatcctcgcccatgtgctatataagcttctcaaatctaatgtccataacaccaccccccactggtagcagcaagcccttccgctgctgtagggtttactttgcaaaggtttacaacg

SEQ ID NO: 24930 - DNA, 600 bp, Chicken  19866894239885_1
acgtgttggagctcagtgctgctcgaggcgggctgtgtgattgccatctgtgctgggccagatctcacccagccctctcatttccctctggttttccaacatctgtgtattaattgagaggtggaaatctcatcgctttctgttctgctctttcctcaggcagaggaacacacgcatgcttctgcttgggagcaagggcacgaaatgcaaacctttgcaggcacacacgtgttgctgcatgttggatcgctgctgcatgttggatcactgctgcggtgggaatggggcagctttgcttcrgstggctttggagagcctgacccacccgcagggctccatccccatggggtgggtttggtggggacagcaatgactgaaggctcagcccactgctgggggagatcctggagtggaaagtcggaagagtgcaaagtagttgtgatcagaaggggatggatgggtgcatctccatgggctgcacggtggtgactcgcagacatcacagcacattgcaatgccatcagccctgggagacatctcctgagttccacgctctgcgtggtggtggcagggaaataaatcccctctctctgctaagcc

SEQ ID NO: 24931 - DNA, 600 bp, Chicken  19866894239885_2
gtgttggagctcagtgctgctcgaggcgggctgtgtgattgccatctgtgctgggccagatctcacccagccctctcatttccctctggttttccaacatctgtgtattaattgagaggtggaaatctcatcgctttctgttctgctctttcctcaggcagaggaacacacgcatgcttctgcttgggagcaagggcacgaaatgcaaacctttgcaggcacacacgtgttgctgcatgttggatcgctgctgcatgttggatcactgctgcggtgggaatggggcagctttgcttcrgstggctttggagagcctgacccacccgcagggctccatccccatggggtgggtttggtggggacagcaatgactgaaggctcagcccactgctgggggagatcctggagtggaaagtcggaagagtgcaaagtagttgtgatcagaaggggatggatgggtgcatctccatgggctgcacggtggtgactcgcagacatcacagcacattgcaatgccatcagccctgggagacatctcctgagttccacgctctgcgtggtggtggcagggaaataaatcccctctctctgctaagcctg

SEQ ID NO: 24932 - DNA, 599 bp, Chicken  19866894239893_1
  misc_feature (1)..(83): n is any nucleotide
nnnnnnnnnnnnnnnnnnnnnnnnnnnnnnnnnnnnnnnnnnnnnnnnnnnnnnnnnnnnnnnnnnnnnnnnnnnnnnnnnnntgatttgctggtgctggaaagactgtgcagcagaagtcactccattgtatgcttgcccatgggagaatcagtactgtggaactgcagcttcttagctgctttcatgcagccttctgcaccgtttactgttcccccagtaaatactttgcctttctgctttctttaaagacttagttgaagcatgtgagtggttagtgatatgtgaggcattcatatrttggatggttgctgtttgttaaatggagtcattcatctcctgttggagtgtgctgaagaagctactttctcatcttgtaagacatgctatgacagttcatgcctttcataaaggctgtgaattgtggacgtaccatagcttatatcagcagatcttgagatggcgtttgcattactttcagaccaaaatcagaaggaatggaccagaaagtctgttttcatattaggaagtgcatttcttactcttacactttcgaatctagcgtttttaagtacagaaagtgaataaaaggaatccct

SEQ ID NO: 24933 - DNA, 599 bp, Chicken  19866894239896_1
  misc_feature (1)..(29): n is any nucleotide
nnnnnnnnnnnnnnnnnnnnnnnnnnnnnatcttacacagagcttcgagtggtttcttaaatttattatgataaaagcacagaatcaacccaccaggctctctctaaaaattcaagctgtttcccaatctaaaatcacgtttctgctacagataatgcagacggctcatttgagagcacgtgtgaggaagagaggaaatatcttacaaaatgttttcaattgactcttccctgtactacacggtgcaggtttcacacaaacctggactgttccaatggcacacttttctcttccctcctrtcctatggtaagcagcatctaattaccaagccttttgttttgtcctttaagtgtcttcaacacccatagttcccacagctacaccattgcaatctacagattcatacctgataatgatgaagttattccgtagcatcttctgaagtgatacttccaaaccrtgaagtgaatgcacattaattcgcagatcaaagcttccattttcactgcattaaaactgacctggtcaacattatgcaacacagattaagcagaacctttggagccagctttatcaagatcacctggtgaatatcttc

SEQ ID NO: 24934 - DNA, 600 bp, Chicken  19866894239896_2
cggctcatttgagagcacgtgtgaggaagagaggaaatatcttacaaaatgttttcaattgactcttccctgtactacacggtgcaggtttcacacaaacctggactgttccaatggcacacttttctcttccctcctrtcctatggtaagcagcatctaattaccaagccttttgttttgtcctttaagtgtcttcaacacccatagttcccacagctacaccattgcaatctacagattcatacctgataatgatgaagttattccgtagcatcttctgaagtgatacttccaaaccrtgaagtgaatgcacattaattcgcagatcaaagcttccattttcactgcattaaaactgacctggtcaacattatgcaacacagattaagcagaacctttggagccagctttatcaagatcacctggtgaatatcttcatttaacagagaaggctctcagaagccccagtgactcctgccaacttacctagcagcactgctgccttgttatgaggactgggagacaggcagtggctctctccagtgaccaatcatggacgaggggcgcatcattagcagctgaccccagacacctgctgc

SEQ ID NO: 24935 - DNA, 600 bp, Chicken  19866894239896_3
gctgccttgttatgaggactgggagacaggcagtggctctctccagtgaccaatcatggacgaggggcgcatcattagcagctgaccccagacacctgctgctgtgagcacagctgctggccacgtctcagattgaacacacctgcttcacaatgcctttctctaaaatggaagagggggaaagggcaagagtgctaagggggacatttgtaagtttcaaatcctgcttgctcactgtctatgttattgttgctttttcttttagccaaatatagggtgctccatttacaacagctgttytgttttagatctccatggtgggaagtgccactcattttggctaagtccccccaagttgtgccactgcaaaaattcttcagtaacttgyctctgcttcttcaggaattttctattctgagcacaaagaaaccaatcagcctactgcctaccgaggacttgattcaaaggcaatggaggctgatggcttttcactggggcttggatgcagcaggaratgcatgcaagcacacarcaggcttccactgcagcaccaacactgccatcccagaaactgcagaaactgctgatctgagcacagac

SEQ ID NO: 24936 - DNA, 600 bp, Chicken  19866894239896_4
cagacacctgctgctgtgagcacagctgctggccacgtctcagattgaacacacctgcttcacaatgcctttctctaaaatggaagagggggaaagggcaagagtgctaagggggacatttgtaagtttcaaatcctgcttgctcactgtctatgttattgttgctttttcttttagccaaatatagggtgctccatttacaacagctgttytgttttagatctccatggtgggaagtgccactcattttggctaagtccccccaagttgtgccactgcaaaaattcttcagtaacttgyctctgcttcttcaggaattttctattctgagcacaaagaaaccaatcagcctactgcctaccgaggacttgattcaaaggcaatggaggctgatggcttttcactggggcttggatgcagcaggaratgcatgcaagcacacarcaggcttccactgcagcaccaacactgccatcccagaaactgcagaaactgctgatctgagcacagacacagtgagcatagggaagagatggggcagaatgaaaagcattggtcactgggaaccaaatgattcatgctgaaaccctggtcccatgc

SEQ ID NO: 24937 - DNA, 600 bp, Chicken  19866894239896_5
tttcaaatcctgcttgctcactgtctatgttattgttgctttttcttttagccaaatatagggtgctccatttacaacagctgttytgttttagatctccatggtgggaagtgccactcattttggctaagtccccccaagttgtgccactgcaaaaattcttcagtaacttgyctctgcttcttcaggaattttctattctgagcacaaagaaaccaatcagcctactgcctaccgaggacttgattcaaaggcaatggaggctgatggcttttcactggggcttggatgcagcaggaratgcatgcaagcacacarcaggcttccactgcagcaccaacactgccatcccagaaactgcagaaactgctgatctgagcacagacacagtgagcatagggaagagatggggcagaatgaaaagcattggtcactgggaaccaaatgattcatgctgaaaccctggtcccatgcaggattggaacacagccccagctttccactgaccagcgtgcggctgcagggcaggcaaaccatgcctcagtttccaaatctgtcaaggtgagattacaaacatttcccctgcttcagatgggcttg

SEQ ID NO: 24938 - DNA, 600 bp, Chicken  19866894239896_6
cactgtctatgttattgttgctttttcttttagccaaatatagggtgctccatttacaacagctgttytgttttagatctccatggtgggaagtgccactcattttggctaagtccccccaagttgtgccactgcaaaaattcttcagtaacttgyctctgcttcttcaggaattttctattctgagcacaaagaaaccaatcagcctactgcctaccgaggacttgattcaaaggcaatggaggctgatggcttttcactggggcttggatgcagcaggaratgcatgcaagcacacarcaggcttccactgcagcaccaacactgccatcccagaaactgcagaaactgctgatctgagcacagacacagtgagcatagggaagagatggggcagaatgaaaagcattggtcactgggaaccaaatgattcatgctgaaaccctggtcccatgcaggattggaacacagccccagctttccactgaccagcgtgcggctgcagggcaggcaaaccatgcctcagtttccaaatctgtcaaggtgagattacaaacatttcccctgcttcagatgggcttgttgagacttggaggttta

SEQ ID NO: 24939 - DNA, 437 bp, Chicken  19866894239897_1
  misc_feature (1)..(72): n is any nucleotide
nnnnnnnnnnnnnnnnnnnnnnnnnnnnnnnnnnnnnnnnnnnnnnnnnnnnnnnnnnnnnnnnnnnnnnnntgggcaccagccccactcctctgctttgggtggagtttgggactggggacggatgcgtctgctgcgtccccagaggtgatggcagcgaagctctcagccccaaacgtgctgtgagcccatcgaggtcccccatccctgcagcacgtggcatcctcagtgcctcgatccccaaatcacacctggtgcctttagcagctgagctctacgggttcctctcccttttgcttsgtggcctctcccgcagtcaatgaggtgcattgtggctgtgtgtgtgcataccccgcggtgttgctgctgctgccttccccgctgcccccagccagcattgcacagagcggggcagccctgcagcaggtggggggata

SEQ ID NO: 24940 - DNA, 600 bp, Chicken  19866894239902_1
ctttttttatgtctgcccataaatcaggggctctccgtcatggtggggccgtaaatctgtccgtgcgcccgccgtgccggagtcgtttctgttctgcctgctaaactcctgtttacccagagacatcaacatagctcttcctcgcggtaattctgcacttgacggcagcctataaaatgaacccacttatttcctctctgtgagctcggcatcccccgtgtttctggagccgtgccccgcgtggttctctgcctcgtggttgattttctggctatgtggttgtgcacagccagggctgcrctgagcccagtggccctgcgcccttctgggggtcgttttggggctgcggggtcacagagcatgcggtgccctgagatggagtggggcagagggttggggaggggtggcacggcrtcacacagccctgcaccacakccctggtgctcatcactgtctttcttccaccagcgacggtgactcagatgtggactcggagctggaggaccgtgtggacggggtgaagtcgtggctgtccaagaacaaaggctcttccaaagcgctctcagatgatggcagcctgaagggcagcagcaggtgggt

SEQ ID NO: 24941 - DNA, 600 bp, Chicken  19866894239902_2
acccagagacatcaacatagctcttcctcgcggtaattctgcacttgacggcagcctataaaatgaacccacttatttcctctctgtgagctcggcatcccccgtgtttctggagccgtgccccgcgtggttctctgcctcgtggttgattttctggctatgtggttgtgcacagccagggctgcrctgagcccagtggccctgcgcccttctgggggtcgttttggggctgcggggtcacagagcatgcggtgccctgagatggagtggggcagagggttggggaggggtggcacggcrtcacacagccctgcaccacakccctggtgctcatcactgtctttcttccaccagcgacggtgactcagatgtggactcggagctggaggaccgtgtggacggggtgaagtcgtggctgtccaagaacaaaggctcttccaaagcgctctcagatgatggcagcctgaagggcagcagcaggtgggtgcaggtctgggcgctggcagcatggcgagggctgggcattgcgcgtggtgtcaggggaagggtgaatctgttgagcagcttagtctccgctgggggcacttacccaagtgctgg

SEQ ID NO: 24942 - DNA, 600 bp, Chicken  19866894239902_3
tcttcctcgcggtaattctgcacttgacggcagcctataaaatgaacccacttatttcctctctgtgagctcggcatcccccgtgtttctggagccgtgccccgcgtggttctctgcctcgtggttgattttctggctatgtggttgtgcacagccagggctgcrctgagcccagtggccctgcgcccttctgggggtcgttttggggctgcggggtcacagagcatgcggtgccctgagatggagtggggcagagggttggggaggggtggcacggcrtcacacagccctgcaccacakccctggtgctcatcactgtctttcttccaccagcgacggtgactcagatgtggactcggagctggaggaccgtgtggacggggtgaagtcgtggctgtccaagaacaaaggctcttccaaagcgctctcagatgatggcagcctgaagggcagcagcaggtgggtgcaggtctgggcgctggcagcatggcgagggctgggcattgcgcgtggtgtcaggggaagggtgaatctgttgagcagcttagtctccgctgggggcacttacccaagtgctggcacgtcctcagctccacacac

SEQ ID NO: 24943 - DNA, 599 bp, Chicken  19866894239907_1
  misc_feature (1)..(143): n is any nucleotide
nnnnnnnnnnnnnnnnnnnnnnnnnnnnnnnnnnnnnnnnnnnnnnnnnnnnnnnnnnnnnnnnnnnnnnnnnnnnnnnnnnnnnnnnnnnnnnnnnnnnnnnnnnnnnnnnnnnnnnnnnnnnnnnnnnnnnnnnnnnnnnnttgcgctatgctgactacgtggaaaaagcttccagctcctaccaatagtgatccaataggcataaaatgggaaagaaagaaactgagatggccccaggacatagatggtctcatcacggtacggcacttcctgcttgtgaaaccactacttgcaaawctaatatgcatgaaagataccaaaaattttagtcactcttcttcaagtgctggtgtgaagaaaatcactataactaatatcgcactgttcttgaatgatgaaacacaaatattaaagtcacagaatgttatcagtgtcttgctgagagcagaaaaaaattaaagaaaagatcagtatataacttaattttgttggttatggattttatctgtagtcagtaatatttttgccaggagtaagtaagtacctttgatcgagagagttgaaagtagagatctgttgtcccaacaggtgtttag

SEQ ID NO: 24944 - DNA, 600 bp, Chicken  19866894239912_1
atatatggaacatattaaaaattttcattattactacttttatggaaatttctcacagttcactcactccagtgggagtttcctactgggctctttccctgaatatttgctcctttttcaatctttattcacttacttctctctctgattactgaatgttccttacttgacttgtggtacagtaatataaaatagttgctgtattgaatgcaaaagctacatcctatatcttagattcatattgatttttatattcatattgattattacttgtattactgtaatgtgatgaaaacttayrcagaacaaaatgtgaacaatagggatgaacttttgcatccatgccctaagtgttgatggagaagagcagatccattgtttaaaaaaaaatgataaattacataatcaattttatttctgttgaacttttatcaatttgtagttacagcaaaaacactctttgctactttcaggtttcaagtcagcctgttcacacctctgatagtgcctcaggccaggacatgcttagtacagtttacgaagttattcagcatattcccaatcagcagcagcaggaccatcaacagtaagttacagcct

SEQ ID NO: 24945 - DNA, 600 bp, Chicken  19866894239912_2
tatatggaacatattaaaaattttcattattactacttttatggaaatttctcacagttcactcactccagtgggagtttcctactgggctctttccctgaatatttgctcctttttcaatctttattcacttacttctctctctgattactgaatgttccttacttgacttgtggtacagtaatataaaatagttgctgtattgaatgcaaaagctacatcctatatcttagattcatattgatttttatattcatattgattattacttgtattactgtaatgtgatgaaaacttayrcagaacaaaatgtgaacaatagggatgaacttttgcatccatgccctaagtgttgatggagaagagcagatccattgtttaaaaaaaaatgataaattacataatcaattttatttctgttgaacttttatcaatttgtagttacagcaaaaacactctttgctactttcaggtttcaagtcagcctgttcacacctctgatagtgcctcaggccaggacatgcttagtacagtttacgaagttattcagcatattcccaatcagcagcagcaggaccatcaacagtaagttacagcctg

SEQ ID NO: 24946 - DNA, 600 bp, Chicken  19866894239912_3
tacataatcaattttatttctgttgaacttttatcaatttgtagttacagcaaaaacactctttgctactttcaggtttcaagtcagcctgttcacacctctgatagtgcctcaggccaggacatgcttagtacagtttacgaagttattcagcatattcccaatcagcagcagcaggaccatcaacagtaagttacagcctgcatgcacgcatgtggtagtcaaagataaggacttctgtgtgtgactgagactgaacaattcacacatcggtggctgctgtttgattccagtgagagkgttaaagcagcaaaaagatscaagctacatcagcccctccactggttcgtgtacaatcccccaccttcaagactccagcctgaagttttatcatgccacctttgtctaagtgtgaagaatgagagttaagatcttcaaaaaccatttcaggggaaaattcccaagtgctttaagaggtttcacagcactgagttctgagcaattcccagtcagcaggttaaatcttcagtcaaagacctgtcagccatgttccaaaaaaactggggggttttcttcaatgttgaaactggtcagttgact

SEQ ID NO: 24947 - DNA, 600 bp, Chicken  19866894239912_4
tgttgaacttttatcaatttgtagttacagcaaaaacactctttgctactttcaggtttcaagtcagcctgttcacacctctgatagtgcctcaggccaggacatgcttagtacagtttacgaagttattcagcatattcccaatcagcagcagcaggaccatcaacagtaagttacagcctgcatgcacgcatgtggtagtcaaagataaggacttctgtgtgtgactgagactgaacaattcacacatcggtggctgctgtttgattccagtgagagkgttaaagcagcaaaaagatscaagctacatcagcccctccactggttcgtgtacaatcccccaccttcaagactccagcctgaagttttatcatgccacctttgtctaagtgtgaagaatgagagttaagatcttcaaaaaccatttcaggggaaaattcccaagtgctttaagaggtttcacagcactgagttctgagcaattcccagtcagcaggttaaatcttcagtcaaagacctgtcagccatgttccaaaaaaactggggggttttcttcaatgttgaaactggtcagttgactgataaccaaagattgtttgt

SEQ ID NO: 24948 - DNA, 600 bp, Chicken  19866894239912_5
gttgaaaagaaaaatacatattcttgcaaatatactgagcggttggctgagtatatgacagcattagtgttcaatatttacattactagaaatgtgcaggttacaattgcaactatgcatctaaattatgtatttgtaaccatgattataaaagaaggatgactggtgagaagctagtaatgaattactgatgacatttttgtatcaatcagatttttttaaatcagttgtaaaaatagcaatcataaagtacattttcttcttaatcttatgtctcccatctcaactttttttcactgmtacatcgctcttctaaacgaaygggttcaaagtgaaggtaaattgaactttgtgacagttcagatttcaactcartattctacagttgtagaggactcatttgcatagccacgtttcactctcttcatttaaccagattttaaaaaagaagtatggaagcaaaatttccactaacaaaaccaggacgggtcctgctcaacatgataaagggtaaatgactcagcttagaaaaactgctcttgtggattttccagttcctgacctgcagcaaaggagcactctgactagtgaataaatcag

SEQ ID NO: 24949 - DNA, 600 bp, Chicken  19866894239912_6
cttgcaaatatactgagcggttggctgagtatatgacagcattagtgttcaatatttacattactagaaatgtgcaggttacaattgcaactatgcatctaaattatgtatttgtaaccatgattataaaagaaggatgactggtgagaagctagtaatgaattactgatgacatttttgtatcaatcagatttttttaaatcagttgtaaaaatagcaatcataaagtacattttcttcttaatcttatgtctcccatctcaactttttttcactgmtacatcgctcttctaaacgaaygggttcaaagtgaaggtaaattgaactttgtgacagttcagatttcaactcartattctacagttgtagaggactcatttgcatagccacgtttcactctcttcatttaaccagattttaaaaaagaagtatggaagcaaaatttccactaacaaaaccaggacgggtcctgctcaacatgataaagggtaaatgactcagcttagaaaaactgctcttgtggattttccagttcctgacctgcagcaaaggagcactctgactagtgaataaatcaggataataaagtcgatacttggt

SEQ ID NO: 24950 - DNA, 600 bp, Chicken  19866894239912_7
atttacattactagaaatgtgcaggttacaattgcaactatgcatctaaattatgtatttgtaaccatgattataaaagaaggatgactggtgagaagctagtaatgaattactgatgacatttttgtatcaatcagatttttttaaatcagttgtaaaaatagcaatcataaagtacattttcttcttaatcttatgtctcccatctcaactttttttcactgmtacatcgctcttctaaacgaaygggttcaaagtgaaggtaaattgaactttgtgacagttcagatttcaactcartattctacagttgtagaggactcatttgcatagccacgtttcactctcttcatttaaccagattttaaaaaagaagtatggaagcaaaatttccactaacaaaaccaggacgggtcctgctcaacatgataaagggtaaatgactcagcttagaaaaactgctcttgtggattttccagttcctgacctgcagcaaaggagcactctgactagtgaataaatcaggataataaagtcgatacttggttttgcagcaggatgcttcagcactgtgtataaggaaaaagtaaaacatcacaa

SEQ ID NO: 24951 - DNA, 600 bp, Chicken  19866894239912_8
tgacatgcaggcatctgcacagtagccagctacattcatggagagtgatacaggattttcctgcattctgctgacaatgggagtttctctttgtgtaaaacaaaataatggatgttaaggcagctgaacaggtttgctgtgcaagtgatgattttgctcatgttctcagtggtcctgactgggagtgctgtcatttcataattttattagaattaaaatcatggcaaaataagtaaaaaaatatggtttcataatgtaatgcctagattttcagcctgaaaatggttcaaatcctttctrtgaacctgatatcttcagtgtcagmtgatgttttgtctctcgctatagaaatcccagtgacagtgttggcagattgtcatagtagacaatgcagaatgctctgggaattactttttcctaacacttttccttacacttttgtcatccttttcattcagacacacacatgcacctatgcctctaagcactaattaactgtaagatgtttagttgtgccccaggtcttaaaatagaagagtactgctggaaagtaattaaatacttaaactcccctgggtttggactgagagactcaatatc

SEQ ID NO: 24952 - DNA, 600 bp, Chicken  19866894239912_9
ccagctacattcatggagagtgatacaggattttcctgcattctgctgacaatgggagtttctctttgtgtaaaacaaaataatggatgttaaggcagctgaacaggtttgctgtgcaagtgatgattttgctcatgttctcagtggtcctgactgggagtgctgtcatttcataattttattagaattaaaatcatggcaaaataagtaaaaaaatatggtttcataatgtaatgcctagattttcagcctgaaaatggttcaaatcctttctrtgaacctgatatcttcagtgtcagmtgatgttttgtctctcgctatagaaatcccagtgacagtgttggcagattgtcatagtagacaatgcagaatgctctgggaattactttttcctaacacttttccttacacttttgtcatccttttcattcagacacacacatgcacctatgcctctaagcactaattaactgtaagatgtttagttgtgccccaggtcttaaaatagaagagtactgctggaaagtaattaaatacttaaactcccctgggtttggactgagagactcaatatctaattgcagttaaaaaaaaatgacc

SEQ ID NO: 24953 - DNA, 590 bp, Chicken  19866894239917_1
tgttttccaaattaagctatgaattaagcaatgtctaatcatgagatcataaaatagaacaaaatagaaaggtgacaaaaattccagtatacagctctgaaagtcggatcgattattctgtaccataaaacatctagatttcctatttatttgttaatgctttgaaaactttgtttaatgcatcatctatcctagacaaatgcatattagcatttattctaaaagtactcataatttaagttttctggtgtttattatacaatataacaaaccttcctttatttttaaactggttgacawctaaaaaatatttctaacaatctcatttttatattttaaataataaaagcttttaaacttatttcactgcatacagaaatctttctgcctcatgtcactgtgcgctcttctgttgaacgatagctaatatcttaactactgagaaaagaatcatgacaattaattaaaatctggatcttccttataattatagttatgcatttaatctccattatttcagaagacattttttctattgtgtatacttagagaaaatatgcttcataggcaagaaaacagaaattgcatat

SEQ ID NO: 24954 - DNA, 599 bp, Chicken  19866894239918_1
  misc_feature (1)..(21): n is any nucleotide
nnnnnnnnnnnnnnnnnnnnncttttttgtctttcctttcaccttttttagttctatgtcctttttgaactttcccactctgtagacatttgaactcttcattctatagttatgctttcagtttttctctctaaagttttcctgttaatctctactgtattcttatttctttaattactgatgagcactgaggtaaagtgttaaagaaatcagtttgaatgaatgcaagatatctttttgttgtgtaagtcagtaactaggaacactgcactctgtagacagaaaatgttatttttccayatacaatgttttgaacaaacttacattgcttttatgtgcaatttcattgtctaatactcttcccagtagaagttttaggaagttaaaggttctgctaatatttgaagtgattgaaaggcaaattgaaatgaagggagaggcagaacttttattacctgtgcagagttcttgaatcaagatgtaaagtagaagctgttaaatatatctagaccaacaaaaaacacgaatttaaagatcctttgaggaaaggctgaaaggcggtaaagcttctgtggcatcacagaaagttaagagcaaca

SEQ ID NO: 24955 - DNA, 600 bp, Chicken  19866894239918_2
acaatgttttgaacaaacttacattgcttttatgtgcaatttcattgtctaatactcttcccagtagaagttttaggaagttaaaggttctgctaatatttgaagtgattgaaaggcaaattgaaatgaagggagaggcagaacttttattacctgtgcagagttcttgaatcaagatgtaaagtagaagctgttaaatatatctagaccaacaaaaaacacgaatttaaagatcctttgaggaaaggctgaaaggcggtaaagcttctgtggcatcacagaaagttaagagcaacatayaagtcattacataacagttaccttaaatctatgctgctaagtttatatgcaaaatcagacaggatatataaatataatatatatatgtgtatgtatatatatatgtttctttatgaacaattcatatacatctcagtcttcaaggccaatctcagtctttgactgagagagacaaatcaccagtatttctgatctcatttgtcatttttacctcagattttttaccttcaagatagacacatccacagattcacagtctatagtgtcagcagaagataccctgcatctgtggaaacccca

SEQ ID NO: 24956 - DNA, 600 bp, Chicken  19866894239919_1
aatagcaactccatctccttgcttttgatgagcggatgttgtaactttttctcctttaggaacttttccactcttgaccttccgggtaggcttacagtcaattatatcctgttctgtgtcactgttttctggcacatgagctgccctcagcgttttctttttccttaactttcttctccttctgttccccttttctgctgggactagagtgtttgctgcctgttgttccgatgcttctgctgacaatttgggagttttatccattggcatttctagaaggactgaacgatttggaagcarggtgctacactgatccagtaaaaagctttcagtcactgtaccatttgcttctcttttgctgaaagtagacagcgaaggagaaggattctctgaaagtccagcctttcccctatccacagcaggcttgtgaatttcttggttagtgtgctggaaacaagctgtcagctctgatagggatatggttgcagagataactggatacactgatgttttctggatgatctcttctgaagaaaagagactagtgttatattcaatctctacagctattaatatttatgcaaagtttgctttccttgc

SEQ ID NO: 24957 - DNA, 600 bp, Chicken  19866894239920_1
gaggtaagtgaggttcagcaggatacagtgcagctcctgcccaggggaggagtgccctgcgggagctgtgcagcaggagtgtgcaattgagctgaccacattattagcgtttgcaatttcattgtgaaatagcagcgattttcccctgagagttagaactgccacattatttgttgtttgtttcttcccagtaacatgctctaaaagcctcaatatcattgaattgtgattacagtaaaaagagcaactgcatcaagtggaatctacttaatgaatgcattccttctgtgcctctaaatrctgctggttgcttcactgaagcattgcacaatacagaggatgccttctctctgtcagaaaccttgtgtagtgttctttacttgtcctggctattgctgttaagatgtacttaggtgtagcagctggcagctctgtatcaaggccccattatgcaattgattgggtaagcacattgtaagagatgggttctcagccaggatgcttccaggatggaagagatggagcactgatttgacctgcatgatgcaacaggcaaggtcagtgctagtgtacaggtgttttggaaagcaattagctcct

SEQ ID NO: 24958 - DNA, 600 bp, Chicken  19866894239921_1
gcagaaaaggataggagatgagtgaaaatgagaatatccaaaaattaaaggctagcatactattatcatgagaaaaattccttgccccccatggtgtgggaaaggagagctgaaggacatcaattagacataattctaggtcattaaattgagatggcacccatgcacagaactgtggaaaccactaggagaaaaagtctatcagttaagaaacatgactcaaaccagtaaattaagcctggtttcatggggatttaaaacagtttctcacaaagttgaggtttttcggtttttgttggkttttttttttttttccagtatgttgaactttttggccaactggcctgacaaagaataagcataatatgtatcttcatgtttcactaccaactacagacttcaattaagatcaagcttacttgtactgggtatagagaaggtgcatgtaatatctgtctaaaggcactctcttcattratccttcagctccactctggacaacctgggaaaatgctgaatgccctaagactgcacccagcttcccttctggaggaaaccaagacccacatctacaaaatgcaacttcatctctcaaggttt

SEQ ID NO: 24959 - DNA, 600 bp, Chicken  19866894239921_2
gaaaccactaggagaaaaagtctatcagttaagaaacatgactcaaaccagtaaattaagcctggtttcatggggatttaaaacagtttctcacaaagttgaggtttttcggtttttgttggkttttttttttttttccagtatgttgaactttttggccaactggcctgacaaagaataagcataatatgtatcttcatgtttcactaccaactacagacttcaattaagatcaagcttacttgtactgggtatagagaaggtgcatgtaatatctgtctaaaggcactctcttcattratccttcagctccactctggacaacctgggaaaatgctgaatgccctaagactgcacccagcttcccttctggaggaaaccaagacccacatctacaaaatgcaacttcatctctcaaggttttcctcctgcacataggaatgcactctacctcacccaacaggtacttgatttctttcagttaattaaagactcggtttaaaacagataatccgcccaccccctactcagaagaaacwgagattttctttctttccccgcatatctctccgaagttagcaaatgttaagctgtgggtag

SEQ ID NO: 24960 - DNA, 600 bp, Chicken  19866894239921_3
tacttgtactgggtatagagaaggtgcatgtaatatctgtctaaaggcactctcttcattratccttcagctccactctggacaacctgggaaaatgctgaatgccctaagactgcacccagcttcccttctggaggaaaccaagacccacatctacaaaatgcaacttcatctctcaaggttttcctcctgcacataggaatgcactctacctcacccaacaggtacttgatttctttcagttaattaaagactcggtttaaaacagataatccgcccaccccctactcagaagaaacwgagattttctttctttccccgcatatctctccgaagttagcaaatgttaagctgtgggtaggacaggattaggtgctgtactaaatgtgacagtcttgcaaacctcagaagaggcgatctcccacttgctggccctttgcaataggacttctgggggtgtaggccttcagtgtgactttcttgaggaatctggttcaataccaaagctgataagagtgcaaagctagcttagcttgtcctggtacatcggwctttcctcttatagcttttatagcttaggctcctgaacaccttcagaaa

SEQ ID NO: 24961 - DNA, 600 bp, Chicken  19866894239921_4
gactcggtttaaaacagataatccgcccaccccctactcagaagaaacwgagattttctttctttccccgcatatctctccgaagttagcaaatgttaagctgtgggtaggacaggattaggtgctgtactaaatgtgacagtcttgcaaacctcagaagaggcgatctcccacttgctggccctttgcaataggacttctgggggtgtaggccttcagtgtgactttcttgaggaatctggttcaataccaaagctgataagagtgcaaagctagcttagcttgtcctggtacatcggwctttcctcttatagcttttatagcttaggctcctgaacaccttcagaaactggtacataaactgaggttgaatttggccagcaaagtcaagccttgcagttgtagttcacgactatagcaaatggtgtgacctgtccatgtagagcatttagcttgtttatctgtagcttggattaagtcaaatgaaccagccaacactagtgtatactgctgatgtacaagaaggacattagtttgcgagttgttggggtttttttaatattaaagtttttttatagggaaaggactgtatttttgtgc

SEQ ID NO: 24962 - DNA, 600 bp, Chicken  19866894239924_1
cacccaaaggtaaatggcagctaacctgcagaccgagcagtactgcctggcattggtcagggggagctcctcctgctgctgctggatgctgatgctgacagggctggtgatgctctgcagggccagctcgtagctgggagccaggaatggacacggcgggagagaggagagagctggcggggaccagccgaggcatccctcactcaaaagcatcacaaagccacagccatagcacggaagctgggcatgatcgtgagcagcatcctggatgttggagattctttgctaccatacactacrggagcacagctctcgcttcaggcatcccacagccagacaaaatgggaacaaacccgcagctctgctgcacgcacagcccacagccatagccttgcaacatgagctgccttgctgttgctcgcatccatcccaatccctgggaatgaagactcagaaggcagtcaaggcgttgatccagcaccagcgtgcttttattccttaacagccaggagggctttttgtgagaggtccggtgtacagatgggactcatcgtctctggtgaaggagagaggggctcagagctcgtgctgctgcccggt

SEQ ID NO: 24963 - DNA, 600 bp, Chicken  19866894239928_1
ggataatattctttcttttcacagtcttcttcagcaggcagttccaatgcaaaccatgtcttatattgtctgtgtagctgtgggacaaggtctcatctatcacacagcaacaaaattgaatgaaatattgccgggagggttcaacctcaactgccattccaccaacatctatctcagatgctgtgggcaaacataataaaataggaggcattacttttacagcatctctaatataaagatgacataaagacgattaatggtagaatttgtccagaaatgtggccacaaaatctgtcctartgcaagttcaaagactaatattctcaacattggcatagagaattggagattttgctcttctaattcctaatttattttttccttcagtttatgaatgcattttttttctattcagttaccttgtttttcagygatataaaccttatttttttaatgcaaaagaggcacagtttccaaaacaaatttgcatatgcttgtttacagaagtaaagtaggataacattctcctggagaaggtgtataagaagtcagtaaaatatatataacatgattgcttctgtcaaatacacacatttattt

SEQ ID NO: 24964 - DNA, 600 bp, Chicken  19866894239928_2
gggagggttcaacctcaactgccattccaccaacatctatctcagatgctgtgggcaaacataataaaataggaggcattacttttacagcatctctaatataaagatgacataaagacgattaatggtagaatttgtccagaaatgtggccacaaaatctgtcctartgcaagttcaaagactaatattctcaacattggcatagagaattggagattttgctcttctaattcctaatttattttttccttcagtttatgaatgcattttttttctattcagttaccttgtttttcagygatataaaccttatttttttaatgcaaaagaggcacagtttccaaaacaaatttgcatatgcttgtttacagaagtaaagtaggataacattctcctggagaaggtgtataagaagtcagtaaaatatatataacatgattgcttctgtcaaatacacacatttatttagctgttcaaatgtacagtaattttgtgtatttatgtttttgttcttaaaggaaacaaaaagaaaaacattaggcagtgaagatacattcatttttatccttttgtaataattgtcatccttaaatgtaaat

SEQ ID NO: 24965 - DNA, 600 bp, Chicken  19866894239928_3
tgtacagtaattttgtgtatttatgtttttgttcttaaaggaaacaaaaagaaaaacattaggcagtgaagatacattcatttttatccttttgtaataattgtcatccttaaatgtaaattagtgatttacacctatatacttacattcaaatcgcagagggaaaggaggtgattccactgtttttcttctgattcttttggagtaatcactagctgctgcaatcgtgacagatgtcacactcaatatcactgttttgatattcctgcctgaatttacagaaagcggaaataatcaagwatggatttcccaattcatttcatttatgaattgagggaaatgccagtataaaaactaggtctaaaaatttgtagtggtaccaatgggaaggactgtaaaaagtgctgtaaaaagtaatccaggttcttataaggtaaatctagttgctggaggcctgtgcagataaaatgaactgtgctaagcatacagaatatttgtatgttcagagagcatactgcagattctgttgggaagatcgtgactggttttattgcatcccttcagcttgcagacaggccaacctttcatcagtttaggaaa

SEQ ID NO: 24966 - DNA, 599 bp, Chicken  19866894239931_1
  misc_feature (1)..(95): n is any nucleotide
nnnnnnnnnnnnnnnnnnnnnnnnnnnnnnnnnnnnnnnnnnnnnnnnnnnnnnnnnnnnnnnnnnnnnnnnnnnnnnnnnnnnnnnnnnnnnnncccccccccagtatgctgtgagttggccctgtgtgatcacagctgttgttgctgactaggaagttggctgtttaacttctaagcactgcgtctgacacgtctgttgtgattacaaaccacatctttgcacacaggtgcttctcgcactgagtgccatttattttctcctgacctctgcctttggcaccagtggtgcccaactgcygcttggacaaacgggccctctgcgttgtgcagctctgacttaagggccakgggygagctgttcagtggaacttggatttagaacactagtggaccaggtggtgtgcagagcacgagctgtggctcacggtggcacacctggggctggccgaacgcctcaactaaggctgccctgccctagcgcccccgcmcgcggaacgcgagctgctcgcggcccgttccagccggccgttccagccacaccaacaggagctgcagttgggctccgctcccaaaatggcagcgcgccgtggagcagct

SEQ ID NO: 24967 - DNA, 599 bp, Chicken  19866894239931_2
  misc_feature (1)..(45): n is any nucleotide
nnnnnnnnnnnnnnnnnnnnnnnnnnnnnnnnnnnnnnnnnnnnncccccccccagtatgctgtgagttggccctgtgtgatcacagctgttgttgctgactaggaagttggctgtttaacttctaagcactgcgtctgacacgtctgttgtgattacaaaccacatctttgcacacaggtgcttctcgcactgagtgccatttattttctcctgacctctgcctttggcaccagtggtgcccaactgcygcttggacaaacgggccctctgcgttgtgcagctctgacttaagggccakgggygagctgttcagtggaacttggatttagaacactagtggaccaggtggtgtgcagagcacgagctgtggctcacggtggcacacctggggctggccgaacgcctcaactaaggctgccctgccctagcgcccccgcmcgcggaacgcgagctgctcgcggcccgttccagccggccgttccagccacaccaacaggagctgcagttgggctccgctcccaaaatggcagcgcgccgtggagcagctgcgcccagcgccgcgtctcggtgccacgggcagcgcggagcagggcctga

SEQ ID NO: 24968 - DNA, 599 bp, Chicken  19866894239931_3
  misc_feature (1)..(41): n is any nucleotide
nnnnnnnnnnnnnnnnnnnnnnnnnnnnnnnnnnnnnnnnncccccccccagtatgctgtgagttggccctgtgtgatcacagctgttgttgctgactaggaagttggctgtttaacttctaagcactgcgtctgacacgtctgttgtgattacaaaccacatctttgcacacaggtgcttctcgcactgagtgccatttattttctcctgacctctgcctttggcaccagtggtgcccaactgcygcttggacaaacgggccctctgcgttgtgcagctctgacttaagggccakgggygagctgttcagtggaacttggatttagaacactagtggaccaggtggtgtgcagagcacgagctgtggctcacggtggcacacctggggctggccgaacgcctcaactaaggctgccctgccctagcgcccccgcmcgcggaacgcgagctgctcgcggcccgttccagccggccgttccagccacaccaacaggagctgcagttgggctccgctcccaaaatggcagcgcgccgtggagcagctgcgcccagcgccgcgtctcggtgccacgggcagcgcggagcagggcctgacmga

SEQ ID NO: 24969 - DNA, 600 bp, Chicken  19866894239931_4
cacgtctgttgtgattacaaaccacatctttgcacacaggtgcttctcgcactgagtgccatttattttctcctgacctctgcctttggcaccagtggtgcccaactgcygcttggacaaacgggccctctgcgttgtgcagctctgacttaagggccakgggygagctgttcagtggaacttggatttagaacactagtggaccaggtggtgtgcagagcacgagctgtggctcacggtggcacacctggggctggccgaacgcctcaactaaggctgccctgccctagcgcccccgcmcgcggaacgcgagctgctcgcggcccgttccagccggccgttccagccacaccaacaggagctgcagttgggctccgctcccaaaatggcagcgcgccgtggagcagctgcgcccagcgccgcgtctcggtgccacgggcagcgcggagcagggcctgacmgaggccgcacgcgtctcgccccgccgccgggctgcgctcggctcctgccccgagtggaccgttccccacgtgcccgagcaccgcgacgaaggaacccggcgccgcaccgcccgtcccgaaccgcygcccccgggtgccg

SEQ ID NO: 24970 - DNA, 537 bp, Chicken  19866894239931_5
ggygagctgttcagtggaacttggatttagaacactagtggaccaggtggtgtgcagagcacgagctgtggctcacggtggcacacctggggctggccgaacgcctcaactaaggctgccctgccctagcgcccccgcmcgcggaacgcgagctgctcgcggcccgttccagccggccgttccagccacaccaacaggagctgcagttgggctccgctcccaaaatggcagcgcgccgtggagcagctgcgcccagcgccgcgtctcggtgccacgggcagcgcggagcagggcctgacmgaggccgcacgcgtctcgccccgccgccgggctgcgctcggctcctgccccgagtggaccgttccccacgtgcccgagcaccgcgacgaaggaacccggcgccgcaccgcccgtcccgaaccgcygcccccgggtgccggggaacaataggcggccgccggcgacgtagcgcgagccccggcactgccgcaacgaggcccggctgcgggcagcgataccgctcggaacgcgagccca

SEQ ID NO: 24971 - DNA, 412 bp, Chicken  19866894239931_6
ctagcgcccccgcmcgcggaacgcgagctgctcgcggcccgttccagccggccgttccagccacaccaacaggagctgcagttgggctccgctcccaaaatggcagcgcgccgtggagcagctgcgcccagcgccgcgtctcggtgccacgggcagcgcggagcagggcctgacmgaggccgcacgcgtctcgccccgccgccgggctgcgctcggctcctgccccgagtggaccgttccccacgtgcccgagcaccgcgacgaaggaacccggcgccgcaccgcccgtcccgaaccgcygcccccgggtgccggggaacaataggcggccgccggcgacgtagcgcgagccccggcactgccgcaacgaggcccggctgcgggcagcgataccgctcggaacgcgagccca

SEQ ID NO: 24972 - DNA, 600 bp, Chicken  19866894239937_1
gccgtggctgaaggcgttctttgctgtgcgccaggctgcgggagctgtgtgtgaagctgatgttcttgcatcccgtggattatggcagaaaagcggaagagctgctctggagaaaggtttactatgaagttatccaactcatcaagacgaataagaaggcaggtatcacggtgtggggtgggcagccctgccaggctgtgggtcaggctgagttaagaggttcctctgcttggagatgtccggagctgtctgatggagttgtctgagcactgagcgctgctgggtgtgagtggagccgayggctgagttttcacagaagcgaygtcagggatcgggagggacccgcaaagcccacccggcccaacccggggcagcagcacccggaccggggcacccacagcgcatccgggcgggttgggaacgcctccagaggagaccccaccgcctctgtgggcggctcagtgccgtccccctcaccgtgaaggacttctgtctcacaccgatgtggaacctccccggtccccgcgggcacccactgccccctgtgctgccaccgggtgtcactgagaagagcccggctccgtcctcccggcactcagc

SEQ ID NO: 24973 - DNA, 600 bp, Chicken  19866894239937_2
ctgtgcgccaggctgcgggagctgtgtgtgaagctgatgttcttgcatcccgtggattatggcagaaaagcggaagagctgctctggagaaaggtttactatgaagttatccaactcatcaagacgaataagaaggcaggtatcacggtgtggggtgggcagccctgccaggctgtgggtcaggctgagttaagaggttcctctgcttggagatgtccggagctgtctgatggagttgtctgagcactgagcgctgctgggtgtgagtggagccgayggctgagttttcacagaagcgaygtcagggatcgggagggacccgcaaagcccacccggcccaacccggggcagcagcacccggaccggggcacccacagcgcatccgggcgggttgggaacgcctccagaggagaccccaccgcctctgtgggcggctcagtgccgtccccctcaccgtgaaggacttctgtctcacaccgatgtggaacctccccggtccccgcgggcacccactgccccctgtgctgccaccgggtgtcactgagaagagcccggctccgtcctcccggcactcagccttcacagatggacccccgttcg

SEQ ID NO: 24974 - DNA, 583 bp, Chicken  19866894239937_3
aagacaagtttcccatgtgaaatgagtgccaggatgctctggtgtggctttgccagagcagatgtattttcccctggctttggtggcgcggaaatactcctcctccccgctgcactgtgtgaggcagcgcgctgtccctcgatctgatgtgggaatgccattaaggctccaacgagacgcctccgctgttcatttcttactctctgtcgctgcaaacatctttccttcttagaagcaggtgaagtgcagcccagcaggggaggcacgctgagcacacagccgagctgcccgctgtctccyttcctcctcaccgtaacctgggctcccggctgcattcttacctccacccgatgacccctcctggcttctctctcccgcagcacatccacagccgcagcgctctggagtgcgcctaccgcactcacctggtggccggcattggcttctaccagcacctgctgctctacatccagtcccactaccagctggagctgcagtgctgcatcgactggacgcacgtgacggacccgctcatgggtgggtgctcgtggggagcggctttgtgtggccgtggggtggttgg

SEQ ID NO: 24975 - DNA, 600 bp, Chicken  19866894239940_1
ccactgcctgagtatttgctaagctttcatttaacaagaacaggttgtgattttacagaattctggcataagaactggccagagagctgaccaatcatgagttttttggctgtccctattcacttgaaaacattaacaacttatattacagctggctttcttaaaaatggtgaaaaatacagtagggaaatcactgtttacaatatcataacagtcataactaatccaataaaggctacatgaccacagtctgatgctaccgtatttgcccccattttaatttgaaactcttctgaacartctcaggatcaagagctaccaagttgattatatgatttccaggagaaagaacagtcttaataaggcaaaattatcagtattgaaaggaaaactgtaaacgtgtgtgtgtgtgtgtgtgtgtaatacataagtgcataaaaacaaacacaacaacattgttgttttgaaataagagaaattaagaacagagttgaattacttcaactccctaaagaacgcaaaaatgcaaaacttaaaaaataaatttgaactgaagaaaagagaaaatccattgttgcaaagaaagttgttcatttaagt

SEQ ID NO: 24976 - DNA, 600 bp, Chicken  19866894239941_1
cttctcacattagactcactccaacagccaaagacatttgtccacctgctttctattgtatttcccagtgctgccagcaggcttgcctgcttctgcaaagggcgtaccaaagagcagatgggtcactctctcagcaagaaattaaaacagtctcagtagggttgtgataaaaattgtcctaaccacttactgggagctctctgaactacagtactggtggaagggcccatgcatgccccacactcactgttttcccatctcctcagccaacctccagcctagttgtccaaatacaaagarttacagacagcctgcaatccatttaggaaaatcttgtgggtacagtaagccttggcttgataacagggagccaggcacagacctctagtggcacaaggtgcctgggatgctggcctcactatgaggactctctgcaggctgaggttgccatctgtatctgcaatgaaatgttcacccagccattgctgtcctagctgcccttaccctagctaaaaataatagcacaagtctccctgtaggaaaaagaagattgctcttgctgggctacaggcactcttgacaccacraggcagactgtgg

SEQ ID NO: 24977 - DNA, 575 bp, Chicken  19866894239941_2
caaatacaaagarttacagacagcctgcaatccatttaggaaaatcttgtgggtacagtaagccttggcttgataacagggagccaggcacagacctctagtggcacaaggtgcctgggatgctggcctcactatgaggactctctgcaggctgaggttgccatctgtatctgcaatgaaatgttcacccagccattgctgtcctagctgcccttaccctagctaaaaataatagcacaagtctccctgtaggaaaaagaagattgctcttgctgggctacaggcactcttgacaccacraggcagactgtgggaagtttgatgcacttatgtctgcataagaggtggtcactctgcactgtactttgagcaatatgtaacagcacagtgatacacaacatgtagcaaaatagtgggaaagggctatgaagaagacttggtcattctgtacatcactcatagcagtgagctcgtgatattattgcatgtacttcctgggttctgaggtctttgatttgcaggccacattaaaggtggtgattgtcctcagttttgtcctgttttaaaaggtgaca

SEQ ID NO: 24978 - DNA, 600 bp, Chicken  19866894239942_1
ttctcttcagctaataaaaagcaaaacagcagaaagggaaaagtatcaatttggttcagacagaaaaacaaacatcttccctgtctttggcagatgagtaacagattacagagtctgtttctacctcaccaaaagccagagaaaaatattatgaaaactgttgaatgaactaaaaaatatttccactccatttctttatgatgcagtctagcatttattaccagttcaggaactacatggttagtttggactgcgagattttgcactgtgttgaagaaaaaaagttgatatatatatatwtttttaatcggtttttgaaaaatcttagaaactggagagcagaatagcttccattatctgctgtataaatgtctgtaaaacaaggagcatacagtatgtaatcagtcagtactttttacagtgtgattccttgctgcaaagactttttttatttagcacttgaaatgatcccaaatttgttgtgcctgactgacttacagaacgattgtaaggaggtggccagaattagaatattatctgcaacaagctaaaactgtgaaaagtgcagaataaaacagttggtaaagtgttactatgagc

SEQ ID NO: 24979 - DNA, 599 bp, Chicken  19866894239951_1
  misc_feature (1)..(112): n is any nucleotide
nnnnnnnnnnnnnnnnnnnnnnnnnnnnnnnnnnnnnnnnnnnnnnnnnnnnnnnnnnnnnnnnnnnnnnnnnnnnnnnnnnnnnnnnnnnnnnnnnnnnnnnnnnnnnnnnttttctgtttggccttcttgtttttctccacctcttgctgccaataccttctgacacactaacccgttgggatttttccatgcagtgtgttttttaatctttttcacttgcttggtttgcaggtgatttgcctgtaggaacattttgtgtcagagttgcactagtgagaattgagttaagacttgatrgggaatttagctttggtgaatgttaggggttgctgatggagagtgtttgactgatacggtgccaatcacttttgctttgagttgtcagtgytgagtggaagactgtatgggccactgaggggtgggtgctgtatgtgaggagagagacctttgggaaagagagatacattttcactttcagacaagtgcaaagtgtgcatcgcatctgctgatctcttggcagcatgaaaactgatgtagacatccgtaattggctgcttaatmattacagtagtttaaaggaccattcttgtatattt

SEQ ID NO: 24980 - DNA, 599 bp, Chicken  19866894239951_2
  misc_feature (1)..(21): n is any nucleotide
nnnnnnnnnnnnnnnnnnnnnttttctgtttggccttcttgtttttctccacctcttgctgccaataccttctgacacactaacccgttgggatttttccatgcagtgtgttttttaatctttttcacttgcttggtttgcaggtgatttgcctgtaggaacattttgtgtcagagttgcactagtgagaattgagttaagacttgatrgggaatttagctttggtgaatgttaggggttgctgatggagagtgtttgactgatacggtgccaatcacttttgctttgagttgtcagtgytgagtggaagactgtatgggccactgaggggtgggtgctgtatgtgaggagagagacctttgggaaagagagatacattttcactttcagacaagtgcaaagtgtgcatcgcatctgctgatctcttggcagcatgaaaactgatgtagacatccgtaattggctgcttaatmattacagtagtttaaaggaccattcttgtatatttccttcactgggtataacagtacttgctaacttagaaaaaatgttcaccaaataatttattcataaaatatatttagctacattggtaaaaa

SEQ ID NO: 24981 - DNA, 600 bp, Chicken  19866894239951_3
gagttgcactagtgagaattgagttaagacttgatrgggaatttagctttggtgaatgttaggggttgctgatggagagtgtttgactgatacggtgccaatcacttttgctttgagttgtcagtgytgagtggaagactgtatgggccactgaggggtgggtgctgtatgtgaggagagagacctttgggaaagagagatacattttcactttcagacaagtgcaaagtgtgcatcgcatctgctgatctcttggcagcatgaaaactgatgtagacatccgtaattggctgcttaatmattacagtagtttaaaggaccattcttgtatatttccttcactgggtataacagtacttgctaacttagaaaaaatgttcaccaaataatttattcataaaatatatttagctacattggtaaaaaaaaaaattaataataattatcatctatttatgtattacagatacagaaagaaataactatttttgttatagcataggagctatccctggctgcagtggtgcatttggaggctgacggcgtaggctgcatttctgagctgttgtcattcatgggatgaaatgaagcggatctctc

SEQ ID NO: 24982 - DNA, 600 bp, Chicken  19866894239955_1
gcttagctttgctgaataatttagcaaaaatgggttgattgctcaaagctcggtattagcccgtgcagccatgcaaaacagaggaatggtcatggtggggagctctgtgtttctgcaggggttatgaggcacagcaagctcttcttgccttcctggctatgcgtgcagagagcagagctccttcagttaaacaaaaccaaattcattttagcccagctgccatttgggggcagttaatgaatcattcttcaaaccaaatgaattttatgttcccacatggtaaacaggagcacacattayccttgcagtgatgagtcctagacagaccacaacaaaattgatttttcttgaatcgagctttgcttgcagtaaggaaagttatggtacatagatcttgtgactggcaaagtgggagctgacattaggctcctctatttgcaatacctcactggtatcacaaagccaagcgagaagcaggttggaggaatttggcagagtttttgacaagacagatggacctctgggagagcacagcagggccactggataaggatcgatgttatgaatgttgctggctctctaagaaaacaattttccttt

SEQ ID NO: 24983 - DNA, 599 bp, Chicken  19866894239956_1
  misc_feature (1)..(118): n is any nucleotide
nnnnnnnnnnnnnnnnnnnnnnnnnnnnnnnnnnnnnnnnnnnnnnnnnnnnnnnnnnnnnnnnnnnnnnnnnnnnnnnnnnnnnnnnnnnnnnnnnnnnnnnnnnnnnnnnnnnnnnttttagcctgtaattataagaatcattgagcctatgtatgcatttcataggaagcctcagttgcataaagcagcagatgtattttggtgccaccagtcaatagtaaaagagaaactcatcacaatcccaggagctcagtgtggacctggcaggctgctctagagctcagcctccttaacccrtatgaagactctcttctgacaaaaagattttaaaaaaaaaaaaaagtaaaaaagcaatgtcagtaaattcagaatcaagtcagacataggaaagaggtaacttaggcacctgtcgcagcttatcatggaggaagattattattacagygttatgtgtacctggggatggaggcagctgtttgcattttctgaatatcaccctgggagtaacatcttcccttaccaatctaagcatatattttacaaactgaaatagttgtttatcagctgtgttaaagtatctgtgtttgtcaggctta

SEQ ID NO: 24984 - DNA, 600 bp, Chicken  19866894239956_2
cctatgtatgcatttcataggaagcctcagttgcataaagcagcagatgtattttggtgccaccagtcaatagtaaaagagaaactcatcacaatcccaggagctcagtgtggacctggcaggctgctctagagctcagcctccttaacccrtatgaagactctcttctgacaaaaagattttaaaaaaaaaaaaaagtaaaaaagcaatgtcagtaaattcagaatcaagtcagacataggaaagaggtaacttaggcacctgtcgcagcttatcatggaggaagattattattacagygttatgtgtacctggggatggaggcagctgtttgcattttctgaatatcaccctgggagtaacatcttcccttaccaatctaagcatatattttacaaactgaaatagttgtttatcagctgtgttaaagtatctgtgtttgtcaggcttatttcagcagtaaattgcattgcttgtgttggtcttgctgaaaagcattgagatgcattctgtgttaggaaagattatctcagggtcttgcaccttgtttgccctgctcctgtgtctactttcacaagactccttatggcttttgccatg

SEQ ID NO: 24985 - DNA, 600 bp, Chicken  19866894239957_1
agcaggagagtactgaatgataggtgcagaataaaaggctctgtttgcctgccagaaaggaaatcacattaatgctctaacaattacagagactgagctttagaaacattaattggcacctgtccagtgattctgcaaaacatttctgttgtggtcagtgctggatatcagtgactgcagttttgattgtccaagtttagacaaaacaaaattttaagaatacgtgtttcatggtatctgtgaaatccctcaggactgcagttgaccatgcctgaaatatctttgagtcttgggatagayattaagccaccttaaatgggagtctgaaggtccttcttaacttccataagcttgttcatgtttgcaaggcattcttcccctccccaacattcctccatttcttctatggagttgatggggaagatatgggtccctgataaataaaacgaattagtgaggatcgctgctgagcaaaaaaaatggaatggtaaatcacagctggtgatttggttagaaaaagttttttgctcaatgacacaaaatctacattgctgcaaactgattcagatgcatatctaaactgcatcataatctgggact

SEQ ID NO: 24986 - DNA, 600 bp, Chicken  19866894239962_1
tagcatagtacctctattttgtggattatcaaggaatacttggatttttagaagccttaaagcataagtagatggtctctgcccatgtacttacctttagtaaagtcttacggaaatatatcttcaacatttttatcccataacacatttatgaatttgacttttactcttgcttccttttaaagcatttaaagtgtttatgcattgtgtgtactgagatggattagcagagaggaccagccatggtactgtttagcaagtgtttgaaaaacttttggacttgggctgcgggatgaactyggggacaggctcatgaattctcctgctaagtcttcaacatgtctgctgtatacattttgagatactgcatgcattacaatatatgcgtgtgaatgtatgtgtattggtacattgggcaggcctatgagaaacctgtcctgattacgtttaagagaataattgcaacgttgcatacattgctcaaagaaaaatgatgagcaagttgatagtgagaatcaggtactcttggcagagagatatcctaaagaatctatgaagcaatatgcgtgtgcgaaggtgactttcccttatacatatctc

SEQ ID NO: 24987 - DNA, 600 bp, Chicken  19866894239962_2
attacaatatatgcgtgtgaatgtatgtgtattggtacattgggcaggcctatgagaaacctgtcctgattacgtttaagagaataattgcaacgttgcatacattgctcaaagaaaaatgatgagcaagttgatagtgagaatcaggtactcttggcagagagatatcctaaagaatctatgaagcaatatgcgtgtgcgaaggtgactttcccttatacatatctccttgcagtgttttggactgacataaacttggcagggagggagcaggagtgccttttattcttgtgtgaactyactgtctagtgctcttggagatggattaaatacacgattttgttagaattgtataccaaaagacaactaactaagcagaaattgtaacttttacagagtactttattaagtttgttgataagtctatgaacccagaaaggatagtctagaattctcatgagactgggactgatttgagcatagtcttagctattattttctctgcacttttctaaacctggatcctacttaatttttaggctgtttaatatagtgattgtctgcttstggatgttgttctatatatgattataaacttgt

SEQ ID NO: 24988 - DNA, 600 bp, Chicken  19866894239962_3
gagcaggagtgccttttattcttgtgtgaactyactgtctagtgctcttggagatggattaaatacacgattttgttagaattgtataccaaaagacaactaactaagcagaaattgtaacttttacagagtactttattaagtttgttgataagtctatgaacccagaaaggatagtctagaattctcatgagactgggactgatttgagcatagtcttagctattattttctctgcacttttctaaacctggatcctacttaatttttaggctgtttaatatagtgattgtctgcttstggatgttgttctatatatgattataaacttgtattttcagaattgagtagacagacattagtacttcatgtaataccagctttaaaaaattcctgaattgccagaataatggataatacttaatccagtgatgtaaattttgcctgttaatgacagaaagcaagagagattagggcaggaaaacacaagaactctggatacttgcatacctagacaatatttttcttaatttgttgtttttcatttttcaggttaactaaacgtgggaaattttaactcttacttgttaagtgacaagc

SEQ ID NO: 24989 - DNA, 600 bp, Chicken  19866894239965_1
attagttccaactactgcacttttcagattgaattttgttttaaaggtttgagtatattcatatatattttcacacaaaaaattatatttaaaaacaatttttgaaaagaccacttatcattttgcatcaaattaaaaggaaccatttttgaaaaattaaattttgttgccatgagacagatggcagcagaggagcagcctgacaatatgctatctgatgtggaagtgtgtatgaagcaaaggtgtctcactaaattcctcccttcagaaaacactgtacccattgacaattcatcagcmgttaytgaacgcttatggagaccgaacagtggatctgagcacagtgaaggagtgagtggtgtgtttgagcagtgatgactgcgacagtgtgttacatgtactggcatagattacacaagtgaagcacgcactggaaaaaatgcatagctattggtggttattacgttgataaatcattttgtagataagaatttgctctatcaaactgtgttactgtattgtattgtgttgtactgtattgggttgctaaccactagaccaggctgcccagagccacgtccagcctggccttgaatgcct

SEQ ID NO: 24990 - DNA, 600 bp, Chicken  19866894239965_2
ttccaactactgcacttttcagattgaattttgttttaaaggtttgagtatattcatatatattttcacacaaaaaattatatttaaaaacaatttttgaaaagaccacttatcattttgcatcaaattaaaaggaaccatttttgaaaaattaaattttgttgccatgagacagatggcagcagaggagcagcctgacaatatgctatctgatgtggaagtgtgtatgaagcaaaggtgtctcactaaattcctcccttcagaaaacactgtacccattgacaattcatcagcmgttaytgaacgcttatggagaccgaacagtggatctgagcacagtgaaggagtgagtggtgtgtttgagcagtgatgactgcgacagtgtgttacatgtactggcatagattacacaagtgaagcacgcactggaaaaaatgcatagctattggtggttattacgttgataaatcattttgtagataagaatttgctctatcaaactgtgttactgtattgtattgtgttgtactgtattgggttgctaaccactagaccaggctgcccagagccacgtccagcctggccttgaatgcctctagg

SEQ ID NO: 24991 - DNA, 599 bp, Chicken  19866894239967_1
  misc_feature (1)..(6): n is any nucleotide
nnnnnnacatttgaagacttttgttccctgtagtgaaataaaatcagaattcagcatgtgatcaggtatgtcttcttaaaaatgtttccttactacagcataatcttttcactgtaacattcgtgtttctgcttgttcccaccacccaggttatcctatccaggacagaccctatatttcatctcagtggatagctatgttcaggaggtgtttaggctctcagtaagactgagagaaaaagtgagaaaacctatccaatgctcttgataagaaatataatttaaagtgaattcctcgaaycccaaatggggatatgttctgggagagtgcaggaatctacagctgagtggcctttgtcccaaggaagtgccaggaggagtttctgaggtgttcaacagtcttagatagaatgtctgttttcaggaagtcacaacaatcatgctgtcttttggaaaaaagaaatgttggtgatttagttcccaatatcctctcctgggtatgctaagagcatcctaaaagattaaggcttggaggagaatttgaaaacattrtctaaattatctagattttcaacagaactgaaataataactactgaac

SEQ ID NO: 24992 - DNA, 600 bp, Chicken  19866894239967_2
tatccaatgctcttgataagaaatataatttaaagtgaattcctcgaaycccaaatggggatatgttctgggagagtgcaggaatctacagctgagtggcctttgtcccaaggaagtgccaggaggagtttctgaggtgttcaacagtcttagatagaatgtctgttttcaggaagtcacaacaatcatgctgtcttttggaaaaaagaaatgttggtgatttagttcccaatatcctctcctgggtatgctaagagcatcctaaaagattaaggcttggaggagaatttgaaaacattrtctaaattatctagattttcaacagaactgaaataataactactgaactttactagcacctgaaaaataacaatggataaatatgtaatgattctgaacatcttaagccctgagaagaagttgttgctgagaactgagcccattagtgcttacttacttatttcaatttcttcgatctgcatatgaaataggaacccatgaatgcgaggaacagcacagaacctgcgatgattaataccatctgcaccacacccagtaactggacccgaccggtgactttatttctgaacatttctgctt

SEQ ID NO: 24993 - DNA, 600 bp, Chicken  19866894239970_1
agtaaagaagtttcactcccttgatctactgcccaattactggagagctctgataaatattgaccaatcagtaggctgggtcacagtcctaagacaatttcctcataaggtctctccatgtccagagagcaggagaccccaattaggccacctgagggagcagaataggctggtggcaggtctgcagcactcaacaagactggagatacagctgggcactgaacaaacctggcttgctagaaatgctgctagagccctggaaggctgtcaccaacatctcctgagacagagatgacagcrggtgacagcccataccccctgcccaaccaagcaaaagtaccagccccacacaggcccctttacctctttgtcagtctcaaagctgtcaagcatctgaatgatgttagggtgatggaggcctctcataatctcaatttcccgctgcaggttcttcagctccttctcagaccgccccaccttggggatgaatttcagagccaccaccttccaaagcaggcaaagctgtgatcagagcagggtcctacccaccttgstgggggctgcatttaaccaaagtgggactcagtatttcctaggtga

SEQ ID NO: 24994 - DNA, 600 bp, Chicken  19866894239970_2
ccctggaaggctgtcaccaacatctcctgagacagagatgacagcrggtgacagcccataccccctgcccaaccaagcaaaagtaccagccccacacaggcccctttacctctttgtcagtctcaaagctgtcaagcatctgaatgatgttagggtgatggaggcctctcataatctcaatttcccgctgcaggttcttcagctccttctcagaccgccccaccttggggatgaatttcagagccaccaccttccaaagcaggcaaagctgtgatcagagcagggtcctacccaccttgstgggggctgcatttaaccaaagtgggactcagtatttcctaggtgaacacacagaatgagacrtgttcatagggccctttgaagctggggcaacaaggagtaccagcagccacctgarctgtatttgcaggactgcgggcagttgtctgaaggaagagattcttgccctttacttagcacttgttaggccacagtggccagcttttggcctagaagtgcactgacaaaacaggagtggtcctagctgaagccaccaggatggcaaggcggctgatacacatggcatacaagctgaaactg

SEQ ID NO: 24995 - DNA, 600 bp, Chicken  19866894239970_3
cctgcccaaccaagcaaaagtaccagccccacacaggcccctttacctctttgtcagtctcaaagctgtcaagcatctgaatgatgttagggtgatggaggcctctcataatctcaatttcccgctgcaggttcttcagctccttctcagaccgccccaccttggggatgaatttcagagccaccaccttccaaagcaggcaaagctgtgatcagagcagggtcctacccaccttgstgggggctgcatttaaccaaagtgggactcagtatttcctaggtgaacacacagaatgagacrtgttcatagggccctttgaagctggggcaacaaggagtaccagcagccacctgarctgtatttgcaggactgcgggcagttgtctgaaggaagagattcttgccctttacttagcacttgttaggccacagtggccagcttttggcctagaagtgcactgacaaaacaggagtggtcctagctgaagccaccaggatggcaaggcggctgatacacatggcatacaagctgaaactggggggcccgagcttcattaaygtagagataaacggaacagcaaccctgtggctggcagaagga

SEQ ID NO: 24996 - DNA, 600 bp, Chicken  19866894239970_4
agtctcaaagctgtcaagcatctgaatgatgttagggtgatggaggcctctcataatctcaatttcccgctgcaggttcttcagctccttctcagaccgccccaccttggggatgaatttcagagccaccaccttccaaagcaggcaaagctgtgatcagagcagggtcctacccaccttgstgggggctgcatttaaccaaagtgggactcagtatttcctaggtgaacacacagaatgagacrtgttcatagggccctttgaagctggggcaacaaggagtaccagcagccacctgarctgtatttgcaggactgcgggcagttgtctgaaggaagagattcttgccctttacttagcacttgttaggccacagtggccagcttttggcctagaagtgcactgacaaaacaggagtggtcctagctgaagccaccaggatggcaaggcggctgatacacatggcatacaagctgaaactggggggcccgagcttcattaaygtagagataaacggaacagcaaccctgtggctggcagaaggagacttctaagaagatggagccaggttctttacagatgtccctcccggtacccatc

SEQ ID NO: 24997 - DNA, 600 bp, Chicken  19866894239970_5
gtgggactcagtatttcctaggtgaacacacagaatgagacrtgttcatagggccctttgaagctggggcaacaaggagtaccagcagccacctgarctgtatttgcaggactgcgggcagttgtctgaaggaagagattcttgccctttacttagcacttgttaggccacagtggccagcttttggcctagaagtgcactgacaaaacaggagtggtcctagctgaagccaccaggatggcaaggcggctgatacacatggcatacaagctgaaactggggggcccgagcttcattaaygtagagataaacggaacagcaaccctgtggctggcagaaggagacttctaagaagatggagccaggttctttacagatgtccctcccggtacccatctcactcctcacctgggcgctgcacctccgccgccccttgtacactcgtccgaaggagccttctccgatcacctccagcacgtggtacctctccatggcggggctccgaggtcgggcmgaggctcctcagaagatggaccaacgatttaaggccgcgggacygcagtaaaacccggcctgagatcgagcccgccgcgttaggcc

SEQ ID NO: 24998 - DNA, 600 bp, Chicken  19866894239970_6
tggtcctagctgaagccaccaggatggcaaggcggctgatacacatggcatacaagctgaaactggggggcccgagcttcattaaygtagagataaacggaacagcaaccctgtggctggcagaaggagacttctaagaagatggagccaggttctttacagatgtccctcccggtacccatctcactcctcacctgggcgctgcacctccgccgccccttgtacactcgtccgaaggagccttctccgatcacctccagcacgtggtacctctccatggcggggctccgaggtcgggcmgaggctcctcagaagatggaccaacgatttaaggccgcgggacygcagtaaaacccggcctgagatcgagcccgccgcgttaggccgcgccgccgcgtcgcctagcaacagccgaggccgtcgcacttccgcttccgggccgggcgggaagatggcggcggccggtgaggaggtggaggcggcggactggtaatggcacccggttccccccccgcccttccccmgggcgggcgtttggggctgcctgaccgctcggtgcttcgcagggcgctgccggccgaggtggaggtgctggaatcc

SEQ ID NO: 24999 - DNA, 600 bp, Chicken  19866894239970_7
atggcatacaagctgaaactggggggcccgagcttcattaaygtagagataaacggaacagcaaccctgtggctggcagaaggagacttctaagaagatggagccaggttctttacagatgtccctcccggtacccatctcactcctcacctgggcgctgcacctccgccgccccttgtacactcgtccgaaggagccttctccgatcacctccagcacgtggtacctctccatggcggggctccgaggtcgggcmgaggctcctcagaagatggaccaacgatttaaggccgcgggacygcagtaaaacccggcctgagatcgagcccgccgcgttaggccgcgccgccgcgtcgcctagcaacagccgaggccgtcgcacttccgcttccgggccgggcgggaagatggcggcggccggtgaggaggtggaggcggcggactggtaatggcacccggttccccccccgcccttccccmgggcgggcgtttggggctgcctgaccgctcggtgcttcgcagggcgctgccggccgaggtggaggtgctggaatccatctacctggaggagctgcgggtggtgcggggccgcgcgaggta

SEQ ID NO: 25000 - DNA, 600 bp, Chicken  19866894239970_8
cactcgtccgaaggagccttctccgatcacctccagcacgtggtacctctccatggcggggctccgaggtcgggcmgaggctcctcagaagatggaccaacgatttaaggccgcgggacygcagtaaaacccggcctgagatcgagcccgccgcgttaggccgcgccgccgcgtcgcctagcaacagccgaggccgtcgcacttccgcttccgggccgggcgggaagatggcggcggccggtgaggaggtggaggcggcggactggtaatggcacccggttccccccccgcccttccccmgggcgggcgtttggggctgcctgaccgctcggtgcttcgcagggcgctgccggccgaggtggaggtgctggaatccatctacctggaggagctgcgggtggtgcggggccgcgcgaggtacgtaccgggccctgcggcccccgggcccctctccccggccgcgccttacctctgcccgcccgcaggtccgagccctgggaggtgagcatcaccctgcaccccgccacggcccaggaccaggactcccagttcgtgcggtgcacactggtgctcgccgtgcccccccaggtaggttcccat

SEQ ID NO: 25001 - DNA, 600 bp, Chicken  19866894239982_1
tctccaaaatcccagcttcagcaactgtagttatgagttagagcaggtggggaacatagcaagaacagagcgaacaaggtaaaaactgttatgcagcgatccatattggtctgtctgactttaagcaaaattcctggtaatttcaccttgtgtttggaaatcaaacttctaatagacacgtcagaaaggtgttcttgtgacttgcagcacaaaggttcctttgtaggaaatttttctacctaaaagcaatggtattaaatcactgaacaaagagagggagatatgttttgattaggcacmgagctttcctctgacagatttcagaacccgtagtctaacagatgacactgtaaagaacacarttgcttttctgctakgttgactaaggaactcagcaaccttcttttcagccatgtggcgttttcattatttgttttctttgtcttgggctttttgcttagctccttttacaagctgttctttattcttcctcaggtgcatagtttgttttcttaagaagcagagccaggagcccaccrccagctttcctggcyaggcaaagggagtgggcagtggtagggctggcccagttcctarctg

SEQ ID NO: 25002 - DNA, 600 bp, Chicken  19866894239982_2
gaacagagcgaacaaggtaaaaactgttatgcagcgatccatattggtctgtctgactttaagcaaaattcctggtaatttcaccttgtgtttggaaatcaaacttctaatagacacgtcagaaaggtgttcttgtgacttgcagcacaaaggttcctttgtaggaaatttttctacctaaaagcaatggtattaaatcactgaacaaagagagggagatatgttttgattaggcacmgagctttcctctgacagatttcagaacccgtagtctaacagatgacactgtaaagaacacarttgcttttctgctakgttgactaaggaactcagcaaccttcttttcagccatgtggcgttttcattatttgttttctttgtcttgggctttttgcttagctccttttacaagctgttctttattcttcctcaggtgcatagtttgttttcttaagaagcagagccaggagcccaccrccagctttcctggcyaggcaaagggagtgggcagtggtagggctggcccagttcctarctgcagtcctccagtcccattgtgagctctggactctgcacattggtgcacagtttcttataggc

SEQ ID NO: 25003 - DNA, 600 bp, Chicken  19866894239982_3
ggtaaaaactgttatgcagcgatccatattggtctgtctgactttaagcaaaattcctggtaatttcaccttgtgtttggaaatcaaacttctaatagacacgtcagaaaggtgttcttgtgacttgcagcacaaaggttcctttgtaggaaatttttctacctaaaagcaatggtattaaatcactgaacaaagagagggagatatgttttgattaggcacmgagctttcctctgacagatttcagaacccgtagtctaacagatgacactgtaaagaacacarttgcttttctgctakgttgactaaggaactcagcaaccttcttttcagccatgtggcgttttcattatttgttttctttgtcttgggctttttgcttagctccttttacaagctgttctttattcttcctcaggtgcatagtttgttttcttaagaagcagagccaggagcccaccrccagctttcctggcyaggcaaagggagtgggcagtggtagggctggcccagttcctarctgcagtcctccagtcccattgtgagctctggactctgcacattggtgcacagtttcttataggcatctcagtgagctct

SEQ ID NO: 25004 - DNA, 600 bp, Chicken  19866894239982_4
ctaaaagcaatggtattaaatcactgaacaaagagagggagatatgttttgattaggcacmgagctttcctctgacagatttcagaacccgtagtctaacagatgacactgtaaagaacacarttgcttttctgctakgttgactaaggaactcagcaaccttcttttcagccatgtggcgttttcattatttgttttctttgtcttgggctttttgcttagctccttttacaagctgttctttattcttcctcaggtgcatagtttgttttcttaagaagcagagccaggagcccaccrccagctttcctggcyaggcaaagggagtgggcagtggtagggctggcccagttcctarctgcagtcctccagtcccattgtgagctctggactctgcacattggtgcacagtttcttataggcatctcagtgagctctgggagtgtgcctgtatggttagtaccgcgaggaaagcccacagatggctgattcattggttttctctgcttttggctaaatgatctttgaactttgagacaaaacttaatttaggtcaatgcagaggagtactgtctccatctgtcactgttttgattcttt

SEQ ID NO: 25005 - DNA, 600 bp, Chicken  19866894239982_5
ttaaatcactgaacaaagagagggagatatgttttgattaggcacmgagctttcctctgacagatttcagaacccgtagtctaacagatgacactgtaaagaacacarttgcttttctgctakgttgactaaggaactcagcaaccttcttttcagccatgtggcgttttcattatttgttttctttgtcttgggctttttgcttagctccttttacaagctgttctttattcttcctcaggtgcatagtttgttttcttaagaagcagagccaggagcccaccrccagctttcctggcyaggcaaagggagtgggcagtggtagggctggcccagttcctarctgcagtcctccagtcccattgtgagctctggactctgcacattggtgcacagtttcttataggcatctcagtgagctctgggagtgtgcctgtatggttagtaccgcgaggaaagcccacagatggctgattcattggttttctctgcttttggctaaatgatctttgaactttgagacaaaacttaatttaggtcaatgcagaggagtactgtctccatctgtcactgttttgattctttttcagcaactaagaa

SEQ ID NO: 25006 - DNA, 590 bp, Chicken  19866894239982_6
acmgagctttcctctgacagatttcagaacccgtagtctaacagatgacactgtaaagaacacarttgcttttctgctakgttgactaaggaactcagcaaccttcttttcagccatgtggcgttttcattatttgttttctttgtcttgggctttttgcttagctccttttacaagctgttctttattcttcctcaggtgcatagtttgttttcttaagaagcagagccaggagcccaccrccagctttcctggcyaggcaaagggagtgggcagtggtagggctggcccagttcctarctgcagtcctccagtcccattgtgagctctggactctgcacattggtgcacagtttcttataggcatctcagtgagctctgggagtgtgcctgtatggttagtaccgcgaggaaagcccacagatggctgattcattggttttctctgcttttggctaaatgatctttgaactttgagacaaaacttaatttaggtcaatgcagaggagtactgtctccatctgtcactgttttgattctttttcagcaactaagaaatgtgtttaagatgtagttcatgcccagaaggc

SEQ ID NO: 25007 - DNA, 600 bp, Chicken  19866894239993_1
cagaaaacagataaagaagattgaagtaactggagaaagcaaaatgcagaatactaggttttgactgtaaaaacatagctttagctaattcaggctgattgtatttgtatggtctgtaattaaaaggcactgtagcaagaatgggtcaaattcttttgcagtaacgattctgaccttctgaatttcacactgaagttgttataattacacgcaactctttttctcaagatgcttctgagtactttttagtttgaggcaaatggtagataacaagcagcaccttttttttcatgataaaamccctcaagtctgagtcacaagagaaaaactggggtttgtttttgcattccataacaaatagcaaaatcataaagaatttttaagttccaaactagctttaaaaattctttaaaggtatctctaaatgtcacaccaatatttgtcttacaaaaggtaactcaaattttcttcttggtgatgtcctgcattctgcagaaagctcttcattgatgcctcttgcagatcaatagtgcataaacaaatatatttccttcctagttaatcctatcaggtgctatcttatttttaacttgtatcttt

SEQ ID NO: 25008 - DNA, 392 bp, Chicken  19866894239998_1
atttattttgaataaacttcataattgtgggtgtttatctgaaattgcacaagcccctggagaattctcccttccctgaattccctcctgatcatcttctcttgcaacccaaggcagctgtgttaccacctgctgcaggggagcctgattccctgcaggtttacatggcaaggtcttctagtctggagtttccgaaccagagtttctaaatccagcccatgtgcaggttaaggcatgtgaaaggactagatgttgtggcctgtgcagaaatttaatctgggtggatatctgaagcctaartcagttcactaagccaagggaaaatggctaatatgcacttcttcaacatattatccctcctccttgagggagacaaaggttcaactgtggag

SEQ ID NO: 25009 - DNA, 600 bp, Chicken  19866894240002_1
gcagaaatgtggtttcctaccatttcaccacagggacgatttatagccatctcgtttgtgcaaaccgtgcaacatcagcattgattttaaaatccattacattaaaactacaccccagaactgcacgtttggccataggttcacatcacaaaggtctcagcagtaacaccagtaaagaaaatatctgacccctcttcagccgcttctttgggccgtgccccaagcccaaggcctcacacagctcctgcccaagagcactcctggcacagctgagatgatgtatttaacagctgctatagrggttaccagaagctgtagctggacattttatacacagaatttacattttyagtggacgtgactttcaaggctctggtaatctgctcttcagctgcaactgagcatttttacactacacaattcctgcagcaaagtaaattacttacatgcaatctaatctcccttcctttcagcttccataaggcttctttttatttcttcagtaatataargaggcataaaggcgatagagaacataacaataaacaattttgcatcaatttaactcaattggtttaaaagaatcaatgcagttaaatg

SEQ ID NO: 25010 - DNA, 600 bp, Chicken  19866894240002_2
ctcgtttgtgcaaaccgtgcaacatcagcattgattttaaaatccattacattaaaactacaccccagaactgcacgtttggccataggttcacatcacaaaggtctcagcagtaacaccagtaaagaaaatatctgacccctcttcagccgcttctttgggccgtgccccaagcccaaggcctcacacagctcctgcccaagagcactcctggcacagctgagatgatgtatttaacagctgctatagrggttaccagaagctgtagctggacattttatacacagaatttacattttyagtggacgtgactttcaaggctctggtaatctgctcttcagctgcaactgagcatttttacactacacaattcctgcagcaaagtaaattacttacatgcaatctaatctcccttcctttcagcttccataaggcttctttttatttcttcagtaatataargaggcataaaggcgatagagaacataacaataaacaattttgcatcaatttaactcaattggtttaaaagaatcaatgcagttaaatgagaacagctctctggtgaagattaaacaatattggtgtgaaaggaaaaaa

SEQ ID NO: 25011 - DNA, 527 bp, Chicken  19866894240002_3
ccgtgccccaagcccaaggcctcacacagctcctgcccaagagcactcctggcacagctgagatgatgtatttaacagctgctatagrggttaccagaagctgtagctggacattttatacacagaatttacattttyagtggacgtgactttcaaggctctggtaatctgctcttcagctgcaactgagcatttttacactacacaattcctgcagcaaagtaaattacttacatgcaatctaatctcccttcctttcagcttccataaggcttctttttatttcttcagtaatataargaggcataaaggcgatagagaacataacaataaacaattttgcatcaatttaactcaattggtttaaaagaatcaatgcagttaaatgagaacagctctctggtgaagattaaacaatattggtgtgaaaggaaaaaaaaaaaaaccaacacacttcttgctcttcatccatgtgggactgggtgctagtgctattcaaataatgaacgacagctctgaaccttttt

SEQ ID NO: 25012 - DNA, 600 bp, Chicken  19866894240005_1
acaaactagttcatgtctttttcaaccaggattttcagatatgtgtgattaattgaggaagcagtagtgggctggcccacaatgatgggttagccattatcttttctgttttcacttgagtcgtaatgaatacacaaacacagcattctgacagaagtaatggcaaatgcaataacaatcaacttaaaactacgatgcctttctgccacaagcctaaaaaacaacccttgaggcatgcattagcattttgggaaataaaaccctatctaataattcccttcctcagagctcatgcttctwtgctaataagtttgccagtcctgtgtttttgttacactttccttcactgtcgcacaccctcctacaatagatttttaaagctttatggtgctatatgggcatgtactgagtgaaactagcttagcgtgcaacattagcacacatactacaaagaggcacaacaaagagaggtaaggctgaataatgaaggagttgtagaattgttcagattgcaagtggcttgggatccagaggttaagccatttgcagaggaactaaactaagctcagcgatgcagaagagctgagatcctaaatgctt

SEQ ID NO: 25013 - DNA, 599 bp, Chicken  19866894240008_1
  misc_feature (1)..(78): n is any nucleotide
nnnnnnnnnnnnnnnnnnnnnnnnnnnnnnnnnnnnnnnnnnnnnnnnnnnnnnnnnnnnnnnnnnnnnnnnnnnnnngtttaatttctctctttggtttttctttaaaataaagaacgtgaggtttccacactttcactcccctccaaagacaggcagtaaaagcaaagcaggtcaggacagatgcctttctgtcagggtccttccaccacacagcaaaatttggccacgagcatctcccaccaccagtgcctggagagcagccgcggtgcggtgcgggcagcagagataagggccctmtcctcagcaggaacaggctttgtccccaggtcccaattctcccctgccagcayggccactygtgctgaaattccttctcgtgaaggataattagcaattaggaacatttcctcttgtttttaagccagcaatgttacaataacaagctgatccagattttctctaaacacagctgtgatgtagctacaggggacctgaggttggaggcagggaacccrgttcacagcctccacacaggtttgcagagcaggcagtgggaactgcttatgctaaaccagaggcagctgctcctttgctgt

SEQ ID NO: 25014 - DNA, 599 bp, Chicken  19866894240008_2
  misc_feature (1)..(25): n is any nucleotide
nnnnnnnnnnnnnnnnnnnnnnnnngtttaatttctctctttggtttttctttaaaataaagaacgtgaggtttccacactttcactcccctccaaagacaggcagtaaaagcaaagcaggtcaggacagatgcctttctgtcagggtccttccaccacacagcaaaatttggccacgagcatctcccaccaccagtgcctggagagcagccgcggtgcggtgcgggcagcagagataagggccctmtcctcagcaggaacaggctttgtccccaggtcccaattctcccctgccagcayggccactygtgctgaaattccttctcgtgaaggataattagcaattaggaacatttcctcttgtttttaagccagcaatgttacaataacaagctgatccagattttctctaaacacagctgtgatgtagctacaggggacctgaggttggaggcagggaacccrgttcacagcctccacacaggtttgcagagcaggcagtgggaactgcttatgctaaaccagaggcagctgctcctttgctgttacaagacccctttgcaacaaatctacaggacaacttcattatcctgtgcatg

SEQ ID NO: 25015 - DNA, 599 bp, Chicken  19866894240008_3
  misc_feature (1)..(17): n is any nucleotide
nnnnnnnnnnnnnnnnngtttaatttctctctttggtttttctttaaaataaagaacgtgaggtttccacactttcactcccctccaaagacaggcagtaaaagcaaagcaggtcaggacagatgcctttctgtcagggtccttccaccacacagcaaaatttggccacgagcatctcccaccaccagtgcctggagagcagccgcggtgcggtgcgggcagcagagataagggccctmtcctcagcaggaacaggctttgtccccaggtcccaattctcccctgccagcayggccactygtgctgaaattccttctcgtgaaggataattagcaattaggaacatttcctcttgtttttaagccagcaatgttacaataacaagctgatccagattttctctaaacacagctgtgatgtagctacaggggacctgaggttggaggcagggaacccrgttcacagcctccacacaggtttgcagagcaggcagtgggaactgcttatgctaaaccagaggcagctgctcctttgctgttacaagacccctttgcaacaaatctacaggacaacttcattatcctgtgcatgcaggagcc

SEQ ID NO: 25016 - DNA, 600 bp, Chicken  19866894240008_4
aaatttggccacgagcatctcccaccaccagtgcctggagagcagccgcggtgcggtgcgggcagcagagataagggccctmtcctcagcaggaacaggctttgtccccaggtcccaattctcccctgccagcayggccactygtgctgaaattccttctcgtgaaggataattagcaattaggaacatttcctcttgtttttaagccagcaatgttacaataacaagctgatccagattttctctaaacacagctgtgatgtagctacaggggacctgaggttggaggcagggaacccrgttcacagcctccacacaggtttgcagagcaggcagtgggaactgcttatgctaaaccagaggcagctgctcctttgctgttacaagacccctttgcaacaaatctacaggacaacttcattatcctgtgcatgcaggagccttccagcaagccagaccctctcctttggtattatgtctcaaaggccgacctgttttattctgagcaacgagggttttcttataccttccctgtctcatcttccytaacctgttaccagctgattctccagctgccatctcctcctctctttgcttctc

SEQ ID NO: 25017 - DNA, 600 bp, Chicken  19866894240008_5
aaacacagctgtgatgtagctacaggggacctgaggttggaggcagggaacccrgttcacagcctccacacaggtttgcagagcaggcagtgggaactgcttatgctaaaccagaggcagctgctcctttgctgttacaagacccctttgcaacaaatctacaggacaacttcattatcctgtgcatgcaggagccttccagcaagccagaccctctcctttggtattatgtctcaaaggccgacctgttttattctgagcaacgagggttttcttataccttccctgtctcatcttccytaacctgttaccagctgattctccagctgccatctcctcctctctttgcttctccactaaaggagggtcagcaaaaaaggccccagcaacagacctcctttccttacgattctatagcaactacaggatgctgagcaattagatcaaatttgaagtgaaaccatacacaagcttacaatcagttgattcacaaaaagttaacatgattgtttttgtgtcatcagtctttataacttcataactgtttcactgcattggaaggtagagaaagctaacaggacaccatcctcaggctgggag

SEQ ID NO: 25018 - DNA, 600 bp, Chicken  19866894240012_1
agctgaatattgccttgtgaggatttgagctcttccaagtttaaatttgctaaaaattctgtcatgtcacatatcatctatttcatcctctttcccaaactttgcaccttttttgagacttgggcttggttcctgcaatcctccaggagaggcaatcatcacgtttctgtttcctttattagcatttgtcttaaagccactagcacacgtctagttctcttcttcttttttttttctttcttttttttttcagattcccagatgtctatatttggctccagcaatctgtgcttcagagcrcttgtcatgtgtcaagttaagactgtaactaggaccatctagaactgaagaatttggatccatcgttcatgaggaaggacaggctaccagtttctcaaggggagaaaagctaggttgcrtgtcctatgaccatcagatcttgtctyccctataaactgactagtaaaaagaattcatgtgagggcaagaaaaaaaggagatctactgaattcatgtttgtatttgacgtttcagacagttctgttttgggtgctctgattctaaacagtcctggcaaatctagtatacctcatcagtact

SEQ ID NO: 25019 - DNA, 563 bp, Chicken  19866894240012_2
ttgggcttggttcctgcaatcctccaggagaggcaatcatcacgtttctgtttcctttattagcatttgtcttaaagccactagcacacgtctagttctcttcttcttttttttttctttcttttttttttcagattcccagatgtctatatttggctccagcaatctgtgcttcagagcrcttgtcatgtgtcaagttaagactgtaactaggaccatctagaactgaagaatttggatccatcgttcatgaggaaggacaggctaccagtttctcaaggggagaaaagctaggttgcrtgtcctatgaccatcagatcttgtctyccctataaactgactagtaaaaagaattcatgtgagggcaagaaaaaaaggagatctactgaattcatgtttgtatttgacgtttcagacagttctgttttgggtgctctgattctaaacagtcctggcaaatctagtatacctcatcagtactctgctgtctgtatgaaatgcagagtgtaaggcagatcaggagaactgtgactaagcacagtaggagattcatgagcggtctc

SEQ ID NO: 25020 - DNA, 536 bp, Chicken  19866894240012_3
gagaggcaatcatcacgtttctgtttcctttattagcatttgtcttaaagccactagcacacgtctagttctcttcttcttttttttttctttcttttttttttcagattcccagatgtctatatttggctccagcaatctgtgcttcagagcrcttgtcatgtgtcaagttaagactgtaactaggaccatctagaactgaagaatttggatccatcgttcatgaggaaggacaggctaccagtttctcaaggggagaaaagctaggttgcrtgtcctatgaccatcagatcttgtctyccctataaactgactagtaaaaagaattcatgtgagggcaagaaaaaaaggagatctactgaattcatgtttgtatttgacgtttcagacagttctgttttgggtgctctgattctaaacagtcctggcaaatctagtatacctcatcagtactctgctgtctgtatgaaatgcagagtgtaaggcagatcaggagaactgtgactaagcacagtaggagattcatgagcggtctc

SEQ ID NO: 25021 - DNA, 600 bp, Chicken  19866894240014_1
caaacaaaggtctttcccaccaggtctgcaagacatactacaaggtgcattctttccattttactcatacaaggagtctggggcagtaaagacagagaaaaatgggagaataggaaaaagttagcatccaatttatttatgatgtcacattctgaatataatgaaaaggtgactgcctgactcatctcctatcttaggatgtgtgctaaaatagtgcaccagacagctaccaaacataaaattagtctgacactaaaactgacgggggagtagatctgtggtggagctccatttcagtgrctgctggaaggaaaactgtttttttttctaccacaagattacaaatgtttgaaaacttatagaatgcatttaaatatggtgtcaagttgagactttaaggatcattactactgtgattgtttaaaaaatttatggctatagtaaaggagtaccatccaaagattatggttctgaatttttttttttttttttttttttttgagcagtgtaattctgtgtaattgagccagtaacaacaagaaatatcagagttcacccttttatttaatctgttttcagtgtttggaacttaaacatcat

SEQ ID NO: 25022 - DNA, 600 bp, Chicken  19866894240018_1
gtcaggataaatatccaattgctacaattcaattcctttgatgttcaatctcccattttcatcactagcactccaaaacagacttgcaaagtgcttgctgtacatgtattatctttgtaagttaggcaatgagttcttccgtcaggttgtattttatgatgccaatttaattcttgctccttttcgtatagaggaaacttgtgctcagcttttccctttttctcatagtgctttcctgcccttcaaaaaacttggcaggccaactctgccaatttttctggttagcaagtattataattygatttaggaaaattttagttttccaaaccttttctagcaagatcagcttgttaagcttgactacaggggccagagagtcttcaggaagaaactaggaagttccacagctacctgtggaataaatcccaatgaagtgtgaaagaacataatatttgtctccgggtttggatgaagacattggcttacatacatcttcctatttttgccagtctattttgagtctccttaccctcccagagttccaaggtcctgcgcttagttcattctccttgccccttggagctggaggttctgtccagt

SEQ ID NO: 25023 - DNA, 600 bp, Chicken  19866894240018_2
gaagacattggcttacatacatcttcctatttttgccagtctattttgagtctccttaccctcccagagttccaaggtcctgcgcttagttcattctccttgccccttggagctggaggttctgtccagtgctgtggagtaagtatgggaatctcaggtccagaagccgaagcggaattttcatcaaacacagcaaaacccagattgtttgaaaactgctgaggagtctggaagtttctgttttggtttgtggctgtaagtggaaagttttatgcaaattagcctttaacctattgcacytaggtgcaaattttacaaccaaagggtataagttttccaataatatatcgcttcagcaactgaacatacctttaagtgcatctcctacacgactaattggagctctcacttttttctttcccctgccttttagatctgccaatgtgctcctctgaggttcttcagtttccagaagatccgtatctttttcatgagcagcttcctcaagtcccagtagtgtttgccgagaaacacgggtctgaaactgcctgagaacatcagggaaatcagtacaaatttcactgtaccaggtatccacta

SEQ ID NO: 25024 - DNA, 600 bp, Chicken  19866894240018_3
cagctggaagcttacctgtgatgagactggagtttgtccaaaggctctgccttgcgattaaggccttcctggaagattatatctgctttcttaaaacttcctctagcctcaagttcttctgcccatgtaatatagagttgtgccagcgttgtaccaatttcctgactatgcagataactgtacagatccaagggttcattacagcaatttccctgaaacaacccaagtatttcaaagggtgtcaatgtctgctttttgattcctctgcaacattgcttttatttcaatacaagactcgcyggagcagttgttaggtcaagacatactcttgcatcatgtcacagcacacagaaagaaagcaagtcaccaggagaaaacaaatgaggaacacctctgacaacacctgtgtatgtcaatattacttaccctttaactatascttacatattccaagtattgaatttaagtgattttttcctatatttcagtgattaaaatatgtcattttggcattcctgagaatagttactttacctaaagtacaatatatatattagcagtctaagtactagtaaattagctgaagaagatagagtggga

SEQ ID NO: 25025 - DNA, 600 bp, Chicken  19866894240018_4
gtgccagcgttgtaccaatttcctgactatgcagataactgtacagatccaagggttcattacagcaatttccctgaaacaacccaagtatttcaaagggtgtcaatgtctgctttttgattcctctgcaacattgcttttatttcaatacaagactcgcyggagcagttgttaggtcaagacatactcttgcatcatgtcacagcacacagaaagaaagcaagtcaccaggagaaaacaaatgaggaacacctctgacaacacctgtgtatgtcaatattacttaccctttaactatascttacatattccaagtattgaatttaagtgattttttcctatatttcagtgattaaaatatgtcattttggcattcctgagaatagttactttacctaaagtacaatatatatattagcagtctaagtactagtaaattagctgaagaagatagagtgggagacaagtccctataagaaggcaagaacagcaacgagaaacataccaatgaagaaacagtgcaagaccagagcayacaggtttttccttagatttagatgtggatgcaatacagttacaagttaaaatgactggaaggac

SEQ ID NO: 25026 - DNA, 600 bp, Chicken  19866894240018_5
aaacaaatgaggaacacctctgacaacacctgtgtatgtcaatattacttaccctttaactatascttacatattccaagtattgaatttaagtgattttttcctatatttcagtgattaaaatatgtcattttggcattcctgagaatagttactttacctaaagtacaatatatatattagcagtctaagtactagtaaattagctgaagaagatagagtgggagacaagtccctataagaaggcaagaacagcaacgagaaacataccaatgaagaaacagtgcaagaccagagcayacaggtttttccttagatttagatgtggatgcaatacagttacaagttaaaatgactggaaggacagatataacacctwaaacatatctttaaataccaaaatacatacagaatcaagcttcactcattcaaaycagcttgtttrcaaaataaaacaaaaaaaaatttacagagtatgtcactacaaactgaatgaccttgagaaacatctgaagatactactgaaaggttgaaatagaattccagaataagcgttaggtttgcagagacaacttctaatactgtactagttgtacaaca

SEQ ID NO: 25027 - DNA, 600 bp, Chicken  19866894240018_6
gtattgaatttaagtgattttttcctatatttcagtgattaaaatatgtcattttggcattcctgagaatagttactttacctaaagtacaatatatatattagcagtctaagtactagtaaattagctgaagaagatagagtgggagacaagtccctataagaaggcaagaacagcaacgagaaacataccaatgaagaaacagtgcaagaccagagcayacaggtttttccttagatttagatgtggatgcaatacagttacaagttaaaatgactggaaggacagatataacacctwaaacatatctttaaataccaaaatacatacagaatcaagcttcactcattcaaaycagcttgtttrcaaaataaaacaaaaaaaaatttacagagtatgtcactacaaactgaatgaccttgagaaacatctgaagatactactgaaaggttgaaatagaattccagaataagcgttaggtttgcagagacaacttctaatactgtactagttgtacaacatactcttttacttggtaggttaaagtaaatagcttagttatgcaaatggcttttaccaagaaaaatcaacactcgagat

SEQ ID NO: 25028 - DNA, 600 bp, Chicken  19866894240018_7
ggcattcctgagaatagttactttacctaaagtacaatatatatattagcagtctaagtactagtaaattagctgaagaagatagagtgggagacaagtccctataagaaggcaagaacagcaacgagaaacataccaatgaagaaacagtgcaagaccagagcayacaggtttttccttagatttagatgtggatgcaatacagttacaagttaaaatgactggaaggacagatataacacctwaaacatatctttaaataccaaaatacatacagaatcaagcttcactcattcaaaycagcttgtttrcaaaataaaacaaaaaaaaatttacagagtatgtcactacaaactgaatgaccttgagaaacatctgaagatactactgaaaggttgaaatagaattccagaataagcgttaggtttgcagagacaacttctaatactgtactagttgtacaacatactcttttacttggtaggttaaagtaaatagcttagttatgcaaatggcttttaccaagaaaaatcaacactcgagattttcacagaacactcacaaatttgagccagagactaagatagcggggatcttggt

SEQ ID NO: 25029 - DNA, 600 bp, Chicken  19866894240018_8
gaatagttactttacctaaagtacaatatatatattagcagtctaagtactagtaaattagctgaagaagatagagtgggagacaagtccctataagaaggcaagaacagcaacgagaaacataccaatgaagaaacagtgcaagaccagagcayacaggtttttccttagatttagatgtggatgcaatacagttacaagttaaaatgactggaaggacagatataacacctwaaacatatctttaaataccaaaatacatacagaatcaagcttcactcattcaaaycagcttgtttrcaaaataaaacaaaaaaaaatttacagagtatgtcactacaaactgaatgaccttgagaaacatctgaagatactactgaaaggttgaaatagaattccagaataagcgttaggtttgcagagacaacttctaatactgtactagttgtacaacatactcttttacttggtaggttaaagtaaatagcttagttatgcaaatggcttttaccaagaaaaatcaacactcgagattttcacagaacactcacaaatttgagccagagactaagatagcggggatcttggtagtatctctgc

SEQ ID NO: 25030 - DNA, 600 bp, Chicken  19866894240020_1
aactatcatagaagaagttcaaaacttgagtgtatacagcaggaagctagcattaaaataatcagtttgtgttgatttgctcttttgtgcaaattttattagaactacttgaaaaaataataacttgttgagtagatgaaaacagtacatgattaatctttgaagatgactagcacagtaaatgatctctgaagtaatactttactctaaattgtaacctctggaagctgatctgtatggtggagagatgctaaactgagttctacttcagtggtaaattcactaggaaaacaaacaagmaaacataatattttatcaaaagaatataaactcataacacttctcttaaagaaatctaatcttcagtcagacatattttcatccattcatgttatataaacatctagtgatgaaattggtttgaagtgaattatataattcttaaaaaaaactatattctctactaggtaaggtacattgtattgctttgcagctaattctcaaacttagcacttgaaagtttagactgaagatgatgcccgtagaaaggtgcagtttagaagacttactgagatatcgtggtctgaaagaatgatgctg

SEQ ID NO: 25031 - DNA, 600 bp, Chicken  19866894240022_1
aaaaacaagacccttgtaaggatagatgtgacatcacagagtgagccccccaagagctggccacatttagggaaagccagtaaaagggagaagcaaaaacaagtgtatttacttcagtaaattcagcaacataggcctatttctttctttccctttattctcttctacttatttctcctacatcatttttcttcatttctttcttttaatttctatccctgcattgctgaactgtgttttcctctccaattcccttcaggaattcctaactttctgttctctgccttttctttcactccyctcatttgtgctcctcctttagcctttgcctggcacctctccttcaggtgctgagcacagtaagttcatcttctcttggaaatctctttccttctttatctaacttcatagacactccacctctcaatcatatattatcaccttttttttcccctgctccttacgtggaagaaattgagtgaatggaaacggtttgatgagtataggaactgaagtcagattgcttcattttttcttggttgtatctcttctgtcgtccttcctctcatgctacctgcctattctgcttcaaaacaggca

SEQ ID NO: 25032 - DNA, 599 bp, Chicken  19866894240024_1
  misc_feature (1)..(188): n is any nucleotide
nnnnnnnnnnnnnnnnnnnnnnnnnnnnnnnnnnnnnnnnnnnnnnnnnnnnnnnnnnnnnnnnnnnnnnnnnnnnnnnnnnnnnnnnnnnnnnnnnnnnnnnnnnnnnnnnnnnnnnnnnnnnnnnnnnnnnnnnnnnnnnnnnnnnnnnnnnnnnnnnnnnnnnnnnnnnnnnnnnnnnnnnnnnnccatccacagccaccctcaccccattcccttcaccgcatctccatcccatccccatccctctccccatcccatcctcattcctctccccacaacccggctcatccccacagwgcatctcaccatggggagagctcaatggcttctgccttggccccacatctgcggagaaaaagcagtggacacacagagggagggacacgtggtgcagtgtgagaccatgcaccatacatggccacgctgcagccacagaagcaccatggtggctgcagcacagcatagcacggcacggcacagcgcaygctcaccctcagcagcctcgggtgcctccaggctctcctcatcccccacaccctcactgctgtctgtgggtccgtccccatcgtcctcacccagcgcttctgtggggcaga

SEQ ID NO: 25033 - DNA, 533 bp, Chicken  19866894240024_2
ccatccacagccaccctcaccccattcccttcaccgcatctccatcccatccccatccctctccccatcccatcctcattcctctccccacaacccggctcatccccacagwgcatctcaccatggggagagctcaatggcttctgccttggccccacatctgcggagaaaaagcagtggacacacagagggagggacacgtggtgcagtgtgagaccatgcaccatacatggccacgctgcagccacagaagcaccatggtggctgcagcacagcatagcacggcacggcacagcgcaygctcaccctcagcagcctcgggtgcctccaggctctcctcatcccccacaccctcactgctgtctgtgggtccgtccccatcgtcctcacccagcgcttctgtggggcagaggcacacttcagtgcgaggacatccccgcagcagcccccccgcccccccccccccgaggcagctccctccccatgttggcacctggctggaagtcgatggtgcgcaacatctcagcaacgtg

SEQ ID NO: 25034 - DNA, 600 bp, Chicken  19866894240025_1
cctgcgctgctcctgctctgtttgggagaagcggaacatccttctgttgtcatcttttttgtactggaaaaaagatagcatcggtgtttctgaaactgtggaatagtgctctgccatgcaggactgtcactgggaggggttttctggaagatgcagaaggggctgtgttgagaccatcttttctcctccataatttggtgtatttctttccttgctgcattccaatctgttcctgcagcgctgctcccagcagcgctgagcccacagggagcacgaggcagcgtcctcctctgcttcctkgtcccgtttatgcttaacatcacagaggcacacctyggtgcctgggatggcagagtgttctcaaacccttacagagctgctgggatgtgcagtgccagtgctggtgcacatgtctggggtttgctatgtgctcctkcctccttatgccaccggaggcttytgacaacccagcgttgagtctcacgggtcccagctgaaaggcctgattcagagctgccctgtccattcacctgaaggcagggctggctaccagcttcccagcaccactggcagcaagagcctgctgaaaacccagccaga

SEQ ID NO: 25035 - DNA, 600 bp, Chicken  19866894240025_2
catccttctgttgtcatcttttttgtactggaaaaaagatagcatcggtgtttctgaaactgtggaatagtgctctgccatgcaggactgtcactgggaggggttttctggaagatgcagaaggggctgtgttgagaccatcttttctcctccataatttggtgtatttctttccttgctgcattccaatctgttcctgcagcgctgctcccagcagcgctgagcccacagggagcacgaggcagcgtcctcctctgcttcctkgtcccgtttatgcttaacatcacagaggcacacctyggtgcctgggatggcagagtgttctcaaacccttacagagctgctgggatgtgcagtgccagtgctggtgcacatgtctggggtttgctatgtgctcctkcctccttatgccaccggaggcttytgacaacccagcgttgagtctcacgggtcccagctgaaaggcctgattcagagctgccctgtccattcacctgaaggcagggctggctaccagcttcccagcaccactggcagcaagagcctgctgaaaacccagccagagccatttccaaggctgctgcatcccmccgagccttc

SEQ ID NO: 25036 - DNA, 600 bp, Chicken  19866894240025_3
gggttttctggaagatgcagaaggggctgtgttgagaccatcttttctcctccataatttggtgtatttctttccttgctgcattccaatctgttcctgcagcgctgctcccagcagcgctgagcccacagggagcacgaggcagcgtcctcctctgcttcctkgtcccgtttatgcttaacatcacagaggcacacctyggtgcctgggatggcagagtgttctcaaacccttacagagctgctgggatgtgcagtgccagtgctggtgcacatgtctggggtttgctatgtgctcctkcctccttatgccaccggaggcttytgacaacccagcgttgagtctcacgggtcccagctgaaaggcctgattcagagctgccctgtccattcacctgaaggcagggctggctaccagcttcccagcaccactggcagcaagagcctgctgaaaacccagccagagccatttccaaggctgctgcatcccmccgagccttcagggagaccacgggggcatccaagggggtcgccgtggatgcaacaacaaaatcgacacacgtttggcaaaggattttagagacgtgtttgtgacctctgc

SEQ ID NO: 25037 - DNA, 600 bp, Chicken  19866894240025_4
ggctgtgttgagaccatcttttctcctccataatttggtgtatttctttccttgctgcattccaatctgttcctgcagcgctgctcccagcagcgctgagcccacagggagcacgaggcagcgtcctcctctgcttcctkgtcccgtttatgcttaacatcacagaggcacacctyggtgcctgggatggcagagtgttctcaaacccttacagagctgctgggatgtgcagtgccagtgctggtgcacatgtctggggtttgctatgtgctcctkcctccttatgccaccggaggcttytgacaacccagcgttgagtctcacgggtcccagctgaaaggcctgattcagagctgccctgtccattcacctgaaggcagggctggctaccagcttcccagcaccactggcagcaagagcctgctgaaaacccagccagagccatttccaaggctgctgcatcccmccgagccttcagggagaccacgggggcatccaagggggtcgccgtggatgcaacaacaaaatcgacacacgtttggcaaaggattttagagacgtgtttgtgacctctgctgaccgtggtctgacacttctgtg

SEQ ID NO: 25038 - DNA, 600 bp, Chicken  19866894240025_5
ggcacacctyggtgcctgggatggcagagtgttctcaaacccttacagagctgctgggatgtgcagtgccagtgctggtgcacatgtctggggtttgctatgtgctcctkcctccttatgccaccggaggcttytgacaacccagcgttgagtctcacgggtcccagctgaaaggcctgattcagagctgccctgtccattcacctgaaggcagggctggctaccagcttcccagcaccactggcagcaagagcctgctgaaaacccagccagagccatttccaaggctgctgcatcccmccgagccttcagggagaccacgggggcatccaagggggtcgccgtggatgcaacaacaaaatcgacacacgtttggcaaaggattttagagacgtgtttgtgacctctgctgaccgtggtctgacacttctgtgctgctcactgcagtgctgctgtgtgcttgtgcagcgtgtgcttttgaccaccctgctcaacagaggccagagcagctctggtgtccaggggttgctgagggtggtgatggccattccagctcccggcccgcctcaggagcggtgaatccttttgtgtgcaggaggc

SEQ ID NO: 25039 - DNA, 510 bp, Chicken  19866894240025_6
tgctcactgcagtgctgctgtgtgcttgtgcagcgtgtgcttttgaccaccctgctcaacagaggccagagcagctctggtgtccaggggttgctgagggtggtgatggccattccagctcccggcccgcctcaggagcggtgaatccttttgtgtgcaggaggcagcattccctgttctgcattacgtgcaggaacgctgcttggatcgggaaggcttacccttaaactattacatcacctgagaactgaaggaggtagagatcacctcggggggagcagcacacagagagctgccagygctgacattgccaagagaggagctgtggccgtgaggccagcactgagccagcaccagcaggagtctgaccacctgtgttggctgtgccggcaccacgctgcatcccacgagagcagcaccgacaccttcacactgctcttcccaacgggctgcgggggggtcacagtgtgcgggacacatcctgaccaaatcccacccgatcccgtttgg

SEQ ID NO: 25040 - DNA, 599 bp, Chicken  19866894240027_1
  misc_feature (1)..(180): n is any nucleotide
nnnnnnnnnnnnnnnnnnnnnnnnnnnnnnnnnnnnnnnnnnnnnnnnnnnnnnnnnnnnnnnnnnnnnnnnnnnnnnnnnnnnnnnnnnnnnnnnnnnnnnnnnnnnnnnnnnnnnnnnnnnnnnnnnnnnnnnnnnnnnnnnnnnnnnnnnnnnnnnnnnnnnnnnnnnnnnnnnnnnacttataactcaagacttagcgaagtttaaaattttgaaatgttcaggttggctaatcccctccagggctttacattgctggtaaaacttatgacagcaaaaagacttggattagaagtygttaaaactccattttgtctgtaggataaaactgatgggaaatcaccaaggggaaagaaatttctgaaaaattccagttattacacaggtaacggtacaaatccactctgctttggcctcttttgtagtttaaatatgtacttcaatgtgcacctgaaacagtgcatgagtataaacacataggtaaaaagtagccagagagtagaaagaggagttgtgttaggaaacatgtctgagacattgctggctttgtttgcacatacatcacagcacagccacacaaaaaaaagcatgcggac

SEQ ID NO: 25041 - DNA, 600 bp, Chicken  19866894240027_2
gaaatcaccaaggggaaagaaatttctgaaaaattccagttattacacaggtaacggtacaaatccactctgctttggcctcttttgtagtttaaatatgtacttcaatgtgcacctgaaacagtgcatgagtataaacacataggtaaaaagtagccagagagtagaaagaggagttgtgttaggaaacatgtctgagacattgctggctttgtttgcacatacatcacagcacagccacacaaaaaaaagcatgcggacaggttgcagttctctacaaacagttccagttcccctgcygtccatcgagcataggaattggctcagggtcccaccagctaacaaacagaattgtkatatggccttttgtcttcgaatcacacatttaaatgtagtcggctaaataatttcttatacgcatagacaccaagctgcctttttcagaccacactgcagatgctgtggacgttaaagaatgtgaagtatcagtgatcatgcccgtacaggcagagggactgctgcaccgcaggagaaagaacatggcaagcagcctccctgctatattaatggcaatgaaccaggacatgactgaacaaaaaa

SEQ ID NO: 25042 - DNA, 572 bp, Chicken  19866894240027_3
gtacaaatccactctgctttggcctcttttgtagtttaaatatgtacttcaatgtgcacctgaaacagtgcatgagtataaacacataggtaaaaagtagccagagagtagaaagaggagttgtgttaggaaacatgtctgagacattgctggctttgtttgcacatacatcacagcacagccacacaaaaaaaagcatgcggacaggttgcagttctctacaaacagttccagttcccctgcygtccatcgagcataggaattggctcagggtcccaccagctaacaaacagaattgtkatatggccttttgtcttcgaatcacacatttaaatgtagtcggctaaataatttcttatacgcatagacaccaagctgcctttttcagaccacactgcagatgctgtggacgttaaagaatgtgaagtatcagtgatcatgcccgtacaggcagagggactgctgcaccgcaggagaaagaacatggcaagcagcctccctgctatattaatggcaatgaaccaggacatgactgaacaaaaaaaataatgttcaatcaggatttctttttt

SEQ ID NO: 25043 - DNA, 600 bp, Chicken  19866894240029_1
tagcatcgatcaacacccccaggtccatttcctctacacagtcttccagtcactctgccccaagcctgtagcgttgcctagggttattgtggccaaagtgcgggacccagcatttggtcttgttgaatcccatctcattggcttcagcccagctatccagcctgtccagatccctctgtagggccttgctactcccaggcagatcaacacttcctgccaacttggtgtcatctgcagacttactgagggtgcactcaatgccctcatccaggtcatcagtaaagatattaaacaggacargccccagcaccgacccctggggaacaccactcgtgaccagttgccagctggatttaactccatgcaccaccactctctgggcctggccctccagccagttccttactcagccaagagtgtacctgtccaagccacagactgccagcttctgcaggagaatactgtgggagacagtgtcaaaggctttgctgaaatctagatagactacatcaacagccttttcctcatccaccagatgggtcactagatcataggaggaaatcaggttggtcaagcaggacctgccctttgtgaacccat

SEQ ID NO: 25044 - DNA, 600 bp, Chicken  19866894240036_1
aagccagtctgagaggttcttccttttcttattcctttacctgttcccactctctgctatgcttctcctacttctttcccagatgtacttatacaacaatttgtacagttatgttgccaaccacattgttgaaatcatccaaatcccactttagaagtagtagtggttttttgtttttgtttttaattcctctatatccttccggtagttgtgatcagagcacagcctaactcagtcccacagtccctccagtcagcacagctgagggcactaaactgcagtggtgagccagttgagttygcaaagaagkgaaccaagcatgccagtatagggtactaatgaggtcttttgcctaaagaagctgtggtgccccatccctggaggtgctgaaggccaggttggatcgggccctgggcagctgacctggcgggggcagccctgcccacagtggatgggttggagcttttaatctttaaattcctttccatctgaagccattctgtgattctatgactctctttcacacggcttcgctattagaggagatgaatgtcttaagtttgtttctagtaaagactgcagaraatgcaaactgataat

SEQ ID NO: 25045 - DNA, 600 bp, Chicken  19866894240036_2
gagaggttcttccttttcttattcctttacctgttcccactctctgctatgcttctcctacttctttcccagatgtacttatacaacaatttgtacagttatgttgccaaccacattgttgaaatcatccaaatcccactttagaagtagtagtggttttttgtttttgtttttaattcctctatatccttccggtagttgtgatcagagcacagcctaactcagtcccacagtccctccagtcagcacagctgagggcactaaactgcagtggtgagccagttgagttygcaaagaagkgaaccaagcatgccagtatagggtactaatgaggtcttttgcctaaagaagctgtggtgccccatccctggaggtgctgaaggccaggttggatcgggccctgggcagctgacctggcgggggcagccctgcccacagtggatgggttggagcttttaatctttaaattcctttccatctgaagccattctgtgattctatgactctctttcacacggcttcgctattagaggagatgaatgtcttaagtttgtttctagtaaagactgcagaraatgcaaactgataattttcagcaag

SEQ ID NO: 25046 - DNA, 600 bp, Chicken  19866894240036_3
tgagccagttgagttygcaaagaagkgaaccaagcatgccagtatagggtactaatgaggtcttttgcctaaagaagctgtggtgccccatccctggaggtgctgaaggccaggttggatcgggccctgggcagctgacctggcgggggcagccctgcccacagtggatgggttggagcttttaatctttaaattcctttccatctgaagccattctgtgattctatgactctctttcacacggcttcgctattagaggagatgaatgtcttaagtttgtttctagtaaagactgcagaraatgcaaactgataattttcagcaagggatgaactagaaattcaaaccactgtaagtatgagtctctacagtgacaaacaaaaggctaagagcttcaaggtggcagctgtgttttcagctttgatcatagaaattgagagttggtgccagttgggaaccataaagcctttcctgggatcaacgaagaaacaattttgctgtaggaacttgtgggtcttatttgctagacctgactgatctgcgctatgtctgttacctgcaggtataacgaagaacactttctaggtttgaaatgaaaaa

SEQ ID NO: 25047 - DNA, 600 bp, Chicken  19866894240038_1
ttcctcacactatagctccgacattgagtacccatttcctccagagtgatttcctcactgtcataacagcatttaagtatatgaagttccctatagcaccaaagaaaagggaagaaaataaaattagccttcatatcttacgtcttttatagaaatatctttcaatccaaacagaaaacaactaatggattaccttaaaattctcactttacttcaggtgtagattttcacaaagcatgttattgtgaatatagatcttaacatttttagagaagggagataatggatttcacccatggraacataagccaggagccragaatggccacaacacatcacctgcagtgacgagagatggccctacagggtataagcacagtatggaaagccaaaggctgataactagagctgtttgacatcccaaacatggcaagccatgagctaggacctcagacctttcaggtgtrtaggagcaaaatgaggtactgccaatggcmggactggagacaaaactacaatatgggtgcaaaatccatccaagaaaaagctcctatattgatctgaggggctcatccaggagacaagatacctggactgcag

SEQ ID NO: 25048 - DNA, 600 bp, Chicken  19866894240038_2
cgacattgagtacccatttcctccagagtgatttcctcactgtcataacagcatttaagtatatgaagttccctatagcaccaaagaaaagggaagaaaataaaattagccttcatatcttacgtcttttatagaaatatctttcaatccaaacagaaaacaactaatggattaccttaaaattctcactttacttcaggtgtagattttcacaaagcatgttattgtgaatatagatcttaacatttttagagaagggagataatggatttcacccatggraacataagccaggagccragaatggccacaacacatcacctgcagtgacgagagatggccctacagggtataagcacagtatggaaagccaaaggctgataactagagctgtttgacatcccaaacatggcaagccatgagctaggacctcagacctttcaggtgtrtaggagcaaaatgaggtactgccaatggcmggactggagacaaaactacaatatgggtgcaaaatccatccaagaaaaagctcctatattgatctgaggggctcatccaggagacaagatacctggactgcagggcaaaggtcaatccagg

SEQ ID NO: 25049 - DNA, 600 bp, Chicken  19866894240038_3
caaacagaaaacaactaatggattaccttaaaattctcactttacttcaggtgtagattttcacaaagcatgttattgtgaatatagatcttaacatttttagagaagggagataatggatttcacccatggraacataagccaggagccragaatggccacaacacatcacctgcagtgacgagagatggccctacagggtataagcacagtatggaaagccaaaggctgataactagagctgtttgacatcccaaacatggcaagccatgagctaggacctcagacctttcaggtgtrtaggagcaaaatgaggtactgccaatggcmggactggagacaaaactacaatatgggtgcaaaatccatccaagaaaaagctcctatattgatctgaggggctcatccaggagacaagatacctggactgcagggcaaaggtcaatccaggagctgtggccagaggctgggctgagcataggcactactagaacggcacagaggagggatggttgctcaggcttgagcttaaatgagacactgggctttgtgggaggctccgggagtctttgaaagtcatataaaagccagagttttgaa

SEQ ID NO: 25050 - DNA, 600 bp, Chicken  19866894240038_4
aaattctcactttacttcaggtgtagattttcacaaagcatgttattgtgaatatagatcttaacatttttagagaagggagataatggatttcacccatggraacataagccaggagccragaatggccacaacacatcacctgcagtgacgagagatggccctacagggtataagcacagtatggaaagccaaaggctgataactagagctgtttgacatcccaaacatggcaagccatgagctaggacctcagacctttcaggtgtrtaggagcaaaatgaggtactgccaatggcmggactggagacaaaactacaatatgggtgcaaaatccatccaagaaaaagctcctatattgatctgaggggctcatccaggagacaagatacctggactgcagggcaaaggtcaatccaggagctgtggccagaggctgggctgagcataggcactactagaacggcacagaggagggatggttgctcaggcttgagcttaaatgagacactgggctttgtgggaggctccgggagtctttgaaagtcatataaaagccagagttttgaattgattgtctagtgaagacagtatgaaatg

SEQ ID NO: 25051 - DNA, 600 bp, Chicken  19866894240038_5
ttgtgaatatagatcttaacatttttagagaagggagataatggatttcacccatggraacataagccaggagccragaatggccacaacacatcacctgcagtgacgagagatggccctacagggtataagcacagtatggaaagccaaaggctgataactagagctgtttgacatcccaaacatggcaagccatgagctaggacctcagacctttcaggtgtrtaggagcaaaatgaggtactgccaatggcmggactggagacaaaactacaatatgggtgcaaaatccatccaagmaaaagctcctatattgatctgaggggctcatccaggagacaagatacctggactgcagggcaaaggtcaatccaggagctgtggccagaggctgggctgagcataggcactactagaacggcacagaggagggatggttgctcaggcttgagcttaaatgagacactgggctttgtgggaggctccgggagtctttgaaagtcatataaaagccagagttttgaattgattgtctagtgaagacagtatgaaatgtttttttcacccacatttagtatgtgcactctgggatacgacagt

SEQ ID NO: 25052 - DNA, 600 bp, Chicken  19866894240039_1
cctcagtccaagagtacatcctgggcatagatacgttgtggggtctggctctccagacaactgtgggagagtacagactttgacaaaggtgcattagtgcctgggctgtacaggcaatattgagaggccatgtgaagcatgagcctatttgtctgccgaaactgcaccagattactaatgtaagacaatatagattcccgggtggacaagatgaaatatcaagcacggtgcaggaattagaagaagttgggattacaagacctgcacatagcccatataattcccccatatgtccagtgygaaagttggatggaacatggagaatgttggtggattatagagaattaaataaggttgtgcagccgtacccaacgttgcctccctaatggacatattgagtagggagataaaaacctaccattgtgtcctagatttagcaaatgcgttcttcagtattctagttgctgaagaattgcaagatcagtttgtgtttacatggggaggcaggcagtggacctttcaggtcctgccacaggggtacgtgcatttgccatcatattgccataatctagtggtgtgtgacctggctaattggaaaaa

SEQ ID NO: 25053 - DNA, 599 bp, Chicken  19866894240043_1
  misc_feature (1)..(35): n is any nucleotide
nnnnnnnnnnnnnnnnnnnnnnnnnnnnnnnnnnngcataaaatgccactgatttctagttcactctctcataactttggcctttcagctgctctgccttctagattccttctttcagacaatacagagctctacacatgattatgctcacttcagtcttcctctccaaaaatgatgccatacaaaaggaacatatagtaactgtgcattgcagtagatgtcgacatttatcaaatcaaaagatcaattctaaccaggcaaaactgaggtcaatatttgccttctggaataattaatctyggcatagatgaacacaagtaaaatgttatcgacacatcctgaattgctaccaattagctggagagttctccattacagtcaagaactgraaaggatttagccccttgaaaccaggatcctgaagaacaaggaatttagctctctagtcaaaactatttaccaggagaatgaggtggaaagctgaggtttcatatgctgactggctcagtgataaataatcatttttactgactttggcaacagtcactcaggatattcttaatagaacacacactctggctgcttagcattggtytgga

SEQ ID NO: 25054 - DNA, 600 bp, Chicken  19866894240043_2
tgctctgccttctagattccttctttcagacaatacagagctctacacatgattatgctcacttcagtcttcctctccaaaaatgatgccatacaaaaggaacatatagtaactgtgcattgcagtagatgtcgacatttatcaaatcaaaagatcaattctaaccaggcaaaactgaggtcaatatttgccttctggaataattaatctyggcatagatgaacacaagtaaaatgttatcgacacatcctgaattgctaccaattagctggagagttctccattacagtcaagaactgraaaggatttagccccttgaaaccaggatcctgaagaacaaggaatttagctctctagtcaaaactatttaccaggagaatgaggtggaaagctgaggtttcatatgctgactggctcagtgataaataatcatttttactgactttggcaacagtcactcaggatattcttaatagaacacacactctggctgcttagcattggtytggacctccgtacttttgatagcacatgagaaggaaaaggagatcaggaacagagagaaaaaataaggaaataaatatttatcccaaaattaga

SEQ ID NO: 25055 - DNA, 600 bp, Chicken  19866894240043_3
atctyggcatagatgaacacaagtaaaatgttatcgacacatcctgaattgctaccaattagctggagagttctccattacagtcaagaactgraaaggatttagccccttgaaaccaggatcctgaagaacaaggaatttagctctctagtcaaaactatttaccaggagaatgaggtggaaagctgaggtttcatatgctgactggctcagtgataaataatcatttttactgactttggcaacagtcactcaggatattcttaatagaacacacactctggctgcttagcattggtytggacctccgtacttttgatagcacatgagaaggaaaaggagatcaggaacagagagaaaaaataaggaaataaatatttatcccaaaattagagttaccagagttctgatttctgagacaaaaagtaacataacccctccttgtgttttctgtttgtttttaaacagcaaattgtctttaaatccaacaaaacaaatgcagttttctggagacagggaaaggaaacctcagaatgttaaatcatctgatattatttaaaaagttgttccccaagagaaataaaatgcaaaaaccaaaca

SEQ ID NO: 25056 - DNA, 600 bp, Chicken  19866894240043_4
gagcctttggaagatgacgcagtgtttgttgtgcaaggtgccctgctccgctcctgcctaggagaacctgagctgcaacgcctgggagacgcagggcagctctcacacctgcacactgcccagcacagggagcacactttcctcggcagcagaaaagcagcagccggacctctgactcctgctggacacgtggctggccagaagaactgggaatgggcacaggaaaacggaacaatcctggactgaccattttttcactgcactactggtacacaatgctggacagacagacgcacagcrgcttcagcactctcttgcataaaaaaaaatctgctctgtggttgcggtggaaggtggcagccagttcttgtctgtcggttaagacgaatctgatggactatacagttttattccgtcaagaataaggctgcagctgttcatttggccaaatgatagagatgaaaacasaacaaatccaaaacaagaaaaggagagtggctggctgctgctgctccttctttgttgttaattgagtcttcacagtgctcctagcttcatggctggctgagtggatggctctttgttttcatttaattctat

SEQ ID NO: 25057 - DNA, 600 bp, Chicken  19866894240043_5
cctctgactcctgctggacacgtggctggccagaagaactgggaatgggcacaggaaaacggaacaatcctggactgaccattttttcactgcactactggtacacaatgctggacagacagacgcacagcrgcttcagcactctcttgcataaaaaaaaatctgctctgtggttgcggtggaaggtggcagccagttcttgtctgtcggttaagacgaatctgatggactatacagttttattccgtcaagaataaggctgcagctgttcatttggccaaatgatagagatgaaaacasaacaaatccaaaacaagaaaaggagagtggctggctgctgctgctccttctttgttgttaattgagtcttcacagtgctcctagcttcatggctggctgagtggatggctctttgttttcatttaattctattttacactgaaatttcgtaggttgttccaccaactccagacaccttcttaacatttgagtgtctagcagggctgaccgggtgttccttgggaacttgatgttgagcccagcctagatattccttttggctgtccatttattttactggggcggtgtcttcatctgtat

SEQ ID NO: 25058 - DNA, 600 bp, Chicken  19866894240049_1
atgtaatgtcatgaacaaatgctctcttgttgagctctaagagagaaattaagcaaaaatattctcaatttctacgaataatcttaaaaagggaaatgcatattgtagcatatagtgctataggacaaacaaattgcaagtttcttgctgctatcaaaacaagttgaaatttggatttcagcctaagtgggaaatatcagatcttctacacttagaaaatatgttttagtatattctaaattagcttcctttattctgattttctattcctcttgatatctacaaaactggagttagttyctaaaggggaatttctcaagtagtggaaatataaagattacccaaattacattatttcaattttttacatttttggttttttgttttttgtgttgtttttgtttgtttgtttgtctttttgtaggacaatctctccaaattcagtaagttcatcaatatcatttgcctcacactactattatattttggacctgatttcctttaatgttatgaatgcaacagtaaatatcttgaatgcaatagttttctagggaaccaatcagtttcttactgattaaaaatctttggtaatcttcattt

SEQ ID NO: 25059 - DNA, 600 bp, Chicken  19866894240058_1
tgcatctgatcattaagaaaaaaaattctttttttccactttcagaggtttttcgtcctggataatggactgttaaaatattccaagtcaccaattgatgtaagtaaagttgaagactattttaaagttagtgttggaggctcattctcatgctaggcatgtttattccagcatactcatgaaagtcgtcggtcgattcaaagagatatttggatatggaaagcatgtaaggttttggttgagttatattcccccagattctgccttttattacttctataaaaacaggaggtgtattamttagtttatttaatgaagatgtttgaaagattagcctgaccatgtattgtacctttttaattttrgtgtcaggaagagctgattattttgagatatgtggataggacagaaaagtgattgtgatgcactcgagatataaggggtagtattaaattakattagttaccaataaccatcgagttgtatcagcagggagctaagtgctgtctaattttctcagcttctcacttaacctgtagttatttgctagtgtgaaccaccacactttccgtttggagttggctctgcacttgtgagata

SEQ ID NO: 25060 - DNA, 600 bp, Chicken  19866894240058_2
tggactgttaaaatattccaagtcaccaattgatgtaagtaaagttgaagactattttaaagttagtgttggaggctcattctcatgctaggcatgtttattccagcatactcatgaaagtcgtcggtcgattcaaagagatatttggatatggaaagcatgtaaggttttggttgagttatattcccccagattctgccttttattacttctataaaaacaggaggtgtattamttagtttatttaatgaagatgtttgaaagattagcctgaccatgtattgtacctttttaattttrgtgtcaggaagagctgattattttgagatatgtggataggacagaaaagtgattgtgatgcactcgagatataaggggtagtattaaattakattagttaccaataaccatcgagttgtatcagcagggagctaagtgctgtctaattttctcagcttctcacttaacctgtagttatttgctagtgtgaaccaccacactttccgtttggagttggctctgcacttgtgagatattttctcatctataaaagaaggaagtttttagattgagtacaggttttaacttttatgtgtcgtt

SEQ ID NO: 25061 - DNA, 549 bp, Chicken  19866894240058_3
catgtttattccagcatactcatgaaagtcgtcggtcgattcaaagagatatttggatatggaaagcatgtaaggttttggttgagttatattcccccagattctgccttttattacttctataaaaacaggaggtgtattamttagtttatttaatgaagatgtttgaaagattagcctgaccatgtattgtacctttttaattttrgtgtcaggaagagctgattattttgagatatgtggataggacagaaaagtgattgtgatgcactcgagatataaggggtagtattaaattakattagttaccaataaccatcgagttgtatcagcagggagctaagtgctgtctaattttctcagcttctcacttaacctgtagttatttgctagtgtgaaccaccacactttccgtttggagttggctctgcacttgtgagatattttctcatctataaaagaaggaagtttttagattgagtacaggttttaacttttatgtgtcgttatattaagatattcctaaaaaaggataacatttcagcacca

SEQ ID NO: 25062 - DNA, 572 bp, Chicken  19866894240060_1
tacagcaatctcctgtgttgctgtaacagcaaaatacaaagaactcaactaccagaccttagtaatattctttcatgcgtatgtaaaaattcaagaaccacaaaataagaacaaaaagtagtgaaatccacagtcctacaagtaatccagtttacccaaagtctgggtagtaccagctgatctcagagaatcccatcaaaagcatgggctaatggctgagccgtatgaatggagcacccagcctcccagcaactgatgtggttgatatcagttccaagtgcagctgatactggtgccccmgtgatcaaggaaaactatcagggaagtagtcatgggcagctcatagaaaacccagccagctgcaaagaaggaaaggctttggggtggccgaatgaagacaaaacaagggtgttctaactgcacagaaccaggaaaagtaaaaaaaaaaaaaaagtagtagcaactagcaagagcagtttaagaaacaaacctaaaaatgaagtagacaactcatttcagaagaacacaaaggacaggtgcctccctgaactttgaaggacaggggcacctag

SEQ ID NO: 25063 - DNA, 600 bp, Chicken  19866894240064_1
gttaataaagagtctttttgagacttaccttggtttatatttttttacagtgcgtgctcacctaactgtgcttttctctggcaaaatggtttctagtacggtttctgtacttctgtccttgtagctttgctgtaattacagcacctctcagttgattaaaaagctacatctcatgaatgagttcacagcttcccatcatcagtgctgttttaaaaggtgaaatctttccttatttttttattgtctgtccttgttttttctactggctcggtgagtttcttcttctctccctggggaacytcttcctgatgagcagcttctctctgtgcccattctcaggacgatcttgcctcctaaaatcacattttaggagaaacagctccctgtaattccgagctgagtcccgacttgacccagcccaacatgtttacatcatatccactcaccaacattgtaggagcccatctgtgacatctcctcacgttccaggagctctgcagccagcgtttctcagctgaaagctgggtcacaaccctgcccgcagaagagcctgtgtcctgtgggcaaccccagtgacccaaaccagtgccaaggaacctt

SEQ ID NO: 25064 - DNA, 599 bp, Chicken  19866894240070_1
  misc_feature (1)..(122): n is any nucleotide
nnnnnnnnnnnnnnnnnnnnnnnnnnnnnnnnnnnnnnnnnnnnnnnnnnnnnnnnnnnnnnnnnnnnnnnnnnnnnnnnnnnnnnnnnnnnnnnnnnnnnnnnnnnnnnnnnnnnnnnnnnctggctgtgtgccatgacttgcattggcttgcctggcctgtggcctcacatcaccatggctttcacatatctccagttatttgtatatctgactggggaagctgctctgtggtactatttgaatgcaagcttacacccaagcacgcgtagttcattgtagtaagaacaatactacatwaccaggcaaacagcgtgagcagagtatttaaatacattcgtttcaaaaaatattgctttatcttctgaatagatcatttcagagaataacaataacaacccattaattttagcatcaacacagaaagtattttaaaaccgctatttttttctcccaggaaataggctgcctacctcctcttttaaaggctatttttatagctgtcggtggcctggattcaggatagagttaatacttctttctccatgacgcgttagaaagaacatgctgaaactttatgaacccagaagcatattctc

SEQ ID NO: 25065 - DNA, 600 bp, Chicken  19866894240070_2
gcctacctcctcttttaaaggctatttttatagctgtcggtggcctggattcaggatagagttaatacttctttctccatgacgcgttagaaagaacatgctgaaactttatgaacccagaagcatattctctatgataaacaaaaacaaactaaaaaaaaaaaaatctctaaggactccacaactcatatggtttttaccatctggcacacagccctgaaacatggttaatctttgcaagtggtatctcatttacagaccctaatacataaaaacccatatgccagcgactcttagagrggacactcctttaagctgcagacatcaccttacagctgcatgtgagcttttactgggacaaaactttgtataatattttagatggtaaaaaatccattagctccaaaacataagagtatggatgctgtcaatgaggagacttttagtgatgatacctttctttaaaaaggtcaccaatcacactcaacacagagagctgagagctaagcaaaggcaaaacaggaggagattggatgttgagtgctttaaagataagtccagggttatctctggaaaaattaaaacaactcgcatcaaaac

SEQ ID NO: 25066 - DNA, 500 bp, Chicken  19866894240070_3
caagataccgaggttacatttgatgaataccaatcctaatgacaaatatactccatgtaaatctgagctccatgacttttggcaaggatattagcaagcagctcagaagtcctggtgcaaattaccaacatgcccataaacttctacaggcacaaatccgcctgttgaactacttcccaagcctcccatcaacaaatatataaagttgtatagaccgtttcttcaaaggtctctgtcataggccacacctggactacacataatgaagagactaaagccccaagagagctctgagcatgwagcagcatgtttctatctctstgctagcattgacaaggacactgaaaagcagaatgccctcaaataggctgattaccgtgaacaagggccgtctgcaagaattactagattttggtgccataaggcataatcagttctaccaccataagtcatacaaatgtggtaatggatccagctcatctgctctctagactcagtat

SEQ ID NO: 25067 - DNA, 479 bp, Chicken  19866894240070_4
gatgaataccaatcctaatgacaaatatactccatgtaaatctgagctccatgacttttggcaaggatattagcaagcagctcagaagtcctggtgcaaattaccaacatgcccataaacttctacaggcacaaatccgcctgttgaactacttcccaagcctcccatcaacaaatatataaagttgtatagaccgtttcttcaaaggtctctgtcataggccacacctggactacacataatgaagagactaaagccccaagagagctctgagcatgwagcagcatgtttctatctctstgctagcattgacaaggacactgaaaagcagaatgccctcaaataggctgattaccgtgaacaagggccgtctgcaagaattactagattttggtgccataaggcataatcagttctaccaccataagtcatacaaatgtggtaatggatccagctcatctgctctctagactcagtat

SEQ ID NO: 25068 - DNA, 600 bp, Chicken  19866894240073_1
caggaattcttagagatgatttgaagaatgaaacatattgctgctggtagaaaccagtgggtggaatatgggggaaatcagacaatatggaaggaagttcaaagaattcttaatacctacactgtttcataaactattcaatagttagtctgaagatatttacaccttctattctttatagatcatacaaggcaaccctcatatttcaaacaaaagagagtatataattttgcatggtcataacgatggagacagcaagtgtgaggtaaaaattagatatccaaaggaatacataaaatracttttaataaaagaggggtttaaatgtttccagagtttttcataaattatctttaatgggaaagtgaaaccttcacacatttaactatcatgtaactaccacattgttcattttatttagcgtgctatcttcttcttacttaaatacaaacgtatacaaataatacaaaaaaaaaaaaaaaacatttatgtgttattaatgaataaattaatgcttcagacaaatattccctgttacaaattagccataactaacagtattagttggaccaataaaggtatgcctacttggacctctga

SEQ ID NO: 25069 - DNA, 458 bp, Chicken  19866894240074_1
aagacatagatgttggccactgttttcaggatctgaagacacttttttttttttttttatttaagcattcatctttggtctcagtctgggtctcttaaaaagagcagtaacttaaatatatttaaaatgattgtacaatgccattagatgacaatgatgctagatagacaataagaccttgggcagatgttaggacttggctctcttaagaacttattgtttgatatacatttcttttggaaatgatacaaagtactttttatgttgactctgcaattaataaataaataatgtggaatwaaaaaaaaaattaatagaataatccaaaggttaaagggtggataagcaaggaggtaagtgaatcatagggatccaggtacaggagcaaacaacatgtttcagtgtaggcaaatatggcacatgcatgttaaaagtaaggcagacagacctacgttcag

SEQ ID NO: 25070 - DNA, 600 bp, Chicken  19866894240078_1
cactcaccatcaaacgggtccaagggatctgagagggcccaatactcttgcccatctgctaaccctatgacccagaaaccattcttaggggacagagcaactgtctcttttcgtctcacagtctcctgggcaacacccaagttccagtttcgcttctttccaacgtctacttcccagtagtgtctccccgatctgtaaccttcctttgccaacagaaaagtgtgggaatcaaatctctcgtccttgtcaggcacctttctgatcacaccagtatctgttacactcttcccatcttcagayacttgcagtctaggatgagctgtgtcagcatcaagggtgacatcaactgcaataaaaaggtaatttcttaagtactaaataacaagaggtctactgctttgagacttyctattgsttgatcctatgaatttattccctcgcctwgccttgatctccactctgttaggccctaggaaatttctttgcactaggatatctccatcttctggcaacccaagtcacctcccttctcttttgtgtctcatctgtgacatactgagagacaccagcakgcaacaatggcatgcaacatgaaggaaa

SEQ ID NO: 25071 - DNA, 600 bp, Chicken  19866894240078_2
tttcgtctcacagtctcctgggcaacacccaagttccagtttcgcttctttccaacgtctacttcccagtagtgtctccccgatctgtaaccttcctttgccaacagaaaagtgtgggaatcaaatctctcgtccttgtcaggcacctttctgatcacaccagtatctgttacactcttcccatcttcagayacttgcagtctaggatgagctgtgtcagcatcaagggtgacatcaactgcaataaaaaggtaatttcttaagtactaaataacaagaggtctactgctttgagacttyctattgsttgatcctatgaatttattccctcgcctwgccttgatctccactctgttaggccctaggaaatttctttgcactaggatatctccatcttctggcaacccaagtcacctcccttctcttttgtgtctcatctgtgacatactgagagacaccagcakgcaacaatggcatgcaacatgaaggaaaaatgtaaggagattacaagcttttgattaagraatcagtcaaacagtaagkaagtgaccagaggataagagccgtgctttggaacacaactcctctttgaacaaaacc

SEQ ID NO: 25072 - DNA, 600 bp, Chicken  19866894240078_3
tcacagtctcctgggcaacacccaagttccagtttcgcttctttccaacgtctacttcccagtagtgtctccccgatctgtaaccttcctttgccaacagaaaagtgtgggaatcaaatctctcgtccttgtcaggcacctttctgatcacaccagtatctgttacactcttcccatcttcagayacttgcagtctaggatgagctgtgtcagcatcaagggtgacatcaactgcaataaaaaggtaatttcttaagtactaaataacaagaggtctactgctttgagacttyctattgsttgatcctatgaatttattccctcgcctwgccttgatctccactctgttaggccctaggaaatttctttgcactaggatatctccatcttctggcaacccaagtcacctcccttctcttttgtgtctcatctgtgacatactgagagacaccagcakgcaacaatggcatgcaacatgaaggaaaaatgtaaggagattacaagcttttgattaagraatcagtcaaacagtaagkaagtgaccagaggataagagccgtgctttggaacacaactcctctttgaacaaaaccagaatca

SEQ ID NO: 25073 - DNA, 600 bp, Chicken  19866894240078_4
cagtttcgcttctttccaacgtctacttcccagtagtgtctccccgatctgtaaccttcctttgccaacagaaaagtgtgggaatcaaatctctcgtccttgtcaggcacctttctgatcacaccagtatctgttacactcttcccatcttcagayacttgcagtctaggatgagctgtgtcagcatcaagggtgacatcaactgcaataaaaaggtaatttcttaagtactaaataacaagaggtctactgctttgagacttyctattgsttgatcctatgaatttattccctcgcctwgccttgatctccactctgttaggccctaggaaatttctttgcactaggatatctccatcttctggcaacccaagtcacctcccttctcttttgtgtctcatctgtgacatactgagagacaccagcakgcaacaatggcatgcaacatgaaggaaaaatgtaaggagattacaagcttttgattaagraatcagtcaaacagtaagkaagtgaccagaggataagagccgtgctttggaacacaactcctctttgaacaaaaccagaatcacaaaatcttcttgyaagggaatgaggaat

SEQ ID NO: 25074 - DNA, 600 bp, Chicken  19866894240078_5
atctgttacactcttcccatcttcagayacttgcagtctaggatgagctgtgtcagcatcaagggtgacatcaactgcaataaaaaggtaatttcttaagtactaaataacaagaggtctactgctttgagacttyctattgsttgatcctatgaatttattccctcgcctwgccttgatctccactctgttaggccctaggaaatttctttgcactaggatatctccatcttctggcaacccaagtcacctcccttctcttttgtgtctcatctgtgacatactgagagacaccagcakgcaacaatggcatgcaacatgaaggaaaaatgtaaggagattacaagcttttgattaagraatcagtcaaacagtaagkaagtgaccagaggataagagccgtgctttggaacacaactcctctttgaacaaaaccagaatcacaaaatcttcttgyaagggaatgaggaataattccagtcaccagggtttcatgataaattcagtagctttgtatacgcttagcagtagtattgctctagctgaacacccggaagcaaaattctccttcttataaagaccaaatctctacgtttttag

SEQ ID NO: 25075 - DNA, 600 bp, Chicken  19866894240078_6
aagggtgacatcaactgcaataaaaaggtaatttcttaagtactaaataacaagaggtctactgctttgagacttyctattgsttgatcctatgaatttattccctcgcctwgccttgatctccactctgttaggccctaggaaatttctttgcactaggatatctccatcttctggcaacccaagtcacctcccttctcttttgtgtctcatctgtgacatactgagagacaccagcakgcaacaatggcatgcaacatgaaggaaaaatgtaaggagattacaagcttttgattaagraatcagtcaaacagtaagkaagtgaccagaggataagagccgtgctttggaacacaactcctctttgaacaaaaccagaatcacaaaatcttcttgyaagggaatgaggaataattccagtcaccagggtttcatgataaattcagtagctttgtatacgcttagcagtagtattgctctagctgaacacccggaagcaaaattctccttcttataaagaccaaatctctacgtttttagaagaagcaattctggttttgtatcctagaagaacaaaaaattattggagacatttctagg

SEQ ID NO: 25076 - DNA, 598 bp, Chicken  19866894240078_7
ataaaaaggtaatttcttaagtactaaataacaagaggtctactgctttgagacttyctattgsttgatcctatgaatttattccctcgcctwgccttgatctccactctgttaggccctaggaaatttctttgcactaggatatctccatcttctggcaacccaagtcacctcccttctcttttgtgtctcatctgtgacatactgagagacaccagcakgcaacaatggcatgcaacatgaaggaaaaatgtaaggagattacaagcttttgattaagraatcagtcaaacagtaagkaagtgaccagaggataagagccgtgctttggaacacaactcctctttgaacaaaaccagaatcacaaaatcttcttgyaagggaatgaggaataattccagtcaccagggtttcatgataaattcagtagctttgtatacgcttagcagtagtattgctctagctgaacacccggaagcaaaattctccttcttataaagaccaaatctctacgtttttagaagaagcaattctggttttgtatcctagaagaacaaaaaattattggagacatttctaggacagcaaatggataatt

SEQ ID NO: 25077 - DNA, 520 bp, Chicken  19866894240078_8
ttattccctcgcctwgccttgatctccactctgttaggccctaggaaatttctttgcactaggatatctccatcttctggcaacccaagtcacctcccttctcttttgtgtctcatctgtgacatactgagagacaccagcakgcaacaatggcatgcaacatgaaggaaaaatgtaaggagattacaagcttttgattaagraatcagtcaaacagtaagkaagtgaccagaggataagagccgtgctttggaacacaactcctctttgaacaaaaccagaatcacaaaatcttcttgyaagggaatgaggaataattccagtcaccagggtttcatgataaattcagtagctttgtatacgcttagcagtagtattgctctagctgaacacccggaagcaaaattctccttcttataaagaccaaatctctacgtttttagaagaagcaattctggttttgtatcctagaagaacaaaaaattattggagacatttctaggacagcaaatggataatt

SEQ ID NO: 25078 - DNA, 599 bp, Chicken  19866894240080_1
  misc_feature (1)..(56): n is any nucleotide
nnnnnnnnnnnnnnnnnnnnnnnnnnnnnnnnnnnnnnnnnnnnnnnnnnnnnnnnaaaaaaaaaaactggcaaagtagttgttggagggaagcaaatgcaaagatactgcacgtgcttcattcgccccaggagccagggactcgggcaagtggtgcagacggtgtggaagaggggtaagcagagataacacagtgaagtgaacaggcagccctgagaaacaaacactgaagcgtttatatcatcacatttttgtgctatatcctttcttgctgcaggaatcatttatagcagaacagamcgacaaagagctgccatcacaggccctagcctgtcacagcactgaatgtgtaaatgccttaaaagaaacacttcataaaaggcagcaggtatttcttttctgcctctcagcaaaactgtggtgaatgtgtcagtgctcaaataacagagagttatactaatgataagtaaagacaaaggtctcaccccagtgtgctcctgagatcttcctgacaggaggcacaccagatctacgagtagctttttcatctgaaactccttttcaacactttttcagacatttcatacatttcctttacc

SEQ ID NO: 25079 - DNA, 600 bp, Chicken  19866894240081_1
gttaggttgttgtagctttgggaactattaatgcaggaagaaagaacagtgtagagcaaactagtctcaaaatcaaagcaggggcttggggaaaaagctgttttcatatgtcttttcctgtgcatgtgaaaaggaatgtattttctaatacattgactatttctgctattaatatatatatatatatatgtatatataaatcttttcaggtagtccagaagggcagatgcaagaccttgagtttctacagactacatacaaacaaaacaaaggtaaaatggtatattaaaaaggtgacaygrtatcttataagcaatataaacagamtaaaagagtggattttgaagcaatgatgccaaagattgtgactgaaaacacagcatagttttgtggactggtttgagctgcaggcccaggtctcccctttcctggttacatattgatctaccaaacagaaaagtaggttttaatctctactatcattttaaaacatcccaaaggaataacttggatcccaagggttagcaagaagtttgactgtgaagcatggccttcctcttgccagaactagatgttctagtttggtacaagtttaggaaa

SEQ ID NO: 25080 - DNA, 600 bp, Chicken  19866894240081_2
taggttgttgtagctttgggaactattaatgcaggaagaaagaacagtgtagagcaaactagtctcaaaatcaaagcaggggcttggggaaaaagctgttttcatatgtcttttcctgtgcatgtgaaaaggaatgtattttctaatacattgactatttctgctattaatatatatatatatatatgtatatataaatcttttcaggtagtccagaagggcagatgcaagaccttgagtttctacagactacatacaaacaaaacaaaggtaaaatggtatattaaaaaggtgacaygrtatcttataagcaatataaacagamtaaaagagtggattttgaagcaatgatgccaaagattgtgactgaaaacacagcatagttttgtggactggtttgagctgcaggcccaggtctcccctttcctggttacatattgatctaccaaacagaaaagtaggttttaatctctactatcattttaaaacatcccaaaggaataacttggatcccaagggttagcaagaagtttgactgtgaagcatggccttcctcttgccagaactagatgttctagtttggtacaagtttaggaaatg

SEQ ID NO: 25081 - DNA, 600 bp, Chicken  19866894240081_3
ttaatgcaggaagaaagaacagtgtagagcaaactagtctcaaaatcaaagcaggggcttggggaaaaagctgttttcatatgtcttttcctgtgcatgtgaaaaggaatgtattttctaatacattgactatttctgctattaatatatatatatatatatgtatatataaatcttttcaggtagtccagaagggcagatgcaagaccttgagtttctacagactacatacaaacaaaacaaaggtaaaatggtatattaaaaaggtgacaygrtatcttataagcaatataaacagamtaaaagagtggattttgaagcaatgatgccaaagattgtgactgaaaacacagcatagttttgtggactggtttgagctgcaggcccaggtctcccctttcctggttacatattgatctaccaaacagaaaagtaggttttaatctctactatcattttaaaacatcccaaaggaataacttggatcccaagggttagcaagaagtttgactgtgaagcatggccttcctcttgccagaactagatgttctagtttggtacaagtttaggaaatgaaagtgaacttcaaactgctggaak

SEQ ID NO: 25082 - DNA, 594 bp, Chicken  19866894240081_4
taaaagagtggattttgaagcaatgatgccaaagattgtgactgaaaacacagcatagttttgtggactggtttgagctgcaggcccaggtctcccctttcctggttacatattgatctaccaaacagaaaagtaggttttaatctctactatcattttaaaacatcccaaaggaataacttggatcccaagggttagcaagaagtttgactgtgaagcatggccttcctcttgccagaactagatgttctagtttggtacaagtttaggaaatgaaagtgaacttcaaactgctggaakagccattcacaatattacctactggctagttttatttcttcccctcaccatggctgatgagcattcaaaagacccagctcatcatatccaggtccaaaaaaataaacaaaaagccctcacctttctaagtcaagactgattgctctattgtctgaatcaagcatggccatattggagtggatacgtacggctctactcctgtggtttgtgaccatccagaagtagacagctcagctgacatctatgctggcaataatgagattaactgctgcataaaactgcctacgaaccaaa

SEQ ID NO: 25083 - DNA, 600 bp, Chicken  19866894240093_1
ctaaagataggttaactctgtagtgactgctcacctgacttgcttggaacaagctaacgtgggtatttgcaactggaaaagttcagtagcacagaggctgagggttatgaaatttgctaaagaatccttgtgtgtactcaggcatttctcttgctcttgagttgtggtgcttaggtgacagctaacagtgccacagatacctaggttggacgtatgagtctgtcagttttgtaaccataatttctgataaatgaagtgattattctctaattttgcacaagtgtttcaaataggaaaaawtaagttagagcttcaaagtgttatacctggaaacacaatagggctgtgactacactcttgattgttctgtaatcagacccaaattgcagatttctttattaagaatccttagcagggaataatgttgtaaagtcacatttggtactttctaaatgaaagtagagactggtacctgtacattaaagttcttctttgcaccaatacatattagaatacattttccactttaacagattaacaaagtgtgtcttaagtgtctaatttatatacagggggattcaaaaaagagaggaaaggatg

SEQ ID NO: 25084 - DNA, 600 bp, Chicken  19866894240095_1
gaatacagcccaagcaaaatgatgagatgtttgttgggtgtgggcaagctgaaaggggctgccagtagctaagcttctaagcttcagacatagacacgaacactggaggcatggggtgctgggactcacgtgcctgagaattagacaactccagctgacacaggccccttcagtccccattgaagtctatgctgattgctagcgtagtgctgcagatggctcctccccccagtttgaatcacaggtctcaactcgatcagcgatgctatcctaaaagtatccatttctctctaacccaamcacagagggatggagtcaaccgcatcccgcagctgcgtgcctcttgtaggaacaaagcttcagtgaagcacactaccgagcgtggtaggggacttttcatctgctgtacactggaggcacagatgcattcacaattagccacattctgcccgaaagcagcatttgctagcaatgttcttcctttccagcagatggctcaggcagcccacagccaaacacatctcaacagcccagggtgacctcacccgcaggtgtatgttattatatctgttgtgtcctttgtgtgttagtctagattgg

SEQ ID NO: 25085 - DNA, 600 bp, Chicken  19866894240099_1
tttattcagtttggaaaactcccttttctgagatcccctcccgaggtagcagtgcctggtgagggtaagggcagcgcagtggagagaagagagcccagagcaggtgagggtgaaacctccagaggagactttgagctcctgctttgccagagcccaactgctgcacagacagggaagccaaaccctaagaggagtttcggctaggtagcatcagaggatgagatacagataatgccatttctcacagtagagagaacatggaacaccacggaatgagcagctgggctgctgagccaggtrgcaaaatgacttctattggtggcagtatcacactgagagagactgaatggagcaagctttgtgttggatatgagatccatttccagcttaatggaaccaacagcrctgctgtgagcgtcaaagtgctgagttttgctgctccgaggaaaacaggtacagcacgatgagtaatgcagtaactgcctgatcagaattagcacctggttcttgtcaaggccaattcaatattgcgttctgaaatgaaaatttcagagcacgaggggaataaaaccaaaagtcatcctgcatctgtcagcttgg

SEQ ID NO: 25086 - DNA, 600 bp, Chicken  19866894240099_2
gagggtgaaacctccagaggagactttgagctcctgctttgccagagcccaactgctgcacagacagggaagccaaaccctaagaggagtttcggctaggtagcatcagaggatgagatacagataatgccatttctcacagtagagagaacatggaacaccacggaatgagcagctgggctgctgagccaggtrgcaaaatgacttctattggtggcagtatcacactgagagagactgaatggagcaagctttgtgttggatatgagatccatttccagcttaatggaaccaacagcrctgctgtgagcgtcaaagtgctgagttttgctgctccgaggaaaacaggtacagcacgatgagtaatgcagtaactgcctgatcagaattagcacctggttcttgtcaaggccaattcaatattgcgttctgaaatgaaaatttcagagcacgaggggaataaaaccaaaagtcatcctgcatctgtcagcttggactcaattggcagcagctgttaaggcccatagatgttttcagagagagactgcagggtctgaataatgagacatgagattcataagcagctgtaatcagtggtgg

SEQ ID NO: 25087 - DNA, 600 bp, Chicken  19866894240099_3
aattcaatattgcgttctgaaatgaaaatttcagagcacgaggggaataaaaccaaaagtcatcctgcatctgtcagcttggactcaattggcagcagctgttaaggcccatagatgttttcagagagagactgcagggtctgaataatgagacatgagattcataagcagctgtaatcagtggtggaagcattttgccatgtggaagagtaaacattacagttgtgttgaaaaaacatcagttaaattcggcactctgttaggggatggctttaaaaaagccgggctgtcactcctaaygcttctgatggcagtaagtagtgcaggtgtggagctgargaggacattccaacagttcctacctgatgctggtgttgttctcaggtgggcacaaaaatggagcagctgtagagaaaygagctgggcttctctgggctttggtgccagctgcagagcagtgtgctccttaatgcttaatcgagttttataaaacctaatggcactaagcaattagagcttaagcccacttatggcgcccatggttttcttcagagctgccatgaggttcttgagggagaagatctgcaaatgtcagctccc

SEQ ID NO: 25088 - DNA, 600 bp, Chicken  19866894240099_4
gaggggaataaaaccaaaagtcatcctgcatctgtcagcttggactcaattggcagcagctgttaaggcccatagatgttttcagagagagactgcagggtctgaataatgagacatgagattcataagcagctgtaatcagtggtggaagcattttgccatgtggaagagtaaacattacagttgtgttgaaaaaacatcagttaaattcggcactctgttaggggatggctttaaaaaagccgggctgtcactcctaaygcttctgatggcagtaagtagtgcaggtgtggagctgargaggacattccaacagttcctacctgatgctggtgttgttctcaggtgggcacaaaaatggagcagctgtagagaaaygagctgggcttctctgggctttggtgccagctgcagagcagtgtgctccttaatgcttaatcgagttttataaaacctaatggcactaagcaattagagcttaagcccacttatggcgcccatggttttcttcagagctgccatgaggttcttgagggagaagatctgcaaatgtcagctccctgctggtgtgtgggggcccacaggcaggaaactcattgg

SEQ ID NO: 25089 - DNA, 600 bp, Chicken  19866894240099_5
ttttcagagagagactgcagggtctgaataatgagacatgagattcataagcagctgtaatcagtggtggaagcattttgccatgtggaagagtaaacattacagttgtgttgaaaaaacatcagttaaattcggcactctgttaggggatggctttaaaaaagccgggctgtcactcctaaygcttctgatggcagtaagtagtgcaggtgtggagctgargaggacattccaacagttcctacctgatgctggtgttgttctcaggtgggcacaaaaatggagcagctgtagagaaaygagctgggcttctctgggctttggtgccagctgcagagcagtgtgctccttaatgcttaatcgagttttataaaacctaatggcactaagcaattagagcttaagcccacttatggcgcccatggttttcttcagagctgccatgaggttcttgagggagaagatctgcaaatgtcagctccctgctggtgtgtgggggcccacaggcaggaaactcattggtggcctcatgtaatatttaagagatttcctggaccgattaattataatactttatatagtaactaacatatctctcat

SEQ ID NO: 25090 - DNA, 600 bp, Chicken  19866894240099_6
ttcttcttaagaggagaggacaggatgaggtgttcaaggcctgttaggatggggccctctgggcagtgtgagctgggggggcagccagcccatcgcaggggtctgcaagtgggtgagctttgaggtctcctccaacctaagccattctgtgattctatcacatcaaaacctcccactctgctgcccaggaggacgggaaggagatgccagcaaggtgcaagtggagatgcagacagaattggcttagctggactgaggctgccttcacacccacagcctgaaatgtcaacatacagtccygggtggtgactgacaccttcatcagaagggctcagcccacacagccatctcttgaggatgaagagcaggcagaagtcacaggagatgctgctggtattgttcctagcaggtctgcaggaactttaagcatcttttcaagggcagtctgtgaaaggcattgcactgtaaagtccagcagcattgtagtcagttatcaaagcacttctccttcaaaggaagatgcccttcgggttagaggaggatacggccatctgtcctttcagccctcatcagctctgctggattccttgacccacccct

SEQ ID NO: 25091 - DNA, 600 bp, Chicken  19866894240101_1
ctgttatctgtgttcttttctgagatgtgatgaaaaatgtcacattatcccagagacagctgtgaaaggttgggtcgcttttctcttgactagtcacccacagaaatccagttttgttctccttttccaaaaacctcgtgctgtagttcttccactgttcttggtacccaactgggtcccactttaatagctaaagctgttaatttgttttgtcttcagaaaaaaataggccaggcagcacatattccacctgttcgtgggctcttctcaacttcttgaagttacctgagtacttccagyctcctcagttctagcatgtaaatgttgcaggactgcagtgcacttcttagcactgtggcaaagatgaaagaattttttttttttkkggtggattctaaccacaacaacattttatctaacattaaaaaaaatgtaaatatgggcaaagttaacaaaaattactgtctatgattctctactttagattcttcctcattcttgagtgtctttagtcatagctgtgggcttcaaaaggagctcaacatccttcttgcacacttgttctcactcagcttggaaaagttcttgcttcctgttctg

SEQ ID NO: 25092 - DNA, 600 bp, Chicken  19866894240101_2
ttgactagtcacccacagaaatccagttttgttctccttttccaaaaacctcgtgctgtagttcttccactgttcttggtacccaactgggtcccactttaatagctaaagctgttaatttgttttgtcttcagaaaaaaataggccaggcagcacatattccacctgttcgtgggctcttctcaacttcttgaagttacctgagtacttccagyctcctcagttctagcatgtaaatgttgcaggactgcagtgcacttcttagcactgtggcaaagatgaaagaattttttttttttkkggtggattctaaccacaacaacattttatctaacattaaaaaaaatgtaaatatgggcaaagttaacaaaaattactgtctatgattctctactttagattcttcctcattcttgagtgtctttagtcatagctgtgggcttcaaaaggagctcaacatccttcttgcacacttgttctcactcagcttggaaaagttcttgcttcctgttctggcataccatagaaaaacagccctctgagcaggaaagcatgagttttctggctttcccttctgccgaaggctgaagtgtttgcaag

SEQ ID NO: 25093 - DNA, 600 bp, Chicken  19866894240101_3
tgactagtcacccacagaaatccagttttgttctccttttccaaaaacctcgtgctgtagttcttccactgttcttggtacccaactgggtcccactttaatagctaaagctgttaatttgttttgtcttcagaaaaaaataggccaggcagcacatattccacctgttcgtgggctcttctcaacttcttgaagttacctgagtacttccagyctcctcagttctagcatgtaaatgttgcaggactgcagtgcacttcttagcactgtggcaaagatgaaagaattttttttttttkkggtggattctaaccacaacaacattttatctaacattaaaaaaaatgtaaatatgggcaaagttaacaaaaattactgtctatgattctctactttagattcttcctcattcttgagtgtctttagtcatagctgtgggcttcaaaaggagctcaacatccttcttgcacacttgttctcactcagcttggaaaagttcttgcttcctgttctggcataccatagaaaaacagccctctgagcaggaaagcatgagttttctggctttcccttctgccgaaggctgaagtgtttgcaagg

SEQ ID NO: 25094 - DNA, 600 bp, Chicken  19866894240102_1
attcacagatgacacaaaacagggaggagtgactgattcttcagggggttttgctgccattcagaagcactgagacaggctagagagttaggctgagagttcatactggactcataatcaaagagcaacaaagtacatctgggtaggaatgacctcaggtgccaatgcatgctggaggctgcccagctggaaagcaatttgatgacttattaagaactttgcaccatttgtttagtgcaatgaattagtgataacagttggcttataacttaatcttaccttgctaatatttctggacaycttcttcaccctcgcagttgacatgcagtagatcttattagccaattcaatgtaaattattggtacagagacaaagaaaaggggactcctctgtagacagagaaggaatcctaaatatcggaaaccatgcctcttgccagggacaacagacataagttctctaaataaatgtacctcagagctgatctagtgatggtatttctctttagccataggcataagcatcgagaacaagctgcagatgtgacattcctggctggaaaagcaacaattgaaatacatgttagacatcatattctg

SEQ ID NO: 25095 - DNA, 600 bp, Chicken  19866894240103_1
aggaaaaaaaaatcccatcttgcctgcttcagctttgctttctcactttccttgcatttgcaatgcagcagtgctgattcattgacttggaaacactaacctttatcacttggacagaaaccagcatgaactgggctctatgaacccaaacacgatggtgagctaacagattggttgtctcttccaaacatacagtaccttaaggttagtcttttctaaatttcccacctctgtaaaaactccttctcagatcctttttctgtaggggactgtttcaaccgggggacagacaagatcatrtaaacttattttctcaagaggagtcaagttgaatgttaacactgcttacttgttggaatatacagagattaggaaacgttcttgagatatccagttttattaactccaaacttgcttctctgtcagctgtagaaaatccagcatctacaaaagccaaagttactgctcttattacatggatcagtgtacaccttttcccccccacaactgttatgaagtcatgagggtagagagaaagagaaggaggcaaggcaaaacaagccaggaatttcrttggcattttttgacaaaccaatggac

SEQ ID NO: 25096 - DNA, 600 bp, Chicken  19866894240103_2
ttcaaccgggggacagacaagatcatrtaaacttattttctcaagaggagtcaagttgaatgttaacactgcttacttgttggaatatacagagattaggaaacgttcttgagatatccagttttattaactccaaacttgcttctctgtcagctgtagaaaatccagcatctacaaaagccaaagttactgctcttattacatggatcagtgtacaccttttcccccccacaactgttatgaagtcatgagggtagagagaaagagaaggaggcaaggcaaaacaagccaggaatttcrttggcattttttgacaaaccaatggacrcacacaagcctgttggctttcaaacagggcttccaatagctctttaagtagtcacctccgtagagaggttctggtgagagaagatctaaagaattatagactgcatgtcatcaatgtctactactgttggctcacattccagaatcatattcactcttcgtatgctctgttaaagatcatggtccaaaactgaagcagacctcactgaaagtcagtttctaaagtatgcgagacccaaaaacttcagttctatttcacttgtcctggttaaa

SEQ ID NO: 25097 - DNA, 600 bp, Chicken  19866894240103_3
aaacttattttctcaagaggagtcaagttgaatgttaacactgcttacttgttggaatatacagagattaggaaacgttcttgagatatccagttttattaactccaaacttgcttctctgtcagctgtagaaaatccagcatctacaaaagccaaagttactgctcttattacatggatcagtgtacaccttttcccccccacaactgttatgaagtcatgagggtagagagaaagagaaggaggcaaggcaaaacaagccaggaatttcrttggcattttttgacaaaccaatggacrcacacaagcctgttggctttcaaacagggcttccaatagctctttaagtagtcacctccgtagagaggttctggtgagagaagatctaaagaattatagactgcatgtcatcaatgtctactactgttggctcacattccagaatcatattcactcttcgtatgctctgttaaagatcatggtccaaaactgaagcagacctcactgaaagtcagtttctaaagtatgcgagacccaaaaacttcagttctatttcacttgtcctggttaaatatagctgggaactacccattaccactg

SEQ ID NO: 25098 - DNA, 600 bp, Chicken  19866894240104_1
aagtgaccccacaaagatgctggcaatgaagaacaacaacataagagatgctatatgtagctcgggtttctggttcactcgatgcctccctcacacgcctcgtgatagtgatttcagcacagatactttcttgtttactctcagacctcactagcaggcttccaaagaaagctctgcgtttctctttgccttctcgccatcgagcttgcagcaggagttaattactgaagcaactgtccaactctttacccttttagctcctgaaataccagaggcagattttaaacagcaaagcaaacrgtgctgaagagaaaacagctccaacagtgaaatctcttctacctgacgctcatgatgttgccttcaggatgcttctgcaggtacgccttcaccacccaggctgtgtgctctcggtaggtcatgacacggctgaggaataagcagagaggggagaggtgggtgaaggcacggcgggggaatggtgagggtcccacacagcggggcagcacagggattaccattcgctcagagccatcctccggtcgaacacgcggatggagccgtcacccagccctgccacgatcagagaccgatgggagt

SEQ ID NO: 25099 - DNA, 599 bp, Chicken  19866894240105_1
  misc_feature (1)..(180): n is any nucleotide
nnnnnnnnnnnnnnnnnnnnnnnnnnnnnnnnnnnnnnnnnnnnnnnnnnnnnnnnnnnnnnnnnnnnnnnnnnnnnnnnnnnnnnnnnnnnnnnnnnnnnnnnnnnnnnnnnnnnnnnnnnnnnnnnnnnnnnnnnnnnnnnnnnnnnnnnnnnnnnnnnnnnnnnnnnnnnnnnnnnncttttaactatgtttgcagctactggctgtctaccagccttttaacatccttcattaccttcaagggaaagagccatgtcgcatcagccctgcacagccccaccacctccagcaccaacyatgctgccaacacaactgtcccagtgactactgcgatggctttgattgagctacccttgctgagacatggcagaaatcttggcctccggtcctcacttctgtcaaggtgattttaagtatagatattcaaagctacgagtgctgggtgatgagtactcccagaacccgctgaagggtcggaacaaaacaccaaagtctcttttagctaataggttttgtctcatagtgatcttggtgtgcactactgaagcactgtgagaatcctgcatcccactgcagttgaggaacttttgctatta

SEQ ID NO: 25100 - DNA, 586 bp, Chicken  19866894240105_2
acccttgctgagacatggcagaaatcttggcctccggtcctcacttctgtcaaggtgattttaagtatagatattcaaagctacgagtgctgggtgatgagtactcccagaacccgctgaagggtcggaacaaaacaccaaagtctcttttagctaataggttttgtctcatagtgatcttggtgtgcactactgaagcactgtgagaatcctgcatcccactgcagttgaggaacttttgctattatggctctgaacaaaaataatagtttttctgcccgtcagtgtctgtaccttctrccaactgatactgtgatcgttcccattcaaactctttgggcttattgcaccccaggaaagatgggcaatgttcataaggaaaagcactcaccaaagratgargctgacccagcagcaatgttcttgcgtaaataagtcaaaagagaacatgtcaatatgtttgcatctgtctaatgaagagatatctatccccagtaacagccctggaagcaatactgtgggacataggcacccttttctgtttaaccagtgggtcacttcctattaacagtcgggttacattgta

SEQ ID NO: 25101 - DNA, 489 bp, Chicken  19866894240105_3
tgagtactcccagaacccgctgaagggtcggaacaaaacaccaaagtctcttttagctaataggttttgtctcatagtgatcttggtgtgcactactgaagcactgtgagaatcctgcatcccactgcagttgaggaacttttgctattatggctctgaacaaaaataatagtttttctgcccgtcagtgtctgtaccttctrccaactgatactgtgatcgttcccattcaaactctttgggcttattgcaccccaggaaagatgggcaatgttcataaggaaaagcactcaccaaagratgargctgacccagcagcaatgttcttgcgtaaataagtcaaaagagaacatgtcaatatgtttgcatctgtctaatgaagagatatctatccccagtaacagccctggaagcaatactgtgggacataggcacccttttctgtttaaccagtgggtcacttcctattaacagtcgggttacattgta

SEQ ID NO: 25102 - DNA, 484 bp, Chicken  19866894240105_4
actcccagaacccgctgaagggtcggaacaaaacaccaaagtctcttttagctaataggttttgtctcatagtgatcttggtgtgcactactgaagcactgtgagaatcctgcatcccactgcagttgaggaacttttgctattatggctctgaacaaaaataatagtttttctgcccgtcagtgtctgtaccttctrccaactgatactgtgatcgttcccattcaaactctttgggcttattgcaccccaggaaagatgggcaatgttcataaggaaaagcactcaccaaagratgargctgacccagcagcaatgttcttgcgtaaataagtcaaaagagaacatgtcaatatgtttgcatctgtctaatgaagagatatctatccccagtaacagccctggaagcaatactgtgggacataggcacccttttctgtttaaccagtgggtcacttcctattaacagtcgggttacattgta

SEQ ID NO: 25103 - DNA, 600 bp, Chicken  19866894240107_1
aaaaaaaaaaaaaagaaaaattggacccctttccaactttcctgtatttacagatgatttacaatttcttttcctggggaaaaggtgctggaacaaaacaaaacaaaacaaagcagaacaaaacgcaaaccaaacaaaacctaggaaaaataattatcaggactccctgtgggtctggagtcctacttgttcaatacactgacaaatagctgtgttgaaggaagactgtacagaacatgaagtcagtagaatattcaactgaccttggtcctgtgctgaggcagggaggagatgcgccartggggctcataggaatgaaggaagggstgaakgtttcctgtttttggaaacactgyttttcctgtttttgtgctttgatgcacaacttggactgagcagaaatgtctgagcgtggtgtgaggccaccgcggtggggcatagttgggtgctgcccagctccatctcccaccagccaacagcctgaggcagcagggctccctccctccctccctccttccctcactactaggcaagtcaaaataacttgttagcagtccggtcgcattccgctccttatcatttattcattctgatttctga

SEQ ID NO: 25104 - DNA, 600 bp, Chicken  19866894240107_2
cctttccaactttcctgtatttacagatgatttacaatttcttttcctggggaaaaggtgctggaacaaaacaaaacaaaacaaagcagaacaaaacgcaaaccaaacaaaacctaggaaaaataattatcaggactccctgtgggtctggagtcctacttgttcaatacactgacaaatagctgtgttgaaggaagactgtacagaacatgaagtcagtagaatattcaactgaccttggtcctgtgctgaggcagggaggagatgcgccartggggctcataggaatgaaggaagggstgaakgtttcctgtttttggaaacactgyttttcctgtttttgtgctttgatgcacaacttggactgagcagaaatgtctgagcgtggtgtgaggccaccgcggtggggcatagttgggtgctgcccagctccatctcccaccagccaacagcctgaggcagcagggctccctccctccctccctccttccctcactactaggcaagtcaaaataacttgttagcagtccggtcgcattccgctccttatcatttattcattctgatttctgaaccagacataacaaatacacccaccat

SEQ ID NO: 25105 - DNA, 600 bp, Chicken  19866894240107_3
ccaactttcctgtatttacagatgatttacaatttcttttcctggggaaaaggtgctggaacaaaacaaaacaaaacaaagcagaacaaaacgcaaaccaaacaaaacctaggaaaaataattatcaggactccctgtgggtctggagtcctacttgttcaatacactgacaaatagctgtgttgaaggaagactgtacagaacatgaagtcagtagaatattcaactgaccttggtcctgtgctgaggcagggaggagatgcgccartggggctcataggaatgaaggaagggstgaakgtttcctgtttttggaaacactgyttttcctgtttttgtgctttgatgcacaacttggactgagcagaaatgtctgagcgtggtgtgaggccaccgcggtggggcatagttgggtgctgcccagctccatctcccaccagccaacagcctgaggcagcagggctccctccctccctccctccttccctcactactaggcaagtcaaaataacttgttagcagtccggtcgcattccgctccttatcatttattcattctgatttctgaaccagacataacaaatacacccaccattagct

SEQ ID NO: 25106 - DNA, 600 bp, Chicken  19866894240107_4
atttacaatttcttttcctggggaaaaggtgctggaacaaaacaaaacaaaacaaagcagaacaaaacgcaaaccaaacaaaacctaggaaaaataattatcaggactccctgtgggtctggagtcctacttgttcaatacactgacaaatagctgtgttgaaggaagactgtacagaacatgaagtcagtagaatattcaactgaccttggtcctgtgctgaggcagggaggagatgcgccartggggctcataggaatgaaggaagggstgaakgtttcctgtttttggaaacactgyttttcctgtttttgtgctttgatgcacaacttggactgagcagaaatgtctgagcgtggtgtgaggccaccgcggtggggcatagttgggtgctgcccagctccatctcccaccagccaacagcctgaggcagcagggctccctccctccctccctccttccctcactactaggcaagtcaaaataacttgttagcagtccggtcgcattccgctccttatcatttattcattctgatttctgaaccagacataacaaatacacccaccattagctctgaatatcccctcctaggatgta

SEQ ID NO: 25107 - DNA, 600 bp, Chicken  19866894240114_1
aaaataaaggcttgcaactaatttagtgctgagagcaggtctttttcttctagaggagcagaacataatgtcttcattaggaatataatcattaaagtataaatagtcatctcagaattgttaacataaagtgcacttgatgccacagaactattgctctaatcagagaacttttaagttcaagggtttaagtgaaagtacagccaggagatatggaaaaaacatactatacatgaaaccatactatgattattattgatcaggtaaatgggactgacagcacatgactttggccccacrgctacaaagatgaggatctattgaataatatctgtagttccagggtatgctagtgagagatagaagcagtggagtayttggctggggcacacctacttttattgcactatgagcaccaaacctaagctccttttctcctttgccttggmaactactactgyttgataaattacttttttaaccaataattttgccacccctgattcatcagtactaccacgtcctatcaattagatgccattttgcaatggtttgatgcaaaacgcagacattatttcttttgaatgaactcccactctc

SEQ ID NO: 25108 - DNA, 600 bp, Chicken  19866894240114_2
taggaatataatcattaaagtataaatagtcatctcagaattgttaacataaagtgcacttgatgccacagaactattgctctaatcagagaacttttaagttcaagggtttaagtgaaagtacagccaggagatatggaaaaaacatactatacatgaaaccatactatgattattattgatcaggtaaatgggactgacagcacatgactttggccccacrgctacaaagatgaggatctattgaataatatctgtagttccagggtatgctagtgagagatagaagcagtggagtayttggctggggcacacctacttttattgcactatgagcaccaaacctaagctccttttctcctttgccttggmaactactactgyttgataaattacttttttaaccaataattttgccacccctgattcatcagtactaccacgtcctatcaattagatgccattttgcaatggtttgatgcaaaacgcagacattatttcttttgaatgaactcccactctcgaacaagaaaggtctttggctgacccacagtttctggcataattttaggaaaaattgtgctctagcgatgtagttgc

SEQ ID NO: 25109 - DNA, 600 bp, Chicken  19866894240114_3
actattgctctaatcagagaacttttaagttcaagggtttaagtgaaagtacagccaggagatatggaaaaaacatactatacatgaaaccatactatgattattattgatcaggtaaatgggactgacagcacatgactttggccccacrgctacaaagatgaggatctattgaataatatctgtagttccagggtatgctagtgagagatagaagcagtggagtayttggctggggcacacctacttttattgcactatgagcaccaaacctaagctccttttctcctttgccttggmaactactactgyttgataaattacttttttaaccaataattttgccacccctgattcatcagtactaccacgtcctatcaattagatgccattttgcaatggtttgatgcaaaacgcagacattatttcttttgaatgaactcccactctcgaacaagaaaggtctttggctgacccacagtttctggcataattttaggaaaaattgtgctctagcgatgtagttgctcctataaactctgggctctttgccatgggatgctatatcatccttggccacagcccctcatagtgaagata

SEQ ID NO: 25110 - DNA, 600 bp, Chicken  19866894240114_4
atcagagaacttttaagttcaagggtttaagtgaaagtacagccaggagatatggaaaaaacatactatacatgaaaccatactatgattattattgatcaggtaaatgggactgacagcacatgactttggccccacrgctacaaagatgaggatctattgaataatatctgtagttccagggtatgctagtgagagatagaagcagtggagtayttggctggggcacacctacttttattgcactatgagcaccaaacctaagctccttttctcctttgccttggmaactactactgyttgataaattacttttttaaccaataattttgccacccctgattcatcagtactaccacgtcctatcaattagatgccattttgcaatggtttgatgcaaaacgcagacattatttcttttgaatgaactcccactctcgaacaagaaaggtctttggctgacccacagtttctggcataattttaggaaaaattgtgctctagcgatgtagttgctcctataaactctgggctctttgccatgggatgctatatcatccttggccacagcccctcatagtgaagatatactgtacaaca

SEQ ID NO: 25111 - DNA, 600 bp, Chicken  19866894240118_1
agtgaatttggataaacaacaacccataattattttatagggtaattgtctgacttgaaatactgaggtaattatcaagttaaatttctatgatccctgcaatttctatgaaacctggagatgtcagtacttgagttctggcatatctcttaagtaaaattataccacctgaacctaaggtcgtaattaaagatgtaacaaagctacgcgaataatgtctatgtgtttcaaatgaaaagcagaataatacccataattggagatggagcagaatgaaactaactggccacaaattccacycctcaggaggtgcgtactgcagtctgtaggtggacatatacacagggggaacgtggmttgtgggtctgggaaagaaagcgtggaaccacttgctttgaaaggcagatggcttctttcagaacgcagcaaggacatgggaaaagcccaaatgagattacgtctcttcttagagacgtaactctgccatgactcttctttgagaggtgaaaagtaccaatttggtctccaaagtgacactgtgggagatgtttgcataaattacttccatttgtgtctaaattgccaagaacaaagctttaa

SEQ ID NO: 25112 - DNA, 600 bp, Chicken  19866894240118_2
aaatactgaggtaattatcaagttaaatttctatgatccctgcaatttctatgaaacctggagatgtcagtacttgagttctggcatatctcttaagtaaaattataccacctgaacctaaggtcgtaattaaagatgtaacaaagctacgcgaataatgtctatgtgtttcaaatgaaaagcagaataatacccataattggagatggagcagaatgaaactaactggccacaaattccacycctcaggaggtgcgtactgcagtctgtaggtggacatatacacagggggaacgtggmttgtgggtctgggaaagaaagcgtggaaccacttgctttgaaaggcagatggcttctttcagaacgcagcaaggacatgggaaaagcccaaatgagattacgtctcttcttagagacgtaactctgccatgactcttctttgagaggtgaaaagtaccaatttggtctccaaagtgacactgtgggagatgtttgcataaattacttccatttgtgtctaaattgccaagaacaaagctttaaaacacagctaaacagtacttaaagagatctgatgaacggcagaatgtgcaacctaac

SEQ ID NO: 25113 - DNA, 600 bp, Chicken  19866894240120_1
gaagttcaattgttcaccatcacagtcaaccacattatattctgtctataaactgagtttgtctgtggttccctatgccattactcctatcatggactatttaaaaatttcattgcttttgctactgggaatctagatgttcttcagcctaagtttatttgtagcatgtatctatttgctgtttcgcactttccagagtttatccctgctgaatttgtgaatattctcatatttcttcttagcttttgtttggcacattaaataaaagcatttattttttcagcattgttttagaatgtrtatttgcaattctctaaatgattccagtagttctttcccatacagtggctttaacaggtacaacctgaactttagcactgtcttacagttgcactgagcactgatgtttattcttgcctccctctttagcagcactttccctcttctattttgttaggatagctgttatcctttcacagcctcttaacaatgacagtaaatctatcaccagttcatctttttagttctttttcctcctttgtcatttccagccaataatttcccaagtttttaatattaatcattctagttcctgcctac

SEQ ID NO: 25114 - DNA, 600 bp, Chicken  19866894240126_1
ccatccaaaaccaacaatattttgctgcaaagttctcagcccactctgctttccatcccccagatcccgtaacgctgtgtgtgtggggatgccgtcgtgtcccatggcacacctccacagatggagagaagaaagagcctttccctacctgagcgcccgctccgttattgcaccgctttgaagtcaagcaataaaaatccccatatagaggcacagagctccccgcagccctttaaagtcccaaatgcaaatttcacgggaagaggaatgcagatgtaccccaaaaggagaaaataaagrgaactccgtgcccttgctctggaattaaggatttaacaggggaacccrgaacaaatgggacccagaggtggaggtcccatccccactgaccccagggagcgcagcactgcagctccrgggygatgctgacagccctccccatctcccagccaggaggcacctcgggaatgctcaaaaacacacggggagaataaacatccgggcgagggccgaggaaggaaagcaaaacactgggagaagccaggaataataagaaccaaaaacaaatagaaaagagctaacgggagcagcgggtctaaa

SEQ ID NO: 25115 - DNA, 573 bp, Chicken  19866894240126_2
ctttccatcccccagatcccgtaacgctgtgtgtgtggggatgccgtcgtgtcccatggcacacctccacagatggagagaagaaagagcctttccctacctgagcgcccgctccgttattgcaccgctttgaagtcaagcaataaaaatccccatatagaggcacagagctccccgcagccctttaaagtcccaaatgcaaatttcacgggaagaggaatgcagatgtaccccaaaaggagaaaataaagrgaactccgtgcccttgctctggaattaaggatttaacaggggaacccrgaacaaatgggacccagaggtggaggtcccatccccactgaccccagggagcgcagcactgcagctccrgggygatgctgacagccctccccatctcccagccaggaggcacctcgggaatgctcaaaaacacacggggagaataaacatccgggcgagggccgaggaaggaaagcaaaacactgggagaagccaggaataataagaaccaaaaacaaatagaaaagagctaacgggagcagcgggtctaaaaataaaatgaaagaacaacat

SEQ ID NO: 25116 - DNA, 504 bp, Chicken  19866894240126_3
cagatggagagaagaaagagcctttccctacctgagcgcccgctccgttattgcaccgctttgaagtcaagcaataaaaatccccatatagaggcacagagctccccgcagccctttaaagtcccaaatgcaaatttcacgggaagaggaatgcagatgtaccccaaaaggagaaaataaagrgaactccgtgcccttgctctggaattaaggatttaacaggggaacccrgaacaaatgggacccagaggtggaggtcccatccccactgaccccagggagcgcagcactgcagctccrgggygatgctgacagccctccccatctcccagccaggaggcacctcgggaatgctcaaaaacacacggggagaataaacatccgggcgagggccgaggaaggaaagcaaaacactgggagaagccaggaataataagaaccaaaaacaaatagaaaagagctaacgggagcagcgggtctaaaaataaaatgaaagaacaacat

SEQ ID NO: 25117 - DNA, 500 bp, Chicken  19866894240126_4
tggagagaagaaagagcctttccctacctgagcgcccgctccgttattgcaccgctttgaagtcaagcaataaaaatccccatatagaggcacagagctccccgcagccctttaaagtcccaaatgcaaatttcacgggaagaggaatgcagatgtaccccaaaaggagaaaataaagrgaactccgtgcccttgctctggaattaaggatttaacaggggaacccrgaacaaatgggacccagaggtggaggtcccatccccactgaccccagggagcgcagcactgcagctccrgggygatgctgacagccctccccatctcccagccaggaggcacctcgggaatgctcaaaaacacacggggagaataaacatccgggcgagggccgaggaaggaaagcaaaacactgggagaagccaggaataataagaaccaaaaacaaatagaaaagagctaacgggagcagcgggtctaaaaataaaatgaaagaacaacat

SEQ ID NO: 25118 - DNA, 600 bp, Chicken  19866894240127_1
ttgttacacatagcactcttctccagagaagtttcagatcgtcttgagttcacaggcaaatcccttctgcagagcaacacttacaactgtgaactagacacaatgtaaacagatcctcaaaatccagacagaggaaccattcagaacagctgactgacacctgaagaaataattacggacacactctccattttagcaagcccttggagatgccccggtgaatgggattcaattttgatgcaaatgacatcactcacatctactttggtaaagctgaagttcacaagtatcacaaaggcwggttagggggaacaagaagaaatattgaaggaacacctgtggcactctcacagcaacatcaactcaaggcagaggttggaccagaagactgcagaactcctttacaaccaacacttctacacctctgggcttctgcagtgccgaagagaaagctgttcttgagggatctgggatgtaacttttccttcttcctttcacatgccatataaaagcagaaactaacacccaagcctgatgcaattttcaagtagtaacctgtatttggcaagggcatctggcaagaagtaccaggatgcaagc

SEQ ID NO: 25119 - DNA, 600 bp, Chicken  19866894240133_1
ctattaagccctaagtctctagtgaaattagattttcaccccaaaacaacattctcctttgctttctttttcatgcaggctaaatttaaagtcgcaattcatttatccatctctcaatcactcttctggggtcaaagcaatctctcagttgtaaatgtctggcctctgcagattatagcagatgagtttcctgattaaaatatttcagaatttgtccctttaggaacacgtacaacaacatgaaaaacccaaagctagagctcaaggggaaaaaaacaaacaaaaaactgtcagatatgytgtgagtcacagttcatgagtgtctaatgatgacaytgatagcatgcaggagatataacaacaaaacaatatcagcaatttgcatttaccagcagtgaatcaagcaggaagctttatttcacactctctctctctcgcacacacacacttccctccaggtttgctatagcaacttggctttgaaatgtcattcatttccaacacagtctataatttgagggtgcctacaatcaggactctattttaggctctcagagcctgatctttcccttcgtctggactccttgcagtagttgcttt

SEQ ID NO: 25120 - DNA, 600 bp, Chicken  19866894240133_2
caccccaaaacaacattctcctttgctttctttttcatgcaggctaaatttaaagtcgcaattcatttatccatctctcaatcactcttctggggtcaaagcaatctctcagttgtaaatgtctggcctctgcagattatagcagatgagtttcctgattaaaatatttcagaatttgtccctttaggaacacgtacaacaacatgaaaaacccaaagctagagctcaaggggaaaaaaacaaacaaaaaactgtcagatatgytgtgagtcacagttcatgagtgtctaatgatgacaytgatagcatgcaggagatataacaacaaaacaatatcagcaatttgcatttaccagcagtgaatcaagcaggaagctttatttcacactctctctctctcgcacacacacacttccctccaggtttgctatagcaacttggctttgaaatgtcattcatttccaacacagtctataatttgagggtgcctacaatcaggactctattttaggctctcagagcctgatctttcccttcgtctggactccttgcagtagttgctttggaaattcacaacttattcctggccagctgcacaag

SEQ ID NO: 25121 - DNA, 567 bp, Chicken  19866894240135_1
caaccaagtggccaagcagcgctcttgggctgcctcagtgcacaaccagcagagcccgcagcccacccaggcaccacatcaggccactgcaccactcccaaccctcggcctttacctgctgccaggcgagcggctagaggggatgtcctgcacgaagctctgctccatacccgggatcctggcggggctgtgggggtggtaggctgtcaggaccacactgcccgagtccttcatctccatggtcataggtacatgtcggtgacaaaggcggccggcgagggctcctgtcaggaaagcagwgcgtgccctgaccccactaccgcctctcactgctgtttgctgtcaggagagtggagtagcctgacccagcaagtctccctgtcaggaaagctgaattagcatatattcaaaaacaccgcccacaaaacaacccacagggaagttactgagtccctaggaaaccagaaacctgagataatcctaacacagctctgcgcgatcggagtgtgtgtgtgtgtgggggggggggacttcttgctttgttcctttttgtttcagaacccattt

SEQ ID NO: 25122 - DNA, 600 bp, Chicken  19866894240136_1
gtgttgagggacatggtttagcgagaaccattggtgaagggtgaatggttggactggatgatcctgtgggtcttttccaaccttagcgattctatgattctatggaattacatcattttcacataaattgcaaaaggtgttttgtgtgatttaactttaatatcgattaatttaataggtcaatattttttgttttacataatcctgcttagattggaaatgttctttagactttccttgggatattctttcacaagttttaatctgcaggtagtctagaaaaaatgtggttattactgygtattatagcttttaatgaaacagtctacagcaatctaatattgtgatgggaatatatttttcaaacaacacttacatcactcaaaggatgtatttttatgtgctgagatacatctccatacagtataacatcagttggtggttctagccagctatttctgctgaatgatgaataatctctagaagtttacggaatacaatatcagtggagcaaatacagactccgtggtcaggacactcagaaacttatagttacataacctcacactcagcttatttatttatttatttagctacaga

SEQ ID NO: 25123 - DNA, 600 bp, Chicken  19866894240137_1
gcattattgttagtctttctgaggctctcctagaataggaacatataaaacaggatttcctccagctctgcatacctacttactccagagtcactaatgacataggactggtttgaacaaagacttaacatgaaatgaacattcaaaagagctgggaacaaaaatatatctgcctagaacactgcatctctgctttgtcttcaaaataaagccaaggaggcacaaatctgctttaaagaccagttttactgtaaagttctcatgagataaatggaagaactgaacatttgcatgtaggaygtgttgacatatcccaatgggttccaaattaaatttaatgtagtctttacaaaacagtcttttcttttgtactggagattagaagtagcttcactgccatcagaagatggaaagacagacaagatccaagtcctgcacaagtggcctccagaaacctaaaccatgtgttgtcttccatatgaytacaagcgacagctggaacatccaaagctctgagatgttaaaatatttccaaccgatattttaaagaaaacttctggatgtacattcataagaaaaaatacaagtaatattgcccaa

SEQ ID NO: 25124 - DNA, 600 bp, Chicken  19866894240137_2
gcatctctgctttgtcttcaaaataaagccaaggaggcacaaatctgctttaaagaccagttttactgtaaagttctcatgagataaatggaagaactgaacatttgcatgtaggaygtgttgacatatcccaatgggttccaaattaaatttaatgtagtctttacaaaacagtcttttcttttgtactggagattagaagtagcttcactgccatcagaagatggaaagacagacaagatccaagtcctgcacaagtggcctccagaaacctaaaccatgtgttgtcttccatatgaytacaagcgacagctggaacatccaaagctctgagatgttaaaatatttccaaccgatattttaaagaaaacttctggatgtacattcataagaaaaaatacaagtaatattgcccaaacatttgtagaaattgattccttagctcattaccacattagggttttggaaagggatgtttatcaccaygactccttcccctgatagaatgtggttcccggcagagccagtgacacactgtgacacatcccgcatccatcacgccatgggacgtgccactgatagccccwtgctgagaagcag

SEQ ID NO: 25125 - DNA, 600 bp, Chicken  19866894240137_3
tactggagattagaagtagcttcactgccatcagaagatggaaagacagacaagatccaagtcctgcacaagtggcctccagaaacctaaaccatgtgttgtcttccatatgaytacaagcgacagctggaacatccaaagctctgagatgttaaaatatttccaaccgatattttaaagaaaacttctggatgtacattcataagaaaaaatacaagtaatattgcccaaacatttgtagaaattgattccttagctcattaccacattagggttttggaaagggatgtttatcaccaygactccttcccctgatagaatgtggttcccggcagagccagtgacacactgtgacacatcccgcatccatcacgccatgggacgtgccactgatagccccwtgctgagaagcagcacacccagctcccttctgcatggccccgtcattcctcagacaaatgtcctgtggctactcagggatgtgctttcagaaggcactctgcaagcacacctcccctaaaaattaacagaaacttggaagaatgttacaggcaaacaagcaaacaaaaaagcaagccagaagctaaagtctgaccaatt

SEQ ID NO: 25126 - DNA, 600 bp, Chicken  19866894240137_4
tcttccatatgaytacaagcgacagctggaacatccaaagctctgagatgttaaaatatttccaaccgatattttaaagaaaacttctggatgtacattcataagaaaaaatacaagtaatattgcccaaacatttgtagaaattgattccttagctcattaccacattagggttttggaaagggatgtttatcaccaygactccttcccctgatagaatgtggttcccggcagagccagtgacacactgtgacacatcccgcatccatcacgccatgggacgtgccactgatagccccwtgctgagaagcagcacacccagctcccttctgcatggccccgtcattcctcagacaaatgtcctgtggctactcagggatgtgctttcagaaggcactctgcaagcacacctcccctaaaaattaacagaaacttggaagaatgttacaggcaaacaagcaaacaaaaaagcaagccagaagctaaagtctgaccaattgtatgcagccctgtaaagggccagagacactaggatgcaggaagaagtaatccaaaagctgcaaagataatgcttgggttatgtactgagcatccaaaact

SEQ ID NO: 25127 - DNA, 600 bp, Chicken  19866894240137_5
tggccccgtcattcctcagacaaatgtcctgtggctactcagggatgtgctttcagaaggcactctgcaagcacacctcccctaaaaattaacagaaacttggaagaatgttacaggcaaacaagcaaacaaaaaagcaagccagaagctaaagtctgaccaattgtatgcagccctgtaaagggccagagacactaggatgcaggaagaagtaatccaaaagctgcaaagataatgcttgggttatgtactgagcatccaaaactaccttggcaatctcttgaagacctccataccagyggtgcactgagagcacaggcaggcagtcaggcaggctaggagaagcacatgtgatgcaaggatgcaggagaaacactactgctcacatcaatgctatcagagcctctctgcctgaggatatttcctacctctacctacaaacagtgcttccaagccattaagtaaacattctttgaagataatgaagcttattctaatctcacagtggtgacactcctgcattgtattcagctgagctacaagactcctgggtaactcctctgtaaaaaatcaggattaccttaactctttgctctcatg

SEQ ID NO: 25128 - DNA, 599 bp, Chicken  19866894240139_1
  misc_feature (1)..(61): n is any nucleotide
nnnnnnnnnnnnnnnnnnnnnnnnnnnnnnnnnnnnnnnnnnnnnnnnnnnnnnnnnnnnntagcagcaagggcacactgctggctcacattcagcatgctgtccaccaggactccccaggtcctttcttgcagagctgctttccagtagggtggcctcagactgtcctgctgctcagagattttcttccccagctgcaggactttgcactgagagttatggtgcgacgtttacaattaaaccatgtgtaccttatagtgtttcttcaggtaaatttctctcttgctttcaacactattrttttatagtttttaaaatgatcagacccagatgatgcaaccaaaatgaacaacgggcctaattaaagtaccaccttccttttgtcttccaatctgagaaattgtttcaacttctacaacgcccatcattccagcattcactgatgttttcttttaatgatgacaatctgttgcagctcagacacagaactcgcatttttccccagacacccagtcatttgtttctttgtgtgtgtgctttattttttatggggccagctgctttgtgatcagcaaaatgtcagaaaaatcatcttacca

SEQ ID NO: 25129 - DNA, 600 bp, Chicken  19866894240141_1
tttatcttgccagcaaggacaggtcttaccaggtaacagagtctgtaggaacctcctgtagttttcctgagtgtctgtacctagtttattgcatcatcatttctaactagattgaccctggtgtgtttccccatcctattcatgcctggggagacgcagccttaggaggaatgaaaaacactgagcaacacagactaagcttagaaacaaagaggggcattgtagataatcagggtcatttccctttttcacagagcttcccactgcacaggagaaataatggagctaattgtgttctckgtgggcatttccccacagattcagacaaatcaccgtgcttatcccattgcctgcaatatagagactccacccaaacctctgcagtttgccccagcacttcatagtgctttgatccacatacagtagtctctgtgatgatcgctgggacaggtgccttctcactcaacgtattacgaacccaactagagtaaggactttcatctgagaactgatgtgattctgaacaaaaccatcaatattttggctaggagacctctgattatgtttttggttactcagcagtgggcacatgcttctgag

SEQ ID NO: 25130 - DNA, 599 bp, Chicken  19866894240163_1
  misc_feature (1)..(82): n is any nucleotide
nnnnnnnnnnnnnnnnnnnnnnnnnnnnnnnnnnnnnnnnnnnnnnnnnnnnnnnnnnnnnnnnnnnnnnnnnnnnnnnnnnaaaatatgcctgcaatgccacaaaagcaaatggctctcagcaaggctagtgagagactctgggacatgtgctaggaccatcagtattcagctggtgacttcagtcaacacctgacaagtccctgagaaagctgaggaaaccggcttttgtagagcaggtgtgggactgaatgacctcctcaggttccctcccagtctccatgcttctacagccagacytgcacygcattcatttttcacttctgtctctgttggcattcagcatttatctttgaatgggcccctcctgatggaygccagcctaaaggaggacctacagggtgatctgaaygttccttccacrtgtggatgagagtatttcccatctgaggtgctgacatgtgacacragtggaacagacaccaattggatgatgaggctaactccaaagaaaaggaaaaaaatcaagacactgcttttatttttagttgcctgttttatcttctatagctaatttgatagttgcacattagttagca

SEQ ID NO: 25131 - DNA, 599 bp, Chicken  19866894240163_2
  misc_feature (1)..(76): n is any nucleotide
nnnnnnnnnnnnnnnnnnnnnnnnnnnnnnnnnnnnnnnnnnnnnnnnnnnnnnnnnnnnnnnnnnnnnnnnnnnnaaaatatgcctgcaatgccacaaaagcaaatggctctcagcaaggctagtgagagactctgggacatgtgctaggaccatcagtattcagctggtgacttcagtcaacacctgacaagtccctgagaaagctgaggaaaccggcttttgtagagcaggtgtgggactgaatgacctcctcaggttccctcccagtctccatgcttctacagccagacytgcacygcattcatttttcacttctgtctctgttggcattcagcatttatctttgaatgggcccctcctgatggaygccagcctaaaggaggacctacagggtgatctgaaygttccttccacrtgtggatgagagtatttcccatctgaggtgctgacatgtgacacragtggaacagacaccaattggatgatgaggctaactccaaagaaaaggaaaaaaatcaagacactgcttttatttttagttgcctgttttatcttctatagctaatttgatagttgcacattagttagcacctcaa

SEQ ID NO: 25132 - DNA, 599 bp, Chicken  19866894240163_3
  misc_feature (1)..(6): n is any nucleotide
nnnnnnaaaatatgcctgcaatgccacaaaagcaaatggctctcagcaaggctagtgagagactctgggacatgtgctaggaccatcagtattcagctggtgacttcagtcaacacctgacaagtccctgagaaagctgaggaaaccggcttttgtagagcaggtgtgggactgaatgacctcctcaggttccctcccagtctccatgcttctacagccagacytgcacygcattcatttttcacttctgtctctgttggcattcagcatttatctttgaatgggcccctcctgatggaygccagcctaaaggaggacctacagggtgatctgaaygttccttccacrtgtggatgagagtatttcccatctgaggtgctgacatgtgacacragtggaacagacaccaattggatgatgaggctaactccaaagaaaaggaaaaaaatcaagacactgcttttatttttagttgcctgttttatcttctatagctaatttgatagttgcacattagttagcacctcaagcagaaagcgagccatcacactcactaaagggaaacacacacaaattagcagcacacgtgagcgcacaca

SEQ ID NO: 25133 - DNA, 600 bp, Chicken  19866894240163_4
tggctctcagcaaggctagtgagagactctgggacatgtgctaggaccatcagtattcagctggtgacttcagtcaacacctgacaagtccctgagaaagctgaggaaaccggcttttgtagagcaggtgtgggactgaatgacctcctcaggttccctcccagtctccatgcttctacagccagacytgcacygcattcatttttcacttctgtctctgttggcattcagcatttatctttgaatgggcccctcctgatggaygccagcctaaaggaggacctacagggtgatctgaaygttccttccacrtgtggatgagagtatttcccatctgaggtgctgacatgtgacacragtggaacagacaccaattggatgatgaggctaactccaaagaaaaggaaaaaaatcaagacactgcttttatttttagttgcctgttttatcttctatagctaatttgatagttgcacattagttagcacctcaagcagaaagcgagccatcacactcactaaagggaaacacacacaaattagcagcacacgtgagcgcacacacacccttctgtacatacccttctgccaagaatctggt

SEQ ID NO: 25134 - DNA, 600 bp, Chicken  19866894240163_5
aggctagtgagagactctgggacatgtgctaggaccatcagtattcagctggtgacttcagtcaacacctgacaagtccctgagaaagctgaggaaaccggcttttgtagagcaggtgtgggactgaatgacctcctcaggttccctcccagtctccatgcttctacagccagacytgcacygcattcatttttcacttctgtctctgttggcattcagcatttatctttgaatgggcccctcctgatggaygccagcctaaaggaggacctacagggtgatctgaaygttccttccacrtgtggatgagagtatttcccatctgaggtgctgacatgtgacacragtggaacagacaccaattggatgatgaggctaactccaaagaaaaggaaaaaaatcaagacactgcttttatttttagttgcctgttttatcttctatagctaatttgatagttgcacattagttagcacctcaagcagaaagcgagccatcacactcactaaagggaaacacacacaaattagcagcacacgtgagcgcacacacacccttctgtacatacccttctgccaagaatctggttgatagctgcgc

SEQ ID NO: 25135 - DNA, 600 bp, Chicken  19866894240163_6
cagctggtgacttcagtcaacacctgacaagtccctgagaaagctgaggaaaccggcttttgtagagcaggtgtgggactgaatgacctcctcaggttccctcccagtctccatgcttctacagccagacytgcacygcattcatttttcacttctgtctctgttggcattcagcatttatctttgaatgggcccctcctgatggaygccagcctaaaggaggacctacagggtgatctgaaygttccttccacrtgtggatgagagtatttcccatctgaggtgctgacatgtgacacragtggaacagacaccaattggatgatgaggctaactccaaagaaaaggaaaaaaatcaagacactgcttttatttttagttgcctgttttatcttctatagctaatttgatagttgcacattagttagcacctcaagcagaaagcgagccatcacactcactaaagggaaacacacacaaattagcagcacacgtgagcgcacacacacccttctgtacatacccttctgccaagaatctggttgatagctgcgctttctttcagagtacactctgctacaacgttcgctctcatttctt

SEQ ID NO: 25136 - DNA, 445 bp, Chicken  19866894240163_7
atcacactcactaaagggaaacacacacaaattagcagcacacgtgagcgcacacacacccttctgtacatacccttctgccaagaatctggttgatagctgcgctttctttcagagtacactctgctacaacgttcgctctcatttctttcatgtacaacatgaaagcattcagaggtttcttaatatgaggtctttttggctcttgttctttcctctgttcgtgctgaggcttcctaaaacgtggtgggggaagggagaaggagggaaaaaaagcatctatttaccttcagcctaaaraaaacccaaacccaatggaaatttccaatcagtggttacrgtggcaaataactggtaaaaatctgaatttcagtggtcatgtctcrccccctttcatgtctttttagagaactgactgaatgtaaaactcaggggggatatcaag

SEQ ID NO: 25137 - DNA, 405 bp, Chicken  19866894240163_8
cacgtgagcgcacacacacccttctgtacatacccttctgccaagaatctggttgatagctgcgctttctttcagagtacactctgctacaacgttcgctctcatttctttcatgtacaacatgaaagcattcagaggtttcttaatatgaggtctttttggctcttgttctttcctctgttcgtgctgaggcttcctaaaacgtggtgggggaagggagaaggagggaaaaaaagcatctatttaccttcagcctaaaraaaacccaaacccaatggaaatttccaatcagtggttacrgtggcaaataactggtaaaaatctgaatttcagtggtcatgtctcrccccctttcatgtctttttagagaactgactgaatgtaaaactcaggggggatatcaag

SEQ ID NO: 25138 - DNA, 359 bp, Chicken  19866894240163_9
atctggttgatagctgcgctttctttcagagtacactctgctacaacgttcgctctcatttctttcatgtacaacatgaaagcattcagaggtttcttaatatgaggtctttttggctcttgttctttcctctgttcgtgctgaggcttcctaaaacgtggtgggggaagggagaaggagggaaaaaaagcatctatttaccttcagcctaaaraaaacccaaacccaatggaaatttccaatcagtggttacrgtggcaaataactggtaaaaatctgaatttcagtggtcatgtctcrccccctttcatgtctttttagagaactgactgaatgtaaaactcaggggggatatcaag

SEQ ID NO: 25139 - DNA, 600 bp, Chicken  19866894240167_1
gcatgctcacacagaacatggtaacttgatgttctgctgaaagcataacttgtgttttttttaactagcttatgtactgtcatagtactgcaaaacctttgtcaaaatatttgggtatcagcacagtgtaagtgatgatccaaatgcctgatctaggtagccggtacaaagtacagcataaggggagaaggctcagtgcaagaaagctttttcaagctctttacactgttctgatcaaaagctcttctaaagaagtgttatgacagataaaatgagtacgtcttccactgggcacagctyctgctcagctctgggaagctgtgtgctccctctgtctctgtcaaatatctacaagtaatatatgatcattctggtgtgttgaacaataatattctgtttgtttcctgtgcctgtcatcatgtagcaggaataatgtgtttgataagagctgcttgcctctgcctgcccgaggagcaaggtggtgcagatgaaagcagaaggcctcttggcagcttgcatcctgcaccttgtgcccagctgggaggtggatgggagagtgattatgcatctcttactagataagaaagtgataataattct

SEQ ID NO: 25140 - DNA, 600 bp, Chicken  19866894240172_1
tctccatttagagggcactggaaccatttgcccagagaagctatggatgtcccatccctgggggtgttcaaatccatgttggatggggctttgagcaacatcacctatagagaggtgtttcttcccatggcaggagggttggaactgggtgatctctgaggtccttttccaatccaagccattctacctttcttggatatgtaaaacatatacaaacaggaaaaccgcagcttactctgcagaactacaggtaaaaatatgagaaagttaatatactaatcctacaactgcctttacagytagagagatgacagcattacaactagaacctattatcagaggtaaatattactctttagatccctgatactgtttcaaggatccatttccaacaatgcatcagtttcagtgcactgttgctatgataaactagcaaaaagatygcagagctatggagtaaatggtcttcccatgcacacaatttcctgggtatcctaaaagctccacattgctctaaaaaggctaaatagcgttgargttcagaaaatctagattcatttctctaacctgaagtagctttctttaagattcagaagactt

SEQ ID NO: 25141 - DNA, 600 bp, Chicken  19866894240172_2
actgggtgatctctgaggtccttttccaatccaagccattctacctttcttggatatgtaaaacatatacaaacaggaaaaccgcagcttactctgcagaactacaggtaaaaatatgagaaagttaatatactaatcctacaactgcctttacagytagagagatgacagcattacaactagaacctattatcagaggtaaatattactctttagatccctgatactgtttcaaggatccatttccaacaatgcatcagtttcagtgcactgttgctatgataaactagcaaaaagatygcagagctatggagtaaatggtcttcccatgcacacaatttcctgggtatcctaaaagctccacattgctctaaaaaggctaaatagcgttgargttcagaaaatctagattcatttctctaacctgaagtagctttctttaagattcagaagacttagatacagagaattttctctcactcctgttttttctatacaaaaatttgctgtggatgttttctcctttccaccctcatccccttgacagaagttggtattgagatgcatgctttgtgagaatgtctcattttctgtcaaaat

SEQ ID NO: 25142 - DNA, 600 bp, Chicken  19866894240172_3
tgcagaactacaggtaaaaatatgagaaagttaatatactaatcctacaactgcctttacagytagagagatgacagcattacaactagaacctattatcagaggtaaatattactctttagatccctgatactgtttcaaggatccatttccaacaatgcatcagtttcagtgcactgttgctatgataaactagcaaaaagatygcagagctatggagtaaatggtcttcccatgcacacaatttcctgggtatcctaaaagctccacattgctctaaaaaggctaaatagcgttgargttcagaaaatctagattcatttctctaacctgaagtagctttctttaagattcagaagacttagatacagagaattttctctcactcctgttttttctatacaaaaatttgctgtggatgttttctcctttccaccctcatccccttgacagaagttggtattgagatgcatgctttgtgagaatgtctcattttctgtcaaaatcccagtttttgctgttgagcagatacactgaaagagggagaacagagaaaaataacttcctggaagagcttaacttgtttagaactaaaaaaca

SEQ ID NO: 25143 - DNA, 600 bp, Chicken  19866894240177_1
ccggacagcaggcatgtacttctgcagtggtgattttgtacctggaggggacaatcacgctgccagatcctacacttcttgtttggggtgctgagtttcaagctctgctgccgtgggatgctaagagaactggtgtaaaagcagcatatgctcctacatctgcatccaaagccgctgctgcaccaattgctatcaaacaatttgctcctgctgtgacagcaattttgggtagtatttggcagctcaagctgccagaacaatcttgttcttattacatggatgtctagcaagctacacagmaaactgtaaagctaaaaattcactgttctgcaagaacgtggcagtttgactttgcattcctaatcaatccctcactgagtcactgacatatcaaggccctcaatcactgatggttaatggctggaaatgctgttttaagcaccaggggcctgctgagtgacccaaaccctagctgcctgactgcaaaggttcctcaagtcaaactggtctacagggaggcaaacyccctccctctgtactgtacttggccacgtaccactgaaggatgctttggccgttggggtgtagtctgcttgaaca

SEQ ID NO: 25144 - DNA, 600 bp, Chicken  19866894240177_2
tgggtagtatttggcagctcaagctgccagaacaatcttgttcttattacatggatgtctagcaagctacacagmaaactgtaaagctaaaaattcactgttctgcaagaacgtggcagtttgactttgcattcctaatcaatccctcactgagtcactgacatatcaaggccctcaatcactgatggttaatggctggaaatgctgttttaagcaccaggggcctgctgagtgacccaaaccctagctgcctgactgcaaaggttcctcaagtcaaactggtctacagggaggcaaacyccctccctctgtactgtacttggccacgtaccactgaaggatgctttggccgttggggtgtagtctgcttgaacaccatgattgttattacgtgcagcagcctcccagaagcatctctcttgagcatcttctctctgggatgccagggagcaccaggggtttccgtgtgacatgggacatctgaagtttcccacagaccttgacccaagatctgagcaaggtggttgcactgtgtgtgtgaggaacacaccttgctcccaggggatcctgaagtacagtgtgtgttgagactggcagcat

SEQ ID NO: 25145 - DNA, 600 bp, Chicken  19866894240177_3
catggtggtttttttttttcaatgcctgggggagctttctcttccatagatgacttcttggagcccccaaattgatgggtgtccctgatcaaggtgtgctgcagctgagcttccattctcctttcctatcctgcagccatggttggaaaggcaggatttgccccttcttgtctgtgctgatattgtcttctatttgccatttgtgtaatatctccccttgccttcttccctctctgcaaatgacgtgtcctgtccctagatatctaagcacatcctgctaagagcatggagcagattgaytgtgagcccttctgatgctgaattcagctgacaatcagctcctgatgccagcagctattcctggttttatcctcttccttcaatctgatgttgacaaggtcaagtctagaaacttctaacaaatgttactttctcattaacagccattaataggtggcaactcctgtttagtatataccagttgccactttaatcagctctctctttgtaagctttatgtttgaatagctactaattccggagtggtgaatggcattagagccagcacgtctccatgctttttgttttgcagtctgtatt

SEQ ID NO: 25146 - DNA, 600 bp, Chicken  19866894240177_4
gtatataccagttgccactttaatcagctctctctttgtaagctttatgtttgaatagctactaattccggagtggtgaatggcattagagccagcacgtctccatgctttttgttttgcagtctgtatttcttttaaagcaattggtatttgaatcccatttcccagtgaccatgactgctctctgaagagaaaggggtgagtggggaaaatgaggggatggatggatgaatggagagcaccatgagcatgttgcagctggcccacagagctctgctgccaagggaaacttcttccacrtggaggagtcttcactccagatcctgtaagtgcagttctctcagcctgcaccctcagtatccttggctgagracctctccagtttgcttgggacagtgaggtatcctaaagctgtgtaacccacacagcaaggacagagaactctccggtgcgttgggctgggatgagaggctgaagcagtaggagccctgcctttctgtggctgttctcatctatttattgctgcagtccctagtgtagttctgcaggcatggactcagatatgcacccagagcaattatacaagtgagtggtatcaat

SEQ ID NO: 25147 - DNA, 600 bp, Chicken  19866894240177_5
gtggtgaatggcattagagccagcacgtctccatgctttttgttttgcagtctgtatttcttttaaagcaattggtatttgaatcccatttcccagtgaccatgactgctctctgaagagaaaggggtgagtggggaaaatgaggggatggatggatgaatggagagcaccatgagcatgttgcagctggcccacagagctctgctgccaagggaaacttcttccacrtggaggagtcttcactccagatcctgtaagtgcagttctctcagcctgcaccctcagtatccttggctgagracctctccagtttgcttgggacagtgaggtatcctaaagctgtgtaacccacacagcaaggacagagaactctccggtgcgttgggctgggatgagaggctgaagcagtaggagccctgcctttctgtggctgttctcatctatttattgctgcagtccctagtgtagttctgcaggcatggactcagatatgcacccagagcaattatacaagtgagtggtatcaatatagaagatacataaatatggtgatttaaaattgtagcattaaacctgtatgcagagacctacagtttgagt

SEQ ID NO: 25148 - DNA, 600 bp, Chicken  19866894240181_1
acacattactttggatttattcttccatttatcctggtttttctaacactttacactggatttgcacacactttgctccagatttactcttactctaacctcgggtgtactcacaatttactctggctttaactcacacttttctccatgtttactaacactttactctgggtttactaacactttatttcaggtttacacagactttactatgggtgtactcttacttttctctgggtttcagacactctgtactccgggtgtactcacaccttacttcaggattttctcgctctataytctgggttcacttacaatttactctgcttttacttacacatractccaagttgactcacacattacttcaggtttattcagacctcactctgggtttactcactctctactccaggagagcttactatttactgtagctttaatcacactttactctgggtttagtcactctctaatctgggtgtactcagaatttactacaggttttactcaccctttactccatgtttgctaacatttttctctgggtttgctctctctactccaggtttattacgaccttactcagggtgtactcca

SEQ ID NO: 25149 - DNA, 600 bp, Chicken  19866894240181_2
ctaacactttacactggatttgcacacactttgctccagatttactcttactctaacctcgggtgtactcacaatttactctggctttaactcacacttttctccatgtttactaacactttactctgggtttactaacactttatttcaggtttacacagactttactatgggtgtactcttacttttctctgggtttcagacactctgtactccgggtgtactcacaccttacttcaggattttctcgctctataytctgggttcacttacaatttactctgcttttacttacacatractccaagttgactcacacattacttcaggtttattcagacctcactctgggtttactcactctctactccaggagagcttactatttactgtagctttaatcacactttactctgggtttagtcactctctaatctgggtgtactcagaatttactacaggttttactcaccctttactccatgtttgctaacatttttctctgggtttgctctctctactccaggtttattacgaccttactcagggtgtactccatctgtacttcatgcatactctcaatttactccaggtttttac

SEQ ID NO: 25150 - DNA, 600 bp, Chicken  19866894240182_1
aaatgagagtaaatccagtgtaaatgtgaggtaccccaaaataatctgtgagtaaaatccgagggaaagcttgagtaacctgtagtaaagtgtgagtaaacttgaagtaaagtgtgagtaaacctggaggagagagtgaggaaaagactgagtaatgggtgagtaacacctcgagtaaagtgtgaacaaatcctaaagtaaggtgtgaataaagttgggtttttgcagtggaaatttccagtcacaaagaaagctgctgaacagagcaaggttgagacaatccgaccagggtagaattgscacaggcaatactaggtaaggtagttatatagggcaggggagagtccagtacaggacagaactagtgggcagactgttgaaaatattgtcctcctattgccataaaaaatacagaacacacctaaaaacaaagggttggtaacagaccttgaatggaaatgtcaggtagcagcagcatgagaaggttgtgagcctgagacactctaccaatgagtcccaggagaggctttacctgcgtcggacccagggtatggatttcaccgactagttgtgcaatttctcccttgtcagtaatggggt

SEQ ID NO: 25151 - DNA, 600 bp, Chicken  19866894240194_1
atactaggacccaagaaagaaataaagaaatagtgtaatctactatgacctacaagaataattgcttatgtatagagaggacaggagtcatagaaggaaaaaataatataaggccagcatgcttattgtttgtagtgcttagtatcttcttttgtactaaagcaagctcaagtgtccttatccacagagaaacaaaatttcagctcttgcctctcctattctgttctgtaggacagatctttaagagttctgttaacaactgtataacttgtctcactggagatggtcttgatcagaagyctgtgacacctgctgccctctcagctatctgaaatatttttcttttcttttcctgtgggtatatggaactaccatcactagatttaatttaatgccttgcaggcaatgcagtagctatcaaacacccaagagcatcagctaatgatcagtgatattacccacgtcctactttacagggaaactacaactaagtctcttgcactgccttygaggttttgattaaaaatcagtgctgaaatcaagcttccaacctgccagagaatttacacctacttgctaaatcgtcacctctgccctgaa

SEQ ID NO: 25152 - DNA, 600 bp, Chicken  19866894240194_2
cctctcctattctgttctgtaggacagatctttaagagttctgttaacaactgtataacttgtctcactggagatggtcttgatcagaagyctgtgacacctgctgccctctcagctatctgaaatatttttcttttcttttcctgtgggtatatggaactaccatcactagatttaatttaatgccttgcaggcaatgcagtagctatcaaacacccaagagcatcagctaatgatcagtgatattacccacgtcctactttacagggaaactacaactaagtctcttgcactgccttygaggttttgattaaaaatcagtgctgaaatcaagcttccaacctgccagagaatttacacctacttgctaaatcgtcacctctgccctgaaggttttctgttccaaaaaatcttattttcatggacagagaggtgaggcataagcccaatctagaattagattttgcagtgggttaataggggcttaccctgatgtcttgtagggcacctgtgagagaaatgtattttctgggaacgccatgagtctcagccctgtgcctttcttaccctatctcctctgtaggtgagacacacaaggag

SEQ ID NO: 25153 - DNA, 599 bp, Chicken  19866894240206_1
  misc_feature (1)..(114): n is any nucleotide
nnnnnnnnnnnnnnnnnnnnnnnnnnnnnnnnnnnnnnnnnnnnnnnnnnnnnnnnnnnnnnnnnnnnnnnnnnnnnnnnnnnnnnnnnnnnnnnnnnnnnnnnnnnnnnnnnncgttttctctctaaatagttttctttctaaatagagcctggaagtctctactgggctgctgagttcagtgcaggaagaaaggcagattcatactgtggtgtttgctaccagcgtccttcttgtgacttacctccttatgcccagttcacatcacttatctgaaatttttgttacataattgtatartgtgtatgttgtaatgtaagaggaaaggtttgtaacaacaaaaacctttactacaataacagatgtctttaaaaggactcccaaataagwaatctgtaagtcagagcaaattcttcaggcttactataggatgcagaaatcgttgattggttgtgttgcatccatttcagtgaaagatttgttcaaaacatgggaaattccctataaatgtgaatttgttaaaagcatatttctggtttctagctgtgctctcttactgagtcckcaggctttcaggtacaacactttaaaggccaaca

SEQ ID NO: 25154 - DNA, 599 bp, Chicken  19866894240206_2
  misc_feature (1)..(24): n is any nucleotide
nnnnnnnnnnnnnnnnnnnnnnnncgttttctctctaaatagttttctttctaaatagagcctggaagtctctactgggctgctgagttcagtgcaggaagaaaggcagattcatactgtggtgtttgctaccagcgtccttcttgtgacttacctccttatgcccagttcacatcacttatctgaaatttttgttacataattgtatartgtgtatgttgtaatgtaagaggaaaggtttgtaacaacaaaaacctttactacaataacagatgtctttaaaaggactcccaaataagwaatctgtaagtcagagcaaattcttcaggcttactataggatgcagaaatcgttgattggttgtgttgcatccatttcagtgaaagatttgttcaaaacatgggaaattccctataaatgtgaatttgttaaaagcatatttctggtttctagctgtgctctcttactgagtcckcaggctttcaggtacaacactttaaaggccaacatcaactctttcagctaygtctttaacctaatgagctccaatccattttacttctaaaagaactaattaattgactttaagtcctgcaaag

SEQ ID NO: 25155 - DNA, 600 bp, Chicken  19866894240206_3
cacttatctgaaatttttgttacataattgtatartgtgtatgttgtaatgtaagaggaaaggtttgtaacaacaaaaacctttactacaataacagatgtctttaaaaggactcccaaataagwaatctgtaagtcagagcaaattcttcaggcttactataggatgcagaaatcgttgattggttgtgttgcatccatttcagtgaaagatttgttcaaaacatgggaaattccctataaatgtgaatttgttaaaagcatatttctggtttctagctgtgctctcttactgagtcckcaggctttcaggtacaacactttaaaggccaacatcaactctttcagctaygtctttaacctaatgagctccaatccattttacttctaaaagaactaattaattgactttaagtcctgcaaaggttgttaactcctttcagtgtcagagaaattgaagctgtcgtgctcaaagcccaaccgactgcgagcaagtggagggttacacatacgtggtgccattgttgccaaaggaaatggctygagaagccsaatgcttttgtttttgataggcaagtgttgctgcgacagtgcacaagct

SEQ ID NO: 25156 - DNA, 600 bp, Chicken  19866894240206_4
taagaggaaaggtttgtaacaacaaaaacctttactacaataacagatgtctttaaaaggactcccaaataagwaatctgtaagtcagagcaaattcttcaggcttactataggatgcagaaatcgttgattggttgtgttgcatccatttcagtgaaagatttgttcaaaacatgggaaattccctataaatgtgaatttgttaaaagcatatttctggtttctagctgtgctctcttactgagtcckcaggctttcaggtacaacactttaaaggccaacatcaactctttcagctaygtctttaacctaatgagctccaatccattttacttctaaaagaactaattaattgactttaagtcctgcaaaggttgttaactcctttcagtgtcagagaaattgaagctgtcgtgctcaaagcccaaccgactgcgagcaagtggagggttacacatacgtggtgccattgttgccaaaggaaatggctygagaagccsaatgcttttgtttttgataggcaagtgttgctgcgacagtgcacaagctcttacagctggggcttcacctgtgtctgtgtacctctgcaatagctcataa

SEQ ID NO: 25157 - DNA, 600 bp, Chicken  19866894240206_5
atgtgaatttgttaaaagcatatttctggtttctagctgtgctctcttactgagtcckcaggctttcaggtacaacactttaaaggccaacatcaactctttcagctaygtctttaacctaatgagctccaatccattttacttctaaaagaactaattaattgactttaagtcctgcaaaggttgttaactcctttcagtgtcagagaaattgaagctgtcgtgctcaaagcccaaccgactgcgagcaagtggagggttacacatacgtggtgccattgttgccaaaggaaatggctygagaagccsaatgcttttgtttttgataggcaagtgttgctgcgacagtgcacaagctcttacagctggggcttcacctgtgtctgtgtacctctgcaatagctcataaacagtacggatagggccttatacataactaaggctgtttagttttaaaagagagagagagagactgctgttggatttgtatatgtatttatcatgtagtattagctgtggtatttaactctctaaagcctaacttccaaccttactagttaaaggctattagcatgtgtgaggatagctgcagttgtctga

SEQ ID NO: 25158 - DNA, 600 bp, Chicken  19866894240206_6
tgttaaaagcatatttctggtttctagctgtgctctcttactgagtcckcaggctttcaggtacaacactttaaaggccaacatcaactctttcagctaygtctttaacctaatgagctccaatccattttacttctaaaagaactaattaattgactttaagtcctgcaaaggttgttaactcctttcagtgtcagagaaattgaagctgtcgtgctcaaagcccaaccgactgcgagcaagtggagggttacacatacgtggtgccattgttgccaaaggaaatggctygagaagccsaatgcttttgtttttgataggcaagtgttgctgcgacagtgcacaagctcttacagctggggcttcacctgtgtctgtgtacctctgcaatagctcataaacagtacggatagggccttatacataactaaggctgtttagttttaaaagagagagagagagactgctgttggatttgtatatgtatttatcatgtagtattagctgtggtatttaactctctaaagcctaacttccaaccttactagttaaaggctattagcatgtgtgaggatagctgcagttgtctgaaaaaatgag

SEQ ID NO: 25159 - DNA, 600 bp, Chicken  19866894240211_1
ggggtaagttgtaaaggctaatcagccagtgtgacaagcagttgagatgctaaatcagctaagaaggtacttattatttttaagtataatcttagtaatacattttcttatttcatctatttgtagatttgttctattattacatgtgtattattttcaatctaactgtaggtttttacccttaaatcttttctaaggatttaagaatctgacaacctacagagcttcccatatttttattcttgaagtcagagagcagaaatactctttgttgtgcccggcatcccagtacctttatcygtggtatccaaggagtatcagagtgytgaatgcctgaaccaagccaagaaatgataattcaaggggcatatgaaagaatcatctccagtggcatgtagaaggtggatatgtttcccgcctttagcagaatatgtggggacctacctaaagtttaggacgcttaaatgatcatagagcatagtgctataaattgtgtggtatgtagctacttccttgaaaaataactacaaagcattttggttttaatactgtattgctaactgatagctttgaacaactttttttwaaaagcaatactga

SEQ ID NO: 25160 - DNA, 600 bp, Chicken  19866894240211_2
cagtgtgacaagcagttgagatgctaaatcagctaagaaggtacttattatttttaagtataatcttagtaatacattttcttatttcatctatttgtagatttgttctattattacatgtgtattattttcaatctaactgtaggtttttacccttaaatcttttctaaggatttaagaatctgacaacctacagagcttcccatatttttattcttgaagtcagagagcagaaatactctttgttgtgcccggcatcccagtacctttatcygtggtatccaaggagtatcagagtgytgaatgcctgaaccaagccaagaaatgataattcaaggggcatatgaaagaatcatctccagtggcatgtagaaggtggatatgtttcccgcctttagcagaatatgtggggacctacctaaagtttaggacgcttaaatgatcatagagcatagtgctataaattgtgtggtatgtagctacttccttgaaaaataactacaaagcattttggttttaatactgtattgctaactgatagctttgaacaactttttttwaaaagcaatactgaaattaccatccaaatgtggcaaagga

SEQ ID NO: 25161 - DNA, 600 bp, Chicken  19866894240211_3
cagtacctttatcygtggtatccaaggagtatcagagtgytgaatgcctgaaccaagccaagaaatgataattcaaggggcatatgaaagaatcatctccagtggcatgtagaaggtggatatgtttcccgcctttagcagaatatgtggggacctacctaaagtttaggacgcttaaatgatcatagagcatagtgctataaattgtgtggtatgtagctacttccttgaaaaataactacaaagcattttggttttaatactgtattgctaactgatagctttgaacaactttttttwaaaagcaatactgaaattaccatccaaatgtggcaaaggaacaggtggaattgttygtaatcagagggccctttattccttcattactagtaattcctgtaaatcacaataattataataatgtacattcaagatctctccctactgagatttaatttcttgtttttacacgtccattcttgtgcatgagctttttaaatttgctcactagcaatcattggaagcagtataagaactgctgacataagccatgtgaaatcacatcctatagcctccctcacacatctgtgtgcaggaaat

SEQ ID NO: 25162 - DNA, 582 bp, Chicken  19866894240211_4
gccaagaaatgataattcaaggggcatatgaaagaatcatctccagtggcatgtagaaggtggatatgtttcccgcctttagcagaatatgtggggacctacctaaagtttaggacgcttaaatgatcatagagcatagtgctataaattgtgtggtatgtagctacttccttgaaaaataactacaaagcattttggttttaatactgtattgctaactgatagctttgaacaactttttttwaaaagcaatactgaaattaccatccaaatgtggcaaaggaacaggtggaattgttygtaatcagagggccctttattccttcattactagtaattcctgtaaatcacaataattataataatgtacattcaagatctctccctactgagatttaatttcttgtttttacacgtccattcttgtgcatgagctttttaaatttgctcactagcaatcattggaagcagtataagaactgctgacataagccatgtgaaatcacatcctatagcctccctcacacatctgtgtgcaggaaatatttggcagtgtgctgcggaagaatacccgggcagcct

SEQ ID NO: 25163 - DNA, 600 bp, Chicken  19866894240215_1
caatatgaaagtgaaaagtggaggattttggtgctttttattccaaacttaattcaataatagagttttctggctgttgcgaaggaaactttgtgctgcacattgtataaatgcaacactttctatcaatgccaccatatttttccttcgagaaaacatttgtacctttcattatttctgcagttacatgacttctcatgagaaaaccacgtcttaaaatgaaaataaccctttacaactgtgtttcacttgtatggcacttcaagtatcagtgaagttgcacatacagtgagatctgtyttcttctgttaaaaacactgatattttgttgatacttgctaacaagtccaatgacagttgcaggcttttcctaagcagtttcaagggtcaagataccaaagtacgagtagatgtgatcagtgcttagcttgtggatgaaacacctcaatctcatcaaagtcctgatgaccagtgctgtttgtgagccctgatgctgttaccatgatcttatcttgcagcagagattccagtcccacttttgttagattgctctgggagaggagctggtgttaaaaccttgaaagtcatggatgtgtggct

SEQ ID NO: 25164 - DNA, 600 bp, Chicken  19866894240217_1
tgcacagtattaaagtatatacgcatgtgtataaagactcaaacatatactgtctgtacatactatgttgtgtgagcacacttcagcaaaatcattacaatttgtcatatattgtcccctccaccactatttgaagatgaaagttttcaatactaatgctgcaaagtgggtattatgttgatttatgctaatcggttctatagatgctgtcatattatattgttaagtgatgacatgggtgaaatatgttgcttccattattaaaagcccacaagtgctggtgcgaaaacagcaggggarccacccacctctacagtcyccatgatctgtttgatgcaattgggagtatgggacttctcccactttcccttgtattcatcagtccttcataggcacagtgtactacagagcgattacaaaggtgtaaataatgagacattcttcaagtgccttccagttcactggctgactaggacagggcccattagagtggacaagcaagcgtccttacacacctaatatggcaacccaacctaggagaatggctatttttgcaccaaatggtagagtaagaaacctcagtgacagacagcaatttct

SEQ ID NO: 25165 - DNA, 600 bp, Chicken  19866894240217_2
tacgcatgtgtataaagactcaaacatatactgtctgtacatactatgttgtgtgagcacacttcagcaaaatcattacaatttgtcatatattgtcccctccaccactatttgaagatgaaagttttcaatactaatgctgcaaagtgggtattatgttgatttatgctaatcggttctatagatgctgtcatattatattgttaagtgatgacatgggtgaaatatgttgcttccattattaaaagcccacaagtgctggtgcgaaaacagcaggggarccacccacctctacagtcyccatgatctgtttgatgcaattgggagtatgggacttctcccactttcccttgtattcatcagtccttcataggcacagtgtactacagagcgattacaaaggtgtaaataatgagacattcttcaagtgccttccagttcactggctgactaggacagggcccattagagtggacaagcaagcgtccttacacacctaatatggcaacccaacctaggagaatggctatttttgcaccaaatggtagagtaagaaacctcagtgacagacagcaatttctgtaccataggacagagatc

SEQ ID NO: 25166 - DNA, 600 bp, Chicken  19866894240217_3
gtagagaagggtaatgtttagctgcttctcctttggagcatgggcatggcaattattattgataacaacactttgctgtaagttgaaattaaatgtactggtgttcacgtgtaggtatagccaatgaccactgacctatacctgctgtgagttatggaaagattgttattttcaattcaactctgaaggaggaatttaatgaaatggaaatgagttattctgcattcaccttttgtgtggttttgtgtttgccatatcacatacttgagtgcatgtaagtctttcataggatgagtacartctgactggcacaggtgacttccactgtccagrgtgttttgtttgtatttgtctttttgtgttaattaccagaacatggagaacacattggcttctggtgagtgtataacagaatcagcttataagcagacataaaatgttactatattttaaaacaattacttaggtcatgctgtactgtggctaaaataacatgaccttcacctacctacctgttgtgaaatttaacctcaaaggatggattctagctgggtaatttcacttccaagttactctagatttattatctaagcccagcct

SEQ ID NO: 25167 - DNA, 600 bp, Chicken  19866894240217_4
tggagcatgggcatggcaattattattgataacaacactttgctgtaagttgaaattaaatgtactggtgttcacgtgtaggtatagccaatgaccactgacctatacctgctgtgagttatggaaagattgttattttcaattcaactctgaaggaggaatttaatgaaatggaaatgagttattctgcattcaccttttgtgtggttttgtgtttgccatatcacatacttgagtgcatgtaagtctttcataggatgagtacartctgactggcacaggtgacttccactgtccagrgtgttttgtttgtatttgtctttttgtgttaattaccagaacatggagaacacattggcttctggtgagtgtataacagaatcagcttataagcagacataaaatgttactatattttaaaacaattacttaggtcatgctgtactgtggctaaaataacatgaccttcacctacctacctgttgtgaaatttaacctcaaaggatggattctagctgggtaatttcacttccaagttactctagatttattatctaagcccagcctgaactcagttcactgcttttgatcactatatta

SEQ ID NO: 25168 - DNA, 599 bp, Chicken  19866894240225_1
  misc_feature (1)..(74): n is any nucleotide
nnnnnnnnnnnnnnnnnnnnnnnnnnnnnnnnnnnnnnnnnnnnnnnnnnnnnnnnnnnnnnnnnnnnnnnnnncccccagtcataacaagagttttttggaaggtggctgtatctctagactttgcctacataggttttcctgttattatggatttatgattatgtacttaatgatgacaccttctctgcctgacgatgcatatacttttacataatggcatttaagatttacgtatttactaatctaaaagagattcttcatgtaagtaaagaattacatatgtactcttcctttaastgtaccataaataatctggatcattttccaagaaagcatactagggctctggtgaggcactttgccgggctgactgcagtggtgactgcatcttatgcttaccatgacagtgtatgaagacaaaaatattaaattttcmttactactctctctgaagtaactgcagtgcactttaaatagatgtacaattcatgagaatgaatcattaaaagggattgagttgaattgtgcctggcagatgttgtcacaagcattgctgaaatgcttaaacacttccagcgagcagcaataggacactt

SEQ ID NO: 25169 - DNA, 600 bp, Chicken  19866894240225_2
tcctgttattatggatttatgattatgtacttaatgatgacaccttctctgcctgacgatgcatatacttttacataatggcatttaagatttacgtatttactaatctaaaagagattcttcatgtaagtaaagaattacatatgtactcttcctttaastgtaccataaataatctggatcattttccaagaaagcatactagggctctggtgaggcactttgccgggctgactgcagtggtgactgcatcttatgcttaccatgacagtgtatgaagacaaaaatattaaattttcmttactactctctctgaagtaactgcagtgcactttaaatagatgtacaattcatgagaatgaatcattaaaagggattgagttgaattgtgcctggcagatgttgtcacaagcattgctgaaatgcttaaacacttccagcgagcagcaataggacacttggaggcataattatcccataggcacagaagtcacacatttcatgctaatgcacaaagggcctcataagaaacctcgtggagctctactgcatgattactgctccttcatcatctgctggatagctttgagcaaggctaca

SEQ ID NO: 25170 - DNA, 599 bp, Chicken  19866894240231_1
  misc_feature (1)..(202): n is any nucleotide
nnnnnnnnnnnnnnnnnnnnnnnnnnnnnnnnnnnnnnnnnnnnnnnnnnnnnnnnnnnnnnnnnnnnnnnnnnnnnnnnnnnnnnnnnnnnnnnnnnnnnnnnnnnnnnnnnnnnnnnnnnnnnnnnnnnnnnnnnnnnnnnnnnnnnnnnnnnnnnnnnnnnnnnnnnnnnnnnnnnnnnnnnnnnnnnnnnnnnnnnnnctgaaagttttgtgaaaaaatggcacagtggttaaattgcaaccattactatgttggggaaaaaaaaaacagacaaaaattccaaataaatactaaawagcagaggatcaataattaaagcaattcttccccaggaccaacaaagttatccatcaccttggttttcgtttaggtcccacaaatcatgctgtcagtgattccttactggcttcacttgtacagtcgttcagctcagtgcacttttagctgaccagtctgtgataattccattctttgtttgcacttaagctgtattcatggaattgtgtccagctgtgttttcaatataattccccatgtaatcctattgatataagccttgtggaatctatactagccaagcaaaggatggtcatat

SEQ ID NO: 25171 - DNA, 600 bp, Chicken  19866894240233_1
cagtttccccgcggcggttcgtaggttagccttcagacctcaataaatctctttgtaagactcgtgttttcagcttcctaaagacacgccgagccccaagtcctgagcctcctgagcgctgtactcacgcaagggaatatctcattatttggccgtgtagctggattcagccgcacaccctccgcaccccctcccctcttcatctctgctccacttttatcagcattgcgtctgtccgaggaagtgaatccatagacagctccatcctccatccctgcagtggctgacgtgggacgcacsaccttgtctgcgacagagatgccggtagcagagcgttttccttgtttaggagaggggcaagaacacccctactgcaccttgcgggattgcttggtttcacgctcgcctgtgaaaagcaggcgcctttagggagggctcctgggggaagmgggacgaggaaagggaagaagcaccggaggacactgcgtggcggtgaggaagggagctgcccagctctcgaggctgttctgcagcagacgcgtcgcacgaacgagcagttgggaacgggtgttgcctgcagccctgggaagaggcagcagt

SEQ ID NO: 25172 - DNA, 600 bp, Chicken  19866894240233_2
tggccgtgtagctggattcagccgcacaccctccgcaccccctcccctcttcatctctgctccacttttatcagcattgcgtctgtccgaggaagtgaatccatagacagctccatcctccatccctgcagtggctgacgtgggacgcacsaccttgtctgcgacagagatgccggtagcagagcgttttccttgtttaggagaggggcaagaacacccctactgcaccttgcgggattgcttggtttcacgctcgcctgtgaaaagcaggcgcctttagggagggctcctgggggaagmgggacgaggaaagggaagaagcaccggaggacactgcgtggcggtgaggaagggagctgcccagctctcgaggctgttctgcagcagacgcgtcgcacgaacgagcagttgggaacgggtgttgcctgcagccctgggaagaggcagcagtgaggaagcacgcgatgcccatacggctacatccagcggtgcggcaatccgctcctcctgcggacctgatcctgagcgttgctccagcaaggccaggtatcgtgtaactgcagacacgcttggggcgagtggctgtgaggcacgggcagc

SEQ ID NO: 25173 - DNA, 600 bp, Chicken  19866894240237_1
aaatcagctctaaaattggtcatgaagccagaaagtcagccacagagccagcctgccagggaggtagccacgtagcccactacctgctacaacagcaagccagcataatgccagccagttacaaagcctacgtcaacgaggcacactgctatctgtgaagctagtgagctgagcagtcacaatgtcaggcacaaaaacagccagatgggcacttaaaacaactagtacactgcaacagaaacacttcaaattctgaagctttctgtaccttagtaagctacatgttatgattccaatgtytctttcacttctttttttctaggggagtacatggtgatgacggtttcctttgacttaagtagacgtatgggttattttgccattcagacctacattccctgcatcctgactgttgttctgtcctgggtttccttctggatcaagagagactctacaccagccaggacatccctcggtaagagaaaagggctgtttcgtacatgttgcttgttgaccactgctgcaacactagcagactggaagtgtcggagtatgaaagctcctaaagcatttaggcattattcagcttagtgaagtcca

SEQ ID NO: 25174 - DNA, 600 bp, Chicken  19866894240238_1
cctcatttccacagcttcttgccatctctcattgtgcccttcctccttgttactgttccttcctcattttgtgtcctgcaccagtttccactttgcagactctttctcatgctgaatgattgtccagtgtccacattccacaactcttcgcccacagaccctggcaaccttgctcctggatgctcattcagccttgctctcccttttgcaagaacagctcctaattcccatacaaaatgccttactcaaaccttcctttcccttcctgctccacttttctctggttcttcgaaccctatygcatccaccacagcatttgccctttggcccaagtgagcagcatcttcctctaccacccctgaaagccagcagagaaggaaagaagtaattgtcagagagagtgcagcacatgggctctctggggatacaagactaattcaaacaattcacatgattaaaaaataaggcactgcctatcagcctcaaactcagaaacacggagacagatactctttccttctcatttcagttttcctgtgaaacagatgatattcaagtttaataaacctattaacaactgcccacagctttgtaaaacca

SEQ ID NO: 25175 - DNA, 599 bp, Chicken  19866894240240_1
  misc_feature (1)..(154): n is any nucleotide
nnnnnnnnnnnnnnnnnnnnnnnnnnnnnnnnnnnnnnnnnnnnnnnnnnnnnnnnnnnnnnnnnnnnnnnnnnnnnnnnnnnnnnnnnnnnnnnnnnnnnnnnnnnnnnnnnnnnnnnnnnnnnnnnnnnnnnnnnnnnnnnnnnnnnnnnnnctataatggaagataaatatttgctaagtgaccactaacagagagtggaagcaagaccagtttagcaaagctagtagaaatgctgtcattcatattccgtttattccatatgacacagcttgtaaaaagcacaaaggaaaaactgmgaaaaccattatttaagtaatatcatttggtattctgtagctaaaaatgttatgctcccacatagaaacaaggaccacgtgtggaaaacaatatctataaacaagaatggaaactataatttgttcttaagtaatgacacagacagatttcttatgctttttatttctaaatgtgtgtcttagtttttgcaaacataccctttccaaaaatatatgcctgtcctctgaaatattttgaccatgccatagaagagagttccataaacttcattggaaaaagcaatcttcaaaagtcactc

SEQ ID NO: 25176 - DNA, 600 bp, Chicken  19866894240240_2
catttggtattctgtagctaaaaatgttatgctcccacatagaaacaaggaccacgtgtggaaaacaatatctataaacaagaatggaaactataatttgttcttaagtaatgacacagacagatttcttatgctttttatttctaaatgtgtgtcttagtttttgcaaacataccctttccaaaaatatatgcctgtcctctgaaatattttgaccatgccatagaagagagttccataaacttcattggaaaaagcaatcttcaaaagtcactctgaaagtaattcctcctatttatytccatggaaactacaacagatacaaagagcacaatcacactagttgatagagcaaattctcagctacaaaacgccatttctcaatgcagtcaccaccctgagctatgtatttgaccagtgaacaagagccctgcgtgccatgcttgtaaaagtctgcgccagcagaggtggcccactgtcagtatcaacactccagaaacacaccacccactgccttgctatgctcacatccactgtctggtctacatcaatgttcagcaggtgtcagtgaacgtcagtgggtgctattttttctatctg

SEQ ID NO: 25177 - DNA, 600 bp, Chicken  19866894240242_1
taccaatatgtgcagaaacaccgttctttttatctcccaccatattacagccctgcatcatgtatctggtatatctcatggagtaagttagaaatagactcatttatacacaatgggaaataggaaagaagcattttttctaagcatcttgagaaacactttttcctaccaaaacgaagtatatactaccctggctgatttattacctttgcctctgagcttaatggatttattaacattaagtaggtaaagactttaatctaaaatagacctagagttgtagatcagatggatttgtgstgctgtttgggggaaaaacagaaatgctctgttcaatttcggccaaaggacagctgtgctcaatggcatcggtgagaggaaggggcggccaccagcactggtcactgggaacagctgtcccatccggtgtgcaaatctcactgctgggccggtgagtgaggtggtgccgtgggtttgagctcacagagaatctcatcgaatcatagaatggcctgggttgaaaaggaccataatgatcatctagtttcaacccccctgctatgaaggttggacaggccaataagatcagctaatccaacc

SEQ ID NO: 25178 - DNA, 600 bp, Chicken  19866894240242_2
gctgtcccatccggtgtgcaaatctcactgctgggccggtgagtgaggtggtgccgtgggtttgagctcacagagaatctcatcgaatcatagaatggcctgggttgaaaaggaccataatgatcatctagtttcaacccccctgctatgaaggttggacaggccaataagatcagctaatccaaccgtcagcccatgcctgtgtgtgctccaggtcacatcactcggtgccacatccacccttttgttgaaaacctccagggaacagaattgtacaatcattaagggtagaaagaccgrccaacttccagattgttcccatcagcacagcattcattcactccccaaagagcaacccgaggatttttccttcccagaaaggggaagattgatcagaaatgaacttgaatgcatgcaacatgttaaatcaccgagttccgcgcaccgtgtttgattttcttcaccgctgctctgctgtgctccctcgctggatttcaaagcactcagagcgctctgctctgcgatatctggtttcaggcaagcagcgtggcagtgtgcctgagctgagaaaatatgcttgaagtctgcattcacaggcgg

SEQ ID NO: 25179 - DNA, 599 bp, Chicken  19866894240252_1
  misc_feature (1)..(90): n is any nucleotide
nnnnnnnnnnnnnnnnnnnnnnnnnnnnnnnnnnnnnnnnnnnnnnnnnnnnnnnnnnnnnnnnnnnnnnnnnnnnnnnnnnnnnnnnnncagtccaagagaaaactgtaacatattaacaataaatttaactgtttaacgtgagaaagcttaataatattggaatccttccctgtatacctttgaaagtcacgctggatgacaaatctcccacccacctgctgtgacaacagggaaggcagggaaaacatgtgggaacaacagggagatacgatacatggggtagcaacagtgcacagragggaagcctaattcaagaaacacagattggcagaaaacttcaaagaacagggtgagcttttcagggcccaccacagactgtgagtctgtgttatggtgcccagataacctacaagtcacttctgatcttcaaagtcgatgaagaaaagtcactctgtactcctcacaccactacatagcttcacttttttagttcctctccacyctctgctgatgaccgactttttcttgctagtgctgatagtaagatgtttctatgctgctttcccgtrcagagatcttccacagaaatccaagcc

SEQ ID NO: 25180 - DNA, 600 bp, Chicken  19866894240252_2
atctcccacccacctgctgtgacaacagggaaggcagggaaaacatgtgggaacaacagggagatacgatacatggggtagcaacagtgcacagragggaagcctaattcaagaaacacagattggcagaaaacttcaaagaacagggtgagcttttcagggcccaccacagactgtgagtctgtgttatggtgcccagataacctacaagtcacttctgatcttcaaagtcgatgaagaaaagtcactctgtactcctcacaccactacatagcttcacttttttagttcctctccacyctctgctgatgaccgactttttcttgctagtgctgatagtaagatgtttctatgctgctttcccgtrcagagatcttccacagaaatccaagcctaatattgcagaaggcagaaaggaccacagttctgttcctggtttggtacagacagtccttcatggactcatcatccccagcactcccttttagttggcttggcctttagacagaacccaactggtgaaataacctgctgcacaaactgatgtgtagacagctcagtatcagtatacaatctgtaggagaagatgataaatgcgta

SEQ ID NO: 25181 - DNA, 600 bp, Chicken  19866894240252_3
gatacatggggtagcaacagtgcacagragggaagcctaattcaagaaacacagattggcagaaaacttcaaagaacagggtgagcttttcagggcccaccacagactgtgagtctgtgttatggtgcccagataacctacaagtcacttctgatcttcaaagtcgatgaagaaaagtcactctgtactcctcacaccactacatagcttcacttttttagttcctctccacyctctgctgatgaccgactttttcttgctagtgctgatagtaagatgtttctatgctgctttcccgtrcagagatcttccacagaaatccaagcctaatattgcagaaggcagaaaggaccacagttctgttcctggtttggtacagacagtccttcatggactcatcatccccagcactcccttttagttggcttggcctttagacagaacccaactggtgaaataacctgctgcacaaactgatgtgtagacagctcagtatcagtatacaatctgtaggagaagatgataaatgcgtagttttgaaaggtttaaggtttacaagtttttccagaattaagccagagatactccaaaagttgccac

SEQ ID NO: 25182 - DNA, 600 bp, Chicken  19866894240254_1
tcttcccttcagagaataattccaactttccttttgaaagcatttatgttaactgtgcttcaaataaaggtatttacaaagtaattttgtgttgtctataattcaagcatctgctgttaaactgattgcttcccaaagcacaccacaaatgtttatgttgtaagaataaatgcatggggacaaaggaaaaagaaatctgaatttagtttactgctgctactgtttaattggttcattggcaattttcttgtcattcaccttctgattactagtctctcactgtgatgataaactagaaaragaagtgaaatcgcttactcctcaaaggaatagcagaataaaaagtttttttggaaaatgaagtctctattcatgcaattatctatcttaaaactatttcacgcataatataatatagtcttcattaattccactttcaaaatagtttataggacaccaacaaatgaccagtagtataccaaatatttcacagatatggctataaagaaaatcatacatttttattagaatatcagaaaacctcagtgtagacagttagcatcatacaagcattctgcttttagtaatttctgttcatga

SEQ ID NO: 25183 - DNA, 600 bp, Chicken  19866894240259_1
atattccaggacaagtgattggctctgagccaaggcagagaaagacagatttagaccattagacaagaaagtactttttcctctcctgctgtaggcaatgtatcattatccctgtaattaaatttagtgcctttgtggcaatgtcttctgcagaatttatctaagtgtggactttctttccctctcctttaactacagtacaattaaccgtgaagtgttcactcatttcaagcttttcagtcgggcttcagaagtaagtgccttggtgggaatgctgtaatcatctcggaatagaacacragcacaagacctgtggtttggcaactttcacctttgctgaaagtgaattttcaaagcttggaaaagaaaaaaaaaaaagcttttagttcaccttttccagttacagcacttgattcagatcctcgtccttgatgagagcttraaggcctcagaacggtattacatggcaattaacccaagtgattaatacataatcaagcacctaagtatcaggcaaaagcctagcccaggtctgaaatctgcatcacacaatcctgtgttactttgttcctcaatttctggcacttaaattctggatgc

SEQ ID NO: 25184 - DNA, 600 bp, Chicken  19866894240259_2
aaagtactttttcctctcctgctgtaggcaatgtatcattatccctgtaattaaatttagtgcctttgtggcaatgtcttctgcagaatttatctaagtgtggactttctttccctctcctttaactacagtacaattaaccgtgaagtgttcactcatttcaagcttttcagtcgggcttcagaagtaagtgccttggtgggaatgctgtaatcatctcggaatagaacacragcacaagacctgtggtttggcaactttcacctttgctgaaagtgaattttcaaagcttggaaaagraaaaaaaaaaagcttttagttcaccttttccagttacagcacttgattcagatcctcgtccttgatgagagcttraaggcctcagaacggtattacatggcaattaacccaagtgattaatacataatcaagcacctaagtatcaggcaaaagcctagcccaggtctgaaatctgcatcacacaatcctgtgttactttgttcctcaatttctggcacttaaattctggatgcaggcaaacaatcaagccaagttcttttctgagcaacgtgggaaagcatttccagactttctgcacag

SEQ ID NO: 25185 - DNA, 600 bp, Chicken  19866894240259_3
aagtactttttcctctcctgctgtaggcaatgtatcattatccctgtaattaaatttagtgcctttgtggcaatgtcttctgcagaatttatctaagtgtggactttctttccctctcctttaactacagtacaattaaccgtgaagtgttcactcatttcaagcttttcagtcgggcttcagaagtaagtgccttggtgggaatgctgtaatcatctcggaatagaacacragcacaagacctgtggtttggcaactttcacctttgctgaaagtgaattttcaaagcttggaaaagaraaaaaaaaaagcttttagttcaccttttccagttacagcacttgattcagatcctcgtccttgatgagagcttraaggcctcagaacggtattacatggcaattaacccaagtgattaatacataatcaagcacctaagtatcaggcaaaagcctagcccaggtctgaaatctgcatcacacaatcctgtgttactttgttcctcaatttctggcacttaaattctggatgcaggcaaacaatcaagccaagttcttttctgagcaacgtgggaaagcatttccagactttctgcacagt

SEQ ID NO: 25186 - DNA, 600 bp, Chicken  19866894240259_4
gtcttctgcagaatttatctaagtgtggactttctttccctctcctttaactacagtacaattaaccgtgaagtgttcactcatttcaagcttttcagtcgggcttcagaagtaagtgccttggtgggaatgctgtaatcatctcggaatagaacacragcacaagacctgtggtttggcaactttcacctttgctgaaagtgaattttcaaagcttggaaaagaaaaaaaaaaaagcttttagttcaccttttccagttacagcacttgattcagatcctcgtccttgatgagagcttraaggcctcagaacggtattacatggcaattaacccaagtgattaatacataatcaagcacctaagtatcaggcaaaagcctagcccaggtctgaaatctgcatcacacaatcctgtgttactttgttcctcaatttctggcacttaaattctggatgcaggcaaacaatcaagccaagttcttttctgagcaacgtgggaaagcatttccagactttctgcacagtaattacaggagttatgcctgcgttcttgcagaaacattttgctcaactcaaactctgcacagacctcagagacc

SEQ ID NO: 25187 - DNA, 600 bp, Chicken  19866894240272_1
ttgaccaccaggtttgtgtatttctctaatttatttccaccctgaaaaaaatattcagtgtttttgtctaagtgttgtattttcttcttatcagatgtccctgtatttggatagaatggctctgatggtagagccaaaatggtaaatccaagttctgtgacatagcaccatttaagtgggatggtgtcccctatagactgagtcatcttaaaatccttctgattttgaaaggaaataagcagccctcttccctccttctcatgctaattcagaagcttctctaataccccagtaagatayttcagctcacaacagagtcagaaaacaaatacagcaaataacaatacttcattttctacttctttggtggtctaaatcaattagcgtagagctcaaatgagcacttgtgtctatgcaaagcagacatagacgtgcgggcataggagcattagatggatttaactgtcttgcagaactacctaaaactgccttaaatgcggttcacaaagttacaaactggtgccagaatgtccatccacattgcagtgtgcatttgtttagctgaacaaatatcagtgttctcaggcttgtctgcacctg

SEQ ID NO: 25188 - DNA, 600 bp, Chicken  19866894240273_1
caaactctctcaccacccccgtcgggagctcctccatcagggaagctgatgctgtccgaatacacgtcatcaatcttggctttgtcctttatctgcacggtcacagcacgctggcagatcactgcctcaaaccccacgacggtggtgccttcatccagggggaagacgaagagccctgccagccaggagggttttagcaacaccaagccctcatccagaacccatcagccttatgttctctggaggagctcaaggccaggctggatggggccctgggcagcacggtctggtggggggcaytgggggttggaactgtgtgggcttaaagatcccttcccaacccaaccattctacgcttctgattcatgaacaagagccaagcactgccygccctggggaggaacaactgcaggacgtgctggtggatgcagctggaaaatgcatggcagggcaggacccagtggacaccaaggtgaccaggagccagcactgtgcccttgctgccaaggcagctagcagtgttcttggttgcatcaggcactgacagcaggtcaaggagccgaccctgccactctgctctgtgatgggacacggggacac

SEQ ID NO: 25189 - DNA, 600 bp, Chicken  19866894240273_2
tatctgcacggtcacagcacgctggcagatcactgcctcaaaccccacgacggtggtgccttcatccagggggaagacgaagagccctgccagccaggagggttttagcaacaccaagccctcatccagaacccatcagccttatgttctctggaggagctcaaggccaggctggatggggccctgggcagcacggtctggtggggggcaytgggggttggaactgtgtgggcttaaagatcccttcccaacccaaccattctacgcttctgattcatgaacaagagccaagcactgccygccctggggaggaacaactgcaggacgtgctggtggatgcagctggaaaatgcatggcagggcaggacccagtggacaccaaggtgaccaggagccagcactgtgcccttgctgccaaggcagctagcagtgttcttggttgcatcaggcactgacagcaggtcaaggagccgaccctgccactctgctctgtgatgggacacggggacacacagaggtggtggcatctccatccacaaaaatctccaagcccatttggacacgattctgggcaccagctcygggtttctccgctggggc

SEQ ID NO: 25190 - DNA, 600 bp, Chicken  19866894240273_3
aagagccaagcactgccygccctggggaggaacaactgcaggacgtgctggtggatgcagctggaaaatgcatggcagggcaggacccagtggacaccaaggtgaccaggagccagcactgtgcccttgctgccaaggcagctagcagtgttcttggttgcatcaggcactgacagcaggtcaaggagccgaccctgccactctgctctgtgatgggacacggggacacacagaggtggtggcatctccatccacaaaaatctccaagcccatttggacacgattctgggcaccagctcygggtttctccgctggggctgggtgggatcagggccattctgtgatacccaaacccacacttccccagtcgtaccctttaggcccacgtcactttgcatttacaaccacggcacacagctcccacggcagcacgtgcttcacttgcctttgcagggctgtgcctgcaggttgcggtaggtgagcgatgctgtcatgcccagggcataaccactgacacaggatgtcacttcggaggcggtgagcagcagtgggcaatgggagctctggttgatcagccctggcatcttcaccaccacgagg

SEQ ID NO: 25191 - DNA, 600 bp, Chicken  19866894240280_1
aatttgcattagttcaagggcaatgttaagcattttacagctggtttattgctattcttgtgctgtttaagctgtctttcatgtcaaaagtcctttcctgcttacaaatcatcaggaagaattgcggccaccacgctgttcgcctaagctcctccaggggttctggccctttgatcacagatatcgtttgcaatcgagttaaaaatagggggctgctgagataagccgaggctctgacaggagaccagctttcccttttctttcggactttgttctccccttccctagtatgggaacacrtaatcttggcacagaaggagtagtattatggctctgggagacatttgaaggagctagggggactggtaaagagctcagccccttgactgtgcagyccagctttgcaaggttccagggttcaaaggcaggcttgtaagccagagcctcagtacataaaattaacgaatgtaggcttgtatccatctttgaggcatattcaactcaatgccaagacattagtttttcccatctctctttactaaggagtctttctaagcctgaaaacctctgccccactaattccattaaaattgtcagaga

SEQ ID NO: 25192 - DNA, 600 bp, Chicken  19866894240280_2
tcctgcttacaaatcatcaggaagaattgcggccaccacgctgttcgcctaagctcctccaggggttctggccctttgatcacagatatcgtttgcaatcgagttaaaaatagggggctgctgagataagccgaggctctgacaggagaccagctttcccttttctttcggactttgttctccccttccctagtatgggaacacrtaatcttggcacagaaggagtagtattatggctctgggagacatttgaaggagctagggggactggtaaagagctcagccccttgactgtgcagyccagctttgcaaggttccagggttcaaaggcaggcttgtaagccagagcctcagtacataaaattaacgaatgtaggcttgtatccatctttgaggcatattcaactcaatgccaagacattagtttttcccatctctctttactaaggagtctttctaagcctgaaaacctctgccccactaattccattaaaattgtcagagaatttcatgtatattaaatctgatagaaaattctgattgacactggtgggcattagatcaagtctgaagtaaacagctctgttgcaaggggaaatc

SEQ ID NO: 25193 - DNA, 600 bp, Chicken  19866894240285_1
tagtcccagttagatccacatttacaccattcctcaggcatatatagtgtgaaagaataaaatcggtcaatgctgacagcactactcaggcactattagttaattccagcccactcttaaccagttacatcactcttctgaactgtattgcttagatgctgtgaggtcagcattttaaaggtgacctcctaccatgtttcctaacaactagaagtatacaatgctttctctttggtcaactccttaatattaaacactcactacaaagtcaactgcaacagaagaatttgttcttttttrtgaataagtacaaccagaagatggaatgtcatgcagaaagttacacgggaacatgttacctcaataaacactgtagatacgatatgctggaacaaataaagaactattttgtcaagtttattaagcctgatgaagactttgtgaaaaagttgttatcaagcttcaatttttcaggtatgttcaataatacaacatgaatcagaggactcagagaaggaaaaagaataccgatgagctcaacaatcaaacaaaccattcatgaccaccaaaacacctagcacttaacaacgtgatcttgaa

SEQ ID NO: 25194 - DNA, 600 bp, Chicken  19866894240288_1
tgtccgtccatcctccctcagctgtcatagacagccgtggaagaatatctgccttgtccatctcggtatccaaaatcaatgcttcctgctgcgttacatgtttcctagctctattcagacagctgtttgatcatcatatttctggcttttgagcgtgaagagtttgcaaaaggaaagttcagcagctgcgtaatgctgtcagcacagctttcatcttctgaggctgtgactcacccaccagtgtgctcacacagatgtcaaacagacacaaatatacaaacacacatggatgtgtgcacytaatccatacaggtcagcttgggaatgtgtaagggcacaacacattggtttctgcagccagtgatgtgctcgctttgcagcttgagtgaccacacatactaatgacaatgaaggaaatcttcagcacacacccagcccacagtttgaatttgtgctgctcagtgtctagcaaggcacctccactgctctttgtggagtactgtgttttgtgagagggcggctgtggtggaaaaggtgggaaatgtttgctttgatgctgtgtaaaaggttcccataatctcccagtccttgtggctgaaa

SEQ ID NO: 25195 - DNA, 528 bp, Chicken  19866894240289_1
agtctggtttaggctactgggaagccagccccagtggactgagtaagcaaagagcagttcatcccatctcatccttttcagacacctaacttagagacaagtctaagcctcactgcacttgtgaaataatataatatggaatacctatggataaaccatgacagtccactccagaggtactatttctttccactggatgtaacgtaacttagttgtctattcatccgatctgtagccctccagtttaggtgagataaaaaaaaaagtgagcaaatcagggagagaagctcagctttgaastctgcagcccagctctgtgaaatgaataaatgaatgactctgtagagcagaggaaatgaaacacaccaaacataaatattgcgaatccatctttgaatgagtgtaagagggagataaaaatagatttttaagaaataaggctstcttgcaattctgttagttttagacacctttttaatgttgctatgtgtctcctagactgatgtgggttgggaacttgccatgtta

SEQ ID NO: 25196 - DNA, 385 bp, Chicken  19866894240289_2
cctatggataaaccatgacagtccactccagaggtactatttctttccactggatgtaacgtaacttagttgtctattcatccgatctgtagccctccagtttaggtgagataaaaaaaaaagtgagcaaatcagggagagaagctcagctttgaastctgcagcccagctctgtgaaatgaataaatgaatgactctgtagagcagaggaaatgaaacacaccaaacataaatattgcgaatccatctttgaatgagtgtaagagggagataaaaatagatttttaagaaataaggctstcttgcaattctgttagttttagacacctttttaatgttgctatgtgtctcctagactgatgtgggttgggaacttgccatgtta

SEQ ID NO: 25197 - DNA, 535 bp, Chicken  19866894240291_1
ggatgcagcgagcatgcaaatctcaccatggttttgggttttgaagcggtagaaggcagaggggaggggagaagaaacatccaaaggagctttgtcaagtctgacattccttttgcatccaaaagtgggtattgattttccacccgtgactgctgtaaatgagaatttctgtgtcgcagcgaaggccggcgctggttgtgtggctcttatctcttcaaatatgattacctgcacttcatggtttcatggttaaaatcataatgaactttgccagccaagtcagtccatcgtctctgtgcrtttgtgcgcgtgatccaatgaattctctcgctggttcctcaccgctctatctccaggctacaggtttattgacttactgctaattttcttgtcaggataattcttccaatcaagatttaaaacaaactgggaggttactaaagtgctggagattaaagtcctaatgctttttgatttgcattaagatacctcggagcgaaggtatcttgttttggggggggggggcaggagaagg

SEQ ID NO: 25198 - DNA, 600 bp, Chicken  19866894240302_1
ccatattctccaggagatttttaaaaatgtgatgtttttctgtgtaatttagttccttctaaaaatagaacagattttaattcaagtgtcagataaatgcatctgcctaaattttaaactattcttatgctaaccctgagattaacagttatacagaactagatatactcttatcttaaagaacgctaactgattgctctttgtctgtaggaagctgtaacaaacagccctgggtcttcaactaatcttagtgaagttgaaaaacagctaaaagatgtaagttctccagtacagcattcmatgtaaaatcatgtatcatgatgtataagaatgtaaactatcaccatatatgtttttggttagaatgggacctcagaggatatgatagaggataccatcaggtaaagttggtaagaaggtatctgtctataagttgtagtacattaacttattccagtatatttgacaaaatgaaaggttaattcatkatctgaggcatgactcatcaaaatcttccagtgatttccctattccagtaaacaagccaatcagaatttaatattgctgcatttttaacttatggtcagtaacaccaagaag

SEQ ID NO: 25199 - DNA, 600 bp, Chicken  19866894240302_2
actgattgctctttgtctgtaggaagctgtaacaaacagccctgggtcttcaactaatcttagtgaagttgaaaaacagctaaaagatgtaagttctccagtacagcattcmatgtaaaatcatgtatcatgatgtataagaatgtaaactatcaccatatatgtttttggttagaatgggacctcagaggatatgatagaggataccatcaggtaaagttggtaagaaggtatctgtctataagttgtagtacattaacttattccagtatatttgacaaaatgaaaggttaattcatkatctgaggcatgactcatcaaaatcttccagtgatttccctattccagtaaacaagccaatcagaatttaatattgctgcatttttaacttatggtcagtaacaccaagaagggttttactaattatgcagacaagattaatggagtttgcaggggaactaaatagcttttctttaaacaaatgtacaatatgtagtttttctcattcattaagaaatgaggtgaataatactttttcaaatctggtgaagtactagaggcatttttatttttctttttttccatgaaggctcttgagaa

SEQ ID NO: 25200 - DNA, 600 bp, Chicken  19866894240315_1
agcaccttagtaatacgtagattcaggcacctttcacctattgcattgatttgataatttcacagaaataaaaaaaaaccgtgggagagagatcatcttgtagtgccaagtgcactaatataggcatactctggggactttcttctatgatttttcctctctgtatgtgtattaagtgtttggaatttaaacgctgtaggtttaccattctactgtagagattaaacaactaagcaaaatacacagaagcacataactgtcacaaaagcgtgactgttgtgtgtgctttttggtaagcayatcccaggtgaaagcaaaagtcaaggcaagcatcctagctcagttagactgcttagcctttacagagacactgtagataaattaaagacatggagataaattaaatctttttcataatttgtttagtcatgtgagtaatggattactgcagattaggtctatggtctctcattagtcaatggacagattaaagaagaatgtcacgaatatggcagattaatcatttttccttagctccaattggttcagcataggaagtagctatttaaagctttgcttcttctattgctatcctcaata

SEQ ID NO: 25201 - DNA, 599 bp, Chicken  19866894240317_1
  misc_feature (1)..(108): n is any nucleotide
nnnnnnnnnnnnnnnnnnnnnnnnnnnnnnnnnnnnnnnnnnnnnnnnnnnnnnnnnnnnnnnnnnnnnnnnnnnnnnnnnnnnnnnnnnnnnnnnnnnnnnnnnnnncagctcaggcatcttttaaaaggaattaatattgtaggaacatatatgtatctttctcaaccacttcagaagcctggagattaatggatactttaaaatctatttttataaaaattcttgtgatgacaaatcatttaacacttcaattttcttattcttcactttgaaaatagaaaatatgcagaacataakaaatgatttacgtctaaaaaatgctaagccacctagtcattttccagaaggaattctttcttcctcttctgccaggtaattaggttgcatctcaaagcagccagaattctcaggagtgaaaaactacagcttacttccactgggactttgattgttcaagaactgttggaattagcccagtattaatacttctggagccctccttccagatttaaggctagtcaatggatttgaatgtataccctctgaacagacgtagactgtacatcaaaacagagccttagatgttttattacctc

SEQ ID NO: 25202 - DNA, 599 bp, Chicken  19866894240326_1
  misc_feature (1)..(91): n is any nucleotide
nnnnnnnnnnnnnnnnnnnnnnnnnnnnnnnnnnnnnnnnnnnnnnnnnnnnnnnnnnnnnnnnnnnnnnnnnnnnnnnnnnnnnnnnnnnagctcctgctgtcctgtctgcaagcagatcgccactgctttgaaggcaccagaataaattagtcacgttcattgctcatcaccactgtggcatgaccgaggcacaatagaaaaatatattcttagctgcataaaaccctgccagcccaactgtggagcagaaacttacttttataccatctcttccagtttctctctattctcccctcrtcccatcttccttactgcagaaaccatgacacagacattgttcagctgcagacaacaagctgcgctggcaaagtcagttgtctccgtaaggcttcggaaagctgcactctggatttgtgcttacaggaacaagtgttttcctgctggctttggttaaacagattccttgtggatcccgttggtgtgtacatgggggaatgtgcaccatgtactcacttatcagtgcagatgtgttcctgagcatctcatggaatgtgtcaattgtctttctgtaaacatccctgtgtagaacaaaggga

SEQ ID NO: 25203 - DNA, 599 bp, Chicken  19866894240327_1
  misc_feature (1)..(35): n is any nucleotide
nnnnnnnnnnnnnnnnnnnnnnnnnnnnnnnnnnnctcccaccgccatagagggacacctgtgggggtcagcaaacactccaggctccagcaggcataacgtgagctgccacacgtcaccgcaaggatgggggacagtccccagacatgtgagggaacatatctccctcctctgccaccctgctgagcagccaagagccaaggggaaaagctgcaggggacagcactgggtgctgctgtccctctgagataaccagttccaggggatgccatctcctgagccccttcccaccatccatcyctgctgcacccatgggtgcactccaagctggtgatcccaaggggattggggtaggtgaggggccaggaaaagcagaggaaccagccccattgagggacagagggccctgaagggcacgtggctctcacctcacctgggctgcatgtctaggcagcacatctgggtagcacgcactacatctgggtggtgatgctcagccacacagagccactaagagaacatgcctctaaagtgctgatgcgaagcctcagtgcagccgtgaaaccacaaaaggcactagaaacttcttgctgtgacgg

SEQ ID NO: 25204 - DNA, 600 bp, Chicken  19866894240328_1
gcaatagcctagctctggtgagtggaaaatgacaataaatgctttctccctgcattccctttctccctgcatcctctatcctaacttcagagacaggtggaggcatagaaataatgactaaaactctcttcagacctaagagacagcatgtgacagcagaaataagcaacactttactgagcagggctccagaacttgtttgagatgaagtatgtagaatgtcctaaatagtcagagggggcagaggtcttcacttccctacacttcataaagaggagaagaataagaaggatacatgcytcaacagtaagaagtggagcaagagccttccacaatacaaataaacagatggagcagagtgagagagtttaaaatctctgagtaactcagtgcccttaggaaggaaagaacttcataaatcccctattcatgagctattgaaacttggcatcctccaagttttctctctcgcacctttcagctttaatcctccctatactaccttggattgccacagctcctcttcatgtctcattcattgtgttctcttttatttttgctgcaagactttcttcaatttcctggcttgatgaggggaac

SEQ ID NO: 25205 - DNA, 600 bp, Chicken  19866894240328_2
ctcaaatagattaaaatgggtaagaacagtaagcagagtgtgttagctatccctttgagattcacaagacccatggatgctgaagatatcagtctgttccttacttaatgtaggcacaaggtaagctcctcaactcgatttgaagtgagaagcaggtttttttttctgaaataatttttgtttcccccaggaatctgcatgaccaaggggctaaatgaaataagcagtgagtaatctcagctgttttcagggcagtcagtgagactctcttctcttattcaagttagcctgagaagaaayggaccctatcttaaaatcstttgggttcacacaagatttcacagtgttcagagatggatataaaaactctaagaaaataggaataayttcttaactctggaacactgctgtaatatccctagtcagtgttctacactgttatctttgtggtatggaaaatttcttggagatggaggtaaaagccaagcacacattgaagaattcacttgaaatatttatcttctaaatctggggtatcactggtggtcagctgtgatattatacataaatccactgcagatgaaaccgrgaaaagccttt

SEQ ID NO: 25206 - DNA, 600 bp, Chicken  19866894240328_3
gtaagaacagtaagcagagtgtgttagctatccctttgagattcacaagacccatggatgctgaagatatcagtctgttccttacttaatgtaggcacaaggtaagctcctcaactcgatttgaagtgagaagcaggtttttttttctgaaataatttttgtttcccccaggaatctgcatgaccaaggggctaaatgaaataagcagtgagtaatctcagctgttttcagggcagtcagtgagactctcttctcttattcaagttagcctgagaagaaayggaccctatcttaaaatcstttgggttcacacaagatttcacagtgttcagagatggatataaaaactctaagaaaataggaataayttcttaactctggaacactgctgtaatatccctagtcagtgttctacactgttatctttgtggtatggaaaatttcttggagatggaggtaaaagccaagcacacattgaagaattcacttgaaatatttatcttctaaatctggggtatcactggtggtcagctgtgatattatacataaatccactgcagatgaaaccgrgaaaagccttttcaatattattttcagcta

SEQ ID NO: 25207 - DNA, 600 bp, Chicken  19866894240328_4
atcagtctgttccttacttaatgtaggcacaaggtaagctcctcaactcgatttgaagtgagaagcaggtttttttttctgaaataatttttgtttcccccaggaatctgcatgaccaaggggctaaatgaaataagcagtgagtaatctcagctgttttcagggcagtcagtgagactctcttctcttattcaagttagcctgagaagaaayggaccctatcttaaaatcstttgggttcacacaagatttcacagtgttcagagatggatataaaaactctaagaaaataggaataayttcttaactctggaacactgctgtaatatccctagtcagtgttctacactgttatctttgtggtatggaaaatttcttggagatggaggtaaaagccaagcacacattgaagaattcacttgaaatatttatcttctaaatctggggtatcactggtggtcagctgtgatattatacataaatccactgcagatgaaaccgrgaaaagccttttcaatattattttcagctaaagtggtgacagaaaacattatgaatgcaataaacagaaagagagggaaatgcaagcttacacagcaa

SEQ ID NO: 25208 - DNA, 600 bp, Chicken  19866894240328_5
tgagaagaaayggaccctatcttaaaatcstttgggttcacacaagatttcacagtgttcagagatggatataaaaactctaagaaaataggaataayttcttaactctggaacactgctgtaatatccctagtcagtgttctacactgttatctttgtggtatggaaaatttcttggagatggaggtaaaagccaagcacacattgaagaattcacttgaaatatttatcttctaaatctggggtatcactggtggtcagctgtgatattatacataaatccactgcagatgaaaccgrgaaaagccttttcaatattattttcagctaaagtggtgacagaaaacattatgaatgcaataaacagaaagagagggaaatgcaagcttacacagcaaggcagatctacattttccccagttctttgccagctaacaaaagtacatctttggctctggggtccacttttattgaaagttgctgaagcaacctcattcgtgcatccgrtaaaatttggaggatgcaataaccttcttctcctccttgacattaaagatgctagaaacattctggagactctccttaagaaaatgaatctct

SEQ ID NO: 25209 - DNA, 573 bp, Chicken  19866894240328_6
aagaattcacttgaaatatttatcttctaaatctggggtatcactggtggtcagctgtgatattatacataaatccactgcagatgaaaccgrgaaaagccttttcaatattattttcagctaaagtggtgacagaaaacattatgaatgcaataaacagaaagagagggaaatgcaagcttacacagcaaggcagatctacattttccccagttctttgccagctaacaaaagtacatctttggctctggggtccacttttattgaaagttgctgaagcaacctcattcgtgcatccgrtaaaatttggaggatgcaataaccttcttctcctccttgacattaaagatgctagaaacattctggagactctccttaagaaaatgaatctctcaaatgaaacaagtgttgaaaaggaatcattttacttggcagcttatatccttatagccctttctagaaaatctggatccaactgatggataattaactttatattatttttatcatattattttattaatcactcagtaggattattggtttgtaagtcttcatgtttttctactaagt

SEQ ID NO: 25210 - DNA, 600 bp, Chicken  19866894240339_1
ttgagtgaatgtggtttgcttcttgtttaattctcttctaaatgaaaacttactgaaggtcaaaccgaagattctcttcactagttgtaaattgtattgactttgtactgtgcactttcctgaagtgcatggtaaggggctttttaagtcataggttcagactgaccttgatctcaccgtgtgtgtaagcttttaagtaccaattttcagtgttggacgacacagtaaagggttgggacttggcaattctccttcagtagtgagaatggatgaatgctgaagactgaattggcttctacraataaagtcacagttggtactataggtaccagttgcttaatatacttaaatgattcagacctttaaggacaacattttactattatgtgaaattgtcctctcaaattgttatagttaatgctgggatctccatgtagctttggcagtaaagaatactttggtgagcatttagttgaaactgaggaagagggaggactactctttttatactgctattgagaaaaacaactgtatgattctgtgttgcccttgttgaaaagggcagctctcaccctaggtctccaacaccatccttggtga

SEQ ID NO: 25211 - DNA, 486 bp, Chicken  19866894240340_1
gtatgaactgaattgagcagaaggaggaggatattgaggaggaaaccccaacagctgctgataagggcttgagtgggcatcctggcttaggactgcagcacagacagcagtggttgcacgagaagggcttttccctatagcaaagctccaagtttgctttgaaccaaagcagcagcaatgctttccctttgcccatcccattcatttccttcagctcgcagcctctcctccccttccccatgaaagccactttcctgcagctgcattttggtggtctgaggttcctttttgcgccgtctyttccctctggttgtgagctcacagcctgcaaactcactgcaacccttccctcagctgctgggctgacctgcaagcaaactgcttactgacaacagcagcccacaaatacaagcatccagtaatggcaggctgctcatagcacccccccccctacacacacacacccccgttaaaacccatttccat

SEQ ID NO: 25212 - DNA, 599 bp, Chicken  19866894240347_1
  misc_feature (1)..(179): n is any nucleotide
nnnnnnnnnnnnnnnnnnnnnnnnnnnnnnnnnnnnnnnnnnnnnnnnnnnnnnnnnnnnnnnnnnnnnnnnnnnnnnnnnnnnnnnnnnnnnnnnnnnnnnnnnnnnnnnnnnnnnnnnnnnnnnnnnnnnnnnnnnnnnnnnnnnnnnnnnnnnnnnnnnnnnnnnnnnnnnnnnnntaattctttctatgtcacatacattctgtcttactgacccccctctgctctttcttttcatgctctgctctttcttttaatgtcctgattgacttctttcctacagcttctacataactcrtcctgatttcattctctatgtctaccacagtgcacagctggcacatccagctgtatccctcctgttttagttctcttgtgtcatttcaacttctggacttcctccttccttccaccatctcactgggctgcacctgtagctacttttctggtttattctactctaagggcataaaggaaaaagaattacctgaaagcatggcccctttcagagaagggatgacttggtgatgtgccgttgcactcagtgtcctctccctgtccaccagagcatgtcagaggctggctgtgaagaatgga

SEQ ID NO: 25213 - DNA, 599 bp, Chicken  19866894240350_1
  misc_feature (1)..(177): n is any nucleotide
nnnnnnnnnnnnnnnnnnnnnnnnnnnnnnnnnnnnnnnnnnnnnnnnnnnnnnnnnnnnnnnnnnnnnnnnnnnnnnnnnnnnnnnnnnnnnnnnnnnnnnnnnnnnnnnnnnnnnnnnnnnnnnnnnnnnnnnnnnnnnnnnnnnnnnnnnnnnnnnnnnnnnnnnnnnnnnnnntaaaagcctgtcctgtgagcactaaggagtgtgtgtgtttcacacagagcatcgaggcaggttctcaccagtggaagaacatcttagactggatataaggaagaagttttttacagtaagggygatgagggactggcacaggttgcccagagaggtggtgggtgacccatctttggagacattcaaggtcaggctggatggggctctgagcacctgggggagctgtggttgtccctgttcrttgcaggggagttggaccagatggcctttacaggtcccttccaacagttgcctacctgaccacctcacccccaagagacccagctctgatccgttgtctactggcaatttcttcttatctgctgatccatttccctgggtgagtggcatgagtaccagcaataccctgacagcatytttag

SEQ ID NO: 25214 - DNA, 599 bp, Chicken  19866894240350_2
  misc_feature (1)..(59): n is any nucleotide
nnnnnnnnnnnnnnnnnnnnnnnnnnnnnnnnnnnnnnnnnnnnnnnnnnnnnnnnnnntaaaagcctgtcctgtgagcactaaggagtgtgtgtgtttcacacagagcatcgaggcaggttctcaccagtggaagaacatcttagactggatataaggaagaagttttttacagtaagggygatgagggactggcacaggttgcccagagaggtggtgggtgacccatctttggagacattcaaggtcaggctggatggggctctgagcacctgggggagctgtggttgtccctgttcrttgcaggggagttggaccagatggcctttacaggtcccttccaacagttgcctacctgaccacctcacccccaagagacccagctctgatccgttgtctactggcaatttcttcttatctgctgatccatttccctgggtgagtggcatgagtaccagcaataccctgacagcatytttaggtcaataccttctgaacaaatgttttccttttacatctgacactttagrtgaacactaggagctgccaaaaggtttttcaractgacagtggtatggggctatgtgcagcgggtgcca

SEQ ID NO: 25215 - DNA, 583 bp, Chicken  19866894240350_3
aagggygatgagggactggcacaggttgcccagagaggtggtgggtgacccatctttggagacattcaaggtcaggctggatggggctctgagcacctgggggagctgtggttgtccctgttcrttgcaggggagttggaccagatggcctttacaggtcccttccaacagttgcctacctgaccacctcacccccaagagacccagctctgatccgttgtctactggcaatttcttcttatctgctgatccatttccctgggtgagtggcatgagtaccagcaataccctgacagcatytttaggtcaataccttctgaacaaatgttttccttttacatctgacactttagrtgaacactaggagctgccaaaaggtttttcaractgacagtggtatggggctatgtgcagcgggtgccacaaagctgccagggaatgcagcccctgctctcgccagggttcctgctagactcctgcccaaaatgctgtcgttggcctggatttcactggcaacagctgaataaccatcaggcagacccttgtgcaaggaacacgtacagacagttcagatgtgcctgga

SEQ ID NO: 25216 - DNA, 529 bp, Chicken  19866894240350_4
tttggagacattcaaggtcaggctggatggggctctgagcacctgggggagctgtggttgtccctgttcrttgcaggggagttggaccagatggcctttacaggtcccttccaacagttgcctacctgaccacctcacccccaagagacccagctctgatccgttgtctactggcaatttcttcttatctgctgatccatttccctgggtgagtggcatgagtaccagcaataccctgacagcatytttaggtcaataccttctgaacaaatgttttccttttacatctgacactttagrtgaacactaggagctgccaaaaggtttttcaractgacagtggtatggggctatgtgcagcgggtgccacaaagctgccagggaatgcagcccctgctctcgccagggttcctgctagactcctgcccaaaatgctgtcgttggcctggatttcactggcaacagctgaataaccatcaggcagacccttgtgcaaggaacacgtacagacagttcagatgtgcctgga

SEQ ID NO: 25217 - DNA, 497 bp, Chicken  19866894240350_5
ctctgagcacctgggggagctgtggttgtccctgttcrttgcaggggagttggaccagatggcctttacaggtcccttccaacagttgcctacctgaccacctcacccccaagagacccagctctgatccgttgtctactggcaatttcttcttatctgctgatccatttccctgggtgagtggcatgagtaccagcaataccctgacagcatytttaggtcaataccttctgaacaaatgttttccttttacatctgacactttagrtgaacactaggagctgccaaaaggtttttcaractgacagtggtatggggctatgtgcagcgggtgccacaaagctgccagggaatgcagcccctgctctcgccagggttcctgctagactcctgcccaaaatgctgtcgttggcctggatttcactggcaacagctgaataaccatcaggcagacccttgtgcaaggaacacgtacagacagttcagatgtgcctgga

SEQ ID NO: 25218 - DNA, 600 bp, Chicken  19866894240351_1
ataaacagcagtcagcattaaaatgctctacaacagcaataactcactttgaacagttttagaccactaaaaaagaatctattaagatggctaattttatgaatgcacttacaattactataagagaatttccagggtttggtaattcatcaaaaatttttattttgttaattacaaaaagctgctatgccctgggcgaggttctagatttggtttagaaggaatactttggtataaagtcagaaaattgtcattaatttttgtaactggcattcagaatttgaagtttcctgttaaatycaagttgaaatacgtttcctcttctccagcagaaagcttcctccttccagcacacagattctatagcaaaatcacttcatttacctgaaccaagttcccatccaggaaaaacagatctgcagagcactttccaagtgttggaaggttgtactgtttcctagtaaggctagaatttgaaaactaaaagtactgacaacataattcccaggcaaaaccaaatccattaaaaaaaaaaaaagaatattgagatacagtattctagaacagaaatacaccatctgattcacgtgatacagacac

SEQ ID NO: 25219 - DNA, 600 bp, Chicken  19866894240352_1
taaagaaaagtatttctgcagtgctgtggagcagagacacccagcttgttatttgcacaatatcccttcaggtttatagcggtgataaattaaaggatttttagtagttgtcctgtaactgcttgaaatagcatggcaatggaacaagcatttaatctgtagtctctgcagtctctacttgtgcaaccagaatttgtgaaagtggtaggccattctttaaacaattccacgggactgtcgccttcctgcgttgtatgtatattttctcatttcctttcctctatccgtttcagcactagrcacttaagatacraggtacttgcagaatgcttttgtcacagacttagaaatgaaaataaatgtttccaaaatccagatggtagcctatagctatgtatagcattcagccttcttctctgtgtatcactatggttaaaacaaattacatacttgagatagtaaaagctctggtacacttgcaggttttgaatgcctgtcactttcagtagaaaagtgaaatatctcttcctmagtttgcattaaagcatttcataagtacgtactaagagaactttgtgctgcaaattaagcatgtgagtg

SEQ ID NO: 25220 - DNA, 600 bp, Chicken  19866894240352_2
ttctgcagtgctgtggagcagagacacccagcttgttatttgcacaatatcccttcaggtttatagcggtgataaattaaaggatttttagtagttgtcctgtaactgcttgaaatagcatggcaatggaacaagcatttaatctgtagtctctgcagtctctacttgtgcaaccagaatttgtgaaagtggtaggccattctttaaacaattccacgggactgtcgccttcctgcgttgtatgtatattttctcatttcctttcctctatccgtttcagcactagrcacttaagatacraggtacttgcagaatgcttttgtcacagacttagaaatgaaaataaatgtttccaaaatccagatggtagcctatagctatgtatagcattcagccttcttctctgtgtatcactatggttaaaacaaattacatacttgagatagtaaaagctctggtacacttgcaggttttgaatgcctgtcactttcagtagaaaagtgaaatatctcttcctmagtttgcattaaagcatttcataagtacgtactaagagaactttgtgctgcaaattaagcatgtgagtgcaccttctattag

SEQ ID NO: 25221 - DNA, 600 bp, Chicken  19866894240352_3
ggactgtcgccttcctgcgttgtatgtatattttctcatttcctttcctctatccgtttcagcactagrcacttaagatacraggtacttgcagaatgcttttgtcacagacttagaaatgaaaataaatgtttccaaaatccagatggtagcctatagctatgtatagcattcagccttcttctctgtgtatcactatggttaaaacaaattacatacttgagatagtaaaagctctggtacacttgcaggttttgaatgcctgtcactttcagtagaaaagtgaaatatctcttcctmagtttgcattaaagcatttcataagtacgtactaagagaactttgtgctgcaaattaagcatgtgagtgcaccttctattagacactgaacaattcatcttcagctttatgaatttcaaagtaaacaatttttttctcagtgatcaagattatttttaaatgttcccaaggtacttctatccagctgttactctgctcgtgctttccttaatcattatggcaaagacatcaagaaacagctgtaaccaatgcatatctcattatctttccttggcacggaaaacgtgcatcgtatttcat

SEQ ID NO: 25222 - DNA, 600 bp, Chicken  19866894240357_1
gagttatccatgcttgcggcagccctacatgggaatgaattaccttctgaaagctctgtgcaatgccatgtttgctcccatggggtcctgagggtgcctggcatgcgcaaggtggattttgccacctgggacaaaggctctaaacaacggggggtggaggatttacagcctggaaggcagcaacctggaaacccacccaatgtatggtagggggaatgaagcaggagagggctttgggttcttcagtcactgctggggaaccgcatgcatgtattccctctaaatcgatgtttttcattrtctgaaatgaaaagagctttcatttgtggaaacattgctctgtgttattcaatcagttttaattaagcgactcagatgcgttaaatggtgctggaggaatcttcttgggaacactagctgctcaacttttactgctcctcttacaaccataaatagggattaatgcctaattgctactgagagtgtcctgctggacctaatgagctgatcacaaacaatccttcattgtggaataatttaactgtatttgactccagccagagatccctgtgcctcaccgtgtctgtgtgctgtgagggg

SEQ ID NO: 25223 - DNA, 600 bp, Chicken  19866894240357_2
ttaattaagcgactcagatgcgttaaatggtgctggaggaatcttcttgggaacactagctgctcaacttttactgctcctcttacaaccataaatagggattaatgcctaattgctactgagagtgtcctgctggacctaatgagctgatcacaaacaatccttcattgtggaataatttaactgtatttgactccagccagagatccctgtgcctcaccgtgtctgtgtgctgtgaggggcagggctgggggtctgcaggggaggaattggtttccattgctgctcagaaaggtcccrtctcgttatcctagccttcccacatggttgtttgtacctaagcgatattctccagctctgcctttctccagaggagagcaaagcacagcagtgcagtggggctgaggttcctggagtggggaaggacgttggtgtgctgtggggagcatctcccagaggcaggacttggccagagcagggtcagattgccatctcagagccctcgaggagctgtgcatgtgctactgcccatcagaaagctgttctgtgggtgggatcatcacccaaaccccttcattgcacactttgagtggcttatgg

SEQ ID NO: 25224 - DNA, 600 bp, Chicken  19866894240358_1
agcgtgtgatgctgtaagggtcacctccagaccgtgctgaaggactgaactgctgcccatctcgggaatatgaaatctggctgaggtgaagcacagctgggaagatgcagcgatctgctgaactgtcagtgtttaaaggcaaggaggttaggagagggtgtgttcgtcttcagaagcagaagtctctaaccaacctcacactcattagcgaaggggagaagaggcgacactcatatagggagaactggtttggaaacgcctccaagtccagccagagttaccatcagcaggaggcagaarctgggagcaaaggcttgctttccaaggcactctcgcgctcagtgcactccctctgtcagcctggcctcaccgcaccccaagcatttcaagcactaccacctgctggaagcaggacctccaagaggtctggagaccggcgtacagatgaaggctttgggattgataatcaggagagggggaaatcagatgatgagaacgtatcctgcacggctcatttccctagcagaaactgggcagaggaggaggaggaaggctgcttgcgtgaaggaactgcacatctggatgaagatgtcataataa

SEQ ID NO: 25225 - DNA, 600 bp, Chicken  19866894240358_2
aggacctccaagaggtctggagaccggcgtacagatgaaggctttgggattgataatcaggagagggggaaatcagatgatgagaacgtatcctgcacggctcatttccctagcagaaactgggcagaggaggaggaggaaggctgcttgcgtgaaggaactgcacatctggatgaagatgtcataataacaatgctgggggacttagaacaggtcctttatactgatattttgggtaagttaatgttgtcttgaaatcagagagagcaggagacccatgaattagcacatttctgcacrgagcagatttttgatcttgacagtgatttcatgagacagaactgggtttgtttgcaatagtatgcaaaaacagggtctggtcactttttccttgtttgcttactcttatctctaaagactgtgaaatgaagacagttgtctaaatcatttttgatgggtgcatgggcagcaacaatgtgtgaataattgagtgtagttttcttaagctgttggaaaaaattaaggtgaaacacttaggtactattagttcactctcaaattaatctcatggcrttcattgccatgaattttaaaccaaac

SEQ ID NO: 25226 - DNA, 600 bp, Chicken  19866894240358_3
acccatgaattagcacatttctgcacrgagcagatttttgatcttgacagtgatttcatgagacagaactgggtttgtttgcaatagtatgcaaaaacagggtctggtcactttttccttgtttgcttactcttatctctaaagactgtgaaatgaagacagttgtctaaatcatttttgatgggtgcatgggcagcaacaatgtgtgaataattgagtgtagttttcttaagctgttggaaaaaattaaggtgaaacacttaggtactattagttcactctcaaattaatctcatggcrttcattgccatgaattttaaaccaaacgttgaattcaagattccaatttatagcaaatatgttttggcctacatacaaactgtctgttactgctcccgctgttcctctgttgataatttcatccatacatgaggaattgttagtgccagggtttcacactttagctatatcagtgcatgccagagagcatttgaagtccactgccatgggttcttcaaaaggcttctgtattactggctttacttttcatctctcagtgctcagagtgttcattattagagctttgttctttagccagtc

SEQ ID NO: 25227 - DNA, 600 bp, Chicken  19866894240359_1
ccagtccaaccttccacctatcaccaatagttcttactaaaccatgtccctaaacgcaacatccaaacattccttgaacatcttcaggatcagtgactccaccacctccctgggcagcccattccagtgcctgaccactccttcagagaagtagtatttcctaacgtccagcctgaatctccactagcacaacttgaggccattccttctagtcctatcactagttacacgagagaagaggctgacccccagctcactacaacctctgttctgctagtaacagagtgataaggtctcccytgagcctcctcttctccagactgaacaatcccagctccctcagctgctcctcataaggcctgtgctccagacccctcaccagctttgttgcccctctttgaacatgttccagggcctcgatgtctttcttgcagtgaggggcccaaactggatgcagtactccaggtgtggcctcaccagtgctgagtacagggggacaattacttccctgttcctgctggcaacactgtttctgatgcaagccaggatgccattggcctacttggacatctggatacactgctggctcacattcagctg

SEQ ID NO: 25228 - DNA, 600 bp, Chicken  19866894240362_1
tttaatgacacccccaggcatcatgatctgagccaaaaatgcactcttttcatgtgatctttagttgatgtatgttttcagcattctgctctttatattgcaatattttaattattgtttactttctttaattactgttttccttgctaattctaaatatacatccttcctccttccttgaaggtttttgggatttttccaatcactccagtatcaaagaacgtttgcagtctagtatttaagcttctcattcttgtactacaatctgtgcagcctgaaggccaaagctttggctgtgtkttggaggtagttctgttttttcaaacgtgtatgctaatctcataggaaaaaagtattttgcagaagtgaaaatcttacgggaaggtttgatgcttacatttgctcatttggatggaagcacacaaagtgaacaatttgcagctgataaatgaaatttcttcatccactgttgtttttttttttttctttctcttttcgtctgtgttctttttttttccatgttatctctacgaaaggggtgtgagaagaaatgtgcaagaccaaaagcctctccatttcatgttgaaagagtttttttat

SEQ ID NO: 25229 - DNA, 599 bp, Chicken  19866894240364_1
  misc_feature (1)..(14): n is any nucleotide
nnnnnnnnnnnnnncgatccttcaggtttaaaatacagcagcatctcagggttcagctgttggtattatgaggactgatagaaatttatcactggaaaacagctatgcagaatactgggtttctgctgaaggaatatatcctactaaatatctcttttccactgaaaaacctcagtgctcctaaagagtgggtgttaaaggttgttgcagtgaaccctgggccacattctgcgctcctcacaacctgacatttggtgtcggtccaggcttagctgtgtcacctcccacaaggagacatcrgttagaccaggctaaagagacgggtggaatatctagttggtaagaaccctgcccatggcaggagcagtatgattttttaaggacccttccaacccaagctcttctataattctataattctacgaagcctgacaaatctattagctataaaactcatgaagtaccctggcagtgtttcagaatcaagatatttaaatgccagagaaaatatctcattgaaacctcacggactgcgcatgggaaaaacttcctccatttccaggtccaattaccatcatgagaagctcaagtggtaatag

SEQ ID NO: 25230 - DNA, 599 bp, Chicken  19866894240370_1
  misc_feature (1)..(63): n is any nucleotide
nnnnnnnnnnnnnnnnnnnnnnnnnnnnnnnnnnnnnnnnnnnnnnnnnnnnnnnnnnnnnnnaagctttgccagaattattattattgccagaaaggcatcagaacatgaatcttatcagcctgtaaataaaaaattagtcagcttaattcttgccaaatagaatttgtgtagaccccgaaaaggtaaggaaaattccttaatgtttttaaggaaaaaaaaaaactttaaaaataaacaagtcagttaaagcaaggagtaaagtaagagagcatgaccattcagcgaagattacagatkgatagtgtatctggaatgtctgcttgcagattcttctgtgagtcattaaaaaaatatattagggcaattagagttcatacaagatgtattcctgactagcttttcctatatttttcattaacaaaattttagcaacatagacaatattttcctaggtgaaggttaataatatttgtattttgcaatgcttgtgctaaactattaagcatgtgcttctaaagcaccctaactattatggccacttgcatgtgtgtttttgttacttttcattaatccataactaaagatgtggaccagat

SEQ ID NO: 25231 - DNA, 600 bp, Chicken  19866894240371_1
tacctaatgccctttttatttcatgtctgtactgaagataccccatatgggtatctttcatgtgtgatagtagtttctatacctgaaaaatatatatatttttttactctccagctcttccatttggtacatcagtcattcacaataccattaagttccataagacatcataatggggaggaaaagtatctggaaagtcctatgtgtcagcattctctgtgttgtagtttaaacattttcttttatttcagtctgatttgcattacttttatattgaaattttacaactatatgaagttkatttgcttttgatcagttatggatgtataggatttccatccagtattcttctctcccatgtctgccaaggagacctggaagaaacgtgctcagtgtattttaaaaggcaaatttgcagaaaatgtcttctagctgaatatcttctgtcttcaaagatacctcaaagtttgctgctttcagtagctgtcaataatgactgaaaggaggtttggggatttaaaacattaattaacttcttgtaaaatagcttagtattgaaagacatctgtagcatagatgtcatttaatcttttcagtgta

SEQ ID NO: 25232 - DNA, 600 bp, Chicken  19866894240374_1
cttccatatggctgggagaaaattgatgatcccatttatggcacttattatgttgagtaagttcccaagttcaatattaagttgctgttaatatgtcataatgtaatactagtatcctctgcagtgcttagctggcaagacatgggtgcagttaccgaatttggatacaaatgggtacaaacactgaatgttaaactgaaggtataccaggaattctcagtcatcaatacagttaatgtgaccaaatatattcagtgtgtctcaaatcaatgactcagtcattcagtcattctgtttctygagggtctgatttcatggtaacattccagttggaatttgtaaaataatgtattaattaaataaatgttgtactttctctgtaagatttggacatccagggaggtgcagatcttattagtcaatgaataaagcaaagcatagccagtttagctcagttaagactgcttttcttttcacaaattggatcttcacactctacatataaaattttaggtatgttatgttttatttcacaactcagtccttgcattcatttttcatattttattttagttgtggaacatgaaactcctgtgtgca

SEQ ID NO: 25233 - DNA, 600 bp, Chicken  19866894240376_1
attggaagtggagtggctgcggcgggggcccggggggggtttgctgtccaggatgttcttcttgaccaccttcagctcccggttcttgacggggacgtagccgtcccgcagcgagatgaggatgggctccgcgtccttccccgacagccactcatccgcctccagggccggctcagggcccggcgtgtcggggtacaggtcgtcctggaagaggtctgactgcggggacaacgtgggggcacagtgagatggggcactcaactctcccccttgaaaccccactgtccccaaaaccccacygtcctcacgaggtgcccgagggctcaccttgcgtggcaccgtcatgacgatgggctcacacttgcgctcgtgcagcttgaagaacctgagtggggcagaggtggttggggtctgcatgtcccytcccgttgtccccccccccgccccaggtccctccagcccccacctggcaatttcacacttggtgacatccacgccccctcttgggcatgaagcccatgccacgctgtggctccttgctgctgtaagtattcaggtagtgcacgtagggcgcctcgtccgtgatctcaaagtagcgga

SEQ ID NO: 25234 - DNA, 572 bp, Chicken  19866894240376_2
gggctccgcgtccttccccgacagccactcatccgcctccagggccggctcagggcccggcgtgtcggggtacaggtcgtcctggaagaggtctgactgcggggacaacgtgggggcacagtgagatggggcactcaactctcccccttgaaaccccactgtccccaaaaccccacygtcctcacgaggtgcccgagggctcaccttgcgtggcaccgtcatgacgatgggctcacacttgcgctcgtgcagcttgaagaacctgagtggggcagaggtggttggggtctgcatgtcccytcccgttgtccccccccccgccccaggtccctccagcccccacctggcaatttcacacttggtgacatccacgccccctcttgggcatgaagcccatgccacgctgtggctccttgctgctgtaagtattcaggtagtgcacgtagggcgcctcgtccgtgatctcaaagtagcggatgctgctgtccccctgcagatatggggagggctgtcagccccctacctctccccatggcggggggggggggggtgggggtaggaatagggggaga

SEQ ID NO: 25235 - DNA, 600 bp, Chicken  19866894240381_1
acagaataccaggatctaaccccatcaaaaacaggcatctcaaacattaggctcaattaagatgaatatgtcaagttaactgtataacacacacagtgaaaataatttctttccatggtagtgtttaaagaaaaccataaaaacataagatctgttaatgtaatttcccacctgaaaaaagcagaaacaaaacctgattttaaaagaaccctccagtgtgctccatttttataactggcaaaacttgtaatgggttgctattgtggtcagccattgctccaaaagtttctattaatattyttttttcccagttcaagtaattatgaggtctgcatacttttaattttgccaatacaaaaatgacttaattktatattcaactcaaattgaattccttgagcttctcttaagcttataaataacaataatgtctgattttacatgggctattacttcctgaggatctaaaaacaacttgtgaatctaagttcatacccttttgttggtaggtcctgagtaagacagtgtgcaagggagaaaataataacgaatgatttagatggaaaatgtaatagagacagcggagagcagcaaaggatc

SEQ ID NO: 25236 - DNA, 600 bp, Chicken  19866894240381_2
caagttaactgtataacacacacagtgaaaataatttctttccatggtagtgtttaaagaaaaccataaaaacataagatctgttaatgtaatttcccacctgaaaaaagcagaaacaaaacctgattttaaaagaaccctccagtgtgctccatttttataactggcaaaacttgtaatgggttgctattgtggtcagccattgctccaaaagtttctattaatattyttttttcccagttcaagtaattatgaggtctgcatacttttaattttgccaatacaaaaatgacttaattktatattcaactcaaattgaattccttgagcttctcttaagcttataaataacaataatgtctgattttacatgggctattacttcctgaggatctaaaaacaacttgtgaatctaagttcatacccttttgttggtaggtcctgagtaagacagtgtgcaagggagaaaataataacgaatgatttagatggaaaatgtaatagagacagcggagagcagcaaaggatctatccatctgtctttctacctatctatctacccatccactgatccatctgtccagctatccatctatctca

SEQ ID NO: 25237 - DNA, 600 bp, Chicken  19866894240381_3
ttgagcttctcttaagcttataaataacaataatgtctgattttacatgggctattacttcctgaggatctaaaaacaacttgtgaatctaagttcatacccttttgttggtaggtcctgagtaagacagtgtgcaagggagaaaataataacgaatgatttagatggaaaatgtaatagagacagcggagagcagcaaaggatctatccatctgtctttctacctatctatctacccatccactgatccatctgtccagctatccatctatctcaggcaatgatctcttccatagttgrttacatctgagattgaaatgtccaccatgtttacaagtgtgaagatttctttttgaaaaccacagctcacagaaagcaagcccttttttcgtgcactaggctttcagatgtgaaacgtttcacagaatccctggatatttcagcaataactgtaacaacaataattgtagggtgcaattctgtaaagatcttgaagctgaaaagcaccaagtatgtatcagctgcgcttttatttttattgttataacctctagggatcagaggtgttgtgattcatcctgttattagtcttgcatcttt

SEQ ID NO: 25238 - DNA, 600 bp, Chicken  19866894240383_1
acagaattctttgtgtaggttgcctgaaactctacctgtacttagttcatagaatcattaaggttgcaaaggcctctaagatcatctagtccaacttcagcccatgcttgtcactgctctagaccacatccctcagtgccacatctagccttttctctcacacctccagggacactgactccaccacctccctgggcagcctcttccaatccctcagcactctcacagagaataaatgtttctgaatatctgacctgaacgtcccctggtacaatgtaacttaggacaagagtgccttasgacacacttcaccatctgacagaaaacttaacatgccttatgtttctgctctctttgaagcaccctgagtcagagacttcttgctctgtgacaygtgccatattgtaaaaagaaaagagacgaagttgtgcctcagctggtgaaacaagtgtgccctgatgcagaagccagatttagataaaacatctacatgcataccaygacatcaaatcctccaaatgagataggctacattcaaattttgtgacagcaaataagtattcaccagtacttaccactgtaccagtgcagccgggagca

SEQ ID NO: 25239 - DNA, 594 bp, Chicken  19866894240383_2
cttcagcccatgcttgtcactgctctagaccacatccctcagtgccacatctagccttttctctcacacctccagggacactgactccaccacctccctgggcagcctcttccaatccctcagcactctcacagagaataaatgtttctgaatatctgacctgaacgtcccctggtacaatgtaacttaggacaagagtgccttasgacacacttcaccatctgacagaaaacttaacatgccttatgtttctgctctctttgaagcaccctgagtcagagacttcttgctctgtgacaygtgccatattgtaaaaagaaaagagacgaagttgtgcctcagctggtgaaacaagtgtgccctgatgcagaagccagatttagataaaacatctacatgcataccaygacatcaaatcctccaaatgagataggctacattcaaattttgtgacagcaaataagtattcaccagtacttaccactgtaccagtgcagccgggagcactcattcctttacaggacatcagaggacagcaattgttttcctgaggagagggaagctcaggggactacggaggaagtaggcctcagt

SEQ ID NO: 25240 - DNA, 487 bp, Chicken  19866894240383_3
tcttccaatccctcagcactctcacagagaataaatgtttctgaatatctgacctgaacgtcccctggtacaatgtaacttaggacaagagtgccttasgacacacttcaccatctgacagaaaacttaacatgccttatgtttctgctctctttgaagcaccctgagtcagagacttcttgctctgtgacaygtgccatattgtaaaaagaaaagagacgaagttgtgcctcagctggtgaaacaagtgtgccctgatgcagaagccagatttagataaaacatctacatgcataccaygacatcaaatcctccaaatgagataggctacattcaaattttgtgacagcaaataagtattcaccagtacttaccactgtaccagtgcagccgggagcactcattcctttacaggacatcagaggacagcaattgttttcctgaggagagggaagctcaggggactacggaggaagtaggcctcagt

SEQ ID NO: 25241 - DNA, 599 bp, Chicken  19866894240384_1
  misc_feature (1)..(190): n is any nucleotide
nnnnnnnnnnnnnnnnnnnnnnnnnnnnnnnnnnnnnnnnnnnnnnnnnnnnnnnnnnnnnnnnnnnnnnnnnnnnnnnnnnnnnnnnnnnnnnnnnnnnnnnnnnnnnnnnnnnnnnnnnnnnnnnnnnnnnnnnnnnnnnnnnnnnnnnnnnnnnnnnnnnnnnnnnnnnnnnnnnnnnnnnnnnnnnaaaaggaggtgaggagactatttatctctgattatttcacactcattgagtgagaacattcaccagccttcaagattagatactcattgcctcttaaaagtaactagtcwgttgtcacagaccaactcatctgatagcttctccttaattygcaaccactgctggtgccaactcagaagagtgagctctattagtgtagatcatctgaaagttatccttagtatttgtacaacaaatgaaaagtcagtatttctctgccaaataaagtcttatcactatgtaagtttaaacatcagctctatgaaaatggcagataaaggaccagcctgtttcactctcctcaggcgtagtcaagctatcaaggtcaaaacaggagctcagaatgagagaagtaaaatgtctgaactgt

SEQ ID NO: 25242 - DNA, 599 bp, Chicken  19866894240384_2
  misc_feature (1)..(149): n is any nucleotide
nnnnnnnnnnnnnnnnnnnnnnnnnnnnnnnnnnnnnnnnnnnnnnnnnnnnnnnnnnnnnnnnnnnnnnnnnnnnnnnnnnnnnnnnnnnnnnnnnnnnnnnnnnnnnnnnnnnnnnnnnnnnnnnnnnnnnnnnnnnnnnnnnnnnnaaaaggaggtgaggagactatttatctctgattatttcacactcattgagtgagaacattcaccagccttcaagattagatactcattgcctcttaaaagtaactagtcwgttgtcacagaccaactcatctgatagcttctccttaattygcaaccactgctggtgccaactcagaagagtgagctctattagtgtagatcatctgaaagttatccttagtatttgtacaacaaatgaaaagtcagtatttctctgccaaataaagtcttatcactatgtaagtttaaacatcagctctatgaaaatggcagataaaggaccagcctgtttcactctcctcaggcgtagtcaagctatcaaggtcaaaacaggagctcagaatgagagaagtaaaatgtctgaactgtcgctgcagagaaataaaaagctattgtacaggggagtgagg

SEQ ID NO: 25243 - DNA, 600 bp, Chicken  19866894240384_3
ctctattagtgtagatcatctgaaagttatccttagtatttgtacaacaaatgaaaagtcagtatttctctgccaaataaagtcttatcactatgtaagtttaaacatcagctctatgaaaatggcagataaaggaccagcctgtttcactctcctcaggcgtagtcaagctatcaaggtcaaaacaggagctcagaatgagagaagtaaaatgtctgaactgtcgctgcagagaaataaaaagctattgtacaggggagtgaggagggcttcattttcttctccttgaagcatgttttyggtaacagctctgccagtcgtgccaaatttgtgacggtatgtgatgtaacaaatcacaaggagacacgctgagcaagccaaaaccaccatactcattttaattaaagatcctttacagctaatttagtcggaacctttgcagttgaaaggctggtcgctagcacaggaactggcccctggagttgcagaggttgttgaaattgggtcccactcgcacctgttgtgattttccacggagcacataccatccttcaccagcatttaaagaaatgataatggtttaatccttcctgttctgcc

SEQ ID NO: 25244 - DNA, 600 bp, Chicken  19866894240386_1
ggttggtccttctggagcagttaagaacaagcagaagtggagtggctgcatggataggaaactgtcagactcatagtctgcccttctataatagagcatattcttctagctaacaaattataaatcatttcctgtcgttccaggcagtgttggtggtgggacagagcgaaggaagctgtctcagagctgctgctcacctggcagttggtgcagatgctgatctctgcctgtgctctgtttccaggccttgtgctggggagcacagagcagagcctggctgggggtggcactgtgtgggcrcagcctgcagcctgcactgtgtcctggagggatggctgtgggtgagacgcggctcagggggcttcatttgggcagtggctgcagtgrtactggcagggtagctggaattggaggtggctgtgactgtgccctttcttacagggcttaactttgtagatggacacaaatgagggacaccgagagccaacggtggaggaaaattcccgatccaaacctgtggaggaataagaagagctccagggggaaaagaaacaggtaaggagctgctgcttctctgcctggtgagggaaaccaaaagca

SEQ ID NO: 25245 - DNA, 600 bp, Chicken  19866894240386_2
ataatagagcatattcttctagctaacaaattataaatcatttcctgtcgttccaggcagtgttggtggtgggacagagcgaaggaagctgtctcagagctgctgctcacctggcagttggtgcagatgctgatctctgcctgtgctctgtttccaggccttgtgctggggagcacagagcagagcctggctgggggtggcactgtgtgggcrcagcctgcagcctgcactgtgtcctggagggatggctgtgggtgagacgcggctcagggggcttcatttgggcagtggctgcagtgrtactggcagggtagctggaattggaggtggctgtgactgtgccctttcttacagggcttaactttgtagatggacacaaatgagggacaccgagagccaacggtggaggaaaattcccgatccaaacctgtggaggaataagaagagctccagggggaaaagaaacaggtaaggagctgctgcttctctgcctggtgagggaaaccaaaagcactgagtaatgccgtgactcctttagggctgtgctctgagtcagcagtggggacagagtgggtccaggccatcctcctgtgcttcttg

SEQ ID NO: 25246 - DNA, 600 bp, Chicken  19866894240398_1
aaacgatgtatcctattcagagtaagtgcagcatgctctccaatacaaaaatcgtaataccacagacgggatattatggacagaagatttcagtgcatacagcggtgaaactcagcagaagtctaacccagcagcacctgacatcccctacataaaagtggggctgtctcctgtgtaccctgccttgtaaaggtctccctacaacgtggaacagcaacttcgtgctggttggcactcctgcagtttaagcccaccttgcagaattctgctaacacacaccctcatcaaacaccacaaacracagcagaaagcagtcaccttyccaaccctgtcacacaaaatatattctcaataaggcaaatgtacaagtggtggttcctcatttatttgctggcagtttttggccaccactcaggtatacttgcagtgagcttcactttatcacctgctacatttaggcagagtggctcatttacattagccagcctcagcaaagctatgccaagttcatctcctccagcccggaacttgccagctgcctttcctgattcagtcaagatttcagcaccctcaggaatgctctcctgaggaagaggaact

SEQ ID NO: 25247 - DNA, 600 bp, Chicken  19866894240398_2
taagtgcagcatgctctccaatacaaaaatcgtaataccacagacgggatattatggacagaagatttcagtgcatacagcggtgaaactcagcagaagtctaacccagcagcacctgacatcccctacataaaagtggggctgtctcctgtgtaccctgccttgtaaaggtctccctacaacgtggaacagcaacttcgtgctggttggcactcctgcagtttaagcccaccttgcagaattctgctaacacacaccctcatcaaacaccacaaacracagcagaaagcagtcaccttyccaaccctgtcacacaaaatatattctcaataaggcaaatgtacaagtggtggttcctcatttatttgctggcagtttttggccaccactcaggtatacttgcagtgagcttcactttatcacctgctacatttaggcagagtggctcatttacattagccagcctcagcaaagctatgccaagttcatctcctccagcccggaacttgccagctgcctttcctgattcagtcaagatttcagcaccctcaggaatgctctcctgaggaagaggaactgaaaactgcacgggcaccaaac

SEQ ID NO: 25248 - DNA, 555 bp, Chicken  19866894240400_1
ccacagtgtctgacttgagacttgtcctcttgtggccaggcctgagcaaaaatttggaattaaatgaatttgcgacgttttgttcctccatactgagtttcatccagtcacctatggttggagattagaagtccggcagcacaaacacccaggtattaaggtctagcttatacactgaaatctgacatggaatttgacagaaagctgttgtgtggctctacagctcatctcagcgccgtgtttttctgcacagctataggcacgtgagagaatatctttgcatccccagagctctgctcrgagtggaaaacaagtgggatgagtcttccttgcttcatgcagctttacagcagattaggtttacccttgaagttgtaatgagatcattccatttgctcctgattctttgatcttatagccttagctagagtgaagtagctgagctaggagggagggtgttttacaggcatcaaaagtcctctgggagctggctaagcaatttcagggctacagcagagctgctggaaatctgacacgtgatcttacgcttagaaa

SEQ ID NO: 25249 - DNA, 599 bp, Chicken  19866894240402_1
  misc_feature (1)..(93): n is any nucleotide
nnnnnnnnnnnnnnnnnnnnnnnnnnnnnnnnnnnnnnnnnnnnnnnnnnnnnnnnnnnnnnnnnnnnnnnnnnnnnnnnnnnnnnnnnnnnnttatactgcaggtgatagcagtagtgctacttatgaaattttccctttggcagaatgttccaagaccctccccgttttggtgagagatcacacgtaagcaaggtactcctggaagcaaagtgcagtacattgctctaccttttttttttccattacctctaacaaacttaagttgatttcacttgctggaggtatgcgctgtgttcyttcattctctagccttttatgcacaattacagttccacagagattgaatgttttactgaagatattaaatgttaccagcaatcttcattactgtaacagaccacagagagctctaaagtgccttacattaaggcattaagtgcattactccaatagttgaggttaaagttttctgacctgtctgcttatggaggcatctacagagatggaaatgatttccattgcctacctgaaaatctttctctgtttggtgttgcttcaatggactgaggtcagttccccagcacagacaggagaat

SEQ ID NO: 25250 - DNA, 600 bp, Chicken  19866894240411_1
attgcagctcagcgatcagtaatgtaatcattgactttgtgcagctgctgctgacaattggaagactagtattgactagacttttttgatacatccaaataaatttagagaaatgtattttgttaagcttgagtactttcttggggaaaaacataaatgggctctctaatgtagtggaaagaggcataagaaagcttagtgtattgaagaaaagcaaggcttattgaagtggtaaaagacacagatttatgtcagtgaaattcattattaattaataaaaggcatagcaaaagaaacaamgagctcttcatctcttgtagtcttcaaatacggacagggtatttcttgaagatgtgtttgtttcattttttccttccatgaagaggaggtgtgctctgggctcatcccttaccctatggagcatagatgtgttttgcacatcctttgtgcgtgcagtaggtgtggcactccatgtggactcaaccagcagctgccaggtccagggagacccctccatttgtttcttgccatatccatttcatcctttataccatttttagctttgcagtcttgttcctctgttattttagtaagtgaaac

SEQ ID NO: 25251 - DNA, 599 bp, Chicken  19866894240419_1
  misc_feature (1)..(155): n is any nucleotide
nnnnnnnnnnnnnnnnnnnnnnnnnnnnnnnnnnnnnnnnnnnnnnnnnnnnnnnnnnnnnnnnnnnnnnnnnnnnnnnnnnnnnnnnnnnnnnnnnnnnnnnnnnnnnnnnnnnnnnnnnnnnnnnnnnnnnnnnnnnnnnnnnnnnnnnnnnnacactgggggctccgcagtgagcacagccatgggacggagcgttcaaacacgagccaggaaaagccttctttttgagccagctctccttcaaatgaatgaacttcttgttccgacagaaccctgaggaatgtatttgacaaatartaaatatatatatatataaaaatcaaaacgaacrttttaaagatgatcgtataagtaaaagtggcygagcttgaagaggaacttctgatccccagtatctctgaaacatgggtgctgtatattagaaacacttaaatgcgtatttaggatgtatttaaatcccagtttcatccaggcttgaagaatttgatttccatgtctctctttcccatacctgtataactgtaggttcatacttgttaagtctttgcacctctttgtaggtacacttcacgttccaggagtgcaccttgagaacc

SEQ ID NO: 25252 - DNA, 599 bp, Chicken  19866894240419_2
  misc_feature (1)..(121): n is any nucleotide
nnnnnnnnnnnnnnnnnnnnnnnnnnnnnnnnnnnnnnnnnnnnnnnnnnnnnnnnnnnnnnnnnnnnnnnnnnnnnnnnnnnnnnnnnnnnnnnnnnnnnnnnnnnnnnnnnnnnnnnnnacactgggggctccgcagtgagcacagccatgggacggagcgttcaaacacgagccaggaaaagccttctttttgagccagctctccttcaaatgaatgaacttcttgttccgacagaaccctgaggaatgtatttgacaaatartaaatatatatatatataaaaatcaaaacgaacrttttaaagatgatcgtataagtaaaagtggcygagcttgaagaggaacttctgatccccagtatctctgaaacatgggtgctgtatattagaaacacttaaatgcgtatttaggatgtatttaaatcccagtttcatccaggcttgaagaatttgatttccatgtctctctttcccatacctgtataactgtaggttcatacttgttaagtctttgcacctctttgtaggtacacttcacgttccaggagtgcaccttgagaaccacacagaaagcctttatttccagccttgctttag

SEQ ID NO: 25253 - DNA, 599 bp, Chicken  19866894240419_3
  misc_feature (1)..(89): n is any nucleotide
nnnnnnnnnnnnnnnnnnnnnnnnnnnnnnnnnnnnnnnnnnnnnnnnnnnnnnnnnnnnnnnnnnnnnnnnnnnnnnnnnnnnnnnnnacactgggggctccgcagtgagcacagccatgggacggagcgttcaaacacgagccaggaaaagccttctttttgagccagctctccttcaaatgaatgaacttcttgttccgacagaaccctgaggaatgtatttgacaaatartaaatatatatatatataaaaatcaaaacgaacrttttaaagatgatcgtataagtaaaagtggcygagcttgaagaggaacttctgatccccagtatctctgaaacatgggtgctgtatattagaaacacttaaatgcgtatttaggatgtatttaaatcccagtttcatccaggcttgaagaatttgatttccatgtctctctttcccatacctgtataactgtaggttcatacttgttaagtctttgcacctctttgtaggtacacttcacgttccaggagtgcaccttgagaaccacacagaaagcctttatttccagccttgctttaggaacaaactacagattgttgaaacctcaaggc

SEQ ID NO: 25254 - DNA, 600 bp, Chicken  19866894240419_4
agaaacacttaaatgcgtatttaggatgtatttaaatcccagtttcatccaggcttgaagaatttgatttccatgtctctctttcccatacctgtataactgtaggttcatacttgttaagtctttgcacctctttgtaggtacacttcacgttccaggagtgcaccttgagaaccacacagaaagcctttatttccagccttgctttaggaacaaactacagattgttgaaacctcaaggctgaaggtttcttcaatagccatcctacaagggctctttgtgcagcacgctctgccacrcgttccttttgaagcaaaggggagtgctggctgctcttgaagccatttgaaatgtccactgttatggttcaaacacttaaaaatgttgcagtctaaagctataattaatagctttatagttagttcaagtgtcaataaggtaaatgcctcaaaagtcaaacgtctccaaaagcttaaagagaacaaatacatgcaggtgctgtcaaggtaatacttgggactcaccgacagatagcaggcacagcaatgagtgcgggttggaatttggaatgggtgattaagctgaaaaatattcctttg

SEQ ID NO: 25255 - DNA, 552 bp, Chicken  19866894240426_1
gtcacattcacttatattattttttttcctgaaaatactgaagatgttccatatgtctgtaaatcctttaatatgactgtgctatctaacagcgatccacagattacaattgataaacctgaaaccaaaaagttgcatgaaatgcaacatatttagtaggaatttctgctacagatgtattaagttgttcagtactatagtatcctgctgtttctggatcccagaatttacttatctgtaaaataatggtagaaatggtgagtacactcactgtatttgaaattaatattttcccctgcrtgcaccatcattgttacacaagaaaaataaagagctatttcttatttttctgagcaccagtagatgttactttccatgcttctcactgcagggagattattctttcctactacatataacaaaatgtctttgactttatgttcctagtgtgcttgatcattatataaacagtattcaatagatgtcatgaaatcacatcctctttctcttctcactttaattcagctaaaaaggggcaattaagctgaggaa

SEQ ID NO: 25256 - DNA, 599 bp, Chicken  19866894240431_1
  misc_feature (1)..(106): n is any nucleotide
nnnnnnnnnnnnnnnnnnnnnnnnnnnnnnnnnnnnnnnnnnnnnnnnnnnnnnnnnnnnnnnnnnnnnnnnnnnnnnnnnnnnnnnnnnnnnnnnnnnnnnnnnngctgagaaacttgaaggtaaaaagattagtgtacattctgacatcctttcaatccagtttttgtgtttgtttccaaattgtactaagttgtaatgtataatgcttattagaccagaactgtaatgcatttaattcagctgttgtctctcttcactgcttgcatttcctactactaaagcctttcgtatcatatrcattcccaaaagtttgaaaggctagatgctgaaaatgataaagacttttcagcctgtttccagcaacatctgatgaaagaaggagagcaaaacacccagtttgatcgtggcatccacctttaagtcctcactgctgatgtcatatgacttttctcctgtatgagacttgaagtggatctctggaggcttccggacctgcctggcagttgccaacactggatcaagtcagctgtggctttgtctggccaaatctccaaatcctccgagcctagacaacccaatttaccaagtrcyatggc

SEQ ID NO: 25257 - DNA, 600 bp, Chicken  19866894240431_2
atcatatrcattcccaaaagtttgaaaggctagatgctgaaaatgataaagacttttcagcctgtttccagcaacatctgatgaaagaaggagagcaaaacacccagtttgatcgtggcatccacctttaagtcctcactgctgatgtcatatgacttttctcctgtatgagacttgaagtggatctctggaggcttccggacctgcctggcagttgccaacactggatcaagtcagctgtggctttgtctggccaaatctccaaatcctccgagcctagacaacccaatttaccaagtrcyatggcttctctaaacaccygttatcatcttcaaataagatccaaggatgctaaaaagcaaaaaagagccctaaacaaataaatgtaacagagattataacgtatgttaatttttccacaggataacccagcggacaagtatcccaagagatgggaaagcaaaatgctgctctttaatgaatagtggagatttttttgcacacacatcttctctgtgggaagacttgtgacaaatacccctcagaatcttcttagggcttctatgaaacaaatattcaaagaaatgaagaaaatcttta

SEQ ID NO: 25258 - DNA, 600 bp, Chicken  19866894240431_3
catatrcattcccaaaagtttgaaaggctagatgctgaaaatgataaagacttttcagcctgtttccagcaacatctgatgaaagaaggagagcaaaacacccagtttgatcgtggcatccacctttaagtcctcactgctgatgtcatatgacttttctcctgtatgagacttgaagtggatctctggaggcttccggacctgcctggcagttgccaacactggatcaagtcagctgtggctttgtctggccaaatctccaaatcctccgagcctagacaacccaatttaccaagtrcyatggcttctctaaacaccygttatcatcttcaaataagatccaaggatgctaaaaagcaaaaaagagccctaaacaaataaatgtaacagagattataacgtatgttaatttttccacaggataacccagcggacaagtatcccaagagatgggaaagcaaaatgctgctctttaatgaatagtggagatttttttgcacacacatcttctctgtgggaagacttgtgacaaatacccctcagaatcttcttagggcttctatgaaacaaatattcaaagaaatgaagaaaatctttact

SEQ ID NO: 25259 - DNA, 600 bp, Chicken  19866894240431_4
ttgaaaggctagatgctgaaaatgataaagacttttcagcctgtttccagcaacatctgatgaaagaaggagagcaaaacacccagtttgatcgtggcatccacctttaagtcctcactgctgatgtcatatgacttttctcctgtatgagacttgaagtggatctctggaggcttccggacctgcctggcagttgccaacactggatcaagtcagctgtggctttgtctggccaaatctccaaatcctccgagcctagacaacccaatttaccaagtrcyatggcttctctaaacaccygttatcatcttcaaataagatccaaggatgctaaaaagcaaaaaagagccctaaacaaataaatgtaacagagattataacgtatgttaatttttccacaggataacccagcggacaagtatcccaagagatgggaaagcaaaatgctgctctttaatgaatagtggagatttttttgcacacacatcttctctgtgggaagacttgtgacaaatacccctcagaatcttcttagggcttctatgaaacaaatattcaaagaaatgaagaaaatctttactgacagctggactactgaga

SEQ ID NO: 25260 - DNA, 600 bp, Chicken  19866894240434_1
tatagcacaatcatgggtgagtcattctgactaaaagcttaggtccagatcctgcattccctcctccaaaaaactcttaagggattgaatgagagcatttgccaagttgggaaccgcaaaactcagtcctaaactatatacgttgttatgggctggcttcagtagctacaaggtgttacagtttgcaaaatcattgctgtttctctttgccttttgccagtttttgaagtccttcctcattctttgttcttggtggatctgatgtactcatactggaaagaaccgcactgtttaactaayccttatctgtaaaatggttataaagaaatttcagarggatctcagtctgtgccttccaaagtccatgccagggaactgaaggggatttttgtggtatacatgaaggactttaaagcctgtcatgtgtcattcagaaaatctgctcaaaaagcacccaagctagccagtggagagagacgctatgcttttcaggtgggcagtcaggtacccctacccagagtgccgtggtctggctctgctgacctgtgatggtgattgctctacagcatggtattgaaccatcctctgccttactggctt

SEQ ID NO: 25261 - DNA, 600 bp, Chicken  19866894240434_2
gcttaggtccagatcctgcattccctcctccaaaaaactcttaagggattgaatgagagcatttgccaagttgggaaccgcaaaactcagtcctaaactatatacgttgttatgggctggcttcagtagctacaaggtgttacagtttgcaaaatcattgctgtttctctttgccttttgccagtttttgaagtccttcctcattctttgttcttggtggatctgatgtactcatactggaaagaaccgcactgtttaactaayccttatctgtaaaatggttataaagaaatttcagarggatctcagtctgtgccttccaaagtccatgccagggaactgaaggggatttttgtggtatacatgaaggactttaaagcctgtcatgtgtcattcagaaaatctgctcaaaaagcacccaagctagccagtggagagagacgctatgcttttcaggtgggcagtcaggtacccctacccagagtgccgtggtctggctctgctgacctgtgatggtgattgctctacagcatggtattgaaccatcctctgccttactggctttggagcaagttctgctgcctgccaggagagcacact

SEQ ID NO: 25262 - DNA, 600 bp, Chicken  19866894240437_1
gttcagacctgggtgtctgctcacatggcaccgctgggacttgttggtgcaatcttcagtctctgctgagggcctccccttgtgatcagacccctgaactaagataccttctggttttggtttttttttccagctgtaccctagaagagataaaagagataatactgataaaaagcaaaactcttgtttccatgtgttactggctgggtgtagtgtggagttaacatccaaagggttatctctctaacagcaagctcagtcctgcagttggtttggaaagcagaaatagcgaggactgcstgggtcacttctctaactgtgctgctgattacctggtttgactcctatctctgctgaggatttctgagtagtgaaaacccaaaggggaaaagttggtgttctttgtgtctttactcttttcagtgtgtgttgttaagaagctaaaatcgtgatggagcctacttgaaagaactgtgctatattgagggcacaatttgtaatacattgagtaagaatagcgtgcaccattgcaagaggaagaggcttccctgccaaatgtacttgaattttattaagtcctaccatctgctttctttgtag

SEQ ID NO: 25263 - DNA, 599 bp, Chicken  19866894240439_1
  misc_feature (1)..(105): n is any nucleotide
nnnnnnnnnnnnnnnnnnnnnnnnnnnnnnnnnnnnnnnnnnnnnnnnnnnnnnnnnnnnnnnnnnnnnnnnnnnnnnnnnnnnnnnnnnnnnnnnnnnnnnnnnttgataatgctgggacgtggaaggtatagagcaggacggagcccttcatctcaatcatcccttaccaagaacttactgtacatgcaaatttaccagctcttgcattgtggaacatttatatatcccagagggggtagttcgctgggagtttgcttctctgcatgctcaggggatcattctccaatgtaagagtcygtagggagaccatagtggctgatgttgctatagcattgacaaagatgtaggagaatgtcctgcagagggatatgaaaagctctgtggattgattctgttcctgtctcgtctgtcttagaaagagccaccttggctaatctttatgaaaacagcatgactaatgcttgcctgctgaactgctrtgttggataagatatttttggctgttgttttcagctgttatttacgggatcaataaaagtgatttttcaattcaaggctaattttttaccaacaagctgcataccgtgtaaggtcgg

SEQ ID NO: 25264 - DNA, 600 bp, Chicken  19866894240439_2
gtacatgcaaatttaccagctcttgcattgtggaacatttatatatcccagagggggtagttcgctgggagtttgcttctctgcatgctcaggggatcattctccaatgtaagagtcygtagggagaccatagtggctgatgttgctatagcattgacaaagatgtaggagaatgtcctgcagagggatatgaaaagctctgtggattgattctgttcctgtctcgtctgtcttagaaagagccaccttggctaatctttatgaaaacagcatgactaatgcttgcctgctgaactgctrtgttggataagatatttttggctgttgttttcagctgttatttacgggatcaataaaagtgatttttcaattcaaggctaattttttaccaacaagctgcataccgtgtaaggtcggaatattggttctgatcttcttttaaggacaagttaatttaaaaacgatgggcagtttccagttcagaattcacttctcttattgaaaggagagatgcctctgggagaaacagcttatgagggagggaattatgcactgaactatatcacaattgactgcccagagatacttatgtgttagcta

SEQ ID NO: 25265 - DNA, 600 bp, Chicken  19866894240441_1
acagcccgtaatgattaggtaaactatttcttctctaagcttaatggtctgtaaggtaaaaagtgtggagttcaggctagaagatagaaaactctatagaatgattgtacttcacagtgaaaaagacttgactttctcgagtttacattgctgagggtttttaggtatgtgactatgaaaaatattgtctaacgaaagtcaagagatgttttgtgtttagaatattagaagtataaaaaatatttctctacattagcaaggtcttgatactaaaattggtgacagagatcagcacttggkgaagattagcaaattctaattcccttggagattccttcatttggagaaaactgtaccttaatcttcatactaaagtaatcatcacattaaaaaaaaatgctgctgaagagatgtgatgtttttcagacagaactatttatagtatttcaattattccttgggttggaataatgataggaataatctaagttcctacttatttgtagagaatgatttctgatatattaataactactaagccagtgaattctgaggaaaattctataattctttgtaaataaacctccctcccattggata

SEQ ID NO: 25266 - DNA, 600 bp, Chicken  19866894240442_1
cacccgcaccccccgggcgcgctgcccgccgctcccggcgccctcaagatgatgcccgccgaccaccgcggcaaatccaaaaagacagtggacaagaacagcaacgagtaccgcgtgcgccgggagcgcaacaacatcgcggtgcgcaagagccgggacaaggccaagcagcgcaacgtggagacgcagcagaaggtgctggagctcaccaccgacaacgagcggctgcggaagcgggtggagcagctcagccgggagctggagactctgcggggcatcttcaggcagctgcccgaaagytcgctggtgaaggccatgggcagctgcgcctagccgggccctcccgcggctccgtgcgctccgagcggtgccggagcgrgctcagattgcggggggtgggctttatttttccttttctttttctttttttttttcytttttttttttccccaacaataatgaccaataaaagaagccaggcagctgtagtattaccaggtcggtgccttagggttgacacacgaataagctgaaaaacgtggtgggttttgtaaggagaaaggcgaggggaaggaagagataaaaaaagcccacgtgtct

SEQ ID NO: 25267 - DNA, 600 bp, Chicken  19866894240442_2
aaaagacagtggacaagaacagcaacgagtaccgcgtgcgccgggagcgcaacaacatcgcggtgcgcaagagccgggacaaggccaagcagcgcaacgtggagacgcagcagaaggtgctggagctcaccaccgacaacgagcggctgcggaagcgggtggagcagctcagccgggagctggagactctgcggggcatcttcaggcagctgcccgaaagytcgctggtgaaggccatgggcagctgcgcctagccgggccctcccgcggctccgtgcgctccgagcggtgccggagcgrgctcagattgcggggggtgggctttatttttccttttctttttctttttttttttcytttttttttttccccaacaataatgaccaataaaagaagccaggcagctgtagtattaccaggtcggtgccttagggttgacacacgaataagctgaaaaacgtggtgggttttgtaaggagaaaggcgaggggaaggaagagataaaaaaagcccacgtgtctacacagggtaaatgacaataataatagtaatagtaataaagcacatagagcagcccagatgtgccttaaagctgcctgc

SEQ ID NO: 25268 - DNA, 600 bp, Chicken  19866894240442_3
atcgcggtgcgcaagagccgggacaaggccaagcagcgcaacgtggagacgcagcagaaggtgctggagctcaccaccgacaacgagcggctgcggaagcgggtggagcagctcagccgggagctggagactctgcggggcatcttcaggcagctgcccgaaagytcgctggtgaaggccatgggcagctgcgcctagccgggccctcccgcggctccgtgcgctccgagcggtgccggagcgrgctcagattgcggggggtgggctttatttttccttttctttttctttttttttttrytttttttttttccccaacaataatgaccaataaaagaagccaggcagctgtagtattaccaggtcggtgccttagggttgacacacgaataagctgaaaaacgtggtgggttttgtaaggagaaaggcgaggggaaggaagagataaaaaaagcccacgtgtctacacagggtaaatgacaataataatagtaatagtaataaagcacatagagcagcccagatgtgccttaaagctgcctgcaggagctctgtgcccgcagcctgccgaggaaggagcgcggggacgtgcgggctgcg

SEQ ID NO: 25269 - DNA, 600 bp, Chicken  19866894240442_4
tcgcggtgcgcaagagccgggacaaggccaagcagcgcaacgtggagacgcagcagaaggtgctggagctcaccaccgacaacgagcggctgcggaagcgggtggagcagctcagccgggagctggagactctgcggggcatcttcaggcagctgcccgaaagytcgctggtgaaggccatgggcagctgcgcctagccgggccctcccgcggctccgtgcgctccgagcggtgccggagcgrgctcagattgcggggggtgggctttatttttccttttctttttctttttttttttcytttttttttttccccaacaataatgaccaataaaagaagccaggcagctgtagtattaccaggtcggtgccttagggttgacacacgaataagctgaaaaacgtggtgggttttgtaaggagaaaggcgaggggaaggaagagataaaaaaagcccacgtgtctacacagggtaaatgacaataataatagtaatagtaataaagcacatagagcagcccagatgtgccttaaagctgcctgcaggagctctgtgcccgcagcctgccgaggaaggagcgcggggacgtgcgggctgcgg

SEQ ID NO: 25270 - DNA, 600 bp, Chicken  19866894240444_1
gataagtgcttctgttagtgtggagtgaatgcttgatgaacattcaggtacaaagcaggatattgcagcatgctcacgttatgagttactaagagtttctttactcttagtaaagaaatctatagcagaatgcacgcaagctggtaagtagatgagttggtaaagaagcttcttgcaagtgaactcacctgcagcttttaaggtttgctacaacttcatggggattggaaggtctgagagtttctcagtcatgagctttaagaaggtgcatcagtcagtggccataacaaaagatggcartacaagagcaaggagttactgcttgctaaatttcagttgaggtggtgttctatgctagataaatagaagcattttatgttctgtactacttttcaggcaacatttgtgactgcagtatagcatggaaaacagtttgtggtttccagagaaatgttaaccaacactgtacttcaggaaggtggatttctcagtagagcagcagtgaatgctgttagttctgtactgctgaacatacagaataacttaaaatcatggcaattttgcaggtgatacggtgctcgttcacagagtacacagcta

SEQ ID NO: 25271 - DNA, 600 bp, Chicken  19866894240450_1
agtaacagaaaactgctctttaatcttacagttatcagactagggacacttcaaaatgccgcaattcctattttcgcaatacccattcactttcaagggagtctggacaaccacaaataattctgttttttgaagtccctcacaccatactcctgcccttttaaaagcacgagcagaatttcctcttcattatggtaagataattcctcataagtcacaccataagatttcttagtacatatcatctaagaataatgtggtaattcaactggaattaaatctggcaagggatgtcaaagmcaacaagasggacttctgtaagtacaaccttgacaaaagaaagaccagaaaaaaaatgtgggccctctgctcaagtagaaaggggacccagttatccagcataaggaaaacacaagtactgaattccttctttgcctctgtctttagtagtaggatcactaggaatyccaggccctacagaccatgggrggaaatctgaagcaaggaagacatacgcttgctggaagatgatcacgtcaggggacacttaagcaaactggacacacgtaagcccacagatcctgatgggatgcaaacaca

SEQ ID NO: 25272 - DNA, 600 bp, Chicken  19866894240450_2
aaactgctctttaatcttacagttatcagactagggacacttcaaaatgccgcaattcctattttcgcaatacccattcactttcaagggagtctggacaaccacaaataattctgttttttgaagtccctcacaccatactcctgcccttttaaaagcacgagcagaatttcctcttcattatggtaagataattcctcataagtcacaccataagatttcttagtacatatcatctaagaataatgtggtaattcaactggaattaaatctggcaagggatgtcaaagmcaacaagasggacttctgtaagtacaaccttgacaaaagaaagaccagaaaaaaaatgtgggccctctgctcaagtagaaaggggacccagttatccagcataaggaaaacacaagtactgaattccttctttgcctctgtctttagtagtaggatcactaggaatyccaggccctacagaccatgggrggaaatctgaagcaaggaagacatacgcttgctggaagatgatcacgtcaggggacacttaagcaaactggacacacgtaagcccacagatcctgatgggatgcaaacacaagagctgaa

SEQ ID NO: 25273 - DNA, 600 bp, Chicken  19866894240450_3
ttcaaaatgccgcaattcctattttcgcaatacccattcactttcaagggagtctggacaaccacaaataattctgttttttgaagtccctcacaccatactcctgcccttttaaaagcacgagcagaatttcctcttcattatggtaagataattcctcataagtcacaccataagatttcttagtacatatcatctaagaataatgtggtaattcaactggaattaaatctggcaagggatgtcaaagmcaacaagasggacttctgtaagtacaaccttgacaaaagaaagaccagsaaaaaaatgtgggccctctgctcaagtagaaaggggacccagttatccagcataaggaaaacacaagtactgaattccttctttgcctctgtctttagtagtaggatcactaggaatyccaggccctacagaccatgggrggaaatctgaagcaaggaagacatacgcttgctggaagatgatcacgtcaggggacacttaagcaaactggacacacgtaagcccacagatcctgatgggatgcaaacacaagagctgaaggaaatggcagatgttactgcaaggccattcttgctaatc

SEQ ID NO: 25274 - DNA, 600 bp, Chicken  19866894240450_4
cacgagcagaatttcctcttcattatggtaagataattcctcataagtcacaccataagatttcttagtacatatcatctaagaataatgtggtaattcaactggaattaaatctggcaagggatgtcaaagmcaacaagasggacttctgtaagtacaaccttgacaaaagaaagaccagaaaaaaaatgtgggccctctgctcaagtagaaaggggacccagttatccagcataaggaaaacacaagtactgaattccttctttgcctctgtctttagtagtaggatcactaggaatyccaggccctacagaccatgggrggaaatctgaagcaaggaagacatacgcttgctggaagatgatcacgtcaggggacacttaagcaaactggacacacgtaagcccacagatcctgatgggatgcaaacacaagagctgaaggaaatggcagatgttactgcaaggccattcttgctaatctttggttagcgaagttgtgtcactgtgactggaagaagtgcccaaggacagtaaaaaagcaaatgtcactcctaccttcaagaaggaggacccagaccagtcagcctaaacactgtcc

SEQ ID NO: 25275 - DNA, 600 bp, Chicken  19866894240450_5
ttatggtaagataattcctcataagtcacaccataagatttcttagtacatatcatctaagaataatgtggtaattcaactggaattaaatctggcaagggatgtcaaagmcaacaagasggacttctgtaagtacaaccttgacaaaagaaagaccagaaaaaaaatgtgggccctctgctcaagtagaaaggggacccagttatccagcataaggaaaacacaagtactgaattccttctttgcctctgtctttagtagtaggatcactaggaatyccaggccctacagaccatgggrggaaatctgaagcaaggaagacatacgcttgctggaagatgatcacgtcaggggacacttaagcaaactggacacacgtaagcccacagatcctgatgggatgcaaacacaagagctgaaggaaatggcagatgttactgcaaggccattcttgctaatctttggttagcgaagttgtgtcactgtgactggaagaagtgcccaaggacagtaaaaaagcaaatgtcactcctaccttcaagaaggaggacccagaccagtcagcctaaacactgtccctggggaagtgatggagcagct

SEQ ID NO: 25276 - DNA, 600 bp, Chicken  19866894240451_1
atgcatacgcacccacctcccctaaatccagtgcatcttaagactgcttgtctgaatgtggcaggcattctattctatgaagccatcctgtaaacatttagttttggaacaaatgaaaaccagaatgctcctatgtggtaaaccattctcatatgttcactacaaaggtatattttaggactagtgggataaaaaaaagcaaaaacaatactccaaatatcagttctaatgacacacttcagaactcttaataaaacatctaatatcaaatgggactaatagaaaaagattcgttaattsctatgctggattcattgtttactccactgaatttgctgctgagaaaacagaactgctacccacgcactgtccctgagccgtgctcacgtgatctcattttctttgtcaaaactacttattagttaagaagatatttggttgatacttacagctcgtgctgctagtgtcattagtactcctgttaaaaatgttaagtaatatccygggtaaaccccatgccaaatggcagaaaggatgaatgtttggattgttgggctgaaggtggctctctcgtagcatactctagcaaatgaaagacaa

SEQ ID NO: 25277 - DNA, 600 bp, Chicken  19866894240451_2
acaatactccaaatatcagttctaatgacacacttcagaactcttaataaaacatctaatatcaaatgggactaatagaaaaagattcgttaattsctatgctggattcattgtttactccactgaatttgctgctgagaaaacagaactgctacccacgcactgtccctgagccgtgctcacgtgatctcattttctttgtcaaaactacttattagttaagaagatatttggttgatacttacagctcgtgctgctagtgtcattagtactcctgttaaaaatgttaagtaatatccygggtaaaccccatgccaaatggcagaaaggatgaatgtttggattgttgggctgaaggtggctctctcgtagcatactctagcaaatgaaagacaaaccaagataaacaacatgagacagattgttaacaatcttcccaggtatcatttataccttcatacttttagcaggctcatctctaatgtattatttgcagtgcaactgcagattactcttatttaaaaataatgccactacattaagacttacagaaaatgcctaaagctgctcacggctgcagatttaaaccttcagtgctat

SEQ ID NO: 25278 - DNA, 600 bp, Chicken  19866894240452_1
ttgggttgttgtggccaaaaggcaggacttggcacttgatcttactgaacttcattccactggcctcagcctagggatccagcctgtccacattgctctgtagggccttcctttccacaagcagatcaacacttctcgccatgtaggtgtcatctgcaaacctactcagtatgcacacaatgccctcaccagatcatcaataaagatattgaacaggccccaatagtgacccttggggaacaccactcatgatcggtcaccagctcgatttaactccattcaccaccactctctgggccyggccatccagccagttctttacccagcaaagagtatatctgtccaagctacaggctgccagcttctccaggagaatactgtggatgactgtattgaaggctttgctgaagtctaggtagactacatcaacaacctttccaccaggaggctcacttggtcatagaaggacatcatgttggtcaagcaagacctgcctttcatgattccatgctggttagtcctgattccccagttgtcccacacatactgtgtgatcttcctcaaaatgatctgctctataaccttacctggcaccaagtt

SEQ ID NO: 25279 - DNA, 599 bp, Chicken  19866894240456_1
  misc_feature (1)..(223): n is any nucleotide
nnnnnnnnnnnnnnnnnnnnnnnnnnnnnnnnnnnnnnnnnnnnnnnnnnnnnnnnnnnnnnnnnnnnnnnnnnnnnnnnnnnnnnnnnnnnnnnnnnnnnnnnnnnnnnnnnnnnnnnnnnnnnnnnnnnnnnnnnnnnnnnnnnnnnnnnnnnnnnnnnnnnnnnnnnnnnnnnnnnnnnnnnnnnnnnnnnnnnnnnnnnnnnnnnnnnnnnnnnnnnnntccatccatccatccatccctccatccatccatccctccctcccttcaccccctgcatgctggggaaggagcacacygacaccaccacctcccactgctctccctctcttcccgcagctatttgggggatggccgtttccacctggagtccatcatgatcgccaacccggggatacccgcctacaggtagggccaactccttccccatcccagcagggcagagggagccacgctccrtgcaatgaacaccagccatttactccggctgaatataaacattttgacaagtacctgtgaaagctctttgaggtgcagccattaaactccccggctgctgcaggcagaggccataaagcgcgatgatgaggctgctgaa

SEQ ID NO: 25280 - DNA, 567 bp, Chicken  19866894240456_2
  misc_feature (1)..(63): n is any nucleotide
nnnnnnnnnnnnnnnnnnnnnnnnnnnnnnnnnnnnnnnnnnnnnnnnnnnnnnnnnnnnnnntccatccatccatccatccctccatccatccatccctccctcccttcaccccctgcatgctggggaaggagcacacygacaccaccacctcccactgctctccctctcttcccgcagctatttgggggatggccgtttccacctggagtccatcatgatcgccaacccggggatacccgcctacaggtagggccaactccttccccatcccagcagggcagagggagccacgctccrtgcaatgaacaccagccatttactccggctgaatataaacattttgacaagtacctgtgaaagctctttgaggtgcagccattaaactccccggctgctgcaggcagaggccataaagcgcgatgatgaggctgctgaaagcagatgaaatatcaagagcgaaaggcagggcccatttggagaaatctgaatttcttagtaggtcgtttgttaggaacgggaggcgcgcgtcagctttatggcgctggggaagctgccgaaacccga

SEQ ID NO: 25281 - DNA, 600 bp, Chicken  19866894240463_1
agggagacctaccaggaatactgcatccagatgtggagctccaagcacaggagagatgtggacctgttggagcatattcagaggaaggttgcaaaagtgatccaagggatggaacatcatccccacaaggagaggctgattgctgaggctgttcagcctggagaaggggtggctccagcaagacctgacagtggcagttcagtatctaaagggaggctataagaaccagggtgacagagtattatcaggatctattgtgacagaacaaggggaaattatttcaaattcaaggagggtagytttaaactggatataaggaaaaagatttttacaataagcatagtgaagcagagatgttcaaggtcatgccgaaccagactctgagcaacttgatcgagctgtagatatctctgctcatggcaagggagttggatgagttgacctttaaatgtgctttccaatycaaacaattccatgattatatgaatcttttatcttgcaaggtaaatttcaagttctttttttttttttttttttttaccttacagataaacagattttttaaacaagtacctagtccttgaaatgagatgccattca

SEQ ID NO: 25282 - DNA, 600 bp, Chicken  19866894240463_2
aaggggtggctccagcaagacctgacagtggcagttcagtatctaaagggaggctataagaaccagggtgacagagtattatcaggatctattgtgacagaacaaggggaaattatttcaaattcaaggagggtagytttaaactggatataaggaaaaagatttttacaataagcatagtgaagcagagatgttcaaggtcatgccgaaccagactctgagcaacttgatcgagctgtagatatctctgctcatggcaagggagttggatgagttgacctttaaatgtgctttccaatycaaacaattccatgattatatgaatcttttatcttgcaaggtaaatttcaagttctttttttttttttttttttttaccttacagataaacagattttttaaacaagtacctagtccttgaaatgagatgccattcaaaaaaaatatttttgctatcaaaaatatatcaaaggcaaatatatgattatttggaattccccttctctctcatattgattatatatattaatttttccctagaagttgagacaaaaagtaaataaaagaacattactctttcttcagatagcatgaggacaa

SEQ ID NO: 25283 - DNA, 600 bp, Chicken  19866894240467_1
aaattggggtgactttgttaaagaaaaccaaggttttataactgagaatttgctcaatcaaatagtgctgttctgctgttcacatgtctatttatttccatggaaagtatgagtaagcattacttctggagttacctatatgtattgaactctgatcttagtttttatattactcttcaaaaataaactatgttttaaaacagagcaagtgtttaaaataggcattggatatttttcatttggttgaaagaatgcatgtaggcacaaacaggtcagacaggagagtcattttcctaagarctaaaaatatttacctgtgtgtgattaatagtgacgcagaaggctaacagtgactgctaaaaaactgttccatgctgagattgctgatagatataatttttttcctaaacaaaatctattctgtcagttttgttactgagattttaattcagaagtctaaagctagctttaaaaaaaaaacctcagtgctaacatacaaaaccaaccattttttaaaaaattcccatttcccctatttctcttctgcacctgctttttattgcaatagccacaggctgtaataagacagcagtgtggctt

SEQ ID NO: 25284 - DNA, 600 bp, Chicken  19866894240475_1
ctagagtgcctgcatcatctacatgaaagcacttctggaggtgcaaccaaagaagttctggagctgtgataaagcagattattagaagacaaacaataagaaactacaatttgagttcatacttagtgcacagtgagtacaggagtatacagtgcaatgagtatggaggtgtatgtgtgtaagagtacaattaacccctctcatggcaagtatgccagctaatttaaatctaaaacctgaattgtggtaaatcagtatgcctcatatgccatctttgtgtcctggcagtacacatctacygaagttcaaggccatggaacttccaggatattttgaagcagtaaaatattcctcatttctaatttctgtgctgttcatactagttactggaaagctctctttgattttattcaagcgggatcaagctctcaaacataatttaagacttcagccatttcccattgcagcaacaaggtccaaaagctaacagctagagttgcacatactgattgccaaatggaaggaaaayagtctgaaaaaagcataaatataaggagtactgaaaataaatttattggaaatgaacactgaatctgaatg

SEQ ID NO: 25285 - DNA, 600 bp, Chicken  19866894240475_2
ctaaaacctgaattgtggtaaatcagtatgcctcatatgccatctttgtgtcctggcagtacacatctacygaagttcaaggccatggaacttccaggatattttgaagcagtaaaatattcctcatttctaatttctgtgctgttcatactagttactggaaagctctctttgattttattcaagcgggatcaagctctcaaacataatttaagacttcagccatttcccattgcagcaacaaggtccaaaagctaacagctagagttgcacatactgattgccaaatggaaggaaaayagtctgaaaaaagcataaatataaggagtactgaaaataaatttattggaaatgaacactgaatctgaatgaaaacctgatctgcttccaaatcaatttcaaagaactgatacagcagaaaaaaggtcttggccagagttatgtcccttacctcagataaactaacttatcaatgatgtatagtagagtcaaatattttttctatgatccatctgccaaatatctatacatgcaagtctggattgctttcagaggcagggatatagacatctaagctctcgagtcagagtaatgtgactc

SEQ ID NO: 25286 - DNA, 600 bp, Chicken  19866894240475_3
tctgtcagaaattgtgctgggaaccagtctcataagcaggtgggtggccagaaccacaaaaaaagcggggttgttttttgtgttgtttttttttttaacaaaattccatcataaatttcttttgtctttctgagttttccttccaaattgaaataaaaaataaataaatctggaaatggtcaattttctatggaggaggaattcctgcagccttaaccaaaaaagaaactctttgtttgtttttccacttggctctttctctctgttcctctggcttctctcactcagctaaccttcccrctccccctttttgttccttctgctcattttccccccctttcacctcttcatttctcagctgaattgttttctcactcctggctttgcaatctatttcacagctgatcctttgctgagcacggactccgtaacactggaggtgaactttcacactcacgttgattcagaggacagaggattaggatagacaggtttgcccctctctgtgcagtaagattaatgtatgaacttcctctccctctgctttacattctgctcatttttattatcttaacttactgttttgttttaaaaccctga

SEQ ID NO: 25287 - DNA, 600 bp, Chicken  19866894240475_4
aattgttttctcactcctggctttgcaatctatttcacagctgatcctttgctgagcacggactccgtaacactggaggtgaactttcacactcacgttgattcagaggacagaggattaggatagacaggtttgcccctctctgtgcagtaagattaatgtatgaacttcctctccctctgctttacattctgctcatttttattatcttaacttactgttttgttttaaaaccctgatccgtatctaaacataacctcatgtgaacagcctgcccaccaccatcaccactgccaccamcaccgctttacccaaatcccctcttcaggtggcagagctgctgtttgaaacaggaccacgaactgggaatgactgcagtgctcagtgcagtatcttcggaaatggagtttggtaacggagcttctgctagatccacctttttcctttcagcctgagagaagttttacctcccttattagtttcactagcagtagcacaggttgttctaatattccgtgctgcctgtaacatattgcagatgtaccctgtgtgaaatggtctctcgttattggaatgcaataaaaagaaaacaagcttctc

SEQ ID NO: 25288 - DNA, 600 bp, Chicken  19866894240476_1
agtgtgcccccagtgcagacagccccacgaggcctacgtgtgactatgcatggggacagcagtcagagcagggcccggctgacggaaggagggtgtcaggtcctttactgacggcaggagtgtggctcagaacctcgcctgcaaaccccaaagctgcacgaacccatcaggggcggtggtggtgttgctgggagctccccgaaaacaaaggtcgctgctctgagggcagggcaggtcttgggctcagcacaggggatcatgagagcggctgatggcagcactcagtgctaaaaggacccktctgtgctgcatgcactgacacagcattcacacaggtggcagattcagtccccttcttggacttatggcacctgcagaacggtgctgtgctttgcaacaccgccttccgaggggagggagaaggtcttcgtggcagaaaaggcccttcagcacgcagttcgcctcccgcacccaggaagacggccacccccccccgccgccccccactgacggggcagcaggccgccataatgcccgcattgtgatcgcgcccgcccggcagggggcgctctactcccggcagtgggcggggcctcgcgg

SEQ ID NO: 25289 - DNA, 600 bp, Chicken  19866894240479_1
ggagtgatgacagagaaaaaacacaagttacatgaggattttcctcagcggagagagcagccttgtttaaagcttgacgtgtgacttttggctggagaaaaagctggcttgactgaaagctgagggaatgcgatccacgtgtcataaagagtatgtctcattaagaattctcatcagtagcttgctatatactgtctgtgagaaaggaatagtccagtcatttttatgtttacttttttgttaaatagtcattggcctatccagctatactgaactgttatttccaggagaaaactgcakagtgattacgtaattttatgtaaatactctttactctcatacttgtccactgtgaaacaatagttcaacagctgtaattcaagtgggtcaaacttgttttccctgattaccaagtaaatttagctaaatggattcaaacgcctaactcaaatactccttactttaccttcttagagcaggctatgaaagaggaagcacagttacagagaaaaggaaaagcctctgaaattggctgtgaaaaggtggataggagggtatggaggagcccatgtttttatacctgtctgccttgggtcaaga

SEQ ID NO: 25290 - DNA, 600 bp, Chicken  19866894240483_1
gaaattacacagcagaagccagcagaacaccaagcaatgcttttgattcacaagaatggcaaaaacaagtcttataagaattcttctccttaaatgcacaactgtaatggatgcaaagtgctgtatttaaaacagtgttttgctatcagataaatattgcttgtcatgctttcaagcagattgtttagttctggctgttgtttccagaacactctgatacaaatggcacagctctgagagaacagtgaggtaggagataacggggtatggaagtgactcaggagcaagctaaagcataarggtagagagccatgactacttgtgaaatgacagattgcaaatataaacacaaaaagtgctctaggctgccagagctggcgggatcctctttatggtgctattttatttctttgtatctctygtttatctttcagcaagtcattagttatgaaaataagactcaaaaataccagcaagattgagactggggcaatatcatgaatttcaagtccttgacaagccaacattcaaggtacttaggagtgttttcccttgcacasttttaaataatgttaccacagctgttcaacagagattcta

SEQ ID NO: 25291 - DNA, 569 bp, Chicken  19866894240483_2
tgtatttaaaacagtgttttgctatcagataaatattgcttgtcatgctttcaagcagattgtttagttctggctgttgtttccagaacactctgatacaaatggcacagctctgagagaacagtgaggtaggagataacggggtatggaagtgactcaggagcaagctaaagcataarggtagagagccatgactacttgtgaaatgacagattgcaaatataaacacaaaaagtgctctaggctgccagagctggcgggatcctctttatggtgctattttatttctttgtatctctygtttatctttcagcaagtcattagttatgaaaataagactcaaaaataccagcaagattgagactggggcaatatcatgaatttcaagtccttgacaagccaacattcaaggtacttaggagtgttttcccttgcacasttttaaataatgttaccacagctgttcaacagagattctactctaatgatagaacagaaaggcatgatatctattccttcaatatgacatgttttattgtgggacaaaatctctgcagtttgagaatcat

SEQ ID NO: 25292 - DNA, 430 bp, Chicken  19866894240483_3
cggggtatggaagtgactcaggagcaagctaaagcataarggtagagagccatgactacttgtgaaatgacagattgcaaatataaacacaaaaagtgctctaggctgccagagctggcgggatcctctttatggtgctattttatttctttgtatctctygtttatctttcagcaagtcattagttatgaaaataagactcaaaaataccagcaagattgagactggggcaatatcatgaatttcaagtccttgacaagccaacattcaaggtacttaggagtgttttcccttgcacasttttaaataatgttaccacagctgttcaacagagattctactctaatgatagaacagaaaggcatgatatctattccttcaatatgacatgttttattgtgggacaaaatctctgcagtttgagaatcat

SEQ ID NO: 25293 - DNA, 599 bp, Chicken  19866894240490_1
  misc_feature (1)..(114): n is any nucleotide
nnnnnnnnnnnnnnnnnnnnnnnnnnnnnnnnnnnnnnnnnnnnnnnnnnnnnnnnnnnnnnnnnnnnnnnnnnnnnnnnnnnnnnnnnnnnnnnnnnnnnnnnnnnnnnnnnntccagacaaaattcaagcccttagaatctcaccccctggtcagcaagcagccatctgcacagtgtgctggagcaacaaaggaaatgggagcaccagaccctgacagcatcactggagtgcccaacacgtctcaccccccacacacaaacagcaggatgctccaacagcagcactcagacagtgctrgcagaggcagtggagcatgcccagactccagcaacgcagccctgctgcctccagaattgcagagatttaacagcagtgaagtttttcaagaacagatatggcttcagaacatcagcacccactctgaaaggctcaagtctgttctctgacctgccaacacagacagaattctttggcattgtctatacaccactgcacagcaggactccagcctacaracaccagtctccagcttctaaggggctttatatgttytgtcatgggtgrctgcatttttcagagctcttcctctcaccttc

SEQ ID NO: 25294 - DNA, 600 bp, Chicken  19866894240490_2
agcatcactggagtgcccaacacgtctcaccccccacacacaaacagcaggatgctccaacagcagcactcagacagtgctrgcagaggcagtggagcatgcccagactccagcaacgcagccctgctgcctccagaattgcagagatttaacagcagtgaagtttttcaagaacagatatggcttcagaacatcagcacccactctgaaaggctcaagtctgttctctgacctgccaacacagacagaattctttggcattgtctatacaccactgcacagcaggactccagcctacaracaccagtctccagcttctaaggggctttatatgttytgtcatgggtgrctgcatttttcagagctcttcctctcaccttcattcattaaacttgaataaaaaaagaatctattaatgaaatgcaaaggagtcatttttcaaaatcagcaatagtctccaatytttctgaggttaaagcactgtttctttcatttaatctaatcccaactgaggaagttgatcccattttatctaatcccaactgaggtgaggaagaacccatacagagtaattaagggcactgatacctttgaagcaag

SEQ ID NO: 25295 - DNA, 600 bp, Chicken  19866894240490_3
acacaaacagcaggatgctccaacagcagcactcagacagtgctrgcagaggcagtggagcatgcccagactccagcaacgcagccctgctgcctccagaattgcagagatttaacagcagtgaagtttttcaagaacagatatggcttcagaacatcagcacccactctgaaaggctcaagtctgttctctgacctgccaacacagacagaattctttggcattgtctatacaccactgcacagcaggactccagcctacaracaccagtctccagcttctaaggggctttatatgttytgtcatgggtgrctgcatttttcagagctcttcctctcaccttcattcattaaacttgaataaaaaaagaatctattaatgaaatgcaaaggagtcatttttcaaaatcagcaatagtctccaatytttctgaggttaaagcactgtttctttcatttaatctaatcccaactgaggaagttgatcccattttatctaatcccaactgaggtgaggaagaacccatacagagtaattaagggcactgatacctttgaagcaagcaggacagctcaacgagtcttcccagtcagccacacc

SEQ ID NO: 25296 - DNA, 600 bp, Chicken  19866894240490_4
ggatgctccaacagcagcactcagacagtgctrgcagaggcagtggagcatgcccagactccagcaacgcagccctgctgcctccagaattgcagagatttaacagcagtgaagtttttcaagaacagatatggcttcagaacatcagcacccactctgaaaggctcaagtctgttctctgacctgccaacacagacagaattctttggcattgtctatacaccactgcacagcaggactccagcctacaracaccagtctccagcttctaaggggctttatatgttytgtcatgggtgrctgcatttttcagagctcttcctctcaccttcattcattaaacttgaataaaaaaagaatctattaatgaaatgcaaaggagtcatttttcaaaatcagcaatagtctccaatytttctgaggttaaagcactgtttctttcatttaatctaatcccaactgaggaagttgatcccattttatctaatcccaactgaggtgaggaagaacccatacagagtaattaagggcactgatacctttgaagcaagcaggacagctcaacgagtcttcccagtcagccacaccaggctttgaatg

SEQ ID NO: 25297 - DNA, 600 bp, Chicken  19866894240490_5
ctrgcagaggcagtggagcatgcccagactccagcaacgcagccctgctgcctccagaattgcagagatttaacagcagtgaagtttttcaagaacagatatggcttcagaacatcagcacccactctgaaaggctcaagtctgttctctgacctgccaacacagacagaattctttggcattgtctatacaccactgcacagcaggactccagcctacaracaccagtctccagcttctaaggggctttatatgttytgtcatgggtgrctgcatttttcagagctcttcctctcaccrtcattcattaaacttgaataaaaaaagaatctattaatgaaatgcaaaggagtcatttttcaaaatcagcaatagtctccaatytttctgaggttaaagcactgtttctttcatttaatctaatcccaactgaggaagttgatcccattttatctaatcccaactgaggtgaggaagaacccatacagagtaattaagggcactgatacctttgaagcaagcaggacagctcaacgagtcttcccagtcagccacaccaggctttgaatggtgaacagcaggagaacatctcagcacaac

SEQ ID NO: 25298 - DNA, 600 bp, Chicken  19866894240490_6
trgcagaggcagtggagcatgcccagactccagcaacgcagccctgctgcctccagaattgcagagatttaacagcagtgaagtttttcaagaacagatatggcttcagaacatcagcacccactctgaaaggctcaagtctgttctctgacctgccaacacagacagaattctttggcattgtctatacaccactgcacagcaggactccagcctacaracaccagtctccagcttctaaggggctttatatgttytgtcatgggtgrctgcatttttcagagctcttcctctcacctrcattcattaaacttgaataaaaaaagaatctattaatgaaatgcaaaggagtcatttttcaaaatcagcaatagtctccaatytttctgaggttaaagcactgtttctttcatttaatctaatcccaactgaggaagttgatcccattttatctaatcccaactgaggtgaggaagaacccatacagagtaattaagggcactgatacctttgaagcaagcaggacagctcaacgagtcttcccagtcagccacaccaggctttgaatggtgaacagcaggagaacatctcagcacaacc

SEQ ID NO: 25299 - DNA, 600 bp, Chicken  19866894240490_7
rgcagaggcagtggagcatgcccagactccagcaacgcagccctgctgcctccagaattgcagagatttaacagcagtgaagtttttcaagaacagatatggcttcagaacatcagcacccactctgaaaggctcaagtctgttctctgacctgccaacacagacagaattctttggcattgtctatacaccactgcacagcaggactccagcctacaracaccagtctccagcttctaaggggctttatatgttytgtcatgggtgrctgcatttttcagagctcttcctctcaccttrattcattaaacttgaataaaaaaagaatctattaatgaaatgcaaaggagtcatttttcaaaatcagcaatagtctccaatytttctgaggttaaagcactgtttctttcatttaatctaatcccaactgaggaagttgatcccattttatctaatcccaactgaggtgaggaagaacccatacagagtaattaagggcactgatacctttgaagcaagcaggacagctcaacgagtcttcccagtcagccacaccaggctttgaatggtgaacagcaggagaacatctcagcacaacca

SEQ ID NO: 25300 - DNA, 600 bp, Chicken  19866894240490_8
gcagaggcagtggagcatgcccagactccagcaacgcagccctgctgcctccagaattgcagagatttaacagcagtgaagtttttcaagaacagatatggcttcagaacatcagcacccactctgaaaggctcaagtctgttctctgacctgccaacacagacagaattctttggcattgtctatacaccactgcacagcaggactccagcctacaracaccagtctccagcttctaaggggctttatatgttytgtcatgggtgrctgcatttttcagagctcttcctctcaccttcrttcattaaacttgaataaaaaaagaatctattaatgaaatgcaaaggagtcatttttcaaaatcagcaatagtctccaatytttctgaggttaaagcactgtttctttcatttaatctaatcccaactgaggaagttgatcccattttatctaatcccaactgaggtgaggaagaacccatacagagtaattaagggcactgatacctttgaagcaagcaggacagctcaacgagtcttcccagtcagccacaccaggctttgaatggtgaacagcaggagaacatctcagcacaaccat

SEQ ID NO: 25301 - DNA, 550 bp, Chicken  19866894240490_9
tttttcaagaacagatatggcttcagaacatcagcacccactctgaaaggctcaagtctgttctctgacctgccaacacagacagaattctttggcattgtctatacaccactgcacagcaggactccagcctacaracaccagtctccagcttctaaggggctttatatgttytgtcatgggtgrctgcatttttcagagctcttcctctcaccttcattcattaaacttgaataaaaaaagaatctattaatgaaatgcaaaggagtcatttttcaaaatcagcaatagtctccaatytttctgaggttaaagcactgtttctttcatttaatctaatcccaactgaggaagttgatcccattttatctaatcccaactgaggtgaggaagaacccatacagagtaattaagggcactgatacctttgaagcaagcaggacagctcaacgagtcttcccagtcagccacaccaggctttgaatggtgaacagcaggagaacatctcagcacaaccattcagaaccagaacccagacccatgctctcta

SEQ ID NO: 25302 - DNA, 599 bp, Chicken  19866894240493_1
  misc_feature (1)..(90): n is any nucleotide
nnnnnnnnnnnnnnnnnnnnnnnnnnnnnnnnnnnnnnnnnnnnnnnnnnnnnnnnnnnnnnnnnnnnnnnnnnnnnnnnnnnnnnnnnntatcctgggctgcatcaaatgaggggtagccagcagggcaagggaggggattgtccccctctactctgccctcatgaaccccatctgtactgtgtccaagcctggggcccccagtacaggaaggatgtggagctgttggagtgggtccagaggacagctatgaagatgaccggagggctggagaacccttcctatgaagaaaggttgaargcaagagggtrtatttaggttagatgctaggaaaaawttttttactcagagggtggtaaagtgctggaacaggttgcccagagaggttgtggatgttccatctctggaggcattcaaggccaggttagatgggatcctgggcacttgatccagtaattggaacaactctgcccatagcaggtgggttggaactagatgatctttaaggtctcctccaacctaagccattctgtgagagttctccagtcactaaaggataggaagctgaaaaatacaaattttgtgcagggaaagaggac

SEQ ID NO: 25303 - DNA, 599 bp, Chicken  19866894240493_2
  misc_feature (1)..(79): n is any nucleotide
nnnnnnnnnnnnnnnnnnnnnnnnnnnnnnnnnnnnnnnnnnnnnnnnnnnnnnnnnnnnnnnnnnnnnnnnnnnnnnntatcctgggctgcatcaaatgaggggtagccagcagggcaagggaggggattgtccccctctactctgccctcatgaaccccatctgtactgtgtccaagcctggggcccccagtacaggaaggatgtggagctgttggagtgggtccagaggacagctatgaagatgaccggagggctggagaacccttcctatgaagaaaggttgaargcaagagggtrtatttaggttagatgctaggaaaaawttttttactcagagggtggtaaagtgctggaacaggttgcccagagaggttgtggatgttccatctctggaggcattcaaggccaggttagatgggatcctgggcacttgatccagtaattggaacaactctgcccatagcaggtgggttggaactagatgatctttaaggtctcctccaacctaagccattctgtgagagttctccagtcactaaaggataggaagctgaaaaatacaaattttgtgcagggaaagaggacaagcaaaaaaa

SEQ ID NO: 25304 - DNA, 599 bp, Chicken  19866894240493_3
  misc_feature (1)..(53): n is any nucleotide
nnnnnnnnnnnnnnnnnnnnnnnnnnnnnnnnnnnnnnnnnnnnnnnnnnnnntatcctgggctgcatcaaatgaggggtagccagcagggcaagggaggggattgtccccctctactctgccctcatgaaccccatctgtactgtgtccaagcctggggcccccagtacaggaaggatgtggagctgttggagtgggtccagaggacagctatgaagatgaccggagggctggagaacccttcctatgaagaaaggttgaargcaagagggtrtatttaggttagatgctaggaaaaawttttttactcagagggtggtaaagtgctggaacaggttgcccagagaggttgtggatgttccatctctggaggcattcaaggccaggttagatgggatcctgggcacttgatccagtaattggaacaactctgcccatagcaggtgggttggaactagatgatctttaaggtctcctccaacctaagccattctgtgagagttctccagtcactaaaggataggaagctgaaaaatacaaattttgtgcagggaaagaggacaagcaaaaaaaactgatggaagagtgaagcagctctt

SEQ ID NO: 25305 - DNA, 457 bp, Chicken  19866894240493_4
atctctggaggcattcaaggccaggttagatgggatcctgggcacttgatccagtaattggaacaactctgcccatagcaggtgggttggaactagatgatctttaaggtctcctccaacctaagccattctgtgagagttctccagtcactaaaggataggaagctgaaaaatacaaattttgtgcagggaaagaggacaagcaaaaaaaactgatggaagagtgaagcagctctttaaggtcagcagtggccactaactattaaacacacaactacacacagccacacattgaattayttattttaaatgagaaacatccttctgttgaatttggccctggggaacaaaaagatagttaatatttccttttattttaggatggctacttcccactccttcccacaaaaaataaattactcacatagaaagaggaagggctcacaagggaagctgg

SEQ ID NO: 25306 - DNA, 600 bp, Chicken  19866894240494_1
ttccattatgagcatggaggtgataaccattcaccaatctacccatcttctgtggatgcccgctatcaagcaacatggaggagtaatttagaccccatcctcttccttctcttgcaggtggtctctctaggcctgtattttggggatcaggcttatctccgcagcagctggaacgtcctggatggcttcttggtcttcgtgtctctcatcgacattgtggtctcagtggcttctgctggtggtgccaaaatcctaggggtgctgcgggtcctccggctgctgcgcaccttacggccactycggtcagagtcccaccaygttctgttctgctcctccttcttactggtccccccaggaagagtcctggagtcagaccccactgtaatgatcaaagggtggtctttgacaatgcacaaaccttagtcgtatggctctgaccatggagatacttcatcagacatccaacccatgggataaaagaggatttggggtcctggtaggagcgtttccccatgacaggccactgcacagggagagcaggggccctctgctgctgaaaatgcttatctgtggccaaacacccctgctctgtctctctgt

SEQ ID NO: 25307 - DNA, 600 bp, Chicken  19866894240494_2
ggtgataaccattcaccaatctacccatcttctgtggatgcccgctatcaagcaacatggaggagtaatttagaccccatcctcttccttctcttgcaggtggtctctctaggcctgtattttggggatcaggcttatctccgcagcagctggaacgtcctggatggcttcttggtcttcgtgtctctcatcgacattgtggtctcagtggcttctgctggtggtgccaaaatcctaggggtgctgcgggtcctccggctgctgcgcaccttacggccactycggtcagagtcccaccaygttctgttctgctcctccttcttactggtccccccaggaagagtcctggagtcagaccccactgtaatgatcaaagggtggtctttgacaatgcacaaaccttagtcgtatggctctgaccatggagatacttcatcagacatccaacccatgggataaaagaggatttggggtcctggtaggagcgtttccccatgacaggccactgcacagggagagcaggggccctctgctgctgaaaatgcttatctgtggccaaacacccctgctctgtctctctgtcacccctccctttccttc

SEQ ID NO: 25308 - DNA, 600 bp, Chicken  19866894240496_1
cctttcagaatgcaagaaaatgtctaacgactctgtttgtctgtatgccctttttttgcctatattctgctctgcgtggagctgtttttaaacacgaaagcacatgggtgggatgagagtttgcttgctttgtcctgaccgctatagttccaggccaggtagaagaagactcattttctgaaagtcactgcatgtgctcctccagaaaacctggatcaggcaagaagagagagcagaagagctaccaagcagagagaacagggcagagctttggctcaacccatcaccttcagaaatctraacacactgttyggamatcttttgcaggcaatattgctcctcccactasagtctggagagaaatgggaatggcaaaaataagtttttcagtggcaaataaattacattacacattaattttaacctcattatccaggtctttcaaagcctaaaagtagatggctggaggaatggatgaggatggaaagcgctcctggcaaccccatatttctgcacaacttcattcagtctttgaagctgacagaagttgctggtgtggcactcactgcacaaatcacctgacgacacctaatggctggt

SEQ ID NO: 25309 - DNA, 600 bp, Chicken  19866894240496_2
caagaaaatgtctaacgactctgtttgtctgtatgccctttttttgcctatattctgctctgcgtggagctgtttttaaacacgaaagcacatgggtgggatgagagtttgcttgctttgtcctgaccgctatagttccaggccaggtagaagaagactcattttctgaaagtcactgcatgtgctcctccagaaaacctggatcaggcaagaagagagagcagaagagctaccaagcagagagaacagggcagagctttggctcaacccatcaccttcagaaatctraacacactgttyggamatcttttgcaggcaatattgctcctcccactasagtctggagagaaatgggaatggcaaaaataagtttttcagtggcaaataaattacattacacattaattttaacctcattatccaggtctttcaaagcctaaaagtagatggctggaggaatggatgaggatggaaagcgctcctggcaaccccatatttctgcacaacttcattcagtctttgaagctgacagaagttgctggtgtggcactcactgcacaaatcacctgacgacacctaatggctggtggaaaaagggag

SEQ ID NO: 25310 - DNA, 600 bp, Chicken  19866894240496_3
aaaatgtctaacgactctgtttgtctgtatgccctttttttgcctatattctgctctgcgtggagctgtttttaaacacgaaagcacatgggtgggatgagagtttgcttgctttgtcctgaccgctatagttccaggccaggtagaagaagactcattttctgaaagtcactgcatgtgctcctccagaaaacctggatcaggcaagaagagagagcagaagagctaccaagcagagagaacagggcagagctttggctcaacccatcaccttcagaaatctraacacactgttyggamatcttttgcaggcaatattgctcctcccactasagtctggagagaaatgggaatggcaaaaataagtttttcagtggcaaataaattacattacacattaattttaacctcattatccaggtctttcaaagcctaaaagtagatggctggaggaatggatgaggatggaaagcgctcctggcaaccccatatttctgcacaacttcattcagtctttgaagctgacagaagttgctggtgtggcactcactgcacaaatcacctgacgacacctaatggctggtggaaaaagggaggaac

SEQ ID NO: 25311 - DNA, 600 bp, Chicken  19866894240496_4
ctttttttgcctatattctgctctgcgtggagctgtttttaaacacgaaagcacatgggtgggatgagagtttgcttgctttgtcctgaccgctatagttccaggccaggtagaagaagactcattttctgaaagtcactgcatgtgctcctccagaaaacctggatcaggcaagaagagagagcagaagagctaccaagcagagagaacagggcagagctttggctcaacccatcaccttcagaaatctraacacactgttyggamatcttttgcaggcaatattgctcctcccactasagtctggagagaaatgggaatggcaaaaataagtttttcagtggcaaataaattacattacacattaattttaacctcattatccaggtctttcaaagcctaaaagtagatggctggaggaatggatgaggatggaaagcgctcctggcaaccccatatttctgcacaacttcattcagtctttgaagctgacagaagttgctggtgtggcactcactgcacaaatcacctgacgacacctaatggctggtggaaaaagggaggaacaacactactgtcaagtctttcctcctgtctgtc

SEQ ID NO: 25312 - DNA, 600 bp, Chicken  19866894240496_5
ccattaatgaaattttcatcttctaaatcttaatcccattgaaacaacaaggaccaggaaggaactaccatggtgattatttttttaaaacattgacaacaattaaaaaaattctttaattactttgcatcctttcagagcgtacagaaaaagttaaattatgtgcttcgtgtggaatttactatccttttacaactgtttttcaacttacaattttatgtaagtaacaatgctttctctccaaccactgcaaatatatcactgatttatctgaacatttcaatatcaaagttaactttygccgttctgttatctagaagaaaatttgccttaaaggataaaattttctgcaatttgatttaggttatatggtcaaagaaagctaagtttgacattcttaatcatactgtgcagtcygctgattggcgcatgaaataagacattacagagagaaaataaaagccaagttatctggctcctacattgctgtttcccaggccaagtacaaatacttacatcacgtggattctcacaaagaaaagaaaaataataaaataatagactccacttatcctctcatgcaagagagacgtttccaat

SEQ ID NO: 25313 - DNA, 600 bp, Chicken  19866894240496_6
aattactttgcatcctttcagagcgtacagaaaaagttaaattatgtgcttcgtgtggaatttactatccttttacaactgtttttcaacttacaattttatgtaagtaacaatgctttctctccaaccactgcaaatatatcactgatttatctgaacatttcaatatcaaagttaactttygccgttctgttatctagaagaaaatttgccttaaaggataaaattttctgcaatttgatttaggttatatggtcaaagaaagctaagtttgacattcttaatcatactgtgcagtcygctgattggcgcatgaaataagacattacagagagaaaataaaagccaagttatctggctcctacattgctgtttcccaggccaagtacaaatacttacatcacgtggattctcacaaagaaaagaaaaataataaaataatagactccacttatcctctcatgcaagagagacgtttccaatgcgttcagagaatactcttctgctatcctacctgttttctcagagctatcactcatatcacaatcaagaaattactatgccgtgtaaaaccataaaacactaaaagtgctcaatagt

SEQ ID NO: 25314 - DNA, 600 bp, Chicken  19866894240502_1
gcaccccacagtaaccaacgttaaggctgaaacacttcaatttttttaaccaaatttcatgacactcagatagctgtcataaccgtaggagcaaggggaaatttcaagcacttccaaggtttggagatgagccgttagaaactgattggctgcattcatacagaggaaaaacttttaatttgttctgcattgatttctaacttcatcctctgttatatacagcacataggagcagatttttcaaggactttcagtatcgaaagaaacaaggaggtgctgaagagaatttttgaaaatgtrtaacaatatatgttcaattaattcccactgatttcattaaaggtctctgaaaacaaaagacttggaaccagcagagtgtgactggctgaccctctgcacatcttcaacataccactatcaggttatctgcagcacagagcacaatctgataaacagtactttaagacaaacatttcttctgcttttgcagatcttcattccagcccatccccagttatacatcagaagttcagtatttttcactgtgtatcccaccagttctactcaatttattgcaaatcaaagaatggtaaccaaact

SEQ ID NO: 25315 - DNA, 600 bp, Chicken  19866894240502_2
ttaattcccactgatttcattaaaggtctctgaaaacaaaagacttggaaccagcagagtgtgactggctgaccctctgcacatcttcaacataccactatcaggttatctgcagcacagagcacaatctgataaacagtactttaagacaaacatttcttctgcttttgcagatcttcattccagcccatccccagttatacatcagaagttcagtatttttcactgtgtatcccaccagttctactcaatttattgcaaatcaaagaatggtaaccaaactgtgtaagtctgaagttwaaaaaaaaaaacacaaatacatcagaaaatgttatgaggtaaattttagagcctttttacgctggctatctaacagttcatttacttattttgtgctttagattttggggtttttttagcccacctcttacaatgaagcattccttatatccaatagctctacaaatctttctacagactgaaggtattaagaatagtaaaatattaacaatcactttgtattgggtaaacgtggttagcgacataattcctgacacacatcctcaagaccagatctctcttaccacttcttcctccagc

SEQ ID NO: 25316 - DNA, 600 bp, Chicken  19866894240506_1
catggccgtaactctcccaggataaactctccctggaaacctctcccatcatcgccaaaaaatagatgctgaaagtgaaggctccaatgaagagacagactcctctgaaaactgaaggttgtgagggtgggaacctttctcatctttggtttgtccagagctcgctgtaggtatagcacctattcccagagcatctgttctgacagtgggttctgttcacatcaccagcttgtgcgtggccgtgccagttcccactgccaggtccgcctgttccttcccagcaagaatgctgctagtttyctagatccaaatttgtgcagctcctcctcagaagctatttccagatgcagttatgctaccctctgctggcaagtaggacaaaccagcagatgctagatctgcctgtacttggaaatagcagggtgttctctcaccaaggatctctcacagttcagcaggtgctggagcagtgggagtgctggtgcaggctgattgccaggtagctgtgtttaaacttgacctagacaatagagtggttaaattgccagcggcagctttgcattcatgctccattataattattcctagtaaagctgcacc

SEQ ID NO: 25317 - DNA, 600 bp, Chicken  19866894240508_1
taactactattacaagctgaagcaaatcacctgggtcaagacaagttcaggcaaaccctcagaggcccataccactagcttagtgcaaagctgtgcctgtcataagcaatggcagcaacatacttagtggatgaaaagatggcagatattttttctctttgccttggctctggctctttttctgacttttgttttctatgagatcatgggcatattcctttgcctttccgaatctctaaaagagataaaatatactgtcaactaaatagaacagaatgaggaaagcagtagaaatgaatygatcattactatttgtttaaatgagaatctctgtcaaatctgaagaattaatctggtctgagaaggatgccgggagacttaggacaacctcatctgacaatcaagtgaagtaaatgtttgttctctacacagatcttcatgctgagaagcactagtgtgatggaatatcttaaagtgattcatcctattctatattcattttttttcttaaagctgagaacataatgatctactcaaaatgggaggatcaccttttagatacataaacagataaaaaaaagtttcattattaaatactga

SEQ ID NO: 25318 - DNA, 599 bp, Chicken  19866894240509_1
  misc_feature (1)..(52): n is any nucleotide
nnnnnnnnnnnnnnnnnnnnnnnnnnnnnnnnnnnnnnnnnnnnnnnnnnnnctgctgcttgtgacagtctgcatgctggattttatatatatatataatgtatgtatgtatatatatatatatatatatatatatagtgttgatgaagaaagcctttaagtaaattaatgaaagatgattaaattaaaaataggctccggggggggaaatggtgcaagagacaaagccatcaaatcaatattgtgtctttctttatatcaggttaacaagctgtataatcaacaaatatacagagtagyatgggtagatcagtatccacggatagyataggtggaaagactataatcagaaatagaygaaaaatactcactcatgttgtaggcttayaggaaaaactccaagaggagcaatctccagaaagagatccttcttcagtggtggtcagcccttaaatggggtttaggagaggtgcagccagggtccaccccttccagtcacacattcacataggtgaattgccttcacctgtgctcccagggctgactcagtgctygcctcagctgatcaatcagagattcaggccrtgattcagcagttc

SEQ ID NO: 25319 - DNA, 599 bp, Chicken  19866894240509_2
  misc_feature (1)..(25): n is any nucleotide
nnnnnnnnnnnnnnnnnnnnnnnnnctgctgcttgtgacagtctgcatgctggattttatatatatatataatgtatgtatgtatatatatatatatatatatatatatagtgttgatgaagaaagcctttaagtaaattaatgaaagatgattaaattaaaaataggctccggggggggaaatggtgcaagagacaaagccatcaaatcaatattgtgtctttctttatatcaggttaacaagctgtataatcaacaaatatacagagtagyatgggtagatcagtatccacggatagyataggtggaaagactataatcagaaatagaygaaaaatactcactcatgttgtaggcttayaggaaaaactccaagaggagcaatctccagaaagagatccttcttcagtggtggtcagcccttaaatggggtttaggagaggtgcagccagggtccaccccttccagtcacacattcacataggtgaattgccttcacctgtgctcccagggctgactcagtgctygcctcagctgatcaatcagagattcaggccrtgattcagcagttcccatacrcaagctcatcctgggaaaac

SEQ ID NO: 25320 - DNA, 600 bp, Chicken  19866894240509_3
cttgtgacagtctgcatgctggattttatatatatatataatgtatgtatgtatatatatatatatatatatatatatagtgttgatgaagaaagcctttaagtaaattaatgaaagatgattaaattaaaaataggctccggggggggaaatggtgcaagagacaaagccatcaaatcaatattgtgtctttctttatatcaggttaacaagctgtataatcaacaaatatacagagtagyatgggtagatcagtatccacggatagyataggtggaaagactataatcagaaatagaygaaaaatactcactcatgttgtaggcttayaggaaaaactccaagaggagcaatctccagaaagagatccttcttcagtggtggtcagcccttaaatggggtttaggagaggtgcagccagggtccaccccttccagtcacacattcacataggtgaattgccttcacctgtgctcccagggctgactcagtgctygcctcagctgatcaatcagagattcaggccrtgattcagcagttcccatacrcaagctcatcctgggaaaactgtctcttggttcccactgaagtccctgacca

SEQ ID NO: 25321 - DNA, 600 bp, Chicken  19866894240509_4
tatatatataatgtatgtatgtatatatatatatatatatatatatatagtgttgatgaagaaagcctttaagtaaattaatgaaagatgattaaattaaaaataggctccggggggggaaatggtgcaagagacaaagccatcaaatcaatattgtgtctttctttatatcaggttaacaagctgtataatcaacaaatatacagagtagyatgggtagatcagtatccacggatagyataggtggaaagactataatcagaaatagaygaaaaatactcactcatgttgtaggcttayaggaaaaactccaagaggagcaatctccagaaagagatccttcttcagtggtggtcagcccttaaatggggtttaggagaggtgcagccagggtccaccccttccagtcacacattcacataggtgaattgccttcacctgtgctcccagggctgactcagtgctygcctcagctgatcaatcagagattcaggccrtgattcagcagttcccatacrcaagctcatcctgggaaaactgtctcttggttcccactgaagtccctgaccatcgtctcttgagggtttattatcttaactc

SEQ ID NO: 25322 - DNA, 600 bp, Chicken  19866894240509_5
tatatcaggttaacaagctgtataatcaacaaatatacagagtagyatgggtagatcagtatccacggatagyataggtggaaagactataatcagaaatagaygaaaaatactcactcatgttgtaggcttayaggaaaaactccaagaggagcaatctccagaaagagatccttcttcagtggtggtcagcccttaaatggggtttaggagaggtgcagccagggtccaccccttccagtcacacattcacataggtgaattgccttcacctgtgctcccagggctgactcagtgctygcctcagctgatcaatcagagattcaggccrtgattcagcagttcccatacrcaagctcatcctgggaaaactgtctcttggttcccactgaagtccctgaccatcgtctcttgagggtttattatcttaactcygcccaggagtctgcaccaaaacgttttacattttcattagacttttatcgggggtgatttcataacatgccattcctcagagtttgtgtgagagatgatttattctactcagcatgctgcttaccataatccgtgaaagtaacttgtagagctccactagggtga

SEQ ID NO: 25323 - DNA, 600 bp, Chicken  19866894240509_6
aatatacagagtagyatgggtagatcagtatccacggatagyataggtggaaagactataatcagaaatagaygaaaaatactcactcatgttgtaggcttayaggaaaaactccaagaggagcaatctccagaaagagatccttcttcagtggtggtcagcccttaaatggggtttaggagaggtgcagccagggtccaccccttccagtcacacattcacataggtgaattgccttcacctgtgctcccagggctgactcagtgctygcctcagctgatcaatcagagattcaggccrtgattcagcagttcccatacrcaagctcatcctgggaaaactgtctcttggttcccactgaagtccctgaccatcgtctcttgagggtttattatcttaactcygcccaggagtctgcaccaaaacgttttacattttcattagacttttatcgggggtgatttcataacatgccattcctcagagtttgtgtgagagatgatttattctactcagcatgctgcttaccataatccgtgaaagtaacttgtagagctccactagggtgattaattgccacgttattgtctgctgttgtac

SEQ ID NO: 25324 - DNA, 600 bp, Chicken  19866894240509_7
agatcagtatccacggatagyataggtggaaagactataatcagaaatagaygaaaaatactcactcatgttgtaggcttayaggaaaaactccaagaggagcaatctccagaaagagatccttcttcagtggtggtcagcccttaaatggggtttaggagaggtgcagccagggtccaccccttccagtcacacattcacataggtgaattgccttcacctgtgctcccagggctgactcagtgctygcctcagctgatcaatcagagattcaggccrtgattcagcagttcccatacrcaagctcatcctgggaaaactgtctcttggttcccactgaagtccctgaccatcgtctcttgagggtttattatcttaactcygcccaggagtctgcaccaaaacgttttacattttcattagacttttatcgggggtgatttcataacatgccattcctcagagtttgtgtgagagatgatttattctactcagcatgctgcttaccataatccgtgaaagtaacttgtagagctccactagggtgattaattgccacgttattgtctgctgttgtacacaacacagtatttgctgcag

SEQ ID NO: 25325 - DNA, 600 bp, Chicken  19866894240509_8
ggaaaaactccaagaggagcaatctccagaaagagatccttcttcagtggtggtcagcccttaaatggggtttaggagaggtgcagccagggtccaccccttccagtcacacattcacataggtgaattgccttcacctgtgctcccagggctgactcagtgctygcctcagctgatcaatcagagattcaggccrtgattcagcagttcccatacrcaagctcatcctgggaaaactgtctcttggttcccactgaagtccctgaccatcgtctcttgagggtttattatcttaactcygcccaggagtctgcaccaaaacgttttacattttcattagacttttatcgggggtgatttcataacatgccattcctcagagtttgtgtgagagatgatttattctactcagcatgctgcttaccataatccgtgaaagtaacttgtagagctccactagggtgattaattgccacgttattgtctgctgttgtacacaacacagtatttgctgcagttaggtagcagtgggctcagtccttcttctgccgatgtccctgggtgtctgagtactcagaggtgaccaaggtgacctgcagc

SEQ ID NO: 25326 - DNA, 600 bp, Chicken  19866894240509_9
catgctgcttaccataatccgtgaaagtaacttgtagagctccactagggtgattaattgccacgttattgtctgctgttgtacacaacacagtatttgctgcagttaggtagcagtgggctcagtccttcttctgccgatgtccctgggtgtctgagtactcagaggtgaccaaggtgacctgcagcacccactggaggtgctggcatgcacggagcagctttgtggcagtgtcctgctggctgtgaggacatttctctagaggcaaagctgtgcatggggcttggtgccacgcactasgtggttagtgatggtaaaatactggcgggtccaacaaaggctggcctgttgatagcgacatgacagatacagtggcccctcccaggttattttgatgccattgagtttttttctctaaagaagtatactaatatgctctgagtaattttcagatgttacccaatatgcactctctgccaaagacttttcatctattttatatgatatttactaattactaaagctatttgggcccattcctgcagcctttacactgctaaagatctcgggccatatgggctggatcctcagctgttgcag

SEQ ID NO: 25327 - DNA, 600 bp, Chicken  19866894240516_1
tttaaattttggaggattttttgagtaatgactttgtagcgtcattctgagcctgtggtgtctaacactgtccaccacttcaaaagggttttgaggtacagcatctcatcagtgagggatggcttttgtctagagcagtatatacccaaagagaaagctaaaagcagaaggcaatttctgatgatggttatacaatagataatgtgtttagccttaattgtgtttactgtaaatggagcccttgagggaaagctaatatgagcagtttctcagtcaagagtggagccacaaaatagatayggtttttaaaaaaattcacgctctgctcgtgaggttttcagtcttctmgaaggcaggaacgtggtgtgcagtagtggcagggtgagtgttctgctgctatggggatgttgactacagaaggcctgataatagggcacagcatcagyagaaatggaaacatccccacctagcagctttatagtttttgtgatggggggtagtgcattttcacagttggcaatatcttatttttctaagttaccttaagacataatccttaatataccaaggacctgcaggccagagacagaaaaccactgg

SEQ ID NO: 25328 - DNA, 600 bp, Chicken  19866894240516_2
gagcctgtggtgtctaacactgtccaccacttcaaaagggttttgaggtacagcatctcatcagtgagggatggcttttgtctagagcagtatatacccaaagagaaagctaaaagcagaaggcaatttctgatgatggttatacaatagataatgtgtttagccttaattgtgtttactgtaaatggagcccttgagggaaagctaatatgagcagtttctcagtcaagagtggagccacaaaatagatayggtttttaaaaaaattcacgctctgctcgtgaggttttcagtcttctmgaaggcaggaacgtggtgtgcagtagtggcagggtgagtgttctgctgctatggggatgttgactacagaaggcctgataatagggcacagcatcagyagaaatggaaacatccccacctagcagctttatagtttttgtgatggggggtagtgcattttcacagttggcaatatcttatttttctaagttaccttaagacataatccttaatataccaaggacctgcaggccagagacagaaaaccactggtttagagataatgagcaacatagaagggtaggcctttgtgatayctgt

SEQ ID NO: 25329 - DNA, 600 bp, Chicken  19866894240516_3
caaagagaaagctaaaagcagaaggcaatttctgatgatggttatacaatagataatgtgtttagccttaattgtgtttactgtaaatggagcccttgagggaaagctaatatgagcagtttctcagtcaagagtggagccacaaaatagatayggtttttaaaaaaattcacgctctgctcgtgaggttttcagtcttctmgaaggcaggaacgtggtgtgcagtagtggcagggtgagtgttctgctgctatggggatgttgactacagaaggcctgataatagggcacagcatcagyagaaatggaaacatccccacctagcagctttatagtttttgtgatggggggtagtgcattttcacagttggcaatatcttatttttctaagttaccttaagacataatccttaatataccaaggacctgcaggccagagacagaaaaccactggtttagagataatgagcaacatagaagggtaggcctttgtgatayctgtgtctggatgatctcatgagaacatctgttcctttgcctattagaattactttctttgattattatttttatatgttttgacctcatttctgtggagag

SEQ ID NO: 25330 - DNA, 600 bp, Chicken  19866894240516_4
tctmgaaggcaggaacgtggtgtgcagtagtggcagggtgagtgttctgctgctatggggatgttgactacagaaggcctgataatagggcacagcatcagyagaaatggaaacatccccacctagcagctttatagtttttgtgatggggggtagtgcattttcacagttggcaatatcttatttttctaagttaccttaagacataatccttaatataccaaggacctgcaggccagagacagaaaaccactggtttagagataatgagcaacatagaagggtaggcctttgtgatayctgtgtctggatgatctcatgagaacatctgttcctttgcctattagaattactttctttgattattatttttatatgttttgacctcatttctgtggagagctctttgcttgcwctgacaaggagtggtagagcactgaagccgaacttgttcacatacatgaagacttatgctgtgttcctgcttgactaaggaatgcagtgattttaattgcttcattgatggytgtggttgtgtctcagattattgctagaccaaggcttctaaagcaagtcccagcaaaactcttgggctttcag

SEQ ID NO: 25331 - DNA, 600 bp, Chicken  19866894240516_5
tccccacctagcagctttatagtttttgtgatggggggtagtgcattttcacagttggcaatatcttatttttctaagttaccttaagacataatccttaatataccaaggacctgcaggccagagacagaaaaccactggtttagagataatgagcaacatagaagggtaggcctttgtgatayctgtgtctggatgatctcatgagaacatctgttcctttgcctattagaattactttctttgattattatttttatatgttttgacctcatttctgtggagagctctttgcttgcwctgacaaggagtggtagagcactgaagccgaacttgttcacatacatgaagacttatgctgtgttcctgcttgactaaggaatgcagtgattttaattgcttcattgatggytgtggttgtgtctcagattattgctagaccaaggcttctaaagcaagtcccagcaaaactcttgggctttcagcatcttccattacttttttttaatctttccacagcacagccataactctgatatggacttcagcagagatagaaggtaggattggcacacagtatgttgctaccatgccaatagg

SEQ ID NO: 25332 - DNA, 600 bp, Chicken  19866894240516_6
cctgcaggccagagacagaaaaccactggtttagagataatgagcaacatagaagggtaggcctttgtgatayctgtgtctggatgatctcatgagaacatctgttcctttgcctattagaattactttctttgattattatttttatatgttttgacctcatttctgtggagagctctttgcttgcwctgacaaggagtggtagagcactgaagccgaacttgttcacatacatgaagacttatgctgtgttcctgcttgactaaggaatgcagtgattttaattgcttcattgatggytgtggttgtgtctcagattattgctagaccaaggcttctaaagcaagtcccagcaaaactcttgggctttcagcatcttccattacttttttttaatctttccacagcacagccataactctgatatggacttcagcagagatagaaggtaggattggcacacagtatgttgctaccatgccaatagggctttgattccacattatgaaatctagaattcattctgtaattgatacgaattatccatggggaatcaaatctttggaggcatgcatgacagattggttcttgtagctccta

SEQ ID NO: 25333 - DNA, 600 bp, Chicken  19866894240521_1
agggcttcattcagggctggtgattagttccaccgtggagtgcactagacaagacaatgagtggatggcggacacagtgattcatagattactctgcccagagatgcaggtgttttaggagcaaatgaaatgaaaggaggctgagtcccttctcagcgcgccttcctggaagagggtttgtacaagagactcaaagttattaaaatcaatctcgtaaatgtaaaagttggaggttttaatcaaaattacactcatccttctgcctctcccagcagaagcagccagaatcttgcggcagcscagagccagcaccgacagtaattcccttccaggaaaggggatcctctggtgtaaacaggaagagtttcctgaaaaatttgtacataaaagataaaagagggattgaacctgagcactgaaaccattctcactccccaaaaaaggctggaagttgcaaaacgtgtgtgattttctaaagcagttgtacctggctgaaagcctcttttccctcctcagtacaaaggacaaatatcagagagtaaaagggttttagcgaggctggtggaaaggagggagtgttgcatccctcactaaagccac

SEQ ID NO: 25334 - DNA, 600 bp, Chicken  19866894240521_2
acaaaggacaaatatcagagagtaaaagggttttagcgaggctggtggaaaggagggagtgttgcatccctcactaaagccacatcaccaatgcacttctgaatttgatgcttaaagtgggtatgcaaatcccacatttcatgcatcacggggtgttttacgctttggcaagaaatgaaagtcacctaagaagcaattgccataatagggtgataagcacaatagaaagacatttacagggctaagcattatcgatgtgcctggtttggcagagtttctgtacagcaagacgagtagctygcatgtcaggagcatgtgttctgtgattacgatgtgcacatgcagcactgtgctctgctgttctgcaggtgctgcccraaataggaattaggaagtgttaaaaagtaatttatgtaaagtgtgtgttctgagtaatgcattgcatttctccaggattttggcttgtgcagactgcaaacttatagataaaatgtgtctattcatatytgttgaatctcaaaagatgtgctaaacaaggaggatgatgagcagtatcacacaattcaatgagcctgccttcattttccacttgtagaaaca

SEQ ID NO: 25335 - DNA, 600 bp, Chicken  19866894240521_3
gccacatcaccaatgcacttctgaatttgatgcttaaagtgggtatgcaaatcccacatttcatgcatcacggggtgttttacgctttggcaagaaatgaaagtcacctaagaagcaattgccataatagggtgataagcacaatagaaagacatttacagggctaagcattatcgatgtgcctggtttggcagagtttctgtacagcaagacgagtagctygcatgtcaggagcatgtgttctgtgattacgatgtgcacatgcagcactgtgctctgctgttctgcaggtgctgcccraaataggaattaggaagtgttaaaaagtaatttatgtaaagtgtgtgttctgagtaatgcattgcatttctccaggattttggcttgtgcagactgcaaacttatagataaaatgtgtctattcatatytgttgaatctcaaaagatgtgctaaacaaggaggatgatgagcagtatcacacaattcaatgagcctgccttcattttccacttgtagaaacatacaaaatagatttatttttacctttgatattagaggagttttagagttttctaaaatcagttctccagccctaaaat

SEQ ID NO: 25336 - DNA, 600 bp, Chicken  19866894240521_4
gggtgataagcacaatagaaagacatttacagggctaagcattatcgatgtgcctggtttggcagagtttctgtacagcaagacgagtagctygcatgtcaggagcatgtgttctgtgattacgatgtgcacatgcagcactgtgctctgctgttctgcaggtgctgcccraaataggaattaggaagtgttaaaaagtaatttatgtaaagtgtgtgttctgagtaatgcattgcatttctccaggattttggcttgtgcagactgcaaacttatagataaaatgtgtctattcatatytgttgaatctcaaaagatgtgctaaacaaggaggatgatgagcagtatcacacaattcaatgagcctgccttcattttccacttgtagaaacatacaaaatagatttatttttacctttgatattagaggagttttagagttttctaaaatcagttctccagccctaaaatgttctattcagcagcattcatgccaattgctatactttttgaagtggactttatcaaacaccctctacttttaagtaaaactgaatttcttctgctgttcttccttcctgtgtcccagcacagcatgga

SEQ ID NO: 25337 - DNA, 599 bp, Chicken  19866894240531_1
  misc_feature (1)..(186): n is any nucleotide
nnnnnnnnnnnnnnnnnnnnnnnnnnnnnnnnnnnnnnnnnnnnnnnnnnnnnnnnnnnnnnnnnnnnnnnnnnnnnnnnnnnnnnnnnnnnnnnnnnnnnnnnnnnnnnnnnnnnnnnnnnnnnnnnnnnnnnnnnnnnnnnnnnnnnnnnnnnnnnnnnnnnnnnnnnnnnnnnnnnnnnnnnncctgtagctccagtagacaggaccagaaggctttgttcttgctctggagaatgcagatgaggggctcaccctgctgaaatgctgaggcacccctgccacttttcctctgactcygtgtagtaatttgaaaagaaattgtatcttgtgttggacatcatggaacgtggtctcttaaaagtgtgcatgtttgcatctatctgcttgcacttaccttgaggcgctgctttcagagtgctgtatgaacattaactggtgcttccttggtatgcatgtgataaaggtctttctgactgtgggttggcatgtgagaagtcgggctgaaaaaattaatcatttattcccttagcacaaagaagggctgcaaaggctgggagtggacttccttcttcttgtaaacagtgtgcaagtgcaga

SEQ ID NO: 25338 - DNA, 600 bp, Chicken  19866894240531_2
ttggacatcatggaacgtggtctcttaaaagtgtgcatgtttgcatctatctgcttgcacttaccttgaggcgctgctttcagagtgctgtatgaacattaactggtgcttccttggtatgcatgtgataaaggtctttctgactgtgggttggcatgtgagaagtcgggctgaaaaaattaatcatttattcccttagcacaaagaagggctgcaaaggctgggagtggacttccttcttcttgtaaacagtgtgcaagtgcagaccagatttccacggtgctcagtcctccacaagcrtgtgcagcatgaragaattcytgtcttcagggatttgtggcccatgaacacaacttttatgggtatccagagtcaagtcataatggasatgggctcttccactggytttcttaacagaagctggcagctcagctcctgcagcctctcctttgggtgctgtgcatgtgcagcaaaaggggaaaaagggggtcatggggacttctggggagtagctgcaaagctgaccagtttggtatcgggcctcataacagccatcttatgtgcttaggaagagatcttaagatgaatggaatgaaaagg

SEQ ID NO: 25339 - DNA, 600 bp, Chicken  19866894240531_3
aacgtggtctcttaaaagtgtgcatgtttgcatctatctgcttgcacttaccttgaggcgctgctttcagagtgctgtatgaacattaactggtgcttccttggtatgcatgtgataaaggtctttctgactgtgggttggcatgtgagaagtcgggctgaaaaaattaatcatttattcccttagcacaaagaagggctgcaaaggctgggagtggacttccttcttcttgtaaacagtgtgcaagtgcagaccagatttccacggtgctcagtcctccacaagcrtgtgcagcatgaragaattcytgtcttcagggatttgtggcccatgaacacaacttttatgggtatccagagtcaagtcataatggasatgggctcttccactggytttcttaacagaagctggcagctcagctcctgcagcctctcctttgggtgctgtgcatgtgcagcaaaaggggaaaaagggggtcatggggacttctggggagtagctgcaaagctgaccagtttggtatcgggcctcataacagccatcttatgtgcttaggaagagatcttaagatgaatggaatgaaaaggcaatcagctctca

SEQ ID NO: 25340 - DNA, 600 bp, Chicken  19866894240531_4
ctcttaaaagtgtgcatgtttgcatctatctgcttgcacttaccttgaggcgctgctttcagagtgctgtatgaacattaactggtgcttccttggtatgcatgtgataaaggtctttctgactgtgggttggcatgtgagaagtcgggctgaaaaaattaatcatttattcccttagcacaaagaagggctgcaaaggctgggagtggacttccttcttcttgtaaacagtgtgcaagtgcagaccagatttccacggtgctcagtcctccacaagcrtgtgcagcatgaragaattcytgtcttcagggatttgtggcccatgaacacaacttttatgggtatccagagtcaagtcataatggasatgggctcttccactggytttcttaacagaagctggcagctcagctcctgcagcctctcctttgggtgctgtgcatgtgcagcaaaaggggaaaaagggggtcatggggacttctggggagtagctgcaaagctgaccagtttggtatcgggcctcataacagccatcttatgtgcttaggaagagatcttaagatgaatggaatgaaaaggcaatcagctctcactcagcyt

SEQ ID NO: 25341 - DNA, 600 bp, Chicken  19866894240531_5
tgtatgaacattaactggtgcttccttggtatgcatgtgataaaggtctttctgactgtgggttggcatgtgagaagtcgggctgaaaaaattaatcatttattcccttagcacaaagaagggctgcaaaggctgggagtggacttccttcttcttgtaaacagtgtgcaagtgcagaccagatttccacggtgctcagtcctccacaagcrtgtgcagcatgaragaattcytgtcttcagggatttgtggcccatgaacacaacttttatgggtatccagagtcaagtcataatggasatgggctcttccactggytttcttaacagaagctggcagctcagctcctgcagcctctcctttgggtgctgtgcatgtgcagcaaaaggggaaaaagggggtcatggggacttctggggagtagctgcaaagctgaccagtttggtatcgggcctcataacagccatcttatgtgcttaggaagagatcttaagatgaatggaatgaaaaggcaatcagctctcactcagcyttattccttgtctcgagctgtgatgctctgatttgtactggccctgcaaaaaaaaatcttagctaaac

SEQ ID NO: 25342 - DNA, 600 bp, Chicken  19866894240531_6
tgcttccttggtatgcatgtgataaaggtctttctgactgtgggttggcatgtgagaagtcgggctgaaaaaattaatcatttattcccttagcacaaagaagggctgcaaaggctgggagtggacttccttcttcttgtaaacagtgtgcaagtgcagaccagatttccacggtgctcagtcctccacaagcrtgtgcagcatgaragaattcytgtcttcagggatttgtggcccatgaacacaacttttatgggtatccagagtcaagtcataatggasatgggctcttccactggytttcttaacagaagctggcagctcagctcctgcagcctctcctttgggtgctgtgcatgtgcagcaaaaggggaaaaagggggtcatggggacttctggggagtagctgcaaagctgaccagtttggtatcgggcctcataacagccatcttatgtgcttaggaagagatcttaagatgaatggaatgaaaaggcaatcagctctcactcagcyttattccttgtctcgagctgtgatgctctgatttgtactggccctgcaaaaaaaaatcttagctaaactaattcagtgttattatc

SEQ ID NO: 25343 - DNA, 600 bp, Chicken  19866894240531_7
ytgtcttcagggatttgtggcccatgaacacaacttttatgggtatccagagtcaagtcataatggasatgggctcttccactggytttcttaacagaagctggcagctcagctcctgcagcctctcctttgggtgctgtgcatgtgcagcaaaaggggaaaaagggggtcatggggacttctggggagtagctgcaaagctgaccagtttggtatcgggcctcataacagccatcttatgtgcttaggaagagatcttaagatgaatggaatgaaaaggcaatcagctctcactcagcyttattccttgtctcgagctgtgatgctctgatttgtactggccctgcaaaaaaaaatcttagctaaactaattcagtgttattatcactttccacatcaatattttctcttcagcagcaccctgtagcaagaagtgtgtggggttaacagtttgaagctttctgccttacgtaattaagaggttcctggctcttggggagctaagggaaaagcattttcactacagcagcctgtgttcttcaagggtgatggtgatcactcagctttattcattgcaagggatgggaaggctgagtacat

SEQ ID NO: 25344 - DNA, 600 bp, Chicken  19866894240535_1
tcacgacaacttcttaaggacttgccacagccttagttcatatctacatgcatgtttctcccctcccattactccattcactttcgacattacatgtaagtactgtgaatgtatcaaaaaaacagggaatcattataatcaatcacagtctgaggtatcttatccatctatttgtaagacatcctaatgagaagagcactttttcattgaattcattgtgttaacaaataagacatcaaaagcagatccatgtctcttttctcctctgctttttttttaaaacagagttttcctttatgytaagagaataaagattcttccccgtgatgttgagatgctagctttcattatgcatggcaaaggagaggtcgatgatgtttatgatcattagcaagcaacacagacatttctggaacaagaaatcaaaaataagaggaagtagcattaaaatgttactggagctaatttttctaaatagagcatggctttcttttttcgtcttctgcatgtgaatagtgttcaaaacaaaataatttctctacgaaactggttcttttttggttttttttttggctttttttttttttagatcagagtcag

SEQ ID NO: 25345 - DNA, 599 bp, Chicken  19866894240548_1
  misc_feature (1)..(19): n is any nucleotide
nnnnnnnnnnnnnnnnnnncctttggcaggtcctcttggtggtgactgcaaatggaaagtgtgctgggggcagagcgggatgcgggattggtagctgtgttcaaatgaaaccttctaaaatgccccacagatactgatgcttactttgaaaaattataataggcttttcccaatagccccagcgggcaaaagatacttaatagaaatcgtgtgtctttgagcacttcctcaactaattcaggtaccccgagtgtgatttcactggagttgtgggaaacacagttcaggtctattaagggktttttttgttcttgtttgttttaaagaaactctcttgacctctctgtagcattatgcaagtgggataacaggcttccacacacactgtgcgccygcctgtaattccaggcgtgtcctaagctgtttgattttcttggtgtccagttctaacttctgcattgctactatggtatctttttgataaatgcatttgcaatctgccattaaatttcttttctcatgggctaaaaaataatcactgaaaatattaggaggacgtgagtgcttttgcaaataggattttaacttagttctcttct

SEQ ID NO: 25346 - DNA, 596 bp, Chicken  19866894240548_2
ctgtgttcaaatgaaaccttctaaaatgccccacagatactgatgcttactttgaaaaattataataggcttttcccaatagccccagcgggcaaaagatacttaatagaaatcgtgtgtctttgagcacttcctcaactaattcaggtaccccgagtgtgatttcactggagttgtgggaaacacagttcaggtctattaagggktttttttgttcttgtttgttttaaagaaactctcttgacctctctgtagcattatgcaagtgggataacaggcttccacacacactgtgcgccygcctgtaattccaggcgtgtcctaagctgtttgattttcttggtgtccagttctaacttctgcattgctactatggtatctttttgataaatgcatttgcaatctgccattaaatttcttttctcatgggctaaaaaataatcactgaaaatattaggaggacgtgagtgcttttgcaaataggattttaacttagttctcttctgaaactaactgccttgatgtgcctatgtttattggagggctcttaaatgtatatgcttatctgcatacatggacaagacctttttttaacg

SEQ ID NO: 25347 - DNA, 600 bp, Chicken  19866894240549_1
tgggaagacattcaaaaacagaatacatgagattatgcagttgtgccacagttccaaattcttgaagtcaaatgctgctctccaagtcctctaaatctatctgaaaatgtggactcttttactcagtgggaagctgtcaagtcagtgaggaagatttgaactaccacatgcagtactgcttcctgctgtggctgatgaaggagacacaaagtaactttagtgacattactgatctctttcttgtaaaaccgtatcctcttctgcacaaaaagagcatctctccagtaccttgccattgtygaatggtgtgtacaattaagcaatactggctgcaggtgagttttctggaagaagtgatcagacctacttcactgctgtcattgcatcagactgggtgaatataatggatgcaaactgatgctggcaaggacataaatagataaaatacagggactgtaagatatgtgcatctttatacttctgaagtatgtgacatgggtgagaaaagactattctttttgttaaattacttagccttatttatttatttattttgaggagagggagaaagggttcagcatgtaaatatatactcgttta

SEQ ID NO: 25348 - DNA, 600 bp, Chicken  19866894240552_1
actgagtactgggaaccagctcctcagattgaagaaggtagatacagcagcgttgcgtgcaggattgtcccagattgacagtcagtggacagagctgctcacacaaatcccagcagtacaagagaaattgcaccaggtaagaaagaacaatggaggcctctaatattccagaaaattcaaaccatacagttgtctccttctctgaaagttggttgctttctgattgtctttatccatttgagaaaagataggaacaacattatgttcactttagagtggaaaagccaacactcatgtctwtatcctgtctacccatactgcctagcactaactaatgctactttcaaactttcccagttgcatttgttaaattttaagtgacaagcaggtaggcttttttaaaaaaacattgatgtactgtttggaaaaatgtactgcctcctgtcagcttgttttcttcagatgtttttgttcaaaatctgaagactgggtccaagactgtggaagacaaagtcaaaatggaatctttaggcttgtatcatgaagaatggaaataagaagcctttaatataatgttttcttataaagatgtgtgaagct

SEQ ID NO: 25349 - DNA, 600 bp, Chicken  19866894240555_1
actcacagcctttgcatgtggtttgggggctattcaatgagccagttcactttgcaaaacgttcattagaatgtgttccagactgtttctccatgtcaatctagaaattaagccagctacagttgaaattatctttcagtaactccatatctgatgggctgatttgaaaagcttatcagtcagtgatgcagtgctgctttgcttatgatcaacattcagtctttataaaggcaatttgcttgcgaacgtgagccatcgttggcagatgggtcagtctggggagatttgaagattttgcaygtaagaacataaacgaccatcagtgattctgttccagcttgtaaactgcatcgttcattcgtgaagcttgagaagacggttcagctggcgggtgttgattccaagtgctactctacagagcctgtgctgcgctgtgcaaagggatgctctgctaccaagacaactccagtaactgttggcttccactgcctcccagctggtaagtccacagaaatcctcctgaaaaggagctgcacaaaggcccaagtaggttgtgctttaactccattattacacttgaaacacggcaatggtctaaca

SEQ ID NO: 25350 - DNA, 600 bp, Chicken  19866894240564_1
aactaaaacaacactgactgcagtttgatgccaggcagcaaagtgaacaagaccatggcgggtattctgggtctaattttaagctctgaatacctgactccaggcaagctttctattctcttctttgttaaatcagccactgatgaagtagttgtttgactggagatgtcttcggctgatttctaaagccctttcctccagctgtccatctgcttgcagtgcatgcacagctgggatgctcatgagatggctcctaaagcaggacaacatctttgagcaaacccatctcacggccacacwctcttctcctttcatagaatggtctgggttggaagggacctcaaggatcactaagctccracccccctgctgcaggcagggctgccaagctccatatctaatactagaccaggctgcccagggycccatccagcctggccttgaacacctccagggaaggggcatccacagcctctctgggcagcacctcaccgctctcacagcaaagaacttccccctgacatccayytaaatcttccctcctccaacttaaaaccccttccaaagctggtgactccttcaccccatgctcgctccatc

SEQ ID NO: 25351 - DNA, 600 bp, Chicken  19866894240564_2
ggtattctgggtctaattttaagctctgaatacctgactccaggcaagctttctattctcttctttgttaaatcagccactgatgaagtagttgtttgactggagatgtcttcggctgatttctaaagccctttcctccagctgtccatctgcttgcagtgcatgcacagctgggatgctcatgagatggctcctaaagcaggacaacatctttgagcaaacccatctcacggccacacwctcttctcctttcatagaatggtctgggttggaagggacctcaaggatcactaagctccracccccctgctgcaggcagggctgccaagctccatatctaatactagaccaggctgcccagggycccatccagcctggccttgaacacctccagggaaggggcatccacagcctctctgggcagcacctcaccgctctcacagcaaagaacttccccctgacatccayytaaatcttccctcctccaacttaaaaccccttccaaagctggtgactccttcaccccatgctcgctccatcccccagcctctcctcctttgaagaggaagaagaaataaagcagagagcgatttgaagaga

SEQ ID NO: 25352 - DNA, 600 bp, Chicken  19866894240564_3
ttgttaaatcagccactgatgaagtagttgtttgactggagatgtcttcggctgatttctaaagccctttcctccagctgtccatctgcttgcagtgcatgcacagctgggatgctcatgagatggctcctaaagcaggacaacatctttgagcaaacccatctcacggccacacwctcttctcctttcatagaatggtctgggttggaagggacctcaaggatcactaagctccracccccctgctgcaggcagggctgccaagctccatatctaatactagaccaggctgcccagggycccatccagcctggccttgaacacctccagggaaggggcatccacagcctctctgggcagcacctcaccgctctcacagcaaagaacttccccctgacatccayytaaatcttccctcctccaacttaaaaccccttccaaagctggtgactccttcaccccatgctcgctccatcccccagcctctcctcctttgaagaggaagaagaaataaagcagagagcgatttgaagagaagctccaaaaactaacagcctccaccatctgtgccaatgctttttcaggaagtcgtaactttat

SEQ ID NO: 25353 - DNA, 600 bp, Chicken  19866894240564_4
agctgggatgctcatgagatggctcctaaagcaggacaacatctttgagcaaacccatctcacggccacacwctcttctcctttcatagaatggtctgggttggaagggacctcaaggatcactaagctccracccccctgctgcaggcagggctgccaagctccatatctaatactagaccaggctgcccagggycccatccagcctggccttgaacacctccagggaaggggcatccacagcctctctgggcagcacctcaccgctctcacagcaaagaacttccccctgacatccayytaaatcttccctcctccaacttaaaaccccttccaaagctggtgactccttcaccccatgctcgctccatcccccagcctctcctcctttgaagaggaagaagaaataaagcagagagcgatttgaagagaagctccaaaaactaacagcctccaccatctgtgccaatgctttttcaggaagtcgtaactttatacagagaaaattccaaagatttagaaacctggaagtagtacagaagacagtttgctgctcagactcccatccaagctgcggggactgcaggcctgcagagctgg

SEQ ID NO: 25354 - DNA, 600 bp, Chicken  19866894240564_5
gctgggatgctcatgagatggctcctaaagcaggacaacatctttgagcaaacccatctcacggccacacwctcttctcctttcatagaatggtctgggttggaagggacctcaaggatcactaagctccracccccctgctgcaggcagggctgccaagctccatatctaatactagaccaggctgcccagggycccatccagcctggccttgaacacctccagggaaggggcatccacagcctctctgggcagcacctcaccgctctcacagcaaagaacttccccctgacatccayytaaatcttccctcctccaacttaaaaccccttccaaagctggtgactccttcaccccatgctcgctccatcccccagcctctcctcctttgaagaggaagaagaaataaagcagagagcgatttgaagagaagctccaaaaactaacagcctccaccatctgtgccaatgctttttcaggaagtcgtaactttatacagagaaaattccaaagatttagaaacctggaagtagtacagaagacagtttgctgctcagactcccatccaagctgcggggactgcaggcctgcagagctgga

SEQ ID NO: 25355 - DNA, 600 bp, Chicken  19866894240566_1
tgatagacccacacaatactgagataaaggtcaaatacgaagtgtaaaaattttgtattttttgtatgttattcataaatactcactagtatgagacaaaagaagttaccaatatatattttgtattgcagctataggttgaggatactgttatctaaaatgatttaaaaaacaaatgggcattttcaaattcttgttgtaatttctatcttctttttctgtgctaagcaccccaatctcggtagcctggacagaaaacactgtgctccagttctgctgatagaagtgctgcacagagcrctttaagcaaagcctacgcttaagccatttgattttgtgaaaactactgttcatctgcacatcaggagggccaatatatccatatttgttatgtctccattagcattttaattaggagttccattttgaagcaaatctccaggttgtccttttgccttacgttgattcatcttggaaatccgcacacactttrggtgttcccagcgcactccaactgctagtggccattgagtctgtgtgaccagattagagctattctgaggttaaaaaaaaatcctttgaaatgcttgtactgtagaa

SEQ ID NO: 25356 - DNA, 600 bp, Chicken  19866894240566_2
ttgttgtaatttctatcttctttttctgtgctaagcaccccaatctcggtagcctggacagaaaacactgtgctccagttctgctgatagaagtgctgcacagagcrctttaagcaaagcctacgcttaagccatttgattttgtgaaaactactgttcatctgcacatcaggagggccaatatatccatatttgttatgtctccattagcattttaattaggagttccattttgaagcaaatctccaggttgtccttttgccttacgttgattcatcttggaaatccgcacacactttrggtgttcccagcgcactccaactgctagtggccattgagtctgtgtgaccagattagagctattctgaggttaaaaaaaaatcctttgaaatgcttgtactgtagaaattaggatctctgcctaaactgttctgctctacaagtctgttcctgtgcacctgcactagctcctaatgtaaccactctcctttgtttcataggccagacaaagcgaaagcatttctaattgcatgaagtcctctgaaattttaagttgtgcttgtacatccgttacgccattctgatctctcaggtccagtt

SEQ ID NO: 25357 - DNA, 600 bp, Chicken  19866894240567_1
ggaaaaactgaaggattatcctaaaaatagatccaaattgggtttcaaaacagtacttgatgaagcttgggtaaaagtccttggggctaagccattacactattttctcctggcagctttcagctgcttttttaggggagtgcacttccagggttcatttacagcaaacaagctgtaatcccatgtaaatggcaagttttaatgagaagataagatagatctctttcatgaggaagagattactaataaggcttgtgcaatctgtccaagattttcagtactgtagatgagttaagtacwttttttttcttgcaaatatatgcttattttcagtctctttttcatgaaataagtaggctttgtccttcaaaagtatctgtcagaatattaagattctcataacagaggactgattttaggcagaaaactttatcaagtgtttatattttgggataaaagttaccttttcaagatattgaggatgctaattggcagatagcaaagtgcaaaaaccaggaggacaaccattagcatacgtgctgttttccttcttgcacgaatctgttttatttcagctgccacagcactgatctttgactt

SEQ ID NO: 25358 - DNA, 600 bp, Chicken  19866894240575_1
catcactgcagtgccagggtcggtgtttcaggctgggctgcagggcatgattctgtgcatggctttgtacttcttataggtgatagtgatggacagccaccttccaggtttggcaaagcccgagcacacaggctgctggggctggcacttggcagagggcaatggggcgggtgcccagccccggggagctgcagatggcctggcagcaatgccaggagcaggggccaggtccccgtcaaagctacgcattgaggctcttctgcaggctgatgctttgacctgggagggcagagggctccrgtgtggccatgccaggtacagggttgctrtggggctgggccgggttccctttgatgctggacttagatcctatctgcacctttaaaccaacaaagaagccatccagactgacttcaagcaggaacatcactcgcaacagggacaaacttctattagtaatcacgccatttaattacacaaagcttgtttaaaggcgagacatcaagaagacagggcagggcccacatctcctcttcaccaacaaatcagaaaaccaaatctgtgtattctcgaaattcagatcgactccactgactttat

SEQ ID NO: 25359 - DNA, 600 bp, Chicken  19866894240575_2
aggctgggctgcagggcatgattctgtgcatggctttgtacttcttataggtgatagtgatggacagccaccttccaggtttggcaaagcccgagcacacaggctgctggggctggcacttggcagagggcaatggggcgggtgcccagccccggggagctgcagatggcctggcagcaatgccaggagcaggggccaggtccccgtcaaagctacgcattgaggctcttctgcaggctgatgctttgacctgggagggcagagggctccrgtgtggccatgccaggtacagggttgctrtggggctgggccgggttccctttgatgctggacttagatcctatctgcacctttaaaccaacaaagaagccatccagactgacttcaagcaggaacatcactcgcaacagggacaaacttctattagtaatcacgccatttaattacacaaagcttgtttaaaggcgagacatcaagaagacagggcagggcccacatctcctcttcaccaacaaatcagaaaaccaaatctgtgtattctcgaaattcagatcgactccactgactttatttttcccctttccgttttattagtgctgc

SEQ ID NO: 25360 - DNA, 600 bp, Chicken  19866894240587_1
atgtcactacttgcactgcgagctttcatgaaacagtatgtttgtttcctatgttaaaaaaactttttaactataaattgataacaaaattacttctaaattcaaaatatttgtcttctgtttttcaaagtcagctgttcaagatgtacattttaaagattttgtactaaatatcattccatattttagaatttttttttttaatattcatggtatatttgtgatgtgatatttttcagtactctgatggctcttttaaaaaactgattcatgttttcctgcagaaattgtcaatagaartggaatatggattttatacggcacatcgctatctatagataatatcaggctgtccctttccagaagaagacaggaagagaatgcagtgaacagaaaaggcaatgctgtggtttcccaaatcactttatttagtccacatggcataataataatggaaaaaagaaagtactacaacacatcattcaaaagaaaaaaaatcttgttccttctaccagggagcagaaaggaaatataatcgctgaaatctaaaatttcttaggaacagctgggaggaaggaggacaacttttaacttctgcca

SEQ ID NO: 25361 - DNA, 600 bp, Chicken  19866894240592_1
tttccttctttttcagagaaatgagtaaagctaccgtgctgtggtaatacactgttcactctatttgttggatctttgcacatacctattctgttgatcgcagtctgtttcagatgtaagctcttagggaaaggaaataattaacatttcattttgccaaaatgactagcacagtgatacactgctacttatcttagacacatcctattcctttttatttgcttggaatataaaagtatacagaaatttgtctacttcagtagctttttaagaagcagacataatggtgacaaacataaygatgatgaagttgacaacaataataataactgtaacaagatcagactttaaatggtgatttttcacatgcaactcaaatgaatcttcttgctaaattttagtaatgccaattttactgcatctcaaagaaaacttataatcctctaaacatatcttgaacgtctagcactgagttttcttctcctttttatttatagttgcatcactcctgtgctgaattcaattttcctcataatgatacacctgcctattccatctaattgttagcttccatctgaaaaaaatacttttctttcccca

SEQ ID NO: 25362 - DNA, 599 bp, Chicken  19866894240596_1
  misc_feature (1)..(77): n is any nucleotide
nnnnnnnnnnnnnnnnnnnnnnnnnnnnnnnnnnnnnnnnnnnnnnnnnnnnnnnnnnnnnnnnnnnnnnnnnnnnntgggttttgttgcaggtctggagagcatcaggaaacccccccccagctgtaataccgatgcctgtgggaagtccaaggggtcagtgctggctgtggaccaggtgcaggtggagcacaggttctgtggctttgaaagccacttggattcaagggttagatccaagacagcatgcagctatccagccatggagagtggagcaaggtccaatccgtaccataacartgtcttaaaggraagaaaaatracatccacagaagagaagatttcctttccgttgggacggaaggggaatagttttccttgccattgtcccatgcatccaggaatggactgagttgtctgtgcctcttcttctcctgcgctgtgtcctgtctctctgygctgacatgcagagaggtggcacagcaattgcacccatcgggtatttatattgaagtgagggagagagatggcatctgtcagccaagagctgcttatccctgctcggctgtgtgacccaggctttcctgctcgtgcatggc

SEQ ID NO: 25363 - DNA, 599 bp, Chicken  19866894240596_2
  misc_feature (1)..(65): n is any nucleotide
nnnnnnnnnnnnnnnnnnnnnnnnnnnnnnnnnnnnnnnnnnnnnnnnnnnnnnnnnnnnnnnnntgggttttgttgcaggtctggagagcatcaggaaacccccccccagctgtaataccgatgcctgtgggaagtccaaggggtcagtgctggctgtggaccaggtgcaggtggagcacaggttctgtggctttgaaagccacttggattcaagggttagatccaagacagcatgcagctatccagccatggagagtggagcaaggtccaatccgtaccataacartgtcttaaaggraagaaaaatracatccacagaagagaagatttcctttccgttgggacggaaggggaatagttttccttgccattgtcccatgcatccaggaatggactgagttgtctgtgcctcttcttctcctgcgctgtgtcctgtctctctgygctgacatgcagagaggtggcacagcaattgcacccatcgggtatttatattgaagtgagggagagagatggcatctgtcagccaagagctgcttatccctgctcggctgtgtgacccaggctttcctgctcgtgcatggcagaaggggtttc

SEQ ID NO: 25364 - DNA, 599 bp, Chicken  19866894240596_3
  misc_feature (1)..(55): n is any nucleotide
nnnnnnnnnnnnnnnnnnnnnnnnnnnnnnnnnnnnnnnnnnnnnnnnnnnnnnntgggttttgttgcaggtctggagagcatcaggaaacccccccccagctgtaataccgatgcctgtgggaagtccaaggggtcagtgctggctgtggaccaggtgcaggtggagcacaggttctgtggctttgaaagccacttggattcaagggttagatccaagacagcatgcagctatccagccatggagagtggagcaaggtccaatccgtaccataacartgtcttaaaggraagaaaaatracatccacagaagagaagatttcctttccgttgggacggaaggggaatagttttccttgccattgtcccatgcatccaggaatggactgagttgtctgtgcctcttcttctcctgcgctgtgtcctgtctctctgygctgacatgcagagaggtggcacagcaattgcacccatcgggtatttatattgaagtgagggagagagatggcatctgtcagccaagagctgcttatccctgctcggctgtgtgacccaggctttcctgctcgtgcatggcagaaggggtttcctacaagccc

SEQ ID NO: 25365 - DNA, 600 bp, Chicken  19866894240596_4
cagtgctggctgtggaccaggtgcaggtggagcacaggttctgtggctttgaaagccacttggattcaagggttagatccaagacagcatgcagctatccagccatggagagtggagcaaggtccaatccgtaccataacartgtcttaaaggraagaaaaatracatccacagaagagaagatttcctttccgttgggacggaaggggaatagttttccttgccattgtcccatgcatccaggaatggactgagttgtctgtgcctcttcttctcctgcgctgtgtcctgtctctctgygctgacatgcagagaggtggcacagcaattgcacccatcgggtatttatattgaagtgagggagagagatggcatctgtcagccaagagctgcttatccctgctcggctgtgtgacccaggctttcctgctcgtgcatggcagaaggggtttcctacaagcccatctatgtggggcatgtgacagctctggctggaagtgcagatccgtggccacagtgcaggtttggttacttctatgccctcctccctcctggaggtgtgctggggctgcggggtcccagggaaggtctgaacttctt

SEQ ID NO: 25366 - DNA, 600 bp, Chicken  19866894240597_1
ttctaaaacaactcttgctttagatccctgagcctctctctgtcaaacttctgcgcttttcatctctccttgcagcagcacacgtagagcagagtagccaaaacaacctttgctcttcgcttgattccagcctgcttcaaactgccttcgcagcacagcagccccctgctgatgttgctgaccctccttgccagctcttcttcccgcacagcactgagcacttccccatcctcacccacaccttgctgcccacaggactttgccacatacacagggagcccctcgcccatgccacagacycgcagctccttctatgcatgggctgtgggctcccctgcagagcacagcagccacatcccagcaattcctggctcagaggcactgcctgccctgggcttcagtgctcatgactgtgacacgtgtttgtgcagatcttattttagctgcacacatcgccgcaggaaacttgttcgagctgacttacttattttttgagctgttaatttaatgggtttattaagtgactctgaatgaatgccattaaagcacatagtagttgggttgattgaatgattgattttacacagctgtcttcttcct

SEQ ID NO: 25367 - DNA, 600 bp, Chicken  19866894240598_1
aaaccagtctaagtcctgtaaataattttgcttctgaaaacagcccagtggtatatagctgagggtaataaacccacgtggatctaagccaagcctccaaaagacaccatgggtattactgctctgcttccctgaaaccaggggtgcagtgcaagtccctcaggaccatggaaagctggctcaagtctagctaggttcattagctttggacatgctgcaggacagctaacagtgctcagccccaagtctctgtgccctccatctgcactgcttcagaactctgactcagcggaatagatktgcagagccamgaaggacctggtgctgcatccagcttggtcacactgctcagtgctctggcagtgaatgagcagrgatcagtgctgagtgagcagctgaacaagaccttccacgcagcctggaygctctacacaggctgcaacattctatttgcgcagcacaccttcttcttttccacttttcgttaccatcatggacatgtatatatttttagatccacatagcacaattcatttcagaagactagcatcaccatgcctggaagaacaaggcagaaacagagccaatacagtatctact

SEQ ID NO: 25368 - DNA, 600 bp, Chicken  19866894240598_2
agtcctgtaaataattttgcttctgaaaacagcccagtggtatatagctgagggtaataaacccacgtggatctaagccaagcctccaaaagacaccatgggtattactgctctgcttccctgaaaccaggggtgcagtgcaagtccctcaggaccatggaaagctggctcaagtctagctaggttcattagctttggacatgctgcaggacagctaacagtgctcagccccaagtctctgtgccctccatctgcactgcttcagaactctgactcagcggaatagatktgcagagccamgaaggacctggtgctgcatccagcttggtcacactgctcagtgctctggcagtgaatgagcagrgatcagtgctgagtgagcagctgaacaagaccttccacgcagcctggaygctctacacaggctgcaacattctatttgcgcagcacaccttcttcttttccacttttcgttaccatcatggacatgtatatatttttagatccacatagcacaattcatttcagaagactagcatcaccatgcctggaagaacaaggcagaaacagagccaatacagtatctactatcatgataag

SEQ ID NO: 25369 - DNA, 600 bp, Chicken  19866894240598_3
acgtggatctaagccaagcctccaaaagacaccatgggtattactgctctgcttccctgaaaccaggggtgcagtgcaagtccctcaggaccatggaaagctggctcaagtctagctaggttcattagctttggacatgctgcaggacagctaacagtgctcagccccaagtctctgtgccctccatctgcactgcttcagaactctgactcagcggaatagatktgcagagccamgaaggacctggtgctgcatccagcttggtcacactgctcagtgctctggcagtgaatgagcagrgatcagtgctgagtgagcagctgaacaagaccttccacgcagcctggaygctctacacaggctgcaacattctatttgcgcagcacaccttcttcttttccacttttcgttaccatcatggacatgtatatatttttagatccacatagcacaattcatttcagaagactagcatcaccatgcctggaagaacaaggcagaaacagagccaatacagtatctactatcatgataagaagtatatacaggcagaatggtatttgcagattactgtctttcttttatggtgattgtgttgct

SEQ ID NO: 25370 - DNA, 600 bp, Chicken  19866894240598_4
tgcttccctgaaaccaggggtgcagtgcaagtccctcaggaccatggaaagctggctcaagtctagctaggttcattagctttggacatgctgcaggacagctaacagtgctcagccccaagtctctgtgccctccatctgcactgcttcagaactctgactcagcggaatagatktgcagagccamgaaggacctggtgctgcatccagcttggtcacactgctcagtgctctggcagtgaatgagcagrgatcagtgctgagtgagcagctgaacaagaccttccacgcagcctggaygctctacacaggctgcaacattctatttgcgcagcacaccttcttcttttccacttttcgttaccatcatggacatgtatatatttttagatccacatagcacaattcatttcagaagactagcatcaccatgcctggaagaacaaggcagaaacagagccaatacagtatctactatcatgataagaagtatatacaggcagaatggtatttgcagattactgtctttcttttatggtgattgtgttgctggaacaacctgcaaacaagaaagcatactagtttcgtgttgtaactagt

SEQ ID NO: 25371 - DNA, 600 bp, Chicken  19866894240601_1
attgaattagatatcctgccctttttgaaggaaggtatctgtcattatttggagacagaccccgatcaataaatccttgctgatacttacagctgtgccacgtagttttgattctttccatgtacagtgacctgaaaaccaactgctggatggagaatccattgacttggactgcatgggtgaatggaatagaccatcctttccaacagctacgcttcaaatgtttctctgatatgggaccagcatgtttgccattcctcctgccatggaggagctgcaagggatccaggtgtgacactracaggagctacactgatacctcagagaggggcaggtggaaaacaggtcatttctttacaacagcttataaaatccagtgggaaatgatcactcattygaagttttgtaggagaattaagcaaatataaatcagctgtggacatactgacatcagctaccrcattaggtcatacagcacagagggagattcctattccattcactgagattataagctaattcatcagaatcctactagtttcatctcattacagccatccaccccaaagcatgaaagatactgtggctattatctggatg

SEQ ID NO: 25372 - DNA, 600 bp, Chicken  19866894240601_2
ccacgtagttttgattctttccatgtacagtgacctgaaaaccaactgctggatggagaatccattgacttggactgcatgggtgaatggaatagaccatcctttccaacagctacgcttcaaatgtttctctgatatgggaccagcatgtttgccattcctcctgccatggaggagctgcaagggatccaggtgtgacactracaggagctacactgatacctcagagaggggcaggtggaaaacaggtcatttctttacaacagcttataaaatccagtgggaaatgatcactcattygaagttttgtaggagaattaagcaaatataaatcagctgtggacatactgacatcagctaccrcattaggtcatacagcacagagggagattcctattccattcactgagattataagctaattcatcagaatcctactagtttcatctcattacagccatccaccccaaagcatgaaagatactgtggctattatctggatgactagcactgccccagtttccagataaactggaatagaagtgaaggtggcttcccacaggggcaggtgctgggaacagcaaagcagtggcctagtta

SEQ ID NO: 25373 - DNA, 600 bp, Chicken  19866894240601_3
attgacttggactgcatgggtgaatggaatagaccatcctttccaacagctacgcttcaaatgtttctctgatatgggaccagcatgtttgccattcctcctgccatggaggagctgcaagggatccaggtgtgacactracaggagctacactgatacctcagagaggggcaggtggaaaacaggtcatttctttacaacagcttataaaatccagtgggaaatgatcactcattygaagttttgtaggagaattaagcaaatataaatcagctgtggacatactgacatcagctaccrcattaggtcatacagcacagagggagattcctattccattcactgagattataagctaattcatcagaatcctactagtttcatctcattacagccatccaccccaaagcatgaaagatactgtggctattatctggatgactagcactgccccagtttccagataaactggaatagaagtgaaggtggcttcccacaggggcaggtgctgggaacagcaaagcagtggcctagttactagctgctttatccccatgggagatttctccctcartacacatctgtgtgttttcaaaaggc

SEQ ID NO: 25374 - DNA, 600 bp, Chicken  19866894240601_4
tgtggacatactgacatcagctaccrcattaggtcatacagcacagagggagattcctattccattcactgagattataagctaattcatcagaatcctactagtttcatctcattacagccatccaccccaaagcatgaaagatactgtggctattatctggatgactagcactgccccagtttccagataaactggaatagaagtgaaggtggcttcccacaggggcaggtgctgggaacagcaaagcagtggcctagttactagctgctttatccccatgggagatttctccctcartacacatctgtgtgttttcaaaaggctgtgcgtttatacagagcccagtcataacagagcaaatttcaacatccactgtaccaccataaacaacactcggtttgaaacattttctccatctctcaagattattgcagcatctgttgatcacattaagttgtaagtgtgctgtctccatggagactgcagagtctccctgggtttccagttactgtatgtggtttcaactgaaagcagagtcactcaatgagtcaatctctattccatataatgaaaggaaaggaagtcactgggctgatt

SEQ ID NO: 25375 - DNA, 600 bp, Chicken  19866894240612_1
tttcccttgttcatttagctgccagctttccacccatgcccaacttccatttcccagagccaaacatcagtaaaaattcattgtttcagaacagttcatcttacagtgtgctcacttctgctttccaagtccattctgttagtttagtccatacacacctgctttaaaaagacctattaaagagcaagcaactacgaaatgatgttttgcctccaaatagacgtgtattttgctcacaagtaaagctcctctttagcagatggaaattttgttcaaccagtgctgtgcctgaatcttaastacttgaggcttttaaagtgttgtagagacaaaagatgaagtaaaaccagtctgcggggcttttcccttctggattacacaagaactgaggcctcttctgtaataaatttactttgacagctgctaaaaaatttaccaagcttgacaacatgcacagaaagcaaaataggacagagaattcagtgggctttcctgctgaccccaggaaaatcactactttaagaaaatgtgtaattatatttctgcggtaaatgatagatttgttggccatattctactctcctacagatgctggtttat

SEQ ID NO: 25376 - DNA, 600 bp, Chicken  19866894240616_1
ataccttcctaactgctgctggcataacacagtgcagtcaaacattgctatcttcagatataactcatcttctgtaacgtacacactgcaccattccatattttataatgaagatcaaacccaaaagcaactagacagtttgtttcccatagctctcttccttctgatttgtaatgaagtggacctccttagaaatgtgaaatagtgatttatgaagacataaacaagttgggggtgttgtactaattaagctggttattttgtgttgccctagatgttctgccttattccatacgagtsttgtttgaatccagcatccgtaactgtgatggcttcttggtgaargaaacagatgctatgaacattttagactggaaaacaaaacagaacgatgtcgaagtgcccttctgtcctgccagagttgttcttcaagattttacgtaagtacagtgtttgcatatgtgagcgcctggaaaaatgtcaaatcatctgtgaaaactcagtgaatagcatgtgtacttcagctggggaataaacagcacctagctgttggataytgaagcttctctctttgtcagtagaaatgcatgcactgcttct

SEQ ID NO: 25377 - DNA, 600 bp, Chicken  19866894240616_2
tgctatcttcagatataactcatcttctgtaacgtacacactgcaccattccatattttataatgaagatcaaacccaaaagcaactagacagtttgtttcccatagctctcttccttctgatttgtaatgaagtggacctccttagaaatgtgaaatagtgatttatgaagacataaacaagttgggggtgttgtactaattaagctggttattttgtgttgccctagatgttctgccttattccatacgagtsttgtttgaatccagcatccgtaactgtgatggcttcttggtgaargaaacagatgctatgaacattttagactggaaaacaaaacagaacgatgtcgaagtgcccttctgtcctgccagagttgttcttcaagattttacgtaagtacagtgtttgcatatgtgagcgcctggaaaaatgtcaaatcatctgtgaaaactcagtgaatagcatgtgtacttcagctggggaataaacagcacctagctgttggataytgaagcttctctctttgtcagtagaaatgcatgcactgcttctgctattcarcagagacatcacgattacatgaggtacaagaagagg

SEQ ID NO: 25378 - DNA, 600 bp, Chicken  19866894240616_3
attttgtgttgccctagatgttctgccttattccatacgagtsttgtttgaatccagcatccgtaactgtgatggcttcttggtgaargaaacagatgctatgaacattttagactggaaaacaaaacagaacgatgtcgaagtgcccttctgtcctgccagagttgttcttcaagattttacgtaagtacagtgtttgcatatgtgagcgcctggaaaaatgtcaaatcatctgtgaaaactcagtgaatagcatgtgtacttcagctggggaataaacagcacctagctgttggataytgaagcttctctctttgtcagtagaaatgcatgcactgcttctgctattcarcagagacatcacgattacatgaggtacaagaagaggaattgttccttagtgtgccttggttttagtgagggttggtgaaggtgaagctgttggcctgcagtggatgtttggtggattagtgccaaaacacaaatggaaatggaggcatttagattgtagccagatggctgacagttcattgagacacagagtttgtgctgcagacaactggagattaaatgctgcgtgctccaccagtatgcgtaatc

SEQ ID NO: 25379 - DNA, 600 bp, Chicken  19866894240616_4
tccagcatccgtaactgtgatggcttcttggtgaargaaacagatgctatgaacattttagactggaaaacaaaacagaacgatgtcgaagtgcccttctgtcctgccagagttgttcttcaagattttacgtaagtacagtgtttgcatatgtgagcgcctggaaaaatgtcaaatcatctgtgaaaactcagtgaatagcatgtgtacttcagctggggaataaacagcacctagctgttggataytgaagcttctctctttgtcagtagaaatgcatgcactgcttctgctattcarcagagacatcacgattacatgaggtacaagaagaggaattgttccttagtgtgccttggttttagtgagggttggtgaaggtgaagctgttggcctgcagtggatgtttggtggattagtgccaaaacacaaatggaaatggaggcatttagattgtagccagatggctgacagttcattgagacacagagtttgtgctgcagacaactggagattaaatgctgcgtgctccaccagtatgcgtaatccagttgaaacaatgaataatgcatatattaaagtctctgaagataataactt

SEQ ID NO: 25380 - DNA, 600 bp, Chicken  19866894240616_5
gaggtacaagaagaggaattgttccttagtgtgccttggttttagtgagggttggtgaaggtgaagctgttggcctgcagtggatgtttggtggattagtgccaaaacacaaatggaaatggaggcatttagattgtagccagatggctgacagttcattgagacacagagtttgtgctgcagacaactggagattaaatgctgcgtgctccaccagtatgcgtaatccagttgaaacaatgaataatgcatatattaaagtctctgaagataataacttgatgtggtttgagtatagcrtagctgtagggactgtccttcagcaacttgtaaatgttaaatttaagatgtcttggagactaattaacgatgtatttatgaacaagggggttttagaaagaaagcgatggtaatgaagtaatgagttatcaggcaaaataaaaatgatttaagtaatgctgtgttctctcttcagttgtgtgctttragtatactgatcagtgtgatagtaacaagagtattggcttctgtactatgctgtgagcttcagaaatgaccgtctctgtaagaagagtggcaatatatactgaggtattgaag

SEQ ID NO: 25381 - DNA, 600 bp, Chicken  19866894240616_6
ctggagattaaatgctgcgtgctccaccagtatgcgtaatccagttgaaacaatgaataatgcatatattaaagtctctgaagataataacttgatgtggtttgagtatagcrtagctgtagggactgtccttcagcaacttgtaaatgttaaatttaagatgtcttggagactaattaacgatgtatttatgaacaagggggttttagaaagaaagcgatggtaatgaagtaatgagttatcaggcaaaataaaaatgatttaagtaatgctgtgttctctcttcagttgtgtgctttragtatactgatcagtgtgatagtaacaagagtattggcttctgtactatgctgtgagcttcagaaatgaccgtctctgtaagaagagtggcaatatatactgaggtattgaagtatagcttgagcagtgttcatataagtctttataaggtaataagcacctgaaagtgatttttaaagtgaagaacattatgcttcagaaacatagcaaggcaaaagagcaaatataatggttttcttgaaggtgttgctgtgtttttaggtctgttaccttaaaacacgctgttgcttgttgtgaatt

SEQ ID NO: 25382 - DNA, 600 bp, Chicken  19866894240619_1
agctcttcttaactttaattagtgtctgcactcataaacgttatgtgaggtaaaatgggaaggtcaaacttcatgcttcgaatctagcattattattgattttatttttcattgccattggatttgctaaaatctgaaccagcttgtcgtgatgcataatgcagtcttgtaggttttgctgcttttttaataaatgattttaacgtgcttggaaaatgtgctacaaaaatgaatattcacttcccttattaaatacttccagaaatgaagaagtgactttgagtagcggtggaaacaaayaatcttgttgaggagagatttttaaaaacaaattgattatatgaatgcagtgcagctagtatgtcttgggaatttatttttccttttccacatcagcaacaagagatcaagaacatttccaagtaccaattttcgtaggctagatgaagggagatagacatttctacacttgatttgaaactgtatgaaccagagtgcttcagaggtttacagctgaaaagataaatggattgtgtgagctgtccaatttcattacgtgccctaaccgaactctttctttaatgtttgatagaattatga

SEQ ID NO: 25383 - DNA, 600 bp, Chicken  19866894240621_1
gaggagagctgacgcaaagagaccgatgggacactgcatgcagaatgagggcatgatcagcaagagcaggtgggcataagggggagaagggagaagattcctccctttaagaaacaggaaacacagaccatgatgaggtgtctgacgtccccaaataaaagcggtagctcggcagacacaacagatgcaccatgggctgcatcccagtctctcaccgtgggtaactctgtcagctagaaaaataccacaggacaggtcctggggttgcaatgcaaaccagtgtccatctgtatccagctsacatcaaagtaggcgctgtgagaagagatctccaaaagatgttgggggaagcgcaatggaccatggcatgtcctcgtgtccctgccctcctgctgctggtggtgkttggtgagttggggatgctgtgtgaagtggggaaccatgcctggagcaggaatcccaccrgaaataggcttgggatggtgctgagggcagtggtgcagtaggtgaagggtgtaggcgtgctccaaaactacgtgagttacaaatgctgggtgctttagaaagatagggaacagtacttgaagcagcaaacgcacc

SEQ ID NO: 25384 - DNA, 600 bp, Chicken  19866894240621_2
tttaagaaacaggaaacacagaccatgatgaggtgtctgacgtccccaaataaaagcggtagctcggcagacacaacagatgcaccatgggctgcatcccagtctctcaccgtgggtaactctgtcagctagaaaaataccacaggacaggtcctggggttgcaatgcaaaccagtgtccatctgtatccagctsacatcaaagtaggcgctgtgagaagagatctccaaaagatgttgggggaagcgcaatggaccatggcatgtcctcgtgtccctgccctcctgctgctggtggtgkttggtgagttggggatgctgtgtgaagtggggaaccatgcctggagcaggaatcccaccrgaaataggcttgggatggtgctgagggcagtggtgcagtaggtgaagggtgtaggcgtgctccaaaactacgtgagttacaaatgctgggtgctttagaaagatagggaacagtacttgaagcagcaaacgcaccacaaatggacccgagctttctcagagacactgtatggggataggcagacgggatggtgcctagtcctccgtggggacatgggtgggaacatctgggtgagcagga

SEQ ID NO: 25385 - DNA, 600 bp, Chicken  19866894240621_3
agctcggcagacacaacagatgcaccatgggctgcatcccagtctctcaccgtgggtaactctgtcagctagaaaaataccacaggacaggtcctggggttgcaatgcaaaccagtgtccatctgtatccagctsacatcaaagtaggcgctgtgagaagagatctccaaaagatgttgggggaagcgcaatggaccatggcatgtcctcgtgtccctgccctcctgctgctggtggtgkttggtgagttggggatgctgtgtgaagtggggaaccatgcctggagcaggaatcccaccrgaaataggcttgggatggtgctgagggcagtggtgcagtaggtgaagggtgtaggcgtgctccaaaactacgtgagttacaaatgctgggtgctttagaaagatagggaacagtacttgaagcagcaaacgcaccacaaatggacccgagctttctcagagacactgtatggggataggcagacgggatggtgcctagtcctccgtggggacatgggtgggaacatctgggtgagcaggacactgtccctctaaacaaaactctctctgtcccgcggtgcaggtactggtgtgaacaccc

SEQ ID NO: 25386 - DNA, 600 bp, Chicken  19866894240627_1
gctggggaaaaaaaaatcatataaatgaatgttcaaatatgttgagatcatgtcgcattttagtttttaacagtctgaacactttcagcagttcctacccagtgttcccggttcagtaagctatattaaaacacgcttggaaagatttatacagtgatttgcttcttagctgactttggtgcaagaagtcactactgcatgttttggttagaaatcgtgaagtgttcttaggggtgatcaaagggaggaggtggccataccacccgtgcagtatgccatgggatgtataacccttgtgcrgaatggggcgggccaggacggctttgtacccccagggctctttggagacattttcacctttggcgttgatattttctgaacagtttatccattttggcatcgctgttttaatcttcttaacaagaagtatgcactgtacctgcacagggtttgaacttgagtgggacagccagcagtggcttaggccagactctcctaaactcacgggaacaccctaaaaacaatgcattttaaaagtgcacagcagtaataatataaaatacaaagtcattggctatcctctgagtattccatttattt

SEQ ID NO: 25387 - DNA, 600 bp, Chicken  19866894240627_2
gcacagggtttgaacttgagtgggacagccagcagtggcttaggccagactctcctaaactcacgggaacaccctaaaaacaatgcattttaaaagtgcacagcagtaataatataaaatacaaagtcattggctatcctctgagtattccatttatttctgttcatgtgtcatatgtacgtggcttagtggcaatgcatttatttgtaatgtgggccagtcctcaggtcaaaggcagctttgtgtttttattctggcctttggggtttttttggtttttacatagtatcttgcctgtastgtagtagttaggtcaggaactttaaaaatatattctgggctgacatataagatagcaccagtgtgrgctacaaggaatccttagcatgtgtatcttcccggctcctcaaataggggggtacagtgtttctgtgtccttccccttgtgcaaggcacrctcagctctccctgaggctgggcccgatggtgcagcagtgcagggggccccacaggtgtgtgtgcgaggaagcggggccatgggttgggtggctgctctggtggctcctgcacggctctgacttgctgatgaaaatggacgtt

SEQ ID NO: 25388 - DNA, 600 bp, Chicken  19866894240627_3
aacaccctaaaaacaatgcattttaaaagtgcacagcagtaataatataaaatacaaagtcattggctatcctctgagtattccatttatttctgttcatgtgtcatatgtacgtggcttagtggcaatgcatttatttgtaatgtgggccagtcctcaggtcaaaggcagctttgtgtttttattctggcctttggggtttttttggtttttacatagtatcttgcctgtastgtagtagttaggtcaggaactttaaaaatatattctgggctgacatataagatagcaccagtgtgrgctacaaggaatccttagcatgtgtatcttcccggctcctcaaataggggggtacagtgtttctgtgtccttccccttgtgcaaggcacrctcagctctccctgaggctgggcccgatggtgcagcagtgcagggggccccacaggtgtgtgtgcgaggaagcggggccatgggttgggtggctgctctggtggctcctgcacggctctgacttgctgatgaaaatggacgtttgaaataatcgttcatcttggactgcttttatgtacattaactgtgttttatgggcagcctactata

SEQ ID NO: 25389 - DNA, 600 bp, Chicken  19866894240627_4
ttctgttcatgtgtcatatgtacgtggcttagtggcaatgcatttatttgtaatgtgggccagtcctcaggtcaaaggcagctttgtgtttttattctggcctttggggtttttttggtttttacatagtatcttgcctgtastgtagtagttaggtcaggaactttaaaaatatattctgggctgacatataagatagcaccagtgtgrgctacaaggaatccttagcatgtgtatcttcccggctcctcaaataggggggtacagtgtttctgtgtccttccccttgtgcaaggcacrctcagctctccctgaggctgggcccgatggtgcagcagtgcagggggccccacaggtgtgtgtgcgaggaagcggggccatgggttgggtggctgctctggtggctcctgcacggctctgacttgctgatgaaaatggacgtttgaaataatcgttcatcttggactgcttttatgtacattaactgtgttttatgggcagcctactatacagagatggcagtagaaaatgatcaagctgacaatgacacaaatccaggtgacagctgaaatatccagaatgggaagagcatttcactgg

SEQ ID NO: 25390 - DNA, 600 bp, Chicken  19866894240628_1
ggtctggctgaaacagaaaaattgtatgttcacccctattcccactgcgtcaaatcatctttcaattagttctttttgactagttacttttaaaattgggagtagcgccccttttcctttccttggcactctaaagacccttttggtagtgaagatgtagctgcacaaaattaattgaagataacgcacgtagcagcttgatagctctttcacacgtttgaaagcccttaacagagactgactaattaagcaagtctaagtagtatgttgtaagtacccccatgttaaatcataactctkttgaggaagaggtaaatttgcacgtgattttttaattgatgtttaaggaattaatacttcaagtaactagcattaaaggactgtgtgctaattacggacagcacatcaggaccacagtaaaatcatggtttcccattataggcagcacctaatgacaccaaaattactaggcagcaaaggtttcatggtatccatgataactagactgataccatgttctgcactgccttgagagctggccaagatttggtctgcaagacccagtgttattttgttctggggagcagaggcagtgctacc

SEQ ID NO: 25391 - DNA, 600 bp, Chicken  19866894240629_1
gaggagctccccacactggtatctggttcttctcctccaaagaggccttcgtggctcttcccttgcttgcgaatctcagatggcaaaattggtcttctgcctttggaagccttctcaccctctggggattcttcttcgccaggctttgctccataagccagcgcctctttcttttcaccctctggtgcagtggctgctgctgatttcgttaaggggctgacactgtctggaaggaggcggctgccaacgaagatgttttctggttcttctgttgccatcagctgagccgtgtgtgcaacrccagcaggctgaatatacccatgtattggttggcggaccgcactgacgggctgattgagaaccctatcaaaggcagacgtttctgtctgaagaggcatgtagtgggctgacactggctgggattttctctgagatacactgtctgtgacaggttcagggcttccacgtgcactttcctctttcaccagtttctctctaacttttactctttaagaaagaaaaaggattaaagctgtgaacagcaatacccaacaaaggaaggaatacagacacctactgtgggtatagacagcagtattg

SEQ ID NO: 25392 - DNA, 599 bp, Chicken  19866894240633_1
  misc_feature (1)..(48): n is any nucleotide
nnnnnnnnnnnnnnnnnnnnnnnnnnnnnnnnnnnnnnnnnnnnnnnncagagcctttcgattgggtttttggttgtttgcatgaaggaaagcctgcaaagcgagatgataacccgtagaactataaatgccccgatacctcaccctgcttgaaatccagaattaagcaaacacttgatttttttctttttctccccctacaacttatttttaatgtgctttatacgttagaatacatcaaataccaagattcaggaagctcatttagtatacaaaaaacacttttgctttacagcaaaytttctttttctgcctgctccgacacgcataatgttataatactagttaccatgttgtattctgcctgtatataagttcagtttagtttcatcttctcctaatgcaaatgtttctaaatctctttttggagtaataaaacactttaactgtttaataaacaacctttagcactcgtccagttcattttgctagggactgcctgcttatttcagctaaagaaaaccaatttcctcctcctcataagcagagtcaaacaattgttttttccatttgtcttygtgtctcaaatccttctggtc

SEQ ID NO: 25393 - DNA, 600 bp, Chicken  19866894240633_2
acacttttgctttacagcaaaytttctttttctgcctgctccgacacgcataatgttataatactagttaccatgttgtattctgcctgtatataagttcagtttagtttcatcttctcctaatgcaaatgtttctaaatctctttttggagtaataaaacactttaactgtttaataaacaacctttagcactcgtccagttcattttgctagggactgcctgcttatttcagctaaagaaaaccaatttcctcctcctcataagcagagtcaaacaattgttttttccatttgtcttygtgtctcaaatccttctggtcagcgcttttgaagagtctataaaaatcctgctaattcagacacacctcctggaaaggctcaagaagacagcacactttagaaaggcaacatctccacctgaaaatgcagaaaactggatgttctagtctagcttgtctaccattaaatacctcctaggaattacactaaaattatctgtccttgctaacagcaatagaagtactgaaagaaaatgctttccctatgaagataaataccgctccagaacattaataacacaaatgctgtaacagctctga

SEQ ID NO: 25394 - DNA, 600 bp, Chicken  19866894240633_3
ttattctacaaaattcattggtagtataggttagataatttgtttctgagtaggtagatacggatgacgtttattacacgtcttaccaacaaacaaacttgatttaagctacacacttctcataaaagaacttcagctattctcttcctcaaggacttcattctggataaactgtttcagacatctttaaactcaaaactttacctacaagtttcactagaaactcaggaacttcttgggtgggaagattttttttttcctgaagcacagaaggtagctgcttttaagcagatgctctgstacttgctggacaaaattattctctcctctagagcccaatacctgttttcttattcaaacgttccttctcgcagtactgttaatctgtttaattggcacagagttactttgctggcagaaagctccaacaagaaaaaggggtctttttgaggtaagaaataccagccacagaaagaaacaaattagcaatgtaatagagcatgcacacaaatacatttaaagtgagtactgcaacagagttttcttcaggcaggcacatacctgtgcacaactgagcaacctcgtcccggttgtgaactt

SEQ ID NO: 25395 - DNA, 600 bp, Chicken  19866894240643_1
agcatacctcctgagcttctagctgtgagaggtggggaaactataggagagacttgcatgttccctgtaaaaataagcctccacctggggagcaaagcaacaatgtcacactccataaaacaaaaacaaatgtaggttaggtcttctggtgtgagccttctcatgggaaataagctgtgataatctgggagcttgcacttggcagaggtgagcaacaggagtgtgtgcagctgtgccaagctcagactgcacttggggcctggggcttgtttttccattctttgtgctcctggagatgtwaaaagaagagagatttgggcctggcatgggggtggcagaaagcattactatgctttgtatgtgagagccaggcagcactgtgctccttgttccagctcagtgggtgctgggttcagaagctgttgtcattttccctttaaaaaagaaaaaggggggcgtctgggctcctccttagtttttaggaaggaactgagaggaatgtggaggatgcgatattttcaagagaaaggaggtgagggaggaatgctctcacagtgttcccttttcacaggcatctcctgcctacagagtgaggaacga

SEQ ID NO: 25396 - DNA, 600 bp, Chicken  19866894240646_1
ctgttacctgttgctttaacacaaggaaccgttgaacctcaacatatgcagcctgcagggcagctctagcctgcaagagactgttgtccacgctatgcagggacttgctcaattcttcttccctcagtgaaatagccaacaattggtctacttgagaacgttctgaaaaagagtacacataatttagcatataatggtacttgacaacacattaaaatacgtgacaagtgatacctcaataaacattaccgcttccaaacatataaacacatgaattaggtaaagcattaatagttgtayaagagcctaaagaagagcatctatgcacaggaacagtcatatactgcatagaacaaagtcaacaatttctctttaaatgatctcaactttgactgcagtaacttttttttaaatcatagttttgccagcactgaacagaaagtcaccctccttcacaaatatcttctgttgaagtatatatacacagaaagtacaaatgcatacttttcattaatgcaataaaaaaggcaaagacaaatttaaactaaacatgatataaattattcagctaatccagaggtcaagaaaaggcaggttaag

SEQ ID NO: 25397 - DNA, 600 bp, Chicken  19866894240646_2
tttgccagcactgaacagaaagtcaccctccttcacaaatatcttctgttgaagtatatatacacagaaagtacaaatgcatacttttcattaatgcaataaaaaaggcaaagacaaatttaaactaaacatgatataaattattcagctaatccagaggtcaagaaaaggcaggttaagactaaacgaactctatgataaaatcatttacaattcaaaatagcatctgtgagacttctgtttgtaatctcctgacaacttgcaagcactgtttttcagtaaatatcctccttttaagasgtcctccggcattacagagatgctccaagtcaatcgatttcaatttgtgcactcctcagcttttttcaagttaatttctttcaatagatttactacaattatatggtgatagaacaaagtaataaaaacccttccatgcattaaatttgactagtcacctggaagccaggattccaaacaaggacagaaagagacctaaatgtatccagttgttctagctctaattttataggtcttacagatctgacaagagtccaccctatgaccttgagcaaaaactaagacacaccaatgtaacac

SEQ ID NO: 25398 - DNA, 600 bp, Chicken  19866894240650_1
tatatgaaaagctgagaaatatagctctataataagtgtataattcatcccctatgcaatcataaactaaaataagtttatggaattgacttttatctatccaatgtgcaaattttaactcaaaaaatgtcattctgaaaaagcaaaattcagaattaaggatagggtgatacttcataagtatttggtgtttctcaagtttcaagaaaggggagtaaatttgtttacccttctctctgtcttaccaattcatggaaagctgatttatgcattacatatgttctgagccctccaaacacratctaaagtatgcttttatctctttttttttctataaattcattacywttataataagaaaaacatatragggcatctgaaaattagagaagaatcttttccaaaataaaacgaagacactcaaacattttgttcaagttagtgctgaacttggtgacatctctataaaccaaatattttgttactaaaatatttgcactttttctaaagacatgttgatttttctttcctgaattcatcaaggctctaaaaactgttttaaagtctccccaggactggaatataataaatttatataca

SEQ ID NO: 25399 - DNA, 600 bp, Chicken  19866894240650_2
tcccctatgcaatcataaactaaaataagtttatggaattgacttttatctatccaatgtgcaaattttaactcaaaaaatgtcattctgaaaaagcaaaattcagaattaaggatagggtgatacttcataagtatttggtgtttctcaagtttcaagaaaggggagtaaatttgtttacccttctctctgtcttaccaattcatggaaagctgatttatgcattacatatgttctgagccctccaaacacratctaaagtatgcttttatctctttttttttctataaattcattacywttataataagaaaaacatatragggcatctgaaaattagagaagaatcttttccaaaataaaacgaagacactcaaacattttgttcaagttagtgctgaacttggtgacatctctataaaccaaatattttgttactaaaatatttgcactttttctaaagacatgttgatttttctttcctgaattcatcaaggctctaaaaactgttttaaagtctccccaggactggaatataataaatttatatacatatatgttaaatttacagaatacatgccacgggaaaatctgtattta

SEQ ID NO: 25400 - DNA, 600 bp, Chicken  19866894240650_3
cccctatgcaatcataaactaaaataagtttatggaattgacttttatctatccaatgtgcaaattttaactcaaaaaatgtcattctgaaaaagcaaaattcagaattaaggatagggtgatacttcataagtatttggtgtttctcaagtttcaagaaaggggagtaaatttgtttacccttctctctgtcttaccaattcatggaaagctgatttatgcattacatatgttctgagccctccaaacacratctaaagtatgcttttatctctttttttttctataaattcattacywttataataagaaaaacatatragggcatctgaaaattagagaagaatcttttccaaaataaaacgaagacactcaaacattttgttcaagttagtgctgaacttggtgacatctctataaaccaaatattttgttactaaaatatttgcactttttctaaagacatgttgatttttctttcctgaattcatcaaggctctaaaaactgttttaaagtctccccaggactggaatataataaatttatatacatatatgttaaatttacagaatacatgccacgggaaaatctgtatttat

SEQ ID NO: 25401 - DNA, 600 bp, Chicken  19866894240650_4
aaataagtttatggaattgacttttatctatccaatgtgcaaattttaactcaaaaaatgtcattctgaaaaagcaaaattcagaattaaggatagggtgatacttcataagtatttggtgtttctcaagtttcaagaaaggggagtaaatttgtttacccttctctctgtcttaccaattcatggaaagctgatttatgcattacatatgttctgagccctccaaacacratctaaagtatgcttttatctctttttttttctataaattcattacywttataataagaaaaacatatragggcatctgaaaattagagaagaatcttttccaaaataaaacgaagacactcaaacattttgttcaagttagtgctgaacttggtgacatctctataaaccaaatattttgttactaaaatatttgcactttttctaaagacatgttgatttttctttcctgaattcatcaaggctctaaaaactgttttaaagtctccccaggactggaatataataaatttatatacatatatgttaaatttacagaatacatgccacgggaaaatctgtatttatttatttatttatagactactt

SEQ ID NO: 25402 - DNA, 600 bp, Chicken  19866894240655_1
aaagtaccgtcctgaaagattaacaaagtacactttaaaaaggtacaccattgattgcagaccaacttgctcccttccctgcatcaccgtatttttcattcacaatttaataatggcgattttcgtaacagtttctcttcatttaattctctgtacttagaagacacgtgctaaggccaactccaaccaccgtaatgagcaaacttaaatctgaagtgggtgtaaaaggctcataaatatccaccagtagtaaatgtttgaacagtttggctggctcaggagaaacgtcttcaaattgayagcttggcagtttcgtttatttgtgtatgagcaaataattcaaggtgccagctgttgcaatgatggctggcaagagtaaagcaaaaccccatccttcagtggattaaatatttgtttttgcagtgaatgatgaaataagtgcattcagcttgaaggacctatgctactgtctcccctaaatgcatgtctttgcagctgctactataaattatgttaggaagagcttctatattggtagactcgaatcattttctgagtgtgaatttgttgatatatgttaaatgctttgtaattgaggac

SEQ ID NO: 25403 - DNA, 600 bp, Chicken  19866894240655_2
gcttctgaggaaggaaattaagaagtgcctggttttcctcatttgaatatctctgcaggggatctgaacactggagttaccacttgcacattaatgagaggctaggactttaattatacgagcctaatttgaagtgattgtgcataggtaccaggggcaaggaaaaaatgtttgctatgaaaaagcactaattctttttcatttcttcaccgctttttcactgaggcaggaaaaagtctatcaacataatgcatggtttaaaagtatcaaaaatatttttagttgcttttaaataattcyctacttttatcttctgaaatcagcattttatttactttaagtaaaaaaaaaaaaaaaaaaagccaagatattttccttcttattattacacttttgtagagtctgataatgttttaagaaatctcttctggatacaatcctttctattctttatcagcacttcacagaatttcagactaagggttcctagagatctgtcactaaggctttggctctgtcactgcttttcactttttttcctggataacctatctattttatagtaggggaaaaaacagtaagactcacagagaagataac

SEQ ID NO: 25404 - DNA, 600 bp, Chicken  19866894240657_1
tcctcaaccctggcccgaggtctacattattgaatcttgaacaaaattgatcctcctttgacagacccttccattcgcagatctaccccagtgccattgtctgcaattttttcccctactctgagcgttttactcctgtatgcactctcccccaggtcatctacaccctacgggatcctcgagatgttgttgtctcctacttctacttctgcaagatgtgcaacagctatgaggaccccgtgtcctttgagcagttcttgagggactttctcagtggagagtgtgagtgtggtttgtgcwtgctcagggcatgctgggggttccccgtcacctctatctctagaatcttttccaagggtccactgatgatgcctgtgaaaccaaacttcctctatgagagagctgaagtgctcagcaaagcacaaaaaagcctgccaattcaatttttaatttgcctgccttctacagatttcattttcctcttggaagtcttggtcagcagaccccttaaggccatgacccaggaccctggcatccttccatccccaaccctttcccactgtggtctgtgtctgctcatactcctgtgtttgcaggatg

SEQ ID NO: 25405 - DNA, 599 bp, Chicken  19866894240659_1
  misc_feature (1)..(41): n is any nucleotide
nnnnnnnnnnnnnnnnnnnnnnnnnnnnnnnnnnnnnnnnncaattttgtgagtttttgaaagtgtttgggtaccagaagctggaggtgagatcttgtgttgggctgctagaagaggtgatggagtgatgcatggatgctgagagcaggcaagagcttactgcttccaaggagctcccaaattcagagcagttgtgctttacagaagggatcaggcttctgcttgggtggctgctttcccaagcaagccactgtgctgtcttgcacactgtcctcccttcaggatccaccgttgttaacygattccaaacaatccctttacatcaggacttcttgttaatggaaggcctgagtgagatgcagaccataatgctaattgatgaagagaacctctaatagwaggaagccgagccattagagccgtgggtatcctgctttcagaacactgttggtgtccaaggagctgagaaatgtgtcttgtcacacttatttccgttattaaacctggcaggtggcctatgcagtgctccaagccctgggtgtagcatggatatttataatgtacccatatccctggtgctggagtggtttagcttggtt

SEQ ID NO: 25406 - DNA, 600 bp, Chicken  19866894240659_2
ttgggctgctagaagaggtgatggagtgatgcatggatgctgagagcaggcaagagcttactgcttccaaggagctcccaaattcagagcagttgtgctttacagaagggatcaggcttctgcttgggtggctgctttcccaagcaagccactgtgctgtcttgcacactgtcctcccttcaggatccaccgttgttaacygattccaaacaatccctttacatcaggacttcttgttaatggaaggcctgagtgagatgcagaccataatgctaattgatgaagagaacctctaatagwaggaagccgagccattagagccgtgggtatcctgctttcagaacactgttggtgtccaaggagctgagaaatgtgtcttgtcacacttatttccgttattaaacctggcaggtggcctatgcagtgctccaagccctgggtgtagcatggatatttataatgtacccatatccctggtgctggagtggtttagcttggttgttaattagcccgatggcaacctttctgtgcttggttagcagagaggcagtgtatggtgcacaagaggtgggaagaggtgagaggattccggggggttgt

SEQ ID NO: 25407 - DNA, 600 bp, Chicken  19866894240661_1
taggtgtgttgctgccacacgtcgtcttcatgaagctgcagagtgctttatgctgatctaccttatcttatcatgccagggaatcccctgattgcccagcttttttttctcaagggctattcatgcctcattcactctctgcattcctattgctctttaaagtgatagttatttaagaaatccataccttcctcaaatcacttttggatgccagacatatgtcttttaaaaatgctctggagtaaaacaaaaaattaattgcaaaatcctttgggagtagtttcgagaactggtaattcytgcaccagtttcactgctgacatttgatcaaccacagtatgttaacaggtggcctatggactgctggagcctaggtgaaatacttcaaatagtctttctgatgctgggatcaatttctttgccatgtgtgctagccgaaacatctattccttctgtttgagggctgaacttgtgctgggatttttcttatgttttgttacctttgagccaatttgctgaaaatagaccttgattctcaccctaatgcacttacagaccctctcatggcagcgtgttgccgaagtgtcgatgcttattgaa

SEQ ID NO: 25408 - DNA, 600 bp, Chicken  19866894240663_1
gtactcttaaataatttcaatgagggtacctccactttcactccacttactatttaatgtagatatcccaacatctttcttagccagtatactaaatctggtatgctaaatgtcaagtcattaatatgatgacggaattgaaattgtaaaaatttaaaataactagacaatgataggttctatttagatgaagttgttatggtatagaagaacactgaagaaataaagctgaaaattgatttacaaatattcttgaatgctggaaatgagcagaatctcctttagaagtattatttggtyaggaaatactaakaatatgctagcattttcaataatctactactctactgaagtactttactagaaccttctaccatctgtgtcagactactaatttcaatttgtgttagttgtattggaatagcagactttacatttttaaatgcatttcatactttgctactcctgtgcatcttctctactcaggcttgtaccattacctatttctaagttttgatttctggaacttattattactggtaaatgagccagtcggatgccaatcacagtagagatccctgaaatctctctttgtacctc

SEQ ID NO: 25409 - DNA, 600 bp, Chicken  19866894240663_2
atttcaatgagggtacctccactttcactccacttactatttaatgtagatatcccaacatctttcttagccagtatactaaatctggtatgctaaatgtcaagtcattaatatgatgacggaattgaaattgtaaaaatttaaaataactagacaatgataggttctatttagatgaagttgttatggtatagaagaacactgaagaaataaagctgaaaattgatttacaaatattcttgaatgctggaaatgagcagaatctcctttagaagtattatttggtyaggaaatactaakaatatgctagcattttcaataatctactactctactgaagtactttactagaaccttctaccatctgtgtcagactactaatttcaatttgtgttagttgtattggaatagcagactttacatttttaaatgcatttcatactttgctactcctgtgcatcttctctactcaggcttgtaccattacctatttctaagttttgatttctggaacttattattactggtaaatgagccagtcggatgccaatcacagtagagatccctgaaatctctctttgtacctcggaaatgtgtgat

SEQ ID NO: 25410 - DNA, 600 bp, Chicken  19866894240666_1
agccgagcaagccagtttgcctcagcctttcttcaaatcacaggtactccagcctgagcacagacctggacacagtactcccggtggttcctaacgagagcaatcagagacagacaatcacctccctcactcttctagccaactcttttttgatggaatcaaggatgcatatgtgtatcggggctgcgtgcaggcacttctggctcacgtcaagctcttcattgacatgaaactccaagtccccctccacagggctgctctccattagctcttctcccagactgtactccaacctgggartgacccgactgaagtggaacacctcgcacttggatggactgaaactctttccatttcctcacrctcacttttycaagcttgtccaggtcctttggatgacatcccttacttccattgtatcaaacgtatcactcaaataaccaccaatcaaccaccaatcttgctctggatgcatttaatcccactgtctggatccactgatacagattttgaagagcactgctcccaaggggcacaactaattacccacctccacccacacatggagctctggaccccagtcccatggctgtgaycgtc

SEQ ID NO: 25411 - DNA, 600 bp, Chicken  19866894240666_2
acctggacacagtactcccggtggttcctaacgagagcaatcagagacagacaatcacctccctcactcttctagccaactcttttttgatggaatcaaggatgcatatgtgtatcggggctgcgtgcaggcacttctggctcacgtcaagctcttcattgacatgaaactccaagtccccctccacagggctgctctccattagctcttctcccagactgtactccaacctgggartgacccgactgaagtggaacacctcgcacttggatggactgaaactctttccatttcctcacrctcacttttycaagcttgtccaggtcctttggatgacatcccttacttccattgtatcaaacgtatcactcaaataaccaccaatcaaccaccaatcttgctctggatgcatttaatcccactgtctggatccactgatacagattttgaagagcactgctcccaaggggcacaactaattacccacctccacccacacatggagctctggaccccagtcccatggctgtgaycgtccaaccaatttctcatccactgaatagtccwccattaaaatccatatgtctccaacttactgat

SEQ ID NO: 25412 - DNA, 600 bp, Chicken  19866894240666_3
agtactcccggtggttcctaacgagagcaatcagagacagacaatcacctccctcactcttctagccaactcttttttgatggaatcaaggatgcatatgtgtatcggggctgcgtgcaggcacttctggctcacgtcaagctcttcattgacatgaaactccaagtccccctccacagggctgctctccattagctcttctcccagactgtactccaacctgggartgacccgactgaagtggaacacctcgcacttggatggactgaaactctttccatttcctcacrctcacttttycaagcttgtccaggtcctttggatgacatcccttacttccattgtatcaaacgtatcactcaaataaccaccaatcaaccaccaatcttgctctggatgcatttaatcccactgtctggatccactgatacagattttgaagagcactgctcccaaggggcacaactaattacccacctccacccacacatggagctctggaccccagtcccatggctgtgaycgtccaaccaatttctcatccactgaatagtccwccattaaaatccatatgtctccaacttactgataaggatatta

SEQ ID NO: 25413 - DNA, 465 bp, Chicken  19866894240666_4
ggartgacccgactgaagtggaacacctcgcacttggatggactgaaactctttccatttcctcacrctcacttttycaagcttgtccaggtcctttggatgacatcccttacttccattgtatcaaacgtatcactcaaataaccaccaatcaaccaccaatcttgctctggatgcatttaatcccactgtctggatccactgatacagattttgaagagcactgctcccaaggggcacaactaattacccacctccacccacacatggagctctggaccccagtcccatggctgtgaycgtccaaccaatttctcatccactgaatagtccwccattaaaatccatatgtctccaacttactgataaggatattatgtgaggacatgtcaaaagycttgtacaagtccacgtggatggcatcacttgctcttcatttgcccagtgatgctgtcacttccccat

SEQ ID NO: 25414 - DNA, 431 bp, Chicken  19866894240666_5
tggatggactgaaactctttccatttcctcacrctcacttttycaagcttgtccaggtcctttggatgacatcccttacttccattgtatcaaacgtatcactcaaataaccaccaatcaaccaccaatcttgctctggatgcatttaatcccactgtctggatccactgatacagattttgaagagcactgctcccaaggggcacaactaattacccacctccacccacacatggagctctggaccccagtcccatggctgtgaycgtccaaccaatttctcatccactgaatagtccwccattaaaatccatatgtctccaacttactgataaggatattatgtgaggacatgtcaaaagycttgtacaagtccacgtggatggcatcacttgctcttcatttgcccagtgatgctgtcacttccccat

SEQ ID NO: 25415 - DNA, 368 bp, Chicken  19866894240666_6
ggatgacatcccttacttccattgtatcaaacgtatcactcaaataaccaccaatcaaccaccaatcttgctctggatgcatttaatcccactgtctggatccactgatacagattttgaagagcactgctcccaaggggcacaactaattacccacctccacccacacatggagctctggaccccagtcccatggctgtgaycgtccaaccaatttctcatccactgaatagtccwccattaaaatccatatgtctccaacttactgataaggatattatgtgaggacatgtcaaaagycttgtacaagtccacgtggatggcatcacttgctcttcatttgcccagtgatgctgtcacttccccat

SEQ ID NO: 25416 - DNA, 599 bp, Chicken  19866894240669_1
  misc_feature (1)..(114): n is any nucleotide
nnnnnnnnnnnnnnnnnnnnnnnnnnnnnnnnnnnnnnnnnnnnnnnnnnnnnnnnnnnnnnnnnnnnnnnnnnnnnnnnnnnnnnnnnnnnnnnnnnnnnnnnnnnnnnnnnnctgttaggaaaacctgtactgaaagtagctgctcaacaagagcagctgcagagaaaaaagcttgtgtctagtgggacagtaggtcttgcgatttttaagagtaatagataatggttaagtaccctttaatacagaatacatgaaatgccaagtaatattttacttgtttccttcttgtcagagtastgatgttatggagaagcagaattycattccatttttatggggagacagactgaagggctgtcccaacatggaactcagtctcatggcagctagtattaggcttccgtacatgccttgaaagtaatccaggtaatttgctatgttgtttaatcctagtgttgacagattagttccttctggcttgcttatgttggtgttctggagagctaaaaaaagatttctctaattagagacatgctggcatcctgggtagcataatatcttgggaaggaccttacggaagtgctcttcgttgaagc

SEQ ID NO: 25417 - DNA, 599 bp, Chicken  19866894240669_2
  misc_feature (1)..(90): n is any nucleotide
nnnnnnnnnnnnnnnnnnnnnnnnnnnnnnnnnnnnnnnnnnnnnnnnnnnnnnnnnnnnnnnnnnnnnnnnnnnnnnnnnnnnnnnnnnctgttaggaaaacctgtactgaaagtagctgctcaacaagagcagctgcagagaaaaaagcttgtgtctagtgggacagtaggtcttgcgatttttaagagtaatagataatggttaagtaccctttaatacagaatacatgaaatgccaagtaatattttacttgtttccttcttgtcagagtastgatgttatggagaagcagaattycattccatttttatggggagacagactgaagggctgtcccaacatggaactcagtctcatggcagctagtattaggcttccgtacatgccttgaaagtaatccaggtaatttgctatgttgtttaatcctagtgttgacagattagttccttctggcttgcttatgttggtgttctggagagctaaaaaaagatttctctaattagagacatgctggcatcctgggtagcataatatcttgggaaggaccttacggaagtgctcttcgttgaagcagtcattgagtcctcacctcacca

SEQ ID NO: 25418 - DNA, 525 bp, Chicken  19866894240673_1
aaagagggaggagaaagggtttcatcatcgctcccgagtgtggacttataaaaactttgcgctcacgctgcctggctcactcatcggctcaccgttttcggagcaggacggggccggagccctcacacagcccatctgctggggtgcaccatgggggtccatcccgaagccgccaagtccccagtggatatccccagaagctccagcacctgctcccgtggtatcttctgcaacatcaaggtaaggagcggcgatgcgggaggaggaggttggcaccgatgcagtcccggtgctgaaacygaggctgataaaaaaggggcagagtgcaaatcccacagcatggccccagatgaggttgcggagcaccagggctcggtgcgagcggcgcgatgtgctgcgtccggtacacggtgtgctgctgccggggaatgattaaccacatcctggtgtgaaagcaaaaacgctgtccctcccggggactgtgtccattcccagcggggagaggggcagctttgggagtggtgg

SEQ ID NO: 25419 - DNA, 600 bp, Chicken  19866894240675_1
ctctcatctttggctgttgagacacagcagagataatgtttgttctgtcctgaaggtctgggcaagagacttctctgctcagatctgtgctctgaccatctccttctcatctcttttctctcacataaaagacaacaattcggcagttacctctgctgacactgaactttgttctcttgcctgacacgagctctcctacctttaaaaacacaattcttagaacttacataaggtgctttcccaatgtgatcatttgatccaagtgcactatatgcctgctattgttgagtgagtcatgakcaccgtaggggctggtgcactcctgccaagacttttttgtggagtttgaaatttcatataacaggacaaataattacaggctgctcataatctcttgctgcttctctccaattacaagctgtttgttatctccttctgcagtacaagtcaattatgtgctacttgtcatttacagagtccacaaacagcggaagaggagtgctcctatctctggcttttctaaggccataagtccaaagggtagctgaatgtggtctatggtgtagactgtcatagcattcctgcttagctattggccac

SEQ ID NO: 25420 - DNA, 527 bp, Chicken  19866894240675_2
tgtttgttatctccttctgcagtacaagtcaattatgtgctacttgtcatttacagagtccacaaacagcggaagaggagtgctcctatctctggcttttctaaggccataagtccaaagggtagctgaatgtggtctatggtgtagactgtcatagcattcctgcttagctattggccacttctgtgcctctagttattgctttgcaaagaataaagtagaattactgattaattttcctttccattcttgctgtatgaactaggagatgaataggttcagagttcaagttggggttgraaaatctggctctggcagtacatgtgcaagtcttctgtggaggcttagttacctgcctagggtgtttttagatcaatctttgtggcactggcaagtacactggatgttgctgcatagttatttgtggaatgtatctaacgacttgctttcgcaggtcattgctagcttctcttggttctaactaacttgaagctttggaggagcaagctgataaaatgccttcaagg

SEQ ID NO: 25421 - DNA, 600 bp, Chicken  19866894240679_1
cctttatttgaaactgctgtcagcaggctttctgtccctaacaactgatacttccgtgtttagctttactcatgactgatttatcccaatgcctcctatgcaacacaataaagcacagggcagaagcagagttttcttattatttgcctgttcatctgaactttaaccaaggagaggaaaagtagaagagttgaggcttcctccacttcactcaaatctatcaactcacaaactgcacaactcctaccaaaacacaattatattcatgttgtataatatgaagcaaatgcatctctacayacatttttaaaaccagtaaaataagctgtagaactaaacccttctctcagaaatcccagcatggaaataaaagcaaagcttctattaattatccttcctgtttgcccatttctacattgggcagacaaataatagacaaatgcaaagagaaaaacaaaccaacttttgctccatgaacatgttacttagggactaaattatcagaatccacatatcagactgcctccattaatagttatcatttctggttcaagcttaaatagttgcagattttacaaccaagccccacagtctatgaag

SEQ ID NO: 25422 - DNA, 600 bp, Chicken  19866894240679_2
acaaataatagacaaatgcaaagagaaaaacaaaccaacttttgctccatgaacatgttacttagggactaaattatcagaatccacatatcagactgcctccattaatagttatcatttctggttcaagcttaaatagttgcagattttacaaccaagccccacagtctatgaaggaacagtcacaggttgcttattagacagaaataactcatggaacaataaggaattaaattaaggagaataaaagatgattgcccatggtgttatgaatgggcactggggccaagagaaggaaaracacaaatgtaaaatcatggggtttttttgcatcacaaaatcacgtattttgtttttggagagctagttaatgctctggctctgcataggtaactcacagctcccagacagacaacactaacttgygattagtgccagattgcataaatcattaggatgatctcagtctttagagaagacagaaataatggtaactctggtgagaatactagaagagtttacacgtttacttaaggactggcaagaaagctgcacagatcagtaaaaattgtatagaaggaatcaagatcaaagaacaag

SEQ ID NO: 25423 - DNA, 600 bp, Chicken  19866894240679_3
caagcttaaatagttgcagattttacaaccaagccccacagtctatgaaggaacagtcacaggttgcttattagacagaaataactcatggaacaataaggaattaaattaaggagaataaaagatgattgcccatggtgttatgaatgggcactggggccaagagaaggaaaracacaaatgtaaaatcatggggtttttttgcatcacaaaatcacgtattttgtttttggagagctagttaatgctctggctctgcataggtaactcacagctcccagacagacaacactaacttgygattagtgccagattgcataaatcattaggatgatctcagtctttagagaagacagaaataatggtaactctggtgagaatactagaagagtttacacgtttacttaaggactggcaagaaagctgcacagatcagtaaaaattgtatagaaggaatcaagatcaaagaacaagtgacatctcaacatcctaaatccaatttccagctgttttctctgtggttacttatctgtggttatcacttttcttctgcttcgttgttattcagccccaacactttaaggaaacattccaggggat

SEQ ID NO: 25424 - DNA, 600 bp, Chicken  19866894240679_4
aaattgtatagaaggaatcaagatcaaagaacaagtgacatctcaacatcctaaatccaatttccagctgttttctctgtggttacttatctgtggttatcacttttcttctgcttcgttgttattcagccccaacactttaaggaaacattccaggggattttcaatgtattctataagctaagtatacagccaaacattaattctgttggtttggtgatgtaagtgaacacaattcagtacatgctttggatgttacatttagccaacatacataagaatgttgttaggggcagcacrgataagtactcctttcagaattgtaagctatacaattaaatgtcactattttctgttctccagaaactaactagagtaaaaaatgactacaaataattatctgccttgggcttttttcttgaatttccactttgtaatgactttcataaatgtaaagacactggaaggcagtaaaaatatgtcacatctgaaatatttctgaacaacagggtatgcagattttcctaagtgtaaattacgtctggcactcaaaacacttgagtgcagaatttcattcccacaggagagatctaaaaactc

SEQ ID NO: 25425 - DNA, 600 bp, Chicken  19866894240682_1
tgaaaccctgctgcttctaccactagaatgtacaatagggttggtaaagatgagtttcgggttacatcagttttccccagtgctgacacagctctccagtgcaaacttcattcacgcaggggccagggaagagcagacataaaacgattatgacttgcttctgctttgtgttgcttctttggctgtcaaactcaaaagaatcagagaagattggaggagtctcatatttgaagatttttgctttgttactgtttttgttcaagtttgtttggataaaggatgtgtggaacaagcagacarggccctgaaatctgagatccaactcattcattcagtgtgaatgattataattatttcacccatttgcagcctgcaatccaagatttcaaaccatattcaaagttcactgyacttttatcrtaggatatttatagttgttttttkttgttgttgttgttttgtattggtccctcatacataagtcatttgcaagccatcatagcctgcaagraaaacagaaacaaatttcaattaatccactcttcctttttttctcagaacaacccagaaatgttctttgaaataagcagactagaaggg

SEQ ID NO: 25426 - DNA, 600 bp, Chicken  19866894240682_2
ttcacgcaggggccagggaagagcagacataaaacgattatgacttgcttctgctttgtgttgcttctttggctgtcaaactcaaaagaatcagagaagattggaggagtctcatatttgaagatttttgctttgttactgtttttgttcaagtttgtttggataaaggatgtgtggaacaagcagacarggccctgaaatctgagatccaactcattcattcagtgtgaatgattataattatttcacccatttgcagcctgcaatccaagatttcaaaccatattcaaagttcactgyacttttatcrtaggatatttatagttgttttttkttgttgttgttgttttgtattggtccctcatacataagtcatttgcaagccatcatagcctgcaagraaaacagaaacaaatttcaattaatccactcttcctttttttctcagaacaacccagaaatgttctttgaaataagcagactagaagggtctgcagtytggmtacatttatgtttaatccttttcccactaggaattgtttttgccaaatggtaaaagcagagacaaagcaaataactactgcctgttctctcagtctg

SEQ ID NO: 25427 - DNA, 600 bp, Chicken  19866894240682_3
ggccagggaagagcagacataaaacgattatgacttgcttctgctttgtgttgcttctttggctgtcaaactcaaaagaatcagagaagattggaggagtctcatatttgaagatttttgctttgttactgtttttgttcaagtttgtttggataaaggatgtgtggaacaagcagacarggccctgaaatctgagatccaactcattcattcagtgtgaatgattataattatttcacccatttgcagcctgcaatccaagatttcaaaccatattcaaagttcactgyacttttatcrtaggatatttatagttgttttttkttgttgttgttgttttgtattggtccctcatacataagtcatttgcaagccatcatagcctgcaagraaaacagaaacaaatttcaattaatccactcttcctttttttctcagaacaacccagaaatgttctttgaaataagcagactagaagggtctgcagtytggmtacatttatgtttaatccttttcccactaggaattgtttttgccaaatggtaaaagcagagacaaagcaaataactactgcctgttctctcagtctgaaaagcacgg

SEQ ID NO: 25428 - DNA, 600 bp, Chicken  19866894240682_4
cgattatgacttgcttctgctttgtgttgcttctttggctgtcaaactcaaaagaatcagagaagattggaggagtctcatatttgaagatttttgctttgttactgtttttgttcaagtttgtttggataaaggatgtgtggaacaagcagacarggccctgaaatctgagatccaactcattcattcagtgtgaatgattataattatttcacccatttgcagcctgcaatccaagatttcaaaccatattcaaagttcactgyacttttatcrtaggatatttatagttgttttttkttgttgttgttgttttgtattggtccctcatacataagtcatttgcaagccatcatagcctgcaagraaaacagaaacaaatttcaattaatccactcttcctttttttctcagaacaacccagaaatgttctttgaaataagcagactagaagggtctgcagtytggmtacatttatgtttaatccttttcccactaggaattgtttttgccaaatggtaaaagcagagacaaagcaaataactactgcctgttctctcagtctgaaaagcacggctgtttggagcagtcttctggaaa

SEQ ID NO: 25429 - DNA, 600 bp, Chicken  19866894240682_5
tggaggagtctcatatttgaagatttttgctttgttactgtttttgttcaagtttgtttggataaaggatgtgtggaacaagcagacarggccctgaaatctgagatccaactcattcattcagtgtgaatgattataattatttcacccatttgcagcctgcaatccaagatttcaaaccatattcaaagttcactgyacttttatcrtaggatatttatagttgttttttkttgttgttgttgttttgtattggtccctcatacataagtcatttgcaagccatcatagcctgcaagraaaacagaaacaaatttcaattaatccactcttcctttttttctcagaacaacccagaaatgttctttgaaataagcagactagaagggtctgcagtytggmtacatttatgtttaatccttttcccactaggaattgtttttgccaaatggtaaaagcagagacaaagcaaataactactgcctgttctctcagtctgaaaagcacggctgtttggagcagtcttctggaaagttggaaagacttctcctaacattattacagatgtctctcatttgagaatttgcagtgctttcacat

SEQ ID NO: 25430 - DNA, 600 bp, Chicken  19866894240682_6
atctgagatccaactcattcattcagtgtgaatgattataattatttcacccatttgcagcctgcaatccaagatttcaaaccatattcaaagttcactgyacttttatcrtaggatatttatagttgttttttkttgttgttgttgttttgtattggtccctcatacataagtcatttgcaagccatcatagcctgcaagraaaacagaaacaaatttcaattaatccactcttcctttttttctcagaacaacccagaaatgttctttgaaataagcagactagaagggtctgcagtytggmtacatttatgtttaatccttttcccactaggaattgtttttgccaaatggtaaaagcagagacaaagcaaataactactgcctgttctctcagtctgaaaagcacggctgtttggagcagtcttctggaaagttggaaagacttctcctaacattattacagatgtctctcatttgagaatttgcagtgctttcacatcaaattaaacacagtgggagctaaaggcaaccaacagctctctgaagaacacctcaacggttagcagctacgggctgcatttgcaaaggtctctagtt

SEQ ID NO: 25431 - DNA, 600 bp, Chicken  19866894240682_7
gagatccaactcattcattcagtgtgaatgattataattatttcacccatttgcagcctgcaatccaagatttcaaaccatattcaaagttcactgyacttttatcrtaggatatttatagttgttttttkttgttgttgttgttttgtattggtccctcatacataagtcatttgcaagccatcatagcctgcaagraaaacagaaacaaatttcaattaatccactcttcctttttttctcagaacaacccagaaatgttctttgaaataagcagactagaagggtctgcagtytggmtacatttatgtttaatccttttcccactaggaattgtttttgccaaatggtaaaagcagagacaaagcaaataactactgcctgttctctcagtctgaaaagcacggctgtttggagcagtcttctggaaagttggaaagacttctcctaacattattacagatgtctctcatttgagaatttgcagtgctttcacatcaaattaaacacagtgggagctaaaggcaaccaacagctctctgaagaacacctcaacggttagcagctacgggctgcatttgcaaaggtctctagttgcct

SEQ ID NO: 25432 - DNA, 600 bp, Chicken  19866894240684_1
gaggtttacacctcagttgaggaccacacagggtggggacaaagcatgagaaacgctttccccttccatcatctcaaacaaaaaaaggctaaaacaatggtcctgggttttctgaacagcagatttgtgttgcacagggtactgaaacttccctctttacgagtggccactcgaagggctgaattcttcccagaaaaagggctctcatgtcccattttaatttttaacgtgaagactaattggtcaggaggtgactgcagtgaatttcatcttaattaaactggcttactcagagtaagwcttgaatacaaaacttttagtttatgttttaygtgagtcaattttatttcacgtcttcatggtgaagataacttttctttcataaattcacaagcaggagctccaagaaatccccttttgcctcaagatctataaagcagatcacaaaaccaatttgatgttatagttgtaatcatcaagtagctctgaacaaatctttctcattagatatttacattgtcagatctctgccattccatatttgcaatattaaatatgaaaatatttgcaaaatttgcagtggttaattcagatgtaaat

SEQ ID NO: 25433 - DNA, 600 bp, Chicken  19866894240684_2
gtggggacaaagcatgagaaacgctttccccttccatcatctcaaacaaaaaaaggctaaaacaatggtcctgggttttctgaacagcagatttgtgttgcacagggtactgaaacttccctctttacgagtggccactcgaagggctgaattcttcccagaaaaagggctctcatgtcccattttaatttttaacgtgaagactaattggtcaggaggtgactgcagtgaatttcatcttaattaaactggcttactcagagtaagwcttgaatacaaaacttttagtttatgttttaygtgagtcaattttatttcacgtcttcatggtgaagataacttttctttcataaattcacaagcaggagctccaagaaatccccttttgcctcaagatctataaagcagatcacaaaaccaatttgatgttatagttgtaatcatcaagtagctctgaacaaatctttctcattagatatttacattgtcagatctctgccattccatatttgcaatattaaatatgaaaatatttgcaaaatttgcagtggttaattcagatgtaaataattagtaaaaataagtacgtaaagaaacaat

SEQ ID NO: 25434 - DNA, 600 bp, Chicken  19866894240684_3
ctcaagatctataaagcagatcacaaaaccaatttgatgttatagttgtaatcatcaagtagctctgaacaaatctttctcattagatatttacattgtcagatctctgccattccatatttgcaatattaaatatgaaaatatttgcaaaatttgcagtggttaattcagatgtaaataattagtaaaaataagtacgtaaagaaacaatattagaaatgaatggaagttttttgcctttttttttttttttaattttgaaattatatccagagctaagatagcacttataaaatgtayctgtagagcaatatacactcctaccaatcacactaattatatggaaggagtcttccctgaactttcttcatccagcactttcagatataccactgtgaaagtgtcagactaaacacgaagcactttaacaactttctgtcagtgtcagataggaagcatcacaaagaaacagcttctctgaaacacagagaaagttcatttttaatgttaaacctctccttttttgttaaaaattgaaatttccttgaaagaattcatttgacctgtaataatctgcctcyattttgaagctcttgaaaa

SEQ ID NO: 25435 - DNA, 600 bp, Chicken  19866894240684_4
tagcacttataaaatgtayctgtagagcaatatacactcctaccaatcacactaattatatggaaggagtcttccctgaactttcttcatccagcactttcagatataccactgtgaaagtgtcagactaaacacgaagcactttaacaactttctgtcagtgtcagataggaagcatcacaaagaaacagcttctctgaaacacagagaaagttcatttttaatgttaaacctctccttttttgttaaaaattgaaatttccttgaaagaattcatttgacctgtaataatctgcctcyattttgaagctcttgaaaactaaaagaaacaccttaggcaggcccaaaaacactacagattttcagagctgtctgaaatatgaaaaaaggtgtttctagtttacatagttttgatatgcaatttgcttatctctcctcttcacaatgctttgttttttgaaaaaaaaagaaagaaaatttggaatcagaatatacttacaaaagttaatttgcttcattgccacattaaggagacgtacttaaatgcttaattggaagaaagcacaaaaataccatttccacaggttacgttaatgtgct

SEQ ID NO: 25436 - DNA, 600 bp, Chicken  19866894240687_1
tgagtgtcaagtgctggcaaaaattaaggtcaaaaagcatctatcttggaatgacaacgaaaccttcaatggccttatttgcaagagctctactaccatagtgctagtttgcgtgcaaggtcagaacaaatttgtaaaccagcttacctaatttattggactggcaatgaaatgcctaaaatgtatagcctagcaaacaaggtgaggacacaggcactgttagggatacaagttgaaaattatcacaaaggcctctctgcattgtgatagcattccatatccatctgcactcctcaaaaygtttcaaatgttcattaggggttagggcaggggcagcaacaaaacttcttgcacacccagatctgtccatactcagagaagtgtcctctgcaggargagtgccctcgtgtgagaacttactctgccaagtggtttgtctataaatacatgccaggtctgctgtaccacaccgtagacactcatatctccaccacgtggtgtgacattttgtaatgccacttcctccaggaaggcagattaaatgatagaatcatagatcttctaaggttgggaaagacctccagtatgtccagccccaac

SEQ ID NO: 25437 - DNA, 600 bp, Chicken  19866894240687_2
catagtgctagtttgcgtgcaaggtcagaacaaatttgtaaaccagcttacctaatttattggactggcaatgaaatgcctaaaatgtatagcctagcaaacaaggtgaggacacaggcactgttagggatacaagttgaaaattatcacaaaggcctctctgcattgtgatagcattccatatccatctgcactcctcaaaaygtttcaaatgttcattaggggttagggcaggggcagcaacaaaacttcttgcacacccagatctgtccatactcagagaagtgtcctctgcaggargagtgccctcgtgtgagaacttactctgccaagtggtttgtctataaatacatgccaggtctgctgtaccacaccgtagacactcatatctccaccacgtggtgtgacattttgtaatgccacttcctccaggaaggcagattaaatgatagaatcatagatcttctaaggttgggaaagacctccagtatgtccagccccaaccccacctgacccccaccatgctcactgaccgtacccctcagtgtcacacctccacagttctggaacaccttcaccgtcaggactccatcacttctc

SEQ ID NO: 25438 - DNA, 600 bp, Chicken  19866894240699_1
tgaggaagaaaggaagattagaccacataaccagtgtacactcagaaaaccaattgttgtatgaagtcaaaaataatcacacaaaagctcctgatgttttcattttaaaatatcattgggtgacctttgattttctttcacctttgatgtttcagaagaaacatcagagaaaattgcaacttccaatctaaattttcttctatttttttattgatggttattattcttgatcacaacaacttgttggtagatttggtgctttaccagcttacaaactggaagatatctatgccttgtccrtttcttgccaaaaagccttagagtagtagyaatctaaatgatatgactggccttagagagaaagaatcttataaaaattggacaatcaattggaaaatcagaccccttttcactcccatatttgataagcctgaagaatctcacaaaaattggactagttttattgatctgcctctggaataaaacgtgaaggcaaatggttgaattcacaggcaaatctctgtctaaaatttgtctaataccaaaactcttacttataaagaggaatttgaaaggctgttttaggaatcctgcaataca

SEQ ID NO: 25439 - DNA, 600 bp, Chicken  19866894240699_2
ccagtgtacactcagaaaaccaattgttgtatgaagtcaaaaataatcacacaaaagctcctgatgttttcattttaaaatatcattgggtgacctttgattttctttcacctttgatgtttcagaagaaacatcagagaaaattgcaacttccaatctaaattttcttctatttttttattgatggttattattcttgatcacaacaacttgttggtagatttggtgctttaccagcttacaaactggaagatatctatgccttgtccrtttcttgccaaaaagccttagagtagtagyaatctaaatgatatgactggccttagagagaaagaatcttataaaaattggacaatcaattggaaaatcagaccccttttcactcccatatttgataagcctgaagaatctcacaaaaattggactagttttattgatctgcctctggaataaaacgtgaaggcaaatggttgaattcacaggcaaatctctgtctaaaatttgtctaataccaaaactcttacttataaagaggaatttgaaaggctgttttaggaatcctgcaatacaggtgtccaggttctctctccaccctcttct

SEQ ID NO: 25440 - DNA, 600 bp, Chicken  19866894240708_1
acctcagtcagcaaggcgggcactgcttccccttcctcaccccctttctcatgaggcagcaatacaatgcggcaattccaaagccaggccaagggctgggacagtcctccccacacacagtccccactccagaagtcagccagatcaattcctggctcccagataaagaggtcacatgccgccaccagcggccagctcctctttgacacagagatcactgctgcaccaaccccgagcctgagctctgggcatggcagaggggaagcaaagtccaggcaagcaaggtcccaagggcacacrttacctgcagcgtggtaaagtggaaggcaatcatacatcacatcgtcgggtctcatgcggaaaccataaaaaaccaagctggccatgcggaaatacctggggtgggggaaccaaggggcatgtcagaagcagggccagaggctcagtgccaggatggggccaggactctgcccccttccttccccagagctcccgcccactgccttacctgcagttgaccacaatagcagccttgggcattcccgtagtgccagaggtatagatatagaagagtttatctggggaggaatgaggagacaa

SEQ ID NO: 25441 - DNA, 600 bp, Chicken  19866894240708_2
tctcatgcggaaaccataaaaaaccaagctggccatgcggaaatacctggggtgggggaaccaaggggcatgtcagaagcagggccagaggctcagtgccaggatggggccaggactctgcccccttccttccccagagctcccgcccactgccttacctgcagttgaccacaatagcagccttgggcattcccgtagtgccagaggtatagatatagaagagtttatctggggaggaatgaggagacaaggtcacacatgcagcgtgacctagatcactgcacctgatccaggaggagytggctgaagcagaaggtggggacaagtcaaagcatactctgatcacatcaaaatacattttgttatgtgatacagaacatgctgggttcaccccaggcctgtttgaacacatggagggcacatgatactgaaccacatgcagccaggcttcagccccccttcaaacattccaggctctgctgctgaagtctgccctcagcatcctgagcagatattcttgccagtgttgtgaccagatgatcctcggaaataccaccaggagtttggctcccaaaagctgaccacgtaccgagaaagccc

SEQ ID NO: 25442 - DNA, 600 bp, Chicken  19866894240708_3
cctatccttgcaggcaggtgccccaggtagctgcaccctcactgcgctcagcaatgccaaaaggcctgacagctctcccaggcagatgttgctcctatgtcaaacagctgggaccacagcccaggcctcttcagagacctgaagatcctgttctccacttcttcccagccaaaaccttgcggtgctgagaggtctttcaacaccatcagccgcaggggcgtaggctgaaacacgctgcaagattgctgcaaacagtgtagggagcaagagagactcgtcccttccatcagggcaggtctrgcacagcacagggctccatgcagtgcgtggacatgagaggaacctctagcacaagaatcctcacacccacgtgggcgtgaggattgaacccacccacctctgcctactaacagaaagaaaaccagatccaattcctgagtaattcagctatgcacactctttgagaccctgctctattccctgcaggaaaggagcactgaatccatggaccccctccgctcagagcctgaaagccccctgaagcacctgcctgcccctcaccttccatcatttccactccaaaaaccacagccttggagt

SEQ ID NO: 25443 - DNA, 600 bp, Chicken  19866894240708_4
aagccttggccgtggaagaaattggccacttggttggagtactcatccagctgccggaaggtccagctctcgcccgtgccttggaagatcagtgctgttttctctggacacttgctcgcagtcctctggaagatcttggcgatcgtgttcttctccctcacgtgcctccacacctgccacttcacccgcagcaggaccagccccgtgctgccaaaataaatggaacaagagggaagctgctcagtgacccctgcgaaaccgcttcctccggcaaagacagcacagcacagagaccttgcyaggagctgcaacagtccagcactgctccaggtgttactctagatgagcagcagctctgggtgcttccctggatataggcagaggccctctgcaaaggcacttatggccacgagggcagggagaggtgttttggaaggctgcagactgggatgtcctcrctttaaaggagcaccctgaagcctcaggtgctgtccaaaaggtgtcactactgtcccacacagagatctttgccgggagctggcacaacctggtaccagcccaggcaactggtgccacgccagcaggataaagtacaaggac

SEQ ID NO: 25444 - DNA, 504 bp, Chicken  19866894240708_5
cacgtgcctccacacctgccacttcacccgcagcaggaccagccccgtgctgccaaaataaatggaacaagagggaagctgctcagtgacccctgcgaaaccgcttcctccggcaaagacagcacagcacagagaccttgcyaggagctgcaacagtccagcactgctccaggtgttactctagatgagcagcagctctgggtgcttccctggatataggcagaggccctctgcaaaggcacttatggccacgagggcagggagaggtgttttggaaggctgcagactgggatgtcctcrctttaaaggagcaccctgaagcctcaggtgctgtccaaaaggtgtcactactgtcccacacagagatctttgccgggagctggcacaacctggtaccagcccaggcaactggtgccacgccagcaggataaagtacaaggacaaggacaaccagcagacttcagagctcagctgaaatctatatttcctaggaaaactttgccc

SEQ ID NO: 25445 - DNA, 600 bp, Chicken  19866894240709_1
actttgctgcctcgccagtaggcaccaggaggcaatttcggttttgtttccaatcactttcgctccttggctgtcacgtactttcatgatgtcattatgtttgggctgcaaatgctgcagggaagtgtttaacgccaaacaaactgtattaactgacttgaaatgtcatggaaacaactctggtgccaataggctttgcagaatttgtctctcattttgaagtttgaattccatgaatactttttgaaagctctcaagtctttccgctgtaactcagcacttcttttccctcctcattaygtaggaagcagcctctttgggcaagacttcatttcttcaagtttaacatattagatgcaaaaccaccagttgtcattaggagcgtttgcaatgatggtgaaacaaaacatgggaaggaaatgaggttgtgggggaaacatcgaatgmtttcaccacgagccccttatgtcgctaggatggagtcgatgggaactgatttgcaactctgtaaacagaacccaacagctgcattgttctgtgttggatttttgcttctcgtggggcaatctatgtgtttttgggtactaaattactgattga

SEQ ID NO: 25446 - DNA, 600 bp, Chicken  19866894240709_2
attaactgacttgaaatgtcatggaaacaactctggtgccaataggctttgcagaatttgtctctcattttgaagtttgaattccatgaatactttttgaaagctctcaagtctttccgctgtaactcagcacttcttttccctcctcattaygtaggaagcagcctctttgggcaagacttcatttcttcaagtttaacatattagatgcaaaaccaccagttgtcattaggagcgtttgcaatgatggtgaaacaaaacatgggaaggaaatgaggttgtgggggaaacatcgaatgmtttcaccacgagccccttatgtcgctaggatggagtcgatgggaactgatttgcaactctgtaaacagaacccaacagctgcattgttctgtgttggatttttgcttctcgtggggcaatctatgtgtttttgggtactaaattactgattgaaatgccgtttgaatgatcagtgctaagactttgtttgctccaaaattactatcccctgaaatgcaagccaagatacgtgaattcaaattgctgcctgcctctgagatgttgttattttcaggtagggaggctcaggagatgttcatt

SEQ ID NO: 25447 - DNA, 600 bp, Chicken  19866894240711_1
acaggactgccctactaaggaacaaagttatcttcagacgtctttatcaaatgaaacattctaagaatctgttttaattaaaagcattacttttatcttttaccaaatgcagtcttctatttggcacagctttaataacaaatggcaggtatttaaacaagtgggattttagctatggaagaaggacagtatctatccatttgttttgtttagagtcgattcacaccttgactgatgtctatgggtcttgcacagatgtagcaagggaactgcatgttttgttttgtgttgtttgttctytcctacacaatcatgccctggtatcatattgtaccagcagaaacctgcttgcacaaasccactctcccccctgtctagtaggtagagcaaggctggatgcaatccagcagtgataaacagctgcagaaatgccccttctcatatggcacaaatcacatgtgcagcgctaatgagttccttttaattggtccatctttttctcccccacctttctcctcctcactggtaagtatgtcctgccaggcacaattgggcactccaatatcttgattcaccatctttgtgctgtgtatgcaaaac

SEQ ID NO: 25448 - DNA, 600 bp, Chicken  19866894240711_2
ttctaagaatctgttttaattaaaagcattacttttatcttttaccaaatgcagtcttctatttggcacagctttaataacaaatggcaggtatttaaacaagtgggattttagctatggaagaaggacagtatctatccatttgttttgtttagagtcgattcacaccttgactgatgtctatgggtcttgcacagatgtagcaagggaactgcatgttttgttttgtgttgtttgttctytcctacacaatcatgccctggtatcatattgtaccagcagaaacctgcttgcacaaasccactctcccccctgtctagtaggtagagcaaggctggatgcaatccagcagtgataaacagctgcagaaatgccccttctcatatggcacaaatcacatgtgcagcgctaatgagttccttttaattggtccatctttttctcccccacctttctcctcctcactggtaagtatgtcctgccaggcacaattgggcactccaatatcttgattcaccatctttgtgctgtgtatgcaaaactgtcctgagttccactactgaagaaagatgcaaggtttatttcacaggttactagcac

SEQ ID NO: 25449 - DNA, 600 bp, Chicken  19866894240711_3
ttttttgcaaagtattaaaaagagtcactggtcttataaatgtaagttacctttcattctaaatacctgtatttgttaagcaatccataatataacagttttcttctgcagttgaagatcacagcttctctgccactagttgcttcacttgacatgaatataatcctgctatcagctgcctattgacttcaaatatttgatttctctcctcctctcctacttaaaaagattaaaggcttaaatgttctgctatactgtatcatactatatgttcagaggaaagattaattttggctgccygcagcattccaagccctatttaaataatattaactaaagcccgacttgtataaatgcttaaattagcagatgtaaagctttgactaacaaagtcctttaaggccccagacctgccataatccagggagatstactgtttcttggtggagtcctggcagggcttagtggtgcattcacaggatctattcatactcactgcatctcacgtaggaagaggtctacacaacttacacaactctcccaaccacgttgctaaaaaatctcctgcacagaactcagtcaaagccagttttctgcttt

SEQ ID NO: 25450 - DNA, 600 bp, Chicken  19866894240711_4
gccactagttgcttcacttgacatgaatataatcctgctatcagctgcctattgacttcaaatatttgatttctctcctcctctcctacttaaaaagattaaaggcttaaatgttctgctatactgtatcatactatatgttcagaggaaagattaattttggctgccygcagcattccaagccctatttaaataatattaactaaagcccgacttgtataaatgcttaaattagcagatgtaaagctttgactaacaaagtcctttaaggccccagacctgccataatccagggagatstactgtttcttggtggagtcctggcagggcttagtggtgcattcacaggatctattcatactcactgcatctcacgtaggaagaggtctacacaacttacacaactctcccaaccacgttgctaaaaaatctcctgcacagaactcagtcaaagccagttttctgcttttcatttgcttggttacccacaaaaagacagttgcaagcaagcgctttcatttctgctkcattttgtttctttcactgtcagagcctttgtgaaggttttcagtgtatggtgtgctatcaagccatggaaac

SEQ ID NO: 25451 - DNA, 392 bp, Chicken  19866894240711_5
taaattagcagatgtaaagctttgactaacaaagtcctttaaggccccagacctgccataatccagggagatstactgtttcttggtggagtcctggcagggcttagtggtgcattcacaggatctattcatactcactgcatctcacgtaggaagaggtctacacaacttacacaactctcccaaccacgttgctaaaaaatctcctgcacagaactcagtcaaagccagttttctgcttttcatttgcttggttacccacaaaaagacagttgcaagcaagcgctttcatttctgctkcattttgtttctttcactgtcagagcctttgtgaaggttttcagtgtatggtgtgctatcaagccatggaaacacatgggtgagatgagcag

SEQ ID NO: 25452 - DNA, 599 bp, Chicken  19866894240712_1
  misc_feature (1)..(25): n is any nucleotide
nnnnnnnnnnnnnnnnnnnnnnnnncagcttttatgtgcccctgtgatgtttccctagttgtttaccagcaagggagttgattttttatgaacttcaaaaaagtatggatatttttaggttgtttaactcttccttaataatccagtggtttggaggtcctgtcctcttttagctggaagcgtgctgccagcagcctagttaaaatcaacatttagatagagctcttactattagtgtgtatgaaaataatttacttcactgttttttgttattcttagatattgagaatggtaacaaayctaatcccaaggaacttatttacagtttatatcataaaatatctaggaatataacaaaatattaagatgaaccaaaygattttcaaggaggattccaggagatttttttaaaacttttgaagttctaacagaatttgagagaagtatcagaaaaataatactttctataagatgtaatttattccttcctatattcaattagtaaactatttaggtttggcttcaaattaaggaatgctacagaagagtagatatcactatagcttctagaagagctgtggtgaagggaactcaaaaat

SEQ ID NO: 25453 - DNA, 600 bp, Chicken  19866894240712_2
ttgattttttatgaacttcaaaaaagtatggatatttttaggttgtttaactcttccttaataatccagtggtttggaggtcctgtcctcttttagctggaagcgtgctgccagcagcctagttaaaatcaacatttagatagagctcttactattagtgtgtatgaaaataatttacttcactgttttttgttattcttagatattgagaatggtaacaaayctaatcccaaggaacttatttacagtttatatcataaaatatctaggaatataacaaaatattaagatgaaccaaaygattttcaaggaggattccaggagatttttttaaaacttttgaagttctaacagaatttgagagaagtatcagaaaaataatactttctataagatgtaatttattccttcctatattcaattagtaaactatttaggtttggcttcaaattaaggaatgctacagaagagtagatatcactatagcttctagaagagctgtggtgaagggaactcaaaaatagttaacagtagtgttataacctgtctgaaacatgtactaaccatcttctaaaagcagataataatattaggaattga

SEQ ID NO: 25454 - DNA, 600 bp, Chicken  19866894240712_3
gagatttttttaaaacttttgaagttctaacagaatttgagagaagtatcagaaaaataatactttctataagatgtaatttattccttcctatattcaattagtaaactatttaggtttggcttcaaattaaggaatgctacagaagagtagatatcactatagcttctagaagagctgtggtgaagggaactcaaaaatagttaacagtagtgttataacctgtctgaaacatgtactaaccatcttctaaaagcagataataatattaggaattgatactggaaatagctgcacatyaaaaaaaaaaattgaaaacaaacataatggaatggaaagtacaacaatgacaacagagcagtaagatcccaggctacagagaatgaggatttactcaaacacaacagccaggggcatagagaaatgtgaaagatgctacttacattcagaaggccttaggtatacaaagatctgaagaaggatacccccctgtctcctgccaacccttaaatgtctgggttgtgtggatcctgccttccctccttatgaccactcagctgcactgcatacacctaagctcccttgggttggccctgcctt

SEQ ID NO: 25455 - DNA, 600 bp, Chicken  19866894240712_4; identical to SEQ ID NO: 25454

SEQ ID NO: 25456 - DNA, 600 bp, Chicken  19866894240714_1
ttccttagcaaacaattcgtcttatccacaccattaatgaaaaaaatcattggcccaagacagatattgcacacctcaatggacaagctctgccagaccaagaacaagctattgcccgcatgccacttcctgagcacagctttccatcagcgtgggtccccgtgtcaggatcgtttcatttaggctggatgtccctgccttatctggaagccaccaacagccatactgaagtgatcacttcaacttctcccttatgcacaaaagcctttgcaatctcatagagataaaatgtgtcaaatwaaattcacgttgcctgttacttacaactttattacgttccagacacttgattatttgcgctagggattcttcctgagattgcagataaattggaagcttctagacctattttctctctggcttttttccycctccaccaaagagctggtatcgctgccttcctgtttccaaccacaccactcatccttcctacacgccataaccaaagtacaaatggtttgcaggctgcctgtcagctaagtcacctagaacaacctacactgcatccagcttactggaaaacaaccaattacaagtgct

SEQ ID NO: 25457 - DNA, 600 bp, Chicken  19866894240714_2
tgagcacagctttccatcagcgtgggtccccgtgtcaggatcgtttcatttaggctggatgtccctgccttatctggaagccaccaacagccatactgaagtgatcacttcaacttctcccttatgcacaaaagcctttgcaatctcatagagataaaatgtgtcaaatwaaattcacgttgcctgttacttacaactttattacgttccagacacttgattatttgcgctagggattcttcctgagattgcagataaattggaagcttctagacctattttctctctggcttttttccycctccaccaaagagctggtatcgctgccttcctgtttccaaccacaccactcatccttcctacacgccataaccaaagtacaaatggtttgcaggctgcctgtcagctaagtcacctagaacaacctacactgcatccagcttactggaaaacaaccaattacaagtgctctttggcttgtcctttccttgtttgatttcactcctgaattcttaccatactgcctcacgtattaagtctgatgagaaaggctacacaattaaatttgttaatgaagattttgctgcacctacaccacta

SEQ ID NO: 25458 - DNA, 600 bp, Chicken  19866894240715_1
tctcgaggaaactgagggacggagcagtagggtgggctggtgtttcatctgcatgtacctcgtcacgttgtgagagactttctgctggaggcatggctacatgtactgatgtagccagtgctcgtgcgcatccccctccagagctgtcctgaaaaagccagaacagtttcaccataaacaagccttaaccagttgtagtgcagtacctctgtagaaaggaagtgtcagcagtgtatccataaggtcactggatcatttgagttggaggagacccttaaagggaatctggtccaactcctrtgcaatgaacacgggcatcaacagctgtggagcagtggcagggctctgagtgaagtgaacctcagtatcctcatctacaacccgagagtaagacaaacgtgagccgttgtgctcaaaacttggttgtgaaggctggctggtgcctgagctgatacagtaatgacttggctgctctcagagatgataatccgggtgtcaaacccgtgaatgttttggttcaattccagtccaagttcagaaaagctttggagaggacaactgatgcctcaaacaaccattctgttggggttcttagatccc

SEQ ID NO: 25459 - DNA, 600 bp, Chicken  19866894240729_1
agaagcagtttataccaaaaaagtccaaactgtatccatttctgacattcttctgcagattttgagtaggacttactactctgtagctgtctgatgttaattcaggagttgcataaaccagcataagctaaaaacagagctactgttctttccagaaaagatgaagaaaccagccatttcccaaaaaatcaaacctacatttgaactcctttctgctagggacaatgtggaggagcaactgccctgtggtaaagtatggtgcagatgtggtgattatgggacaactttacaataagagaragggcatttgttagatwaagtcagtgaaaatgacctctgaatcttctttcaagagctgaagtgatggcagttccctgtcctggctgtggggcaatcattcaccctagcttcactgctgacacagcatcagcaggtgtgctagccatgctgcctttgggcaacagctgagcaatatcagtacagcttcttgctgcttgagagtgctgtaagagtactgaaaggaatgttccctgacagcctcatctcaggaaggctgagagatatagtacttatttctatgataaattcaactgcatgcat

SEQ ID NO: 25460 - DNA, 600 bp, Chicken  19866894240729_2
aaaaagtccaaactgtatccatttctgacattcttctgcagattttgagtaggacttactactctgtagctgtctgatgttaattcaggagttgcataaaccagcataagctaaaaacagagctactgttctttccagaaaagatgaagaaaccagccatttcccaaaaaatcaaacctacatttgaactcctttctgctagggacaatgtggaggagcaactgccctgtggtaaagtatggtgcagatgtggtgattatgggacaactttacaataagagaragggcatttgttagatwaagtcagtgaaaatgacctctgaatcttctttcaagagctgaagtgatggcagttccctgtcctggctgtggggcaatcattcaccctagcttcactgctgacacagcatcagcaggtgtgctagccatgctgcctttgggcaacagctgagcaatatcagtacagcttcttgctgcttgagagtgctgtaagagtactgaaaggaatgttccctgacagcctcatctcaggaaggctgagagatatagtacttatttctatgataaattcaactgcatgcatcaactgtaaatttgaga

SEQ ID NO: 25461 - DNA, 600 bp, Chicken  19866894240737_1
gtgtcctttggggcctgtgcagcacattgaagctattcccttatctaatcatggctcaggtgagtgctattagggttatacattaacagcagtaacgatgccctctccccaagctttgggccctgccttgatcccaacgctggaatccttccttctggccccatggatggctcagtttggctgcttgagatgttccttttgtctttggaggacaagaaggaggaagtttgaacatgtgctggggctggaaggtgctggcagcagggggacccttgtcccattcatgctcccacccatggmccctccaacagccgtgggccrtgccagagagctggcacagccccaaccccagactgccccrtcccactgctcctcgagatccctgcaggcattggggtcttccccacaggtccccacgaggagccatgacggctcatcccaaatttcctctttcctttcccagagccataaaagggccaccgagggcgagcgaagtgtaacccagcattgatattcaaggtggccgcattattcattgtcaatagcatttcttgcaagtccctttcttctccctgtgaatctctcacaatgcattcctga

SEQ ID NO: 25462 - DNA, 600 bp, Chicken  19866894240737_2
gcacattgaagctattcccttatctaatcatggctcaggtgagtgctattagggttatacattaacagcagtaacgatgccctctccccaagctttgggccctgccttgatcccaacgctggaatccttccttctggccccatggatggctcagtttggctgcttgagatgttccttttgtctttggaggacaagaaggaggaagtttgaacatgtgctggggctggaaggtgctggcagcagggggacccttgtcccattcatgctcccacccatggmccctccaacagccgtgggccrtgccagagagctggcacagccccaaccccagactgccccrtcccactgctcctcgagatccctgcaggcattggggtcttccccacaggtccccacgaggagccatgacggctcatcccaaatttcctctttcctttcccagagccataaaagggccaccgagggcgagcgaagtgtaacccagcattgatattcaaggtggccgcattattcattgtcaatagcatttcttgcaagtccctttcttctccctgtgaatctctcacaatgcattcctgaattcagcaaacatcactgaaa

SEQ ID NO: 25463 - DNA, 600 bp, Chicken  19866894240737_3
gagtgctattagggttatacattaacagcagtaacgatgccctctccccaagctttgggccctgccttgatcccaacgctggaatccttccttctggccccatggatggctcagtttggctgcttgagatgttccttttgtctttggaggacaagaaggaggaagtttgaacatgtgctggggctggaaggtgctggcagcagggggacccttgtcccattcatgctcccacccatggmccctccaacagccgtgggccrtgccagagagctggcacagccccaaccccagactgccccrtcccactgctcctcgagatccctgcaggcattggggtcttccccacaggtccccacgaggagccatgacggctcatcccaaatttcctctttcctttcccagagccataaaagggccaccgagggcgagcgaagtgtaacccagcattgatattcaaggtggccgcattattcattgtcaatagcatttcttgcaagtccctttcttctccctgtgaatctctcacaatgcattcctgaattcagcaaacatcactgaaaactgccgttagccaaggcgaggaaatctccatctctgggt

SEQ ID NO: 25464 - DNA, 599 bp, Chicken  19866894240740_1
  misc_feature (1)..(140): n is any nucleotide
nnnnnnnnnnnnnnnnnnnnnnnnnnnnnnnnnnnnnnnnnnnnnnnnnnnnnnnnnnnnnnnnnnnnnnnnnnnnnnnnnnnnnnnnnnnnnnnnnnnnnnnnnnnnnnnnnnnnnnnnnnnnnnnnnnnnnnnnnnnnttgaatgcttccaggcagaggacacccaaagtctcactgggcaaccagttcagtgtctcacctcccttacagcaaagaatttcttcctaacatctagtctaagtgttgtattcagttattttgaggattgctacagaagcgattgcaaacaaaactaccrtttcatagtagctgatacagtgctgccagcactggtgattttatcacgggaattgtaacacttgatgtcttgtcttctaaagctttaaatgctcaatttcatgatgtactttgatgtggaaaaagaagtactttggggtctatgaaaaaaggcagatgtgagcaaagccctcagtcttagaaactagaagttcaataagaaaacacacctgaaagcacacctgttgagagtactttgtgaaaggaatctcatgatagaatcatttgagttgggtgggatctttaaggtccatctggtcc

SEQ ID NO: 25465 - DNA, 600 bp, Chicken  19866894240740_2
agtgctgccagcactggtgattttatcacgggaattgtaacacttgatgtcttgtcttctaaagctttaaatgctcaatttcatgatgtactttgatgtggaaaaagaagtactttggggtctatgaaaaaaggcagatgtgagcaaagccctcagtcttagaaactagaagttcaataagaaaacacacctgaaagcacacctgttgagagtactttgtgaaaggaatctcatgatagaatcatttgagttgggtgggatctttaaggtccatctggtcccaactcccctgtcgtgagycgggacgcccgcggctccgtcaggttgctcagagtgctgatttgcacatcgtggggatgagacgcttatcttacccttctccctcctcagggcttggcgcagctctgcgtgaccatcgaagagtgctgggaccacgacgcagaggctcggctctcggcaggctgtgtcgaggagcgcattgctcagatccgcaaatccgtaaacggcactacctcggactgccttgtctccatcgtgacgtccgtcaccaacgtggacttgccgcccaaagagtccagtatctaagtcctggtttgcttt

SEQ ID NO: 25466 - DNA, 600 bp, Chicken  19866894240740_3
agggcttggcgcagctctgcgtgaccatcgaagagtgctgggaccacgacgcagaggctcggctctcggcaggctgtgtcgaggagcgcattgctcagatccgcaaatccgtaaacggcactacctcggactgccttgtctccatcgtgacgtccgtcaccaacgtggacttgccgcccaaagagtccagtatctaagtcctggtttgcttttgtctttccagactcagtggatttgaaaaaagaaaaagaagaagtttaaaaaaaaaaaaaaaaaaagaggaaacacacgagaaaaaayaaaaaaaaaacaaacacaaaaatccaacaaacacatgactgcagctgctattttatcttgactttttattattattgttattattattattattattatttttggattggatcaattttaccagcacattgctctactgtattaacaaatggacatttcagcaagcattcaggtgccgactaatgaatgcagaaaaggtgcaggtacctcagaacctcaacaaactcacttcagttgttttgttgttgttgttgttttttaaattgagttttctgggtttctctttatcagtctgtcttc

SEQ ID NO: 25467 - DNA, 599 bp, Chicken  19866894240746_1
  misc_feature (1)..(44): n is any nucleotide
nnnnnnnnnnnnnnnnnnnnnnnnnnnnnnnnnnnnnnnnnnnntgtatttgcggtagaaaggcgttattttccggtgagaagtggtattttcgagaagaaaatgtgggaattttcaagggaaaagtggtattttccgtgtggaaatgcgtgcttttcgagagaaaggtggtatttttggacagaaaatgcgtgattttggggtgaaagccggtattttcgtggaggaaacgcgtgatttctatttaaaaagttgcatttttggagggaaaaagcgtgattttggggtgaaatgcggtakttttgaaytgaacatacatgattctcgtgcgaaaaatggtatttttatggtaaaaatgcgtgttttgggggtaamattttctaagagaaaatgcttgctttttgggcgaaaagtgacgttttygaggtgtraatgcgtgatttccgggcaaaatattggtatttttgggtagaaaacgcgtgattttcaggcaaaagcgtttttttcgaagagaattctcgcagggggagcaccgcgtatgcgtggatttgcgatcgcactgcgcatgcgcggacctgcgctcagggtattttcgagga

SEQ ID NO: 25468 - DNA, 599 bp, Chicken  19866894240746_2
  misc_feature (1)..(36): n is any nucleotide
nnnnnnnnnnnnnnnnnnnnnnnnnnnnnnnnnnnntgtatttgcggtagaaaggcgttattttccggtgagaagtggtattttcgagaagaaaatgtgggaattttcaagggaaaagtggtattttccgtgtggaaatgcgtgcttttcgagagaaaggtggtatttttggacagaaaatgcgtgattttggggtgaaagccggtattttcgtggaggaaacgcgtgatttctatttaaaaagttgcatttttggagggaaaaagcgtgattttggggtgaaatgcggtakttttgaaytgaacatacatgattctcgtgcgaaaaatggtatttttatggtaaaaatgcgtgttttgggggtaamattttctaagagaaaatgcttgctttttgggcgaaaagtgacgttttygaggtgtraatgcgtgatttccgggcaaaatattggtatttttgggtagaaaacgcgtgattttcaggcaaaagcgtttttttcgaagagaattctcgcagggggagcaccgcgtatgcgtggatttgcgatcgcactgcgcatgcgcggacctgcgctcagggtattttcgaggagacagtgc

SEQ ID NO: 25469 - DNA, 600 bp, Chicken  19866894240746_3
gtgagaagtggtattttcgagaagaaaatgtgggaattttcaagggaaaagtggtattttccgtgtggaaatgcgtgcttttcgagagaaaggtggtatttttggacagaaaatgcgtgattttggggtgaaagccggtattttcgtggaggaaacgcgtgatttctatttaaaaagttgcatttttggagggaaaaagcgtgattttggggtgaaatgcggtakttttgaaytgaacatacatgattctcgtgcgaaaaatggtatttttatggtaaaaatgcgtgttttgggggtaamattttctaagagaaaatgcttgctttttgggcgaaaagtgacgttttygaggtgtraatgcgtgatttccgggcaaaatattggtatttttgggtagaaaacgcgtgattttcaggcaaaagcgtttttttcgaagagaattctcgcagggggagcaccgcgtatgcgtggatttgcgatcgcactgcgcatgcgcggacctgcgctcagggtattttcgaggagacagtgcgagattttctggggaaatggggtattttcgaagtgaacatgcgtgattctcaggcgaaagatggtatt

SEQ ID NO: 25470 - DNA, 600 bp, Chicken  19866894240746_4
aagtggtattttccgtgtggaaatgcgtgcttttcgagagaaaggtggtatttttggacagaaaatgcgtgattttggggtgaaagccggtattttcgtggaggaaacgcgtgatttctatttaaaaagttgcatttttggagggaaaaagcgtgattttggggtgaaatgcggtakttttgaaytgaacatacatgattctcgtgcgaaaaatggtatttttatggtaaaaatgcgtgttttgggggtaamattttctaagagaaaatgcttgctttttgggcgaaaagtgacgttttygaggtgtraatgcgtgatttccgggcaaaatattggtatttttgggtagaaaacgcgtgattttcaggcaaaagcgtttttttcgaagagaattctcgcagggggagcaccgcgtatgcgtggatttgcgatcgcactgcgcatgcgcggacctgcgctcagggtattttcgaggagacagtgcgagattttctggggaaatggggtattttcgaagtgaacatgcgtgattctcaggcgaaagatggtattttcaaggagaaaacacgtgtttttcggttgaagagggtgattttcccg

SEQ ID NO: 25471 - DNA, 600 bp, Chicken  19866894240746_5
ttttccgtgtggaaatgcgtgcttttcgagagaaaggtggtatttttggacagaaaatgcgtgattttggggtgaaagccggtattttcgtggaggaaacgcgtgatttctatttaaaaagttgcatttttggagggaaaaagcgtgattttggggtgaaatgcggtakttttgaaytgaacatacatgattctcgtgcgaaaaatggtatttttatggtaaaaatgcgtgttttgggggtaamattttctaagagaaaatgcttgctttttgggcgaaaagtgacgttttygaggtgtraatgcgtgatttccgggcaaaatattggtatttttgggtagaaaacgcgtgattttcaggcaaaagcgtttttttcgaagagaattctcgcagggggagcaccgcgtatgcgtggatttgcgatcgcactgcgcatgcgcggacctgcgctcagggtattttcgaggagacagtgcgagattttctggggaaatggggtattttcgaagtgaacatgcgtgattctcaggcgaaagatggtattttcaaggagaaaacacgtgtttttcggttgaagagggtgattttcccgaaggaaat

SEQ ID NO: 25472 - DNA, 508 bp, Chicken  19866894240746_6
ggcaaaagcgtttttttcgaagagaattctcgcagggggagcaccgcgtatgcgtggatttgcgatcgcactgcgcatgcgcggacctgcgctcagggtattttcgaggagacagtgcgagattttctggggaaatggggtattttcgaagtgaacatgcgtgattctcaggcgaaagatggtattttcaaggagaaaacacgtgtttttcggttgaagagggtgattttcccgaaggaaatgcttttcgcgcgaaaagtggcatttgtggggtgtaaatgcgggattttcaggagaaargtggtattttcgggtacaagatgcgtgacttgtggacagaggtgctttatttctgggggaaaatgcgtgattttcgggcgaaaacttgtgttttcggcgggacagtgcgtgattttcgttagaaaagtggtattttccggtagacaatgcgtgatattcgtgtgaagcggggttccttcacgcggaaaacgcggaatttttgggtgaa

SEQ ID NO: 25473 - DNA, 583 bp, Chicken  19866894240749_1
gtgaacatgcgtgattctcaggcgaaagatggtattttcaaggagaaaacacgtgtttttcggttgaagagggtgattttcccgaaggaaatgcttttcgcgcgaaaagtggcatttgtggggtgtaaatgcgggattttcaggagaaaagtggtattttcgggtacaagatgcgtgacttgtggacagaggtgctttttttctgggggaaaatgcgtgattttcgggcgaaaacttgtgttttcggcgggacagtgcgtgattttcgttagaaaagtggtattttccggtagacaatgygtgatattcgtgtgaagyggggttccttcacgcggaaaacgyggaatttttgggtgaaaggtggtatgttcagggagaaaatgtgcgattttcctttgaaacgtacaattttcgwgaaaaaaatgcgtggttcttgggagaaatggggttgcttcgcgcagaaaatgcgtgattttcgggggaaaggtggtattttcrgggagaaaatgagtgattttcctttgaaaggtggtattttcgggaagaaaatgcgtattttggggtaaaggcggtattttcgggg

SEQ ID NO: 25474 - DNA, 565 bp, Chicken  19866894240749_2
caggcgaaagatggtattttcaaggagaaaacacgtgtttttcggttgaagagggtgattttcccgaaggaaatgcttttcgcgcgaaaagtggcatttgtggggtgtaaatgcgggattttcaggagaaaagtggtattttcgggtacaagatgcgtgacttgtggacagaggtgctttttttctgggggaaaatgcgtgattttcgggcgaaaacttgtgttttcggcgggacagtgcgtgattttcgttagaaaagtggtattttccggtagacaatgygtgatattcgtgtgaagyggggttccttcacgcggaaaacgyggaatttttgggtgaaaggtggtatgttcagggagaaaatgtgcgattttcctttgaaacgtacaattttcgwgaaaaaaatgcgtggttcttgggagaaatggggttgcttcgcgcagaaaatgcgtgattttcgggggaaaggtggtattttcrgggagaaaatgagtgattttcctttgaaaggtggtattttcgggaagaaaatgcgtattttggggtaaaggcggtattttcgggg

SEQ ID NO: 25475 - DNA, 541 bp, Chicken  19866894240749_3
gagaaaacacgtgtttttcggttgaagagggtgattttcccgaaggaaatgcttttcgcgcgaaaagtggcatttgtggggtgtaaatgcgggattttcaggagaaaagtggtattttcgggtacaagatgcgtgacttgtggacagaggtgctttttttctgggggaaaatgcgtgattttcgggcgaaaacttgtgttttcggcgggacagtgcgtgattttcgttagaaaagtggtattttccggtagacaatgygtgatattcgtgtgaagyggggttccttcacgcggaaaacgyggaatttttgggtgaaaggtggtatgttcagggagaaaatgtgcgattttcctttgaaacgtacaattttcgwgaaaaaaatgcgtggttcttgggagaaatggggttgcttcgcgcagaaaatgcgtgattttcgggggaaaggtggtattttcrgggagaaaatgagtgattttcctttgaaaggtggtattttcgggaagaaaatgcgtattttggggtaaaggcggtattttcgggg

SEQ ID NO: 25476 - DNA, 468 bp, Chicken  19866894240749_4
ttgtggggtgtaaatgcgggattttcaggagaaaagtggtattttcgggtacaagatgcgtgacttgtggacagaggtgctttttttctgggggaaaatgcgtgattttcgggcgaaaacttgtgttttcggcgggacagtgcgtgattttcgttagaaaagtggtattttccggtagacaatgygtgatattcgtgtgaagyggggttccttcacgcggaaaacgyggaatttttgggtgaaaggtggtatgttcagggagaaaatgtgcgattttcctttgaaacgtacaattttcgwgaaaaaaatgcgtggttcttgggagaaatggggttgcttcgcgcagaaaatgcgtgattttcgggggaaaggtggtattttcrgggagaaaatgagtgattttcctttgaaaggtggtattttcgggaagaaaatgcgtattttggggtaaaggcggtattttcgggg

SEQ ID NO: 25477 - DNA, 385 bp, Chicken  19866894240749_5
ttttctgggggaaaatgcgtgattttcgggcgaaaacttgtgttttcggcgggacagtgcgtgattttcgttagaaaagtggtattttccggtagacaatgygtgatattcgtgtgaagyggggttccttcacgcggaaaacgyggaatttttgggtgaaaggtggtatgttcagggagaaaatgtgcgattttcctttgaaacgtacaattttcgwgaaaaaaatgcgtggttcttgggagaaatggggttgcttcgcgcagaaaatgcgtgattttcgggggaaaggtggtattttcrgggagaaaatgagtgattttcctttgaaaggtggtattttcgggaagaaaatgcgtattttggggtaaaggcggtattttcgggg

SEQ ID NO: 25478 - DNA, 600 bp, Chicken  19866894240753_1
ttttccggtagacaatgcgtgatattcgtgtgaagtggggttccttcacgcggaaaacgcggaatttttgggtgaaaggtggtatgttcagggagaaaatgtgcggttttcctttgaaacgtagaattttcgtgaaaaaaatgcgtggttcttgggagaaatggggttgcttcgcgcagaaaatgcgtgattttcgggggaaaggtggtattttcggggagaaaatgagtgattttcctttgaaaggtggtattttcgggaagaaaatgcgtgattttggggtgaaaggcggtattttckgggtgaaaatgcgtcattttggggtgaaacgtggtgtatttgcggtagaaaggcgttattttccggtgagaagtgrtattttcgagaagaaaatgtgggaattttcaagggaaaagtggtattttccgtgtggaaatgcgtgctttttgagagaaagcyggtatttttggagagaaaatgcrtgattttggggtgaaaggcggtatttttgaattgaacatacatgattctcgtgcgaaaaatggtatttttatggtaaaaatgcgtgttttgggggtaaaattttctaagagaaaatgc

SEQ ID NO: 25479 - DNA, 600 bp, Chicken  19866894240753_2
aggtggtatgttcagggagaaaatgtgcggttttcctttgaaacgtagaattttcgtgaaaaaaatgcgtggttcttgggagaaatggggttgcttcgcgcagaaaatgcgtgattttcgggggaaaggtggtattttcggggagaaaatgagtgattttcctttgaaaggtggtattttcgggaagaaaatgcgtgattttggggtgaaaggcggtattttckgggtgaaaatgcgtcattttggggtgaaacgtggtgtatttgcggtagaaaggcgttattttccggtgagaagtgrtattttcgagaagaaaatgtgggaattttcaagggaaaagtggtattttccgtgtggaaatgcgtgctttttgagagaaagcyggtatttttggagagaaaatgcrtgattttggggtgaaaggcggtatttttgaattgaacatacatgattctcgtgcgaaaaatggtatttttatggtaaaaatgcgtgttttgggggtaaaattttctaagagaaaatgcttgctttttgggcgaaaagtgtcgtttttgaggtgtaaatgcgtgatttccgggcaaaatattgttatttttgggt

SEQ ID NO: 25480 - DNA, 600 bp, Chicken  19866894240753_3
aatggggttgcttcgcgcagaaaatgcgtgattttcgggggaaaggtggtattttcggggagaaaatgagtgattttcctttgaaaggtggtattttcgggaagaaaatgcgtgattttggggtgaaaggcggtattttckgggtgaaaatgcgtcattttggggtgaaacgtggtgtatttgcggtagaaaggcgttattttccggtgagaagtgrtattttcgagaagaaaatgtgggaattttcaagggaaaagtggtattttccgtgtggaaatgcgtgctttttgagagaaagcyggtatttttggagagaaaatgcrtgattttggggtgaaaggcggtatttttgaattgaacatacatgattctcgtgcgaaaaatggtatttttatggtaaaaatgcgtgttttgggggtaaaattttctaagagaaaatgcttgctttttgggcgaaaagtgtcgtttttgaggtgtaaatgcgtgatttccgggcaaaatattgttatttttgggtagaaaacgcgtgattttcaggcaaaagcgtttttttcgaagagaattctcgcagggggagccccgcgtatgcgtggatttgcg

SEQ ID NO: 25481 - DNA, 600 bp, Chicken  19866894240753_4
atgcgtgattttcgggggaaaggtggtattttcggggagaaaatgagtgattttcctttgaaaggtggtattttcgggaagaaaatgcgtgattttggggtgaaaggcggtattttckgggtgaaaatgcgtcattttggggtgaaacgtggtgtatttgcggtagaaaggcgttattttccggtgagaagtgrtattttcgagaagaaaatgtgggaattttcaagggaaaagtggtattttccgtgtggaaatgcgtgctttttgagagaaagcyggtatttttggagagaaaatgcrtgattttggggtgaaaggcggtatttttgaattgaacatacatgattctcgtgcgaaaaatggtatttttatggtaaaaatgcgtgttttgggggtaaaattttctaagagaaaatgcttgctttttgggcgaaaagtgtcgtttttgaggtgtaaatgcgtgatttccgggcaaaatattgttatttttgggtagaaaacgcgtgattttcaggcaaaagcgtttttttcgaagagaattctcgcagggggagccccgcgtatgcgtggatttgcgatcgcactgcgcatgcgcgcacc

SEQ ID NO: 25482 - DNA, 600 bp, Chicken  19866894240761_1
gttcacaagtttctaataagcaggttactgctgtctttgacagttttgtcatgaaataattgcatggagttactaaaagggcagtgtgttaaaagtatttattccacttgtggtgaagtaataggcacaactgaaactctgccttatctgctgatgaagtactaattatttgactaggtctgaaagccacattggtgttttggagtgggatggtctgaaggatacagaagtgggcagtggaggagatgctccagttcctgacatgctacacgtgtcttggggaatagaggtgtaaaattrttttaaggagaattcattcagcatatagccaatgtctaatttagttgctggaggtacagagagagatgctgaagtccagcacaggtgctkctctgtgtggctatgtctctgcactggtgttaacttgrtggcttggctgctagctctcgttgcctctccttcttacctttgtggtcctgtctgtaggtctgtctgtctcctttccttgggggcatgcaggtgcttaaggctattcagcagggttgagcaggttaaaaacaacaaaataaaatactgtttgtggccaactatttgatatga

SEQ ID NO: 25483 - DNA, 600 bp, Chicken  19866894240761_2
aaaagtatttattccacttgtggtgaagtaataggcacaactgaaactctgccttatctgctgatgaagtactaattatttgactaggtctgaaagccacattggtgttttggagtgggatggtctgaaggatacagaagtgggcagtggaggagatgctccagttcctgacatgctacacgtgtcttggggaatagaggtgtaaaattrttttaaggagaattcattcagcatatagccaatgtctaatttagttgctggaggtacagagagagatgctgaagtccagcacaggtgctkctctgtgtggctatgtctctgcactggtgttaacttgrtggcttggctgctagctctcgttgcctctccttcttacctttgtggtcctgtctgtaggtctgtctgtctcctttccttgggggcatgcaggtgcttaaggctattcagcagggttgagcaggttaaaaacaacaaaataaaatactgtttgtggccaactatttgatatgaaggtatcttgtactgtaagtatactgatcctgtgacatttacaaatgccctttcactaataaatagcccaaagtgtacmgcagaagcttt

SEQ ID NO: 25484 - DNA, 600 bp, Chicken  19866894240761_3
aactgaaactctgccttatctgctgatgaagtactaattatttgactaggtctgaaagccacattggtgttttggagtgggatggtctgaaggatacagaagtgggcagtggaggagatgctccagttcctgacatgctacacgtgtcttggggaatagaggtgtaaaattrttttaaggagaattcattcagcatatagccaatgtctaatttagttgctggaggtacagagagagatgctgaagtccagcacaggtgctkctctgtgtggctatgtctctgcactggtgttaacttgrtggcttggctgctagctctcgttgcctctccttcttacctttgtggtcctgtctgtaggtctgtctgtctcctttccttgggggcatgcaggtgcttaaggctattcagcagggttgagcaggttaaaaacaacaaaataaaatactgtttgtggccaactatttgatatgaaggtatcttgtactgtaagtatactgatcctgtgacatttacaaatgccctttcactaataaatagcccaaagtgtacmgcagaagcttttttttttgaatggaaagaattttcatgttaaatatctg

SEQ ID NO: 25485 - DNA, 600 bp, Chicken  19866894240761_4
cacaggtgctkctctgtgtggctatgtctctgcactggtgttaacttgrtggcttggctgctagctctcgttgcctctccttcttacctttgtggtcctgtctgtaggtctgtctgtctcctttccttgggggcatgcaggtgcttaaggctattcagcagggttgagcaggttaaaaacaacaaaataaaatactgtttgtggccaactatttgatatgaaggtatcttgtactgtaagtatactgatcctgtgacatttacaaatgccctttcactaataaatagcccaaagtgtacmgcagaagcttttttttttgaatggaaagaattttcatgttaaatatctgctgggattgaatttgattatgtctagaaaactgtccataggcagttaccaacagcagtgtcttggttttggtaagctatgaagaaattatagaagaacttctaaagtgttttcacttgtatggctgttcagtgcaaaatagcagagaaagcaactgcatcagtaatgaaataaatgaacttcagtagctggttgtattagtttatcagtcagctctattgagcaaaatctgatgttgaataggccataata

SEQ ID NO: 25486 - DNA, 600 bp, Chicken  19866894240761_5
ctatgaagaaattatagaagaacttctaaagtgttttcacttgtatggctgttcagtgcaaaatagcagagaaagcaactgcatcagtaatgaaataaatgaacttcagtagctggttgtattagtttatcagtcagctctattgagcaaaatctgatgttgaataggccataatagttcttgaatgccattagtgctagaattactggatttcttttgcgtggagagaagatgagcgtaagggatttaattgctaggcctgtgtgaatgaatactaatgtcagaaggatggaagaggtkctgtttgttctccttcaggctgaaaaggaggactgagttatgaagaagccgccgtttaatagccagagccttagggacggtgccagaacagtcaagagaatcagactttggggtggaggaatgctctgcagtgaggataaggcacaaagcaaatcttccagtttccatttggcaatggttgttgccacatggcctccatgaatctggtggggtagagaaggagatgaccacatgtgcaggacaagcaggcgtcgtggcatccaggtgagtgggagaggagtgatgggtggagggttgcta

SEQ ID NO: 25487 - DNA, 599 bp, Chicken  19866894240767_1
  misc_feature (1)..(255): n is any nucleotide
nnnnnnnnnnnnnnnnnnnnnnnnnnnnnnnnnnnnnnnnnnnnnnnnnnnnnnnnnnnnnnnnnnnnnnnnnnnnnnnnnnnnnnnnnnnnnnnnnnnnnnnnnnnnnnnnnnnnnnnnnnnnnnnnnnnnnnnnnnnnnnnnnnnnnnnnnnnnnnnnnnnnnnnnnnnnnnnnnnnnnnnnnnnnnnnnnnnnnnnnnnnnnnnnnnnnnnnnnnnnnnnnnnnnnnnnnnnnnnnnnnnnnnnnnnnnnnnctttgtggtttagcccttacacacaattttttctgtatctctgtraagatgcactgcttctttatggtttgctctggaaaaccctctgtgctgttcttcatgatgagcagtatcctaaagcacaaatagttttgtggtgggaatggtgctgctccagaatttggaagttagggttaatgaggatctcagatcctacctttaggtttgcacagtcccatggatgagtaagtcaaggaaagattgcatagcaatgtgctccacagatctttagtgggaaatgaagtytagatgtgctgcagcatatttattcttacagttctcaggtcaaatatacatggttgcct

SEQ ID NO: 25488 - DNA, 599 bp, Chicken  19866894240767_2
  misc_feature (1)..(15): n is any nucleotide
nnnnnnnnnnnnnnnctttgtggtttagcccttacacacaattttttctgtatctctgtraagatgcactgcttctttatggtttgctctggaaaaccctctgtgctgttcttcatgatgagcagtatcctaaagcacaaatagttttgtggtgggaatggtgctgctccagaatttggaagttagggttaatgaggatctcagatcctacctttaggtttgcacagtcccatggatgagtaagtcaaggaaagattgcatagcaatgtgctccacagatctttagtgggaaatgaagtytagatgtgctgcagcatatttattcttacagttctcaggtcaaatatacatggttgccttcttctgatgcctgggggaaattctcagttcaggctgcagcagatctgctggattagctggaaggtgatggaaaagatggtgaatagatgcatggaaagaaatgggtaaaggccactcttgttaaagaatgcacttaaccaagagtaaaccaaaagctgaacagaaagatgtaaatggctaattacaaattaattaattacaaattgtataatattcatgastcctcaggaagtaaacca

SEQ ID NO: 25489 - DNA, 600 bp, Chicken  19866894240767_3
tttagtgggaaatgaagtytagatgtgctgcagcatatttattcttacagttctcaggtcaaatatacatggttgccttcttctgatgcctgggggaaattctcagttcaggctgcagcagatctgctggattagctggaaggtgatggaaaagatggtgaatagatgcatggaaagaaatgggtaaaggccactcttgttaaagaatgcacttaaccaagagtaaaccaaaagctgaacagaaagatgtaaatggctaattacaaattaattaattacaaattgtataatattcatgastcctcaggaagtaaaccaatgcagtgctctaattttaaccctgaagtctttgccattaaccgtaaattctagtactcattaatgcaaagcaaataaacacaaaaggcactcattcattacggagaagtatatgtagttctgagaaacgcagtctatctatcttcaaagtatccgatttgaaaaggacctctttttaagatgaagaattctgaaaactcatcttttcctcctgaaagcttttctgccaccttttctgtaacgctgtgacatttttaagccgcagatctccagtgttgtttt

SEQ ID NO: 25490 - DNA, 600 bp, Chicken  19866894240773_1
ctatgctgtagccctacttctactggcagataagcttaattgggagtaacgataaacatgcatgagaagttccacgcttctctgctgaaactcagatcacccatgtgggcttctaaagagaagacggaggcagtcacaaatgacctaagctgtttctcgttaacccaaacagctccctgctgagttcagttcttttatggtcttctgtataaccagataatgtccaattaaggtggataaaataaacccttaccctgagtttagcttctagtttcaggaaaatacgggcaaagcaagaargtttattcgaattaattaactagcattagctctgtagcaccagcagcacctttttatgttttgctcctttctgcactgctgggggctgttccagctggagcagagaaggckctggggagacctgtgagtgtcctgtcagtatctaaaggggggcaccaggaaagaagagggcggactctttaagaagggtctgttgtgacaggacaaggggaaatggtttcaaactaaaagaggaggtttagactggatgtaaggaagagatttttttacagtgagggtgatgaggtactggcaaaggtt

SEQ ID NO: 25491 - DNA, 600 bp, Chicken  19866894240773_2
tctaaagagaagacggaggcagtcacaaatgacctaagctgtttctcgttaacccaaacagctccctgctgagttcagttcttttatggtcttctgtataaccagataatgtccaattaaggtggataaaataaacccttaccctgagtttagcttctagtttcaggaaaatacgggcaaagcaagaargtttattcgaattaattaactagcattagctctgtagcaccagcagcacctttttatgttttgctcctttctgcactgctgggggctgttccagctggagcagagaaggckctggggagacctgtgagtgtcctgtcagtatctaaaggggggcaccaggaaagaagagggcggactctttaagaagggtctgttgtgacaggacaaggggaaatggtttcaaactaaaagaggaggtttagactggatgtaaggaagagatttttttacagtgagggtgatgaggtactggcaaaggttacccagagaggtgatggaagccctttccctggagaaattcagggtcaggctgggggagctctgagtactgcatctcactgtgagtatccctgtccattgcggggcagttgg

SEQ ID NO: 25492 - DNA, 590 bp, Chicken  19866894240790_1
aaaatagcaacttttttgtttctgcaagcacagattagataggaactctgtctttcagtaatacgcattggccacctggcaacaataattctaaaaacaagtggacgttccagtcttaataaaacaaaacgtgcaaaaccgttcttacaaagttttcacagtattcatatttatgtggcaaaactacttcaagaaacaatgcctattattctgcagtcctcatctaatatgagttctgatacagaatatcaccggtacacctaaattaccaagagacttcaaaagacttattgaaccccrgcacacatagagacctccatgccctaagcttttctctttccccctttcaataaattttatacttggcataaggtacagtccaccttatactattttcaaatttcctcttaaccacagatataattctagaaatataatttttttcccctcaaaatcttacatgtttttaggagtacgtttcaaataactcttgtaactaagtaaacactttcgcttttcttggccatgatgaagaacaatgggtgaacattaaggaaaaaacaaagattttcttagtaatacaacctcag

SEQ ID NO: 25493 - DNA, 600 bp, Chicken  19866894240791_1
tatcttgacctgatctcaacagaggaaagcagcagctgctctgccaagggagagcaatgagtctggcttcctgagttgctctttgtggccttcaggtaaaacaattcatccttatgtaaagtgggaagaaaggtgctgcagagtgaaagagcaccatttgctgagccataagagccagagggactgcacagagtctgcgcctgagatcacacagcaccctgaggcagagttctcccaaaatgcagtatatgaggggaccagtgtgagttttcaatgcctgcagctgctcatgtcaataaratagaggataatacttaccatgtggtatctccagagctagtcacaatactgttgtcrtcaagaaaccggcagcaggagaggtaacctggggagcaggaaccagtgagtatgagagacagagcagggttagaagagtgagatttggaagcagagacacccaggccactggtaggcagaacacccacctgtatgagctgagagttccctgctcactttgacgttgccttcacgcgtcttgaggttgtagatggagcacatgttgtcaaggcccccacaggccacaaaattgcctgagggtgc

SEQ ID NO: 25494 - DNA, 600 bp, Chicken  19866894240791_2
tgagtctggcttcctgagttgctctttgtggccttcaggtaaaacaattcatccttatgtaaagtgggaagaaaggtgctgcagagtgaaagagcaccatttgctgagccataagagccagagggactgcacagagtctgcgcctgagatcacacagcaccctgaggcagagttctcccaaaatgcagtatatgaggggaccagtgtgagttttcaatgcctgcagctgctcatgtcaataaratagaggataatacttaccatgtggtatctccagagctagtcacaatactgttgtcrtcaagaaaccggcagcaggagaggtaacctggggagcaggaaccagtgagtatgagagacagagcagggttagaagagtgagatttggaagcagagacacccaggccactggtaggcagaacacccacctgtatgagctgagagttccctgctcactttgacgttgccttcacgcgtcttgaggttgtagatggagcacatgttgtcaaggcccccacaggccacaaaattgcctgagggtgcataggcacaggtcatgacccaggaggaacgcaaagggatggcatgaacctggaagga

SEQ ID NO: 25495 - DNA, 599 bp, Chicken  19866894240794_1
  misc_feature (1)..(159): n is any nucleotide
nnnnnnnnnnnnnnnnnnnnnnnnnnnnnnnnnnnnnnnnnnnnnnnnnnnnnnnnnnnnnnnnnnnnnnnnnnnnnnnnnnnnnnnnnnnnnnnnnnnnnnnnnnnnnnnnnnnnnnnnnnnnnnnnnnnnnnnnnnnnnnnnnnnnnnnnnnnnnnnggcctcggcctatgagcactttcactgttctctcccgtttcttaaagagaaaagaacatgacaaccaagtccatatagcattaactccccttagcacacgctcccagcttccagcaactcgcagccaaggacgtcccccaygggaggatgcacctggcccactgctggacaccacgagcatcccctcgtttgactaatccattcctgaacccatttatrgttctggccacgccgtaacatcccatggcaatgggttccacaaccgcatcacacactgtctggacaaaaacarcttccttttgattcagtgaaatcagtcacttgttgattccataatacattctgctgctcatgttatgagaaagagcaaaactgctttactttgtctgaatcatttctgcttttccgtgcttcctccacagttacttctccactcccat

SEQ ID NO: 25496 - DNA, 599 bp, Chicken  19866894240794_2
  misc_feature (1)..(81): n is any nucleotide
nnnnnnnnnnnnnnnnnnnnnnnnnnnnnnnnnnnnnnnnnnnnnnnnnnnnnnnnnnnnnnnnnnnnnnnnnnnnnnnnnggcctcggcctatgagcactttcactgttctctcccgtttcttaaagagaaaagaacatgacaaccaagtccatatagcattaactccccttagcacacgctcccagcttccagcaactcgcagccaaggacgtcccccaygggaggatgcacctggcccactgctggacaccacgagcatcccctcgtttgactaatccattcctgaacccatttatrgttctggccacgccgtaacatcccatggcaatgggttccacaaccgcatcacacactgtctggacaaaaacarcttccttttgattcagtgaaatcagtcacttgttgattccataatacattctgctgctcatgttatgagaaagagcaaaactgctttactttgtctgaatcatttctgcttttccgtgcttcctccacagttacttctccactcccatttcctcagagatctctgccagagcccctcagtctgtttgctccttgtgctgcatgaaccccagtccttatcaccactc

SEQ ID NO: 25497 - DNA, 599 bp, Chicken  19866894240794_3
  misc_feature (1)..(8): n is any nucleotide
nnnnnnnnggcctcggcctatgagcactttcactgttctctcccgtttcttaaagagaaaagaacatgacaaccaagtccatatagcattaactccccttagcacacgctcccagcttccagcaactcgcagccaaggacgtcccccaygggaggatgcacctggcccactgctggacaccacgagcatcccctcgtttgactaatccattcctgaacccatttatrgttctggccacgccgtaacatcccatggcaatgggttccacaaccgcatcacacactgtctggacaaaaacarcttccttttgattcagtgaaatcagtcacttgttgattccataatacattctgctgctcatgttatgagaaagagcaaaactgctttactttgtctgaatcatttctgcttttccgtgcttcctccacagttacttctccactcccatttcctcagagatctctgccagagcccctcagtctgtttgctccttgtgctgcatgaaccccagtccttatcaccactcagtgctttattttcagacataatgtctttaaaaaaaagaactgtaagcaaaaacaaaaatgagagcctacagc

SEQ ID NO: 25498 - DNA, 600 bp, Chicken  19866894240795_1
ccacctttattaagttcatcttaacatcttactctatatgatttccagagagtgtggaagggtagtttttttttgtttttatttacttaagttagaataagagcattatatctcatgccatcatatcatagccatgtggctcagaaacttgcttggaaagaatctcctactccttgtagaaatttcctgcttctcctccttcgcctgccctgtcagcctgtggccagacaaagcccaaggtagtgtctgaattttttttttttgctgctgtcagctttgctttccctatctatcccctcwatgactctataaccaagcttcacttcccacattgcctcagccatcccyttccccagatccaccgtgcaaccagcacagctccttgtactccacaacgatttcccatttttgtttcacctcacatgcaatattttttctcactctcccagccacttctgtatgagtgtggacaagatgatgcccatcccaccagctggttggcgtcacactgtaccagttggcagtagagcttgggaaggcttggtggtgacagtctttttcaaaaactggtgactgtaatgtcaccataatgtcactagc

SEQ ID NO: 25499 - DNA, 600 bp, Chicken  19866894240795_2
agagtgtggaagggtagtttttttttgtttttatttacttaagttagaataagagcattatatctcatgccatcatatcatagccatgtggctcagaaacttgcttggaaagaatctcctactccttgtagaaatttcctgcttctcctccttcgcctgccctgtcagcctgtggccagacaaagcccaaggtagtgtctgaattttttttttttgctgctgtcagctttgctttccctatctatcccctcwatgactctataaccaagcttcacttcccacattgcctcagccatcccyttccccagatccaccgtgcaaccagcacagctccttgtactccacaacgatttcccatttttgtttcacctcacatgcaatattttttctcactctcccagccacttctgtatgagtgtggacaagatgatgcccatcccaccagctggttggcgtcacactgtaccagttggcagtagagcttgggaaggcttggtggtgacagtctttttcaaaaactggtgactgtaatgtcaccataatgtcactagcgtaatctagtttagtatcactgtctgtattcaataaaaaactgtcaac

SEQ ID NO: 25500 - DNA, 599 bp, Chicken  19866894240805_1
  misc_feature (1)..(88): n is any nucleotide
nnnnnnnnnnnnnnnnnnnnnnnnnnnnnnnnnnnnnnnnnnnnnnnnnnnnnnnnnnnnnnnnnnnnnnnnnnnnnnnnnnnnnnnntattattactgcaaatatttatcatagttccatgctgagacccaacttcacatgcctcacatcccagccatgctctgtggtctactcattaaactcacacatgaggtttactcaagctagatatcctgctgctgtgacccagaccacagacagcctagttctggcctcagtctgccttcctctctgccatgctgtgcacggctgagctgatrgttgatcagaatttgggcaggaagcatttggtggattgtttggtggatgtgttctgttcctatatgaagtytgaaaactgtagtgcctgtgagagtgaggatggaaaaacctgctggattacttcccagaatgaaattctgtgcagagtgatttgatccaagtgcacactcatgtttggtggtccttcttcagccttttctaggggaacatttattaaccttttgtctctggaaaagtttgaccccaccaaaattgcactaattataaaaatacagcttcagaaacacacaaagtattc

SEQ ID NO: 25501 - DNA, 599 bp, Chicken  19866894240805_2
  misc_feature (1)..(17): n is any nucleotide
nnnnnnnnnnnnnnnnntattattactgcaaatatttatcatagttccatgctgagacccaacttcacatgcctcacatcccagccatgctctgtggtctactcattaaactcacacatgaggtttactcaagctagatatcctgctgctgtgacccagaccacagacagcctagttctggcctcagtctgccttcctctctgccatgctgtgcacggctgagctgatrgttgatcagaatttgggcaggaagcatttggtggattgtttggtggatgtgttctgttcctatatgaagtytgaaaactgtagtgcctgtgagagtgaggatggaaaaacctgctggattacttcccagaatgaaattctgtgcagagtgatttgatccaagtgcacactcatgtttggtggtccttcttcagccttttctaggggaacatttattaaccttttgtctctggaaaagtttgaccccaccaaaattgcactaattataaaaatacagcttcagaaacacacaaagtattcatgtatttttccagccatgatatttgtcatccaaaagcaaagcaaacagataaaggcagttcgatatagtc

SEQ ID NO: 25502 - DNA, 599 bp, Chicken  19866894240812_1
  misc_feature (1)..(122): n is any nucleotide
nnnnnnnnnnnnnnnnnnnnnnnnnnnnnnnnnnnnnnnnnnnnnnnnnnnnnnnnnnnnnnnnnnnnnnnnnnnnnnnnnnnnnnnnnnnnnnnnnnnnnnnnnnnnnnnnnnnnnnnnnncatgtaaaattccttacacaaacagtttaagctgggatggaactattttttcagtatctgatatgatgctgttttggttctaggagaaaaacaatactgataatgcactgaagtctgcgattgctgctaagcagtgttgtacagagtcaaggccattctcagcaaagggcctaagaarctggaaggggacagaaccagaacatctgacttaaactggccacagggatattccataccatatgacatcatgcagaaggagttttgaagggggtaagagtttgtctgcttctcttctgcttgctggaggtggcaagctgggcatcggttggcaggttgtgagcagttgcttgtgcatgagttaatatacaatcatatgtaartatatagtcataaatattawccttttcctttcctctatcttaataaatagttttatctcaacccacagattctactgtttttttttttccaattctt

SEQ ID NO: 25503 - DNA, 600 bp, Chicken  19866894240812_2
taggagaaaaacaatactgataatgcactgaagtctgcgattgctgctaagcagtgttgtacagagtcaaggccattctcagcaaagggcctaagaarctggaaggggacagaaccagaacatctgacttaaactggccacagggatattccataccatatgacatcatgcagaaggagttttgaagggggtaagagtttgtctgcttctcttctgcttgctggaggtggcaagctgggcatcggttggcaggttgtgagcagttgcttgtgcatgagttaatatacaatcatatgtaartatatagtcataaatattawccttttcctttcctctatcttaataaatagttttatctcaacccacagattctactgtttttttttttccaattctttcccccatcccactagaaatgtggggagtgaatgaatgactgtgtggtcctgagctgcctgccatgttaaaccacaacattcatttcagaacccaactaggggcccaaaggcttgagatcatagaatcatagaatggcctgggttgaaaaggaccacagcgaacatcgagtttcaacccccctgctatgtgcagggttgccaa

SEQ ID NO: 25504 - DNA, 600 bp, Chicken  19866894240812_3
taatgcactgaagtctgcgattgctgctaagcagtgttgtacagagtcaaggccattctcagcaaagggcctaagaarctggaaggggacagaaccagaacatctgacttaaactggccacagggatattccataccatatgacatcatgcagaaggagttttgaagggggtaagagtttgtctgcttctcttctgcttgctggaggtggcaagctgggcatcggttggcaggttgtgagcagttgcttgtgcatgagttaatatacaatcatatgtaartatatagtcataaatattawccttttcctttcctctatcttaataaatagttttatctcaacccacagattctactgtttttttttttccaattctttcccccatcccactagaaatgtggggagtgaatgaatgactgtgtggtcctgagctgcctgccatgttaaaccacaacattcatttcagaacccaactaggggcccaaaggcttgagatcatagaatcatagaatggcctgggttgaaaaggaccacagcgaacatcgagtttcaacccccctgctatgtgcagggttgccaaccactagactaggctgcaca

SEQ ID NO: 25505 - DNA, 600 bp, Chicken  19866894240817_1
agtagaaagcgcaagaagcttcgcaaattaatattaatgacagcatcaactcccaggggggaagtgaaaccaagccatgaagttcaggcccaacttttgagagtgaagggaacgattcagatcagaggtttcagctcgccaattatgaagttgaggcggggcataaaattcaagttagatggacaccatccttaactcaaaaggcctttggatttaggactagaatttatatttctattttacaagttcaggaacccagcccgagcttcagctgaagttaatgcacccaagtattccctyagggcaaagcctgcacgatatgcaagtgaggaagtcatcgtgtacaacagcctccatagtgaaactaactcaaatcagacacttcccaaaagagactgcttttgactatttcagttcagggtgggtgttatttagagagctcacgatcctatacccttttttagtctgttgatacaaaacaagattctccaaggtcagtaatgggcctgactgtgctctctatgccaccagcagtgatctcattaaaattagtttggctcctacagaacatgggggaaaaaaagcaaacagacagaagcc

SEQ ID NO: 25506 - DNA, 600 bp, Chicken  19866894240817_2
cagtaatgggcctgactgtgctctctatgccaccagcagtgatctcattaaaattagtttggctcctacagaacatgggggaaaaaaagcaaacagacagaagccaactcagagcaccctgtgcaacatgaagcaaatgcacacttccacttacagcttatggactccattcttaactcatttgtacttacaagaatcaagattagctctatggagacaatcaaagccaagcaagtataacaggagagaaacaaaagatttgtacccataaccattttcaattagattatacagtcacawaagcagacatgtgaaagtcctaaggaaagccatctagccaaagaagagtcccaagataaaccaagatgcaaaattttattcaaaagtaatgtcacacatcaaaatagcaacagccttagaaacacaagaaaatggtttcrgtattaaacacacagtctacatggtgctcatggatccatttaaaatatattgttttctttctttaaaaatagatattataagaatgtcatgcacagtgattttcattaaaatcacacttactacatctcaagaaagattagaagtcggagcattaacatt

SEQ ID NO: 25507 - DNA, 600 bp, Chicken  19866894240817_3
acacttccacttacagcttatggactccattcttaactcatttgtacttacaagaatcaagattagctctatggagacaatcaaagccaagcaagtataacaggagagaaacaaaagatttgtacccataaccattttcaattagattatacagtcacawaagcagacatgtgaaagtcctaaggaaagccatctagccaaagaagagtcccaagataaaccaagatgcaaaattttattcaaaagtaatgtcacacatcaaaatagcaacagccttagaaacacaagaaaatggtttcrgtattaaacacacagtctacatggtgctcatggatccatttaaaatatattgttttctttctttaaaaatagatattataagaatgtcatgcacagtgattttcattaaaatcacacttactacatctcaagaaagattagaagtcggagcattaacatttctttgatatcaatgccaatgaaatgcattttaatatcaaggtataaggacttcaattaagagactattatacttcttggaatagtctgatacaaaaggcactgagtcacattctgcaactgatttttctctctttaagt

SEQ ID NO: 25508 - DNA, 600 bp, Chicken  19866894240817_4
aaaaaatcaaaaagacagctggctgggaaaagggttttgttcttttgtttagctgcagaggacagatggaaaaatcaatttcaactacttccagttccaggttattttatcttagaaagcgcagctctttccatcatcaccttctagctggagagcaaattgagtcaccattaagaccatcttcacagtcatccaattctaaataaggagtacaaacaggagagcctttccagaggacagtgggatccaactaattcacttgcttgttttgtgcaagtcccaggtgctgtattcgtactkcccccagtggtgcaagagttttcccacaggccaractaaacaatgaactggagcacctgctgggatctcctgatgatgggctgtggctacctgataccttctgacaggttgcctcctcaaactcactagcaggcaggccttgaagcaaagctcttggtatgcmttaggtacccttatcccagtatttaccccatcccagcatttccaacattgccatccataagcagacagaaccagtataatgaacctgtcttagaaggacagaccaacgttgccragcatattcccacatttgggctg

SEQ ID NO: 25509 - DNA, 600 bp, Chicken  19866894240817_5
ttttgttcttttgtttagctgcagaggacagatggaaaaatcaatttcaactacttccagttccaggttattttatcttagaaagcgcagctctttccatcatcaccttctagctggagagcaaattgagtcaccattaagaccatcttcacagtcatccaattctaaataaggagtacaaacaggagagcctttccagaggacagtgggatccaactaattcacttgcttgttttgtgcaagtcccaggtgctgtattcgtactkcccccagtggtgcaagagttttcccacaggccaractaaacaatgaactggagcacctgctgggatctcctgatgatgggctgtggctacctgataccttctgacaggttgcctcctcaaactcactagcaggcaggccttgaagcaaagctcttggtatgcmttaggtacccttatcccagtatttaccccatcccagcatttccaacattgccatccataagcagacagaaccagtataatgaacctgtcttagaaggacagaccaacgttgccragcatattcccacatttgggctgtatttgcagttcagattctttccctgtgtgagag

SEQ ID NO: 25510 - DNA, 600 bp, Chicken  19866894240817_6
gtcaccattaagaccatcttcacagtcatccaattctaaataaggagtacaaacaggagagcctttccagaggacagtgggatccaactaattcacttgcttgttttgtgcaagtcccaggtgctgtattcgtactkcccccagtggtgcaagagttttcccacaggccaractaaacaatgaactggagcacctgctgggatctcctgatgatgggctgtggctacctgataccttctgacaggttgcctcctcaaactcactagcaggcaggccttgaagcaaagctcttggtatgcmttaggtacccttatcccagtatttaccccatcccagcatttccaacattgccatccataagcagacagaaccagtataatgaacctgtcttagaaggacagaccaacgttgccragcatattcccacatttgggctgtatttgcagttcagattctttccctgtgtgagagctgagaataagtggtgcctctcttgtcccaaataaaaaggcagagagtgaaaaattatcttctctgtgatcctgaagtacttcctgcagttcccaaagtgaagaggtacttgatttgactgattttata

SEQ ID NO: 25511 - DNA, 600 bp, Chicken  19866894240817_7
tcccaggtgctgtattcgtactkcccccagtggtgcaagagttttcccacaggccaractaaacaatgaactggagcacctgctgggatctcctgatgatgggctgtggctacctgataccttctgacaggttgcctcctcaaactcactagcaggcaggccttgaagcaaagctcttggtatgcmttaggtacccttatcccagtatttaccccatcccagcatttccaacattgccatccataagcagacagaaccagtataatgaacctgtcttagaaggacagaccaacgttgccragcatattcccacatttgggctgtatttgcagttcagattctttccctgtgtgagagctgagaataagtggtgcctctcttgtcccaaataaaaaggcagagagtgaaaaattatcttctctgtgatcctgaagtacttcctgcagttcccaaagtgaagaggtacttgatttgactgattttatataaagaacaatcgtagaagtgcaaatgtatgaatagtaaactgctggtgtttagttattaatcatttttttggggctcttctgcatcagctctcccccacactcttaatgtata

SEQ ID NO: 25512 - DNA, 600 bp, Chicken  19866894240820_1
cctttgtgagtcagaagagacctacatgaaagtcatctggaaaaatacagtaaagcagaaaaaaaacccaatccttaaagtacttcttttcaacagtctgagttaattgcttttaacagagaagcagaatagctcaacagacaaggcttcctttctgtcacagaagaggcaagacaaacttaaaacttcgcctttgcatcctcttctagacagaaggttgcttttcttctccaaccaaggatgtatgcctggcctgcctccagggacccagtggtgatactgtcatacttcagtcttctraaaaaaaatccacatcgcttttcctagtgtatcaagtcagactacatccctaagtcaaccacttgagtcattgcttagcctttgaaaatccaggaggagctgcagatgacaacacctgaccacagcctgccagcaccattacttctgatgctttgcaacgtctccagcagtgaaactgctgaagatcagttttctgctaaacagggtgaaagtcctatactgcccatttacagctttctccataaaccctgcttctgtcagggctcggaacgctgcttgagaagagggctttccattgac

SEQ ID NO: 25513 - DNA, 600 bp, Chicken  19866894240822_1
ctacttggtttggtatattacttttccatcaaataaatcttagaggatttttcctgtcattaaatttccaacgcccatttctcaaccttttcctctctatgactacaatttctcatagaagagctcagtagtgagatccataatagcagaacaaagctttacaaactcattctttctcactgcaatttaggactttgcattttgggataaatgaaggtagtcatttgaagactactttctagaaataccttaaatttgtgcatgtagtatctgccctgattttaaccccatcaattacgraaccttaaatgaggaatgtcatttacagtcatatgttttaagttgaaaaaacatcactgttccccaactgtagcttcaccttgttgttaatagctattacaaacagaattcggtacaaacccaggccccagaactgcactaaaccaatagctagacacaggtaggtttaacgttcaatttcgataaaggtttacaaagtatggacacagtaaaagccaattgaaacttycaaactcaactttgcacttcttaaaaacgtagtgaaaagatccccctgccactccctgagatgtctgccac

SEQ ID NO: 25514 - DNA, 600 bp, Chicken  19866894240822_2
gactactttctagaaataccttaaatttgtgcatgtagtatctgccctgattttaaccccatcaattacgraaccttaaatgaggaatgtcatttacagtcatatgttttaagttgaaaaaacatcactgttccccaactgtagcttcaccttgttgttaatagctattacaaacagaattcggtacaaacccaggccccagaactgcactaaaccaatagctagacacaggtaggtttaacgttcaatttcgataaaggtttacaaagtatggacacagtaaaagccaattgaaacttycaaactcaactttgcacttcttaaaaacgtagtgaaaagatccccctgccactccctgagatgtctgccactttgttgtcacaacactgatgctctgcagaatcagacagttctgagagtacagttagtgatattaaatcaagcccacactttttcccagaaatctctcagcttaagcagcaagattgagaacttcagaaaacaggcaggaaacaaattgctctccatgaatattcccataaaagttttgacagcatgcttgagataaatgggaaaaaaaaatctcttatctgattcagg

SEQ ID NO: 25515 - DNA, 600 bp, Chicken  19866894240836_1
gcacacagcatatgtaaattgcaataccaactgaatcaggtttcttcctgacattggctaactccagatgtctacatctgttagacaaagcatttttcctaaccaattctagaccactgaagagcgacaggactagaaggaatggtctcaagttgtgccaggagaggttctggttggatataaggaaacatttcttcttcaaaagagcgctcaggcactggaatgggctgcccagggaggtggtggagtcatcatccctggaggtgctcaagaaacatgtggtaccgaaggacatggttwagtggggaaatagtggcagtaggagggtggttggactggatgatataggagtcttttccaacctgggcwattctgtgattttaagatccacaggctgcaagtcaagacataatacatattcatggatatcacctaagcagcttagcgggaagtgctacaaaagttcactgctctaagttctccttctactagctggatacgaaatagcctgtgaatcatttcctgataacaattaaaagcttcagatctgacattcagaaaagcttcaagcacaacacacaatgtctagaccatgtttgt

SEQ ID NO: 25516 - DNA, 600 bp, Chicken  19866894240836_2
gtctacatctgttagacaaagcatttttcctaaccaattctagaccactgaagagcgacaggactagaaggaatggtctcaagttgtgccaggagaggttctggttggatataaggaaacatttcttcttcaaaagagcgctcaggcactggaatgggctgcccagggaggtggtggagtcatcatccctggaggtgctcaagaaacatgtggtaccgaaggacatggttwagtggggaaatagtggcagtaggagggtggttggactggatgatataggagtcttttccaacctgggcwattctgtgattttaagatccacaggctgcaagtcaagacataatacatattcatggatatcacctaagcagcttagcgggaagtgctacaaaagttcactgctctaagttctccttctactagctggatacgaaatagcctgtgaatcatttcctgataacaattaaaagcttcagatctgacattcagaaaagcttcaagcacaacacacaatgtctagaccatgtttgtaacctgggcctgtaactaaattaattggacacatgcagtcaaatgacaataatcaagtgtcccagtgca

SEQ ID NO: 25517 - DNA, 599 bp, Chicken  19866894240837_1
  misc_feature (1)..(18): n is any nucleotide
nnnnnnnnnnnnnnnnnntgaaaagaaagaagcagcaggggagcacagctttctgatccatctgttaaactggaacattactgtagtgccaggaaatgatcctgagctcatgatccgggtttttctgtacaagtgacttgaaccagcacactgagcgttctcattaagatatttcagccacattcaatctttttctcctgttttgcatcaacaagcttgtttagctagaagctgagattaaaatgaagggcaacttgcatacagcagataaacaaactgtcataatttgacctgagatayattgttctcaaataatgggagagagaaggatgactcttaagaaagcaaacatttttaatgatggttagcctgtctttccacccatccagcttttcttgccagatgctctactttaattccacatgcttgtctgcatttcattcatatccttaacattaaggcgaatacattctgtttgcctctggatgttctatcggtgctgtattaattgacgggttacagtggcatctcattatactgatggactggcaggtggatcatgctgcactcagggggctactgcagtttggcagctgaaa

SEQ ID NO: 25518 - DNA, 600 bp, Chicken  19866894240838_1
aactgtctgtctgattgacattatcctaaggaagatctagagtgaacggcagtaaagatcttcagagaagacgtagctcatggaagagggaaaaagacaaggaaagagggaacaacgggttctcttctctgtccccatggcagctgggcttggctggggctggctccagctgcgatggtggaacagacactgcgtgtgcttctgaggctgccacgaagcatcccagtgccaaagacacaccccagggcagagcgggaaggctgggccccacctcctggtgtggcttcgaggacgggagakgggttttatccatgacagagatgctgctagaaggggaccggctgcctgtgggcttctgcagtgmggagggagtaaaagcatccacacrgcactcagcctcagtgccaggggaatggctgcaggacgtggctctgtcccactgataggccatcctgagcactcagccccaggagcaacaccatatcccattgtatctggggacaagaagaagatgagccagtgtttcagaactgatkgtgcccggatactcccacgtcatctccctttgggagctgtagagctccgcaggggacaacttgg

SEQ ID NO: 25519 - DNA, 581 bp, Chicken  19866894240838_2
gagaagacgtagctcatggaagagggaaaaagacaaggaaagagggaacaacgggttctcttctctgtccccatggcagctgggcttggctggggctggctccagctgcgatggtggaacagacactgcgtgtgcttctgaggctgccacgaagcatcccagtgccaaagacacaccccagggcagagcgggaaggctgggccccacctcctggtgtggcttcgaggacgggagakgggttttatccatgacagagatgctgctagaaggggaccggctgcctgtgggcttctgcagtgmggagggagtaaaagcatccacacrgcactcagcctcagtgccaggggaatggctgcaggacgtggctctgtcccactgataggccatcctgagcactcagccccaggagcaacaccatatcccattgtatctggggacaagaagaagatgagccagtgtttcagaactgatkgtgcccggatactcccacgtcatctccctttgggagctgtagagctccgcaggggacaacttggggggacactgcgggacgctgaagcgctcacacagccctgactgag

SEQ ID NO: 25520 - DNA, 557 bp, Chicken  19866894240838_3
ggaaaaagacaaggaaagagggaacaacgggttctcttctctgtccccatggcagctgggcttggctggggctggctccagctgcgatggtggaacagacactgcgtgtgcttctgaggctgccacgaagcatcccagtgccaaagacacaccccagggcagagcgggaaggctgggccccacctcctggtgtggcttcgaggacgggagakgggttttatccatgacagagatgctgctagaaggggaccggctgcctgtgggcttctgcagtgmggagggagtaaaagcatccacacrgcactcagcctcagtgccaggggaatggctgcaggacgtggctctgtcccactgataggccatcctgagcactcagccccaggagcaacaccatatcccattgtatctggggacaagaagaagatgagccagtgtttcagaactgatkgtgcccggatactcccacgtcatctccctttgggagctgtagagctccgcaggggacaacttggggggacactgcgggacgctgaagcgctcacacagccctgactgag

SEQ ID NO: 25521 - DNA, 409 bp, Chicken  19866894240838_4
acaccccagggcagagcgggaaggctgggccccacctcctggtgtggcttcgaggacgggagakgggttttatccatgacagagatgctgctagaaggggaccggctgcctgtgggcttctgcagtgmggagggagtaaaagcatccacacrgcactcagcctcagtgccaggggaatggctgcaggacgtggctctgtcccactgataggccatcctgagcactcagccccaggagcaacaccatatcccattgtatctggggacaagaagaagatgagccagtgtttcagaactgatkgtgcccggatactcccacgtcatctccctttgggagctgtagagctccgcaggggacaacttggggggacactgcgggacgctgaagcgctcacacagccctgactgag

SEQ ID NO: 25522 - DNA, 600 bp, Chicken  19866894240841_1
gttcacaagcccgcataaaacactccctattttatacagtcaatattttattccttttatcagcctttgtagaagattacacattctcatcaagtttcaacacaatgttgaagtaaaccaaccaaggtatttcagcatttctcagacacaaagtgtcatgactgagtagaatcttccccacaaaacatcctgatccctatttctgttacaacccaacttaatgtttgccaagtttcccataaggctgcattacacagtaccaaataaataaaaatagaaacaacatcaaaaaactcactkgaacatcttatttctttcatgccacaggggaactccaaaatggaaagtcgtcattcagagacagtaacactagtacacaaagctttcttcaaatataattgtaagcattacttattcttaagtactgaagataacatttcaaggagtcagaaaatgcaagcaataccaaatgaacagtaayttcaattttaaatgttttccatgcatgttgcattttctgtttcatttggcgtgttaaaaatcaaacttgaattagaaatgtacagtcagcacagtcaaatcagccttctgaagcctacc

SEQ ID NO: 25523 - DNA, 600 bp, Chicken  19866894240841_2
aaaacatcctgatccctatttctgttacaacccaacttaatgtttgccaagtttcccataaggctgcattacacagtaccaaataaataaaaatagaaacaacatcaaaaaactcactkgaacatcttatttctttcatgccacaggggaactccaaaatggaaagtcgtcattcagagacagtaacactagtacacaaagctttcttcaaatataattgtaagcattacttattcttaagtactgaagataacatttcaaggagtcagaaaatgcaagcaataccaaatgaacagtaayttcaattttaaatgttttccatgcatgttgcattttctgtttcatttggcgtgttaaaaatcaaacttgaattagaaatgtacagtcagcacagtcaaatcagccttctgaagcctaccccttcactttttcaagtataaatcactaattacatgttaaattatgtatttttaatataaactaggagctctctccttgtctactaattctagtgtatttaattagttacactgatagaggcttgcctgcacaggaaatgtggattgagatctgttcttaatgagaaaggagtaagcttcc

SEQ ID NO: 25524 - DNA, 600 bp, Chicken  19866894240844_1
cattttaataacagcctccctggttccaggcagcattacgttgtggtcagacaccacatgcaagtgatctatctcgcacagaagataagtgtgttttgtgtcccggctgttactaccagagaccacacctataaatattccaattgccatggatgagcacatgaactccggtaccctgtatgcagtagcagctaggaagagttgtcagaagtccagcatctgaactagagataagatgatgatctctctgacaccgtctgttaatcaagacaacaagcaccccacccaaagcctctccaygttagtataaaatctgaagcattgagaagggctgaacaaaaatgccctctccttatccctgaggaatcaataggccacttcatgccgttcactcagattcagtttttacaactctgtttttacagatcaccagagagaactcaaatccctttcatttctaacatacaccttacttcagagaagaaagtttacaaaaaagtgtagtaaatcattatgcatacatagcaaatagcaaaatctaatcaaattacataagggaaatgttttcttaggattccagagaagtgacggggttatgtc

SEQ ID NO: 25525 - DNA, 600 bp, Chicken  19866894240847_1
cctgttcccttttagagaggactatcagagagttagaaacagcacttggtgtcccaaacacaactcaaaaagagggacatttggattttagctcctcatttagcttcccatacccagaaggagttcaaaagtaactctgagattaaaaagtctggattgaaggtctttctcaatctacaaagtgttgagttgtgccaaagtcagcacttaaaaatatgatttatgcagccaggaaatgacaacggggaataccgatcctaaccaaatgatgatgcctttccccttgtgtgggaaagtgtrggaaggacatttatagagattattaaggagtcactcacattatgaaagagaactcacatggatgcagatgcttttggttcaacatccagctctattctctccttactttatcaccactctggaagccaaacaagcacatctgggtttgttttctcatttgtaaagcagtatttatttatttttttaacctgacaagtgttatgatatcattatcatcttaatagtagtaagtacttcttttagcaccccagtcctcttatggataaggagaatcaatcagagaaaatgcacaatttgagc

SEQ ID NO: 25526 - DNA, 600 bp, Chicken  19866894240848_1
tagtttgtccatctttccttcacgtgtggagacagaaggcaggaggtgaaaaaactcttgtgagaagcaccagatgatcagaggtctgttacgaaagcccagtgcacttcctagggggaaacagctcatcccagggtgctcttgtgttccagctggggaactgcagagaatacttgcctcgtgctgggggaaattctttttttcttctttatgcttcaacatagctctattttgagtaatgatttatattaaaaacaaaacaaaacaaacaacaacaacaaaaacctatcctacatctgrcatgaagtaattgatagacatgaagtacctttatgtagaaacacgagtagagactgaatactgggccaggttctcccagaatctcagctacagctgaactgatttcagcagattaactcttgccaacagtaaagctgcagttaagtccttttaggcagacatcaggtacatacactaatgcaggtgactaaggaaacaggcattagaagttaaaaaaaataggaaccaacatcagcagtttctggattggtcaataaaacacaaagtgacattggagcagagcttgcatgttattgggtc

SEQ ID NO: 25527 - DNA, 600 bp, Chicken  19866894240849_1
ttcaagtgaatgaaaagagaatcaagaaactaaaacttagaaatgagattcaagtggaaacaaatctcaactatggagatctgccagggaatgacttaacatatgctctggggcacaactgattttaagggctctggaattatgactgcaacatgccacattgatttgtgtgcaacacgctgagagattgcatcaagagcactcgctatctattcacatgtgcatttactaacaatcatatttcatgcagttaagtgcaaggcctctgatcttcagagcatgcatggctttgatttgtaygtctagatttcttgtgtactgcatgagtacagcgctggcatgtatatttcttgtgtactgcaaagtgtgctggtatgtggggactaaaaagacataaacatactatattgttacactttgctacaaagcatagaagcagttctgaaagtagcagaggagtaaaaagtatagtgacaaaaaagccagagaggtagttcctccacttcaaactttctctgattaaagagcatgcaggatgtcacatttctgttccatgctctaatgaatacagaaacacagttagcaggttgtgggaggtga

SEQ ID NO: 25528 - DNA, 600 bp, Chicken  19866894240859_1
acacaatgtgaaccacggtccctctttcactgcgggctgccaccgcattaactgggctttgtgctgctgttgagagcttcagtgctggggtcagctctgcgggcacttctctcccacctcattacagagcagccagctttctgttttctctgttttcagctcctcgtgcttctgaggaaggtgaaggatgagaggtgcctcctggcaagaatcccgctgcctcctggggtaatgtgctagctgctcccccaacatgacatccttacagggccatgtctcgtgccgatatctctttctatrgggactcgtttttattgcctacatcgtgtgctggatttagaagccctccagtgttaccatggcaacagtttctgcttaagtataggtgagaatacaagttaattttaaataaggtgaactgaaggagggggtgaaaaagctctcacaaagtgtctgaaaccacacagatgtttctgtctaaggttagtagcaaagtatccaaagctaattcctcatccctgaggtcacaacctcctcataacaaaaaaagaggttcagggcctgtttttttggactgtcactgcttgtggtggtggctgg

SEQ ID NO: 25529 - DNA, 600 bp, Chicken  19866894240861_1
gaaagtgaatttggtgcagcatggaagcattttcagcgcagctgattattttttattctgtagcattccagtctggctgtaatttcgttacgtcagtacattcagtacatttagctgctagtttggaagagcagcaagtacaagatttgctgtttgaggtaataaaagctgttccagcttactcctttttttattgctgttaatagtatggacacaaagtaaagtttaatgttaaaggacctagagctgatgtgctgatctttattatttttttacaccatagatattaccaaaccttayggaagggcctgtggttattctcgttaagtgtattccagtaacactgtgggagttagagacagtagagagacaatttaatgaaaatccttctttgcactttctgctgttccaccatgcccttttttatttagtagaaaaattayccattatttttgtttgattttaaaagttgttttttaataaggaatctagacttaaatagcattagttcaagcattagctcaaaaattgcaattatttgtctccttctctctgtattttcatttcctttttcttactactacattgttaagtggaagt

SEQ ID NO: 25530 - DNA, 600 bp, Chicken  19866894240861_2
gatttgctgtttgaggtaataaaagctgttccagcttactcctttttttattgctgttaatagtatggacacaaagtaaagtttaatgttaaaggacctagagctgatgtgctgatctttattatttttttacaccatagatattaccaaaccttayggaagggcctgtggttattctcgttaagtgtattccagtaacactgtgggagttagagacagtagagagacaatttaatgaaaatccttctttgcactttctgctgttccaccatgcccttttttatttagtagaaaaattayccattatttttgtttgattttaaaagttgttttttaataaggaatctagacttaaatagcattagttcaagcattagctcaaaaattgcaattatttgtctccttctctctgtattttcatttcctttttcttactactacattgttaagtggaagtagaactatttccctaccaagctatcagggaaatctagttattagcaggctaagtgacagatgtggtttgctactgtattgctcttgctactacttcttaccctttccattcccaacattagcattttttgtcttacagtccag

SEQ ID NO: 25531 - DNA, 599 bp, Chicken  19866894240863_1
  misc_feature (1)..(54): n is any nucleotide
nnnnnnnnnnnnnnnnnnnnnnnnnnnnnnnnnnnnnnnnnnnnnnnnnnnnnnctcacccagcatcaaatttatatgttatatcttacgatgtaacaagaaaaatacaccagatgactgcagtaattgatgctgatgaagacataaacagtaacatatacctaaagtatcttccatcttaaaggcaggttagcgatttgtctttctcttaaaactttgatcaaacaacagaactgagtgtagctacattgcctgcacaaagggaaattatggctcatcacttctccgttcatgatctayaaagattaaaaaggattgtgtgaacagacaaacatttgagcgtttactgtattcttaacagacacataacaggaaggagagaaggaaaggaaagaagtaagaaagtaaggttacttttgcaaaaatagcatgattagagagagaagtgagtagcttttgctctcatctgttaattaaaatcttgagccaacaacctaagctttttttcattgggctactcttgaattaccttttttttttgtaggtttctgtgttattcatagagtatttaatgcatttagtcacttaatgttaagggc

SEQ ID NO: 25532 - DNA, 600 bp, Chicken  19866894240873_1
aaactatttagttgcacagaaggaaacctttccacatctttgatccttctccaaaccttttctacttatacgtttttgaggtgggaaattgccagcattgcatgttcaagatgtacatagcccacacagtgataaactgagttatgatgttctattccattcctaagcctttcttacattctgtctgatagagtgtcaatgcagttttgatgcctcccatctcctgtaccaagtaaagctttttcagtagcatgaagttctggtagaatccttcctctcacctccatcattttgaagtgrggaatgatgcattaackctgtgtgtgagcctccaattaccagaycattctgtctgctccctcctccttcactgtctgaaagctgatgtattgtttctctgccttctgctgatgtatgtctactggctttacagaatgctgcatatcataggatgcttttggctttattaagaggccaagccaaacatggatgtagaaagagccatatggggtcagtcccacttttcttgaccttctgtaactgaagagacatgcatggggcttgactgcttctgtrtgcwccttgctctcagttgtccat

SEQ ID NO: 25533 - DNA, 600 bp, Chicken  19866894240873_2
agaaggaaacctttccacatctttgatccttctccaaaccttttctacttatacgtttttgaggtgggaaattgccagcattgcatgttcaagatgtacatagcccacacagtgataaactgagttatgatgttctattccattcctaagcctttcttacattctgtctgatagagtgtcaatgcagttttgatgcctcccatctcctgtaccaagtaaagctttttcagtagcatgaagttctggtagaatccttcctctcacctccatcattttgaagtgrggaatgatgcattaackctgtgtgtgagcctccaattaccagaycattctgtctgctccctcctccttcactgtctgaaagctgatgtattgtttctctgccttctgctgatgtatgtctactggctttacagaatgctgcatatcataggatgcttttggctttattaagaggccaagccaaacatggatgtagaaagagccatatggggtcagtcccacttttcttgaccttctgtaactgaagagacatgcatggggcttgactgcttctgtrtgcwccttgctctcagttgtccattctgtgaagtctacagt

SEQ ID NO: 25534 - DNA, 600 bp, Chicken  19866894240873_3
ccttctccaaaccttttctacttatacgtttttgaggtgggaaattgccagcattgcatgttcaagatgtacatagcccacacagtgataaactgagttatgatgttctattccattcctaagcctttcttacattctgtctgatagagtgtcaatgcagttttgatgcctcccatctcctgtaccaagtaaagctttttcagtagcatgaagttctggtagaatccttcctctcacctccatcattttgaagtgrggaatgatgcattaackctgtgtgtgagcctccaattaccagaycattctgtctgctccctcctccttcactgtctgaaagctgatgtattgtttctctgccttctgctgatgtatgtctactggctttacagaatgctgcatatcataggatgcttttggctttattaagaggccaagccaaacatggatgtagaaagagccatatggggtcagtcccacttttcttgaccttctgtaactgaagagacatgcatggggcttgactgcttctgtrtgcwccttgctctcagttgtccattctgtgaagtctacagtctttatcttcagcttagctgctctcag

SEQ ID NO: 25535 - DNA, 600 bp, Chicken  19866894240873_4
ctcacctccatcattttgaagtgrggaatgatgcattaackctgtgtgtgagcctccaattaccagaycattctgtctgctccctcctccttcactgtctgaaagctgatgtattgtttctctgccttctgctgatgtatgtctactggctttacagaatgctgcatatcataggatgcttttggctttattaagaggccaagccaaacatggatgtagaaagagccatatggggtcagtcccacttttcttgaccttctgtaactgaagagacatgcatggggcttgactgcttctgtrtgcwccttgctctcagttgtccattctgtgaagtctacagtctttatcttcagcttagctgctctcagtatctggaattgtctatgtaggcaaatgccagcaggaaggggagggtggtaaaatacacctatagccctcaccaccatcctgcagcatacgtgaaggaaaaagcaaatgcatctgctattcatggatgatttttatcaccatcataggaaagatgttttaggggtggagggctatgtggatacttcgtatcagtgatccttgcttgtttgttttttccataccattttttct

SEQ ID NO: 25536 - DNA, 600 bp, Chicken  19866894240873_5
cctccatcattttgaagtgrggaatgatgcattaackctgtgtgtgagcctccaattaccagaycattctgtctgctccctcctccttcactgtctgaaagctgatgtattgtttctctgccttctgctgatgtatgtctactggctttacagaatgctgcatatcataggatgcttttggctttattaagaggccaagccaaacatggatgtagaaagagccatatggggtcagtcccacttttcttgaccttctgtaactgaagagacatgcatggggcttgactgcttctgtrtgcwccttgctctcagttgtccattctgtgaagtctacagtctttatcttcagcttagctgctctcagtatctggaattgtctatgtaggcaaatgccagcaggaaggggagggtggtaaaatacacctatagccctcaccaccatcctgcagcatacgtgaaggaaaaagcaaatgcatctgctattcatggatgatttttatcaccatcataggaaagatgttttaggggtggagggctatgtggatacttcgtatcagtgatccttgcttgtttgttttttccataccattttttctccat

SEQ ID NO: 25537 - DNA, 521 bp, Chicken  19866894240874_1
ctccacaggaaatacacgtagctaaacaaagtcagagctgcgggcagcttcctactgctgctctctggctgtgcagtgctccgccgtgcagctgtgcccagggctgggtcacaccagcagtaccacactgcgctctgtgggcacagagtgcttctgggcccagagcacaagggaacactgcaggcccatgcacagacactgctccgatcgatggaagagcgtcatcactcctacagggaaaaaaaactctgtaaaagtttgttctcagctttgctacctccatttttctctcacatatcyggccataggcattcagaggcattcggacgtgtgcaccttgctgctgtgccggtcaggctttgctctgtgtggcgcagccatgagctgtgagcattgcactctgcacagtggcgctggggctgctctgccctcgagctgcagccctggctgtggaccccgaagtgcagccgcctgcacgccacgtccaaacaaagctgcagtgccattgcttgcgtgtgaat

SEQ ID NO: 25538 - DNA, 600 bp, Chicken  19866894240876_1
ctcatttctgctctttcgttccagagttgatttttttttcctcacgtctcccagggtatttggatatgtacacctggtggttgtgttcatattgcagcatctgatgcctggttgcttaggaggcttctggcctcagtccctggaggcgttgaaggccaggatggatggggccctgggcagcctgatctagtgcttgttctagcaactggcaatcctgcctgcagcaggggggttggaaccaggtcatcttggaggcaaaaattgcagaggggctgtacatccactgcctgctgttgggargtttcttactgctratggcggtgcctgggcatactgatcagtgacccagtggtgcagcaccagggcactgcaaggaagctgtaagccaagtgctatgcagcctcagttgctgctttgcaggaatctgctctggttgcctgggtgagtcatcctttggacagggacacgggcgatcattagttttccattattcgcaatgcataacagttaatggatggatgaatagattttgtttctcgggctggtaaattttcttgacaattttgcaaggctgctctgtgtctagaagtgaaatgagtg

SEQ ID NO: 25539 - DNA, 600 bp, Chicken  19866894240876_2
ttcgttccagagttgatttttttttcctcacgtctcccagggtatttggatatgtacacctggtggttgtgttcatattgcagcatctgatgcctggttgcttaggaggcttctggcctcagtccctggaggcgttgaaggccaggatggatggggccctgggcagcctgatctagtgcttgttctagcaactggcaatcctgcctgcagcaggggggttggaaccaggtcatcttggaggcaaaaattgcagaggggctgtacatccactgcctgctgttgggargtttcttactgctratggcggtgcctgggcatactgatcagtgacccagtggtgcagcaccagggcactgcaaggaagctgtaagccaagtgctatgcagcctcagttgctgctttgcaggaatctgctctggttgcctgggtgagtcatcctttggacagggacacgggcgatcattagttttccattattcgcaatgcataacagttaatggatggatgaatagattttgtttctcgggctggtaaattttcttgacaattttgcaaggctgctctgtgtctagaagtgaaatgagtgtttgtttcaattcc

SEQ ID NO: 25540 - DNA, 600 bp, Chicken  19866894240879_1
agtatttttatgttgcaatatattacgttttttatttttctcattaaaagatatgtaagtaacagctaattgatgcttttaggattgttctacaggaaatgcaagttggtttctaagacagaagttacccatgacaccaagctcttctgctttatgctgcctaagagcactcatctccaggttcccattggacaacatgtttacctcaaacaaatcattgcaggtaggaaaaactgagaatatgaccatagctattttaacatatctctctattttgagcctctgctgtttgcagataayttactgtattcacttttcctattctttcagctaccttttgtcttttctttagggacggaagtagtaaaaccgtacacacctttattgccttttttgccactggatttcaaagaaccattttgccaggatggtgtgcacatatatttaatgatcaaaatttattcctgtgggttgttcacacaggcactggaccacctacaaataggtaaatatctgctttggggtgttttgtgtttagttctgtctttaggttggctttattattgcacatatgtcagctgtatcaagcagttaattact

SEQ ID NO: 25541 - DNA, 528 bp, Chicken  19866894240881_1
gttcttaattgggctttatttcttgtttggtgttttctatgcagttaagtgaattgacagacttactgtttctggaatgaaaatgaggttttggctgagacatgcatggtgatgagctgatgcaagggtacctccattgcacatcttcaggagagtcagaaaggggaacacccacccgagacctgctggaagctaaacattcacacatagccaacctgccagcagtgtgacagtatgagtagttgtactgctcctgctgcaatggcagtggaacagagaggcatgcagagcagctctgcrgccagtgcgaggctgatggggcagggaggcccttgctctgcactagcagggtggcaagggaatcagygcaaggatgtgatggccagtgtggatccataatttatgttagctgctataataaataacatttagtagataaactcagttatagtaacagggcactgaactaagtgttggaaagacaacgagaaagcaaaacttgctgcataatgcatagaaggaaaacca

SEQ ID NO: 25542 - DNA, 461 bp, Chicken  19866894240881_2
gtttctggaatgaaaatgaggttttggctgagacatgcatggtgatgagctgatgcaagggtacctccattgcacatcttcaggagagtcagaaaggggaacacccacccgagacctgctggaagctaaacattcacacatagccaacctgccagcagtgtgacagtatgagtagttgtactgctcctgctgcaatggcagtggaacagagaggcatgcagagcagctctgcrgccagtgcgaggctgatggggcagggaggcccttgctctgcactagcagggtggcaagggaatcagygcaaggatgtgatggccagtgtggatccataatttatgttagctgctataataaataacatttagtagataaactcagttatagtaacagggcactgaactaagtgttggaaagacaacgagaaagcaaaacttgctgcataatgcatagaaggaaaacca

SEQ ID NO: 25543 - DNA, 600 bp, Chicken  19866894240883_1
gtttcttgcagcagtaggatgggtggtttgaaagagtgcagtaaacaccggtaaagatgcttatcttctctgttttgctgcactgaatatgtgtagagccagaagtcctcttttatcccacaacttgagcaatggaaacacaaaacttgggtttgcgaggcagatatatctgcgctgcagagttgagtcctgggggaggagtagacctctctcccacctctataggaatgtccccttccctcctctggcagtgctgagggaagcgcatcccaacgcccgctttctctgtctgcattgacycacattagaatcccatggagctgaccgcaggtggttggagtcgcagcgtttgcctgctttgacttcaccagtgctgccaccgctttgccctcttgcagtgccttttctgctgctgttcttccccgggttccacytgacctcacagcgtgatcctgctgctggctgggcgggcagcttctgtgagggtctgcacactgctggctytgcatccaactgctgctcaaagcactaacccctcctgtccaatggacccagctaaactgattgttttccttactgctagctctttcaggcttgctt

SEQ ID NO: 25544 - DNA, 600 bp, Chicken  19866894240883_2
gaaacacaaaacttgggtttgcgaggcagatatatctgcgctgcagagttgagtcctgggggaggagtagacctctctcccacctctataggaatgtccccttccctcctctggcagtgctgagggaagcgcatcccaacgcccgctttctctgtctgcattgacycacattagaatcccatggagctgaccgcaggtggttggagtcgcagcgtttgcctgctttgacttcaccagtgctgccaccgctttgccctcttgcagtgccttttctgctgctgttcttccccgggttccacytgacctcacagcgtgatcctgctgctggctgggcgggcagcttctgtgagggtctgcacactgctggctytgcatccaactgctgctcaaagcactaacccctcctgtccaatggacccagctaaactgattgttttccttactgctagctctttcaggcttgcttgatgccctgagcttgttttactccttgctgttaacacaagtggtttgttcttcagatagctgcttgcaaaaacaaggccgatggtagtctccagcagacctgagctgctgggataacaggcagcggtttaacct

SEQ ID NO: 25545 - DNA, 600 bp, Chicken  19866894240883_3
acctctctcccacctctataggaatgtccccttccctcctctggcagtgctgagggaagcgcatcccaacgcccgctttctctgtctgcattgacycacattagaatcccatggagctgaccgcaggtggttggagtcgcagcgtttgcctgctttgacttcaccagtgctgccaccgctttgccctcttgcagtgccttttctgctgctgttcttccccgggttccacytgacctcacagcgtgatcctgctgctggctgggcgggcagcttctgtgagggtctgcacactgctggctytgcatccaactgctgctcaaagcactaacccctcctgtccaatggacccagctaaactgattgttttccttactgctagctctttcaggcttgcttgatgccctgagcttgttttactccttgctgttaacacaagtggtttgttcttcagatagctgcttgcaaaaacaaggccgatggtagtctccagcagacctgagctgctgggataacaggcagcggtttaacctcattctttcagcagaggttactcagtgaacctgcagaggttactggggagattggcagagcaagrctttt

SEQ ID NO: 25546 - DNA, 600 bp, Chicken  19866894240883_4
ggctytgcatccaactgctgctcaaagcactaacccctcctgtccaatggacccagctaaactgattgttttccttactgctagctctttcaggcttgcttgatgccctgagcttgttttactccttgctgttaacacaagtggtttgttcttcagatagctgcttgcaaaaacaaggccgatggtagtctccagcagacctgagctgctgggataacaggcagcggtttaacctcattctttcagcagaggttactcagtgaacctgcagaggttactggggagattggcagagcaagrcttttaccaacttcaaacagatttcacaatgggagtttcctgtgcgtttgaaatgcttcagtggcctgcagggcaacaaagctggtgaaaggtctggagcacaagtcttaygaggagcagctgagggaactggcactcttcagtccaaagaagaggaggctcaggggagacactgcgtgaaaggaagttgtagcaaggtgggggtcggcctcttcttctgggtaacagtgataggacgagaagtaatggcctcaagttgtgctaagggaggttcacgtcagatagtaggaaaaacaactt

SEQ ID NO: 25547 - DNA, 600 bp, Chicken  19866894240883_5
gcttgttttactccttgctgttaacacaagtggtttgttcttcagatagctgcttgcaaaaacaaggccgatggtagtctccagcagacctgagctgctgggataacaggcagcggtttaacctcattctttcagcagaggttactcagtgaacctgcagaggttactggggagattggcagagcaagrcttttaccaacttcaaacagatttcacaatgggagtttcctgtgcgtttgaaatgcttcagtggcctgcagggcaacaaagctggtgaaaggtctggagcacaagtcttaygaggagcagctgagggaactggcactcttcagtccaaagaagaggaggctcaggggagacactgcgtgaaaggaagttgtagcaaggtgggggtcggcctcttcttctgggtaacagtgataggacgagaagtaatggcctcaagttgtgctaagggaggttcacgtcagatagtaggaaaaacaacttctcagaaggagtggtcaggcactggaacaggctgcctggggagatggtacagtccccgtcccctggaggtgctcaagaaaaacagagatgtggcactgagggacatggtta

SEQ ID NO: 25548 - DNA, 600 bp, Chicken  19866894240884_1
ctgctgtatttaccagtacattaagatcattgttttctaaaccctctttgggtgaaagttagcatatgaagtaatcaaactccttttattacttgaaaaattactatataaataaagatttctgttattgttaacttcaatgtgggaaataagagctcttgttttcaaaaaaatgaccctgaaatattcttgcaagaaaatcagcaaatcaagcaaatcattttctgtgcagaaggaaggagactttcttgtcctctgagcttgtaaaggtaggatagtcctttccagaaacctttgtgrtrtttgtttcatttggccacaggagttgtaattagtgaagtaattcgagttcatatgaaaaaaaatattaccctgaaatgtttggagagagagtcttaagggttcaccacatgaaagaaggaatgtagctaaaagcagttttgattgctggtgagactgggaatgttgaagtaaggttatgaaatgtcaggggcttattttgagcatcaacatgttaacttcaaagttcaccttatttgtcagtagtagactgagagttgtatacaaattagaggcttttattttgctttcagatgtgat

SEQ ID NO: 25549 - DNA, 600 bp, Chicken  19866894240884_2
gctgtatttaccagtacattaagatcattgttttctaaaccctctttgggtgaaagttagcatatgaagtaatcaaactccttttattacttgaaaaattactatataaataaagatttctgttattgttaacttcaatgtgggaaataagagctcttgttttcaaaaaaatgaccctgaaatattcttgcaagaaaatcagcaaatcaagcaaatcattttctgtgcagaaggaaggagactttcttgtcctctgagcttgtaaaggtaggatagtcctttccagaaacctttgtgrtrtttgtttcatttggccacaggagttgtaattagtgaagtaattcgagttcatatgaaaaaaaatattaccctgaaatgtttggagagagagtcttaagggttcaccacatgaaagaaggaatgtagctaaaagcagttttgattgctggtgagactgggaatgttgaagtaaggttatgaaatgtcaggggcttattttgagcatcaacatgttaacttcaaagttcaccttatttgtcagtagtagactgagagttgtatacaaattagaggcttttattttgctttcagatgtgatca

SEQ ID NO: 25550 - DNA, 599 bp, Chicken  19866894240902_1
  misc_feature (1)..(70): n is any nucleotide
nnnnnnnnnnnnnnnnnnnnnnnnnnnnnnnnnnnnnnnnnnnnnnnnnnnnnnnnnnnnnnnnnnnnnncttatggtggaagccattaaacacgtccttctttgtcagcctcctgaatgaataattttcaaagagaaaagaataacttcccataagcattgcttgttgaaggagggagtgttctgacaaagcatacaataccaaaatgaacctttcattttgcttaaaacaattgtttattaggaaacctgtacatgctttgcctttacttgcatcccttacaaaattctgctgcgccygtggcccagtggcagagggtgrctttttgttaagggcatctagtgaaaaaatgaaggaaaatgcccttaaactggaagagggtagatttagactagatattaggaagaaattatttagtgtgagggtgaaacactgcaacagattgcccagagaggtaaatgccccctccttggaggcattcraggccaggctgaatggggctgtgagcagcctggtctagagggaggtgtccctgcccacagcagggggttggaactagatgatcttaaaggtccttaaaaataacaaaagaaccaac

SEQ ID NO: 25551 - DNA, 599 bp, Chicken  19866894240902_2
  misc_feature (1)..(48): n is any nucleotide
nnnnnnnnnnnnnnnnnnnnnnnnnnnnnnnnnnnnnnnnnnnnnnnncttatggtggaagccattaaacacgtccttctttgtcagcctcctgaatgaataattttcaaagagaaaagaataacttcccataagcattgcttgttgaaggagggagtgttctgacaaagcatacaataccaaaatgaacctttcattttgcttaaaacaattgtttattaggaaacctgtacatgctttgcctttacttgcatcccttacaaaattctgctgcgccygtggcccagtggcagagggtgrctttttgttaagggcatctagtgaaaaaatgaaggaaaatgcccttaaactggaagagggtagatttagactagatattaggaagaaattatttagtgtgagggtgaaacactgcaacagattgcccagagaggtaaatgccccctccttggaggcattcraggccaggctgaatggggctgtgagcagcctggtctagagggaggtgtccctgcccacagcagggggttggaactagatgatcttaaaggtccttaaaaataacaaaagaaccaacttgaggcaagaccaaggcccag

SEQ ID NO: 25552 - DNA, 600 bp, Chicken  19866894240902_3
ctgacaaagcatacaataccaaaatgaacctttcattttgcttaaaacaattgtttattaggaaacctgtacatgctttgcctttacttgcatcccttacaaaattctgctgcgccygtggcccagtggcagagggtgrctttttgttaagggcatctagtgaaaaaatgaaggaaaatgcccttaaactggaagagggtagatttagactagatattaggaagaaattatttagtgtgagggtgaaacactgcaacagattgcccagagaggtaaatgccccctccttggaggcattcraggccaggctgaatggggctgtgagcagcctggtctagagggaggtgtccctgcccacagcagggggttggaactagatgatcttaaaggtccttaaaaataacaaaagaaccaacttgaggcaagaccaaggcccagtgcggcctgcactaactccatggcaacacactgcagcagcgacactcactctgcagaaggggcacagggaatactgctgctcccactgcagcacagcaggttgagaaacacaatttggacagtgataatgagaacagccttaaaaattgcctttccaagaat

SEQ ID NO: 25553 - DNA, 600 bp, Chicken  19866894240908_1
atgtgttgatatactaaagtgcataaaatctcagcagcttcattagcaagaaaaacctgttttagcctcagaatgaaatataaggtaggcatatccatttctgggtagcaagacattgactttcccactgattcagcattctggtttaataataaaaaacatttttcagtttacctcatttacattaccactttagaagacgtaggcagctgagacagagactacttcagcagatgtgttgtgtcatacggtgacaccactcttctgctctcagataatgactgcagaggtgaaaacagrcttatcagctgttgtytctcaaagcactgtgaagctgcctaggagggctttgacaaagtgtctgggaagtggccatgtgagagggatcctcttctttccartgaccggcagctgagttcttccttcatggcatgatggagrtgcacattgttctgagccatagcagggcagggaagcaatgctgagtctcacactcagtaagctggaccacaaggaccagcagtggagaaagccagcagagcctctaatgaactgtcaggctttgcttgtaggccaggattttggaatatggccacatca

SEQ ID NO: 25554 - DNA, 600 bp, Chicken  19866894240908_2
aagtgcataaaatctcagcagcttcattagcaagaaaaacctgttttagcctcagaatgaaatataaggtaggcatatccatttctgggtagcaagacattgactttcccactgattcagcattctggtttaataataaaaaacatttttcagtttacctcatttacattaccactttagaagacgtaggcagctgagacagagactacttcagcagatgtgttgtgtcatacggtgacaccactcttctgctctcagataatgactgcagaggtgaaaacagrcttatcagctgttgtytctcaaagcactgtgaagctgcctaggagggctttgacaaagtgtctgggaagtggccatgtgagagggatcctcttctttccartgaccggcagctgagttcttccttcatggcatgatggagrtgcacattgttctgagccatagcagggcagggaagcaatgctgagtctcacactcagtaagctggaccacaaggaccagcagtggagaaagccagcagagcctctaatgaactgtcaggctttgcttgtaggccaggattttggaatatggccacatcatgaatgaagttattgc

SEQ ID NO: 25555 - DNA, 600 bp, Chicken  19866894240908_3
tgggtagcaagacattgactttcccactgattcagcattctggtttaataataaaaaacatttttcagtttacctcatttacattaccactttagaagacgtaggcagctgagacagagactacttcagcagatgtgttgtgtcatacggtgacaccactcttctgctctcagataatgactgcagaggtgaaaacagrcttatcagctgttgtytctcaaagcactgtgaagctgcctaggagggctttgacaaagtgtctgggaagtggccatgtgagagggatcctcttctttccartgaccggcagctgagttcttccttcatggcatgatggagrtgcacattgttctgagccatagcagggcagggaagcaatgctgagtctcacactcagtaagctggaccacaaggaccagcagtggagaaagccagcagagcctctaatgaactgtcaggctttgcttgtaggccaggattttggaatatggccacatcatgaatgaagttattgccagttcaggaggagctctgctactcaagcttccaggagaatggctttgcctcagcatgggcagatgatacagaccccagggaggg

SEQ ID NO: 25556 - DNA, 600 bp, Chicken  19866894240908_4
tggtttaataataaaaaacatttttcagtttacctcatttacattaccactttagaagacgtaggcagctgagacagagactacttcagcagatgtgttgtgtcatacggtgacaccactcttctgctctcagataatgactgcagaggtgaaaacagrcttatcagctgttgtytctcaaagcactgtgaagctgcctaggagggctttgacaaagtgtctgggaagtggccatgtgagagggatcctcttctttccartgaccggcagctgagttcttccttcatggcatgatggagrtgcacattgttctgagccatagcagggcagggaagcaatgctgagtctcacactcagtaagctggaccacaaggaccagcagtggagaaagccagcagagcctctaatgaactgtcaggctttgcttgtaggccaggattttggaatatggccacatcatgaatgaagttattgccagttcaggaggagctctgctactcaagcttccaggagaatggctttgcctcagcatgggcagatgatacagaccccagggagggcttcttgtggccctcccccagctcacttggcactgcaaag

SEQ ID NO: 25557 - DNA, 600 bp, Chicken  19866894240920_1
cagatgtgcaaaatcagcggaggaagaggaggaggaaggctccaaccacagcacaaaggcaaagaggagagcgttgggactcagtgcgtgacatgatggaagcctaatgtgcaaaaccaattgaggaagaggagaaggaaggctccaatcatggcatgagaacaaagaggaggacgttggggctcagaacatggcatgatggaacccaaatgtgcaaaaagaagtgaggaagaggaggagagaggctctgaatgtggcacaatagcacagggaagagtgctgaggctcagagcacggcaygatggaacccaggtggacaaaatcagttgaggaagaggargaggaaggctcccatcgtgccacaacagcacagrgaggggaggctcagagctctccggccgtctcgacgacgtggaacagagtgacgttgtagagcacctggtgcccgttgttccaggtgtagaggaccctctcgcgtgggttgtagtccagcatggagatgtgtgagtattggttgtggaaggggatgtccgtgtattcgtagcttgaggtggccgtgtgataagcgaagtagattttggcccccgccaggtgggagtt

SEQ ID NO: 25558 - DNA, 600 bp, Chicken  19866894240920_2
tccaaccacagcacaaaggcaaagaggagagcgttgggactcagtgcgtgacatgatggaagcctaatgtgcaaaaccaattgaggaagaggagaaggaaggctccaatcatggcatgagaacaaagaggaggacgttggggctcagaacatggcatgatggaacccaaatgtgcaaaaagaagtgaggaagaggaggagagaggctctgaatgtggcacaatagcacagggaagagtgctgaggctcagagcacggcaygatggaacccaggtggacaaaatcagttgaggaagaggargaggaaggctcccatcgtgccacaacagcacagrgaggggaggctcagagctctccggccgtctcgacgacgtggaacagagtgacgttgtagagcacctggtgcccgttgttccaggtgtagaggaccctctcgcgtgggttgtagtccagcatggagatgtgtgagtattggttgtggaaggggatgtccgtgtattcgtagcttgaggtggccgtgtgataagcgaagtagattttggcccccgccaggtgggagttggtgacgtagagagtcccacagatgaggaacgattcccca

SEQ ID NO: 25559 - DNA, 600 bp, Chicken  19866894240920_3
tgggactcagtgcgtgacatgatggaagcctaatgtgcaaaaccaattgaggaagaggagaaggaaggctccaatcatggcatgagaacaaagaggaggacgttggggctcagaacatggcatgatggaacccaaatgtgcaaaaagaagtgaggaagaggaggagagaggctctgaatgtggcacaatagcacagggaagagtgctgaggctcagagcacggcaygatggaacccaggtggacaaaatcagttgaggaagaggargaggaaggctcccatcgtgccacaacagcacagrgaggggaggctcagagctctccggccgtctcgacgacgtggaacagagtgacgttgtagagcacctggtgcccgttgttccaggtgtagaggaccctctcgcgtgggttgtagtccagcatggagatgtgtgagtattggttgtggaaggggatgtccgtgtattcgtagcttgaggtggccgtgtgataagcgaagtagattttggcccccgccaggtgggagttggtgacgtagagagtcccacagatgaggaacgattccccagcgctgcgtttcgggtaccccgtgtcccagctcc

SEQ ID NO: 25560 - DNA, 600 bp, Chicken  19866894240921_1
tcccaatagatgatggtttgttggacgatggtcataatgatcaagttggagtcttaaattcacctacctgctattctggtcatcagaatggggaacgaattgagcgtttttctcggaaggtgtttgttggaggtcttccaccagatattgatgaaggtgagctgcctgaaaactaagtattggaagtttggaaggagggagaaagaaaaatgaggtaaattaggtacgaaaataaaccatctagcaaagtaatgttgtggtataagaagctacagttacgtttgttttgttttttttttwaagagagttgatgagaatactgtgctttttgtcatttaatgtcatccactccttttgattttgaaatgatttagttctgattctgccctcaagagtttcatatgatgcctggaatttgtggttaatgcttatctttcagtcataggaggacacatattcctttcaaatgtgttagccctccatactgtcctctatatgaacctactttatcatctattcatgggaaatgactattagtaattgaatttcaaattctattttaccattacctgaaaatctcaaaagtggtttagaaaggtt

SEQ ID NO: 25561 - DNA, 600 bp, Chicken  19866894240922_1
cagccctacaaaaagcccagagccaccaggtgctgcagtgactgctccagccaggggaacagtgctgctctgcatagagctgcagcaaaggggaccctctgcctgctccctcagacacagcactacctcacatgcactgcaaggcacagagcatggggagctgcagcctccatccccgccccccggccaacctcaagcctgcagccagcacgaacagcagccccattcacagaaaccagaattggaaaaggagcagcttgagcaatgatttgcttacagacaaagccgtgttgctcttcygtccgtgtgctggtccagcgaggctgtgtgagatgtaggtgcatggcatcggcaggccacgtgctgtgtgctgcagcagggcactgctgccgggtccttggagtagtctgcaaccgtgggtgttgtctgttgcaatatcctccagggcctgggcgtaagccctgctgattgcaggcagcactgcctgatactccctggatgccacgtccaaaggctcctgctcctggatatcgcgatccaagttgaaaatgagcggtggccgatgatgctcttctggcccaatgcttccatcacaagcct

SEQ ID NO: 25562 - DNA, 600 bp, Chicken  19866894240925_1
ctcaaagccccatccagcatggccttgagtgcttccagagcgggggcattgacaacctcattgggaaacatgttccagtgtctcaccatcctcacagtaaagaacttcttccccatgtctagtctaaatctaccctctttcagtttaaaaccatttttccttctcctgtcactacatgcccttataaaaagtccctcctcagctttcctgtaggtccccttcagatactggaaggccactataaggtgtctctggagtcttctccaggctcaagagtcccagcattctcagcctgttctyrtagaaaaggtgctctagccctctcataatctttgtaaccctcctctaaacgtgatccaacaacttcttgtgttgagggcttcagaattggatgcagtactcccggtgggttttttctaagaggtcaaataacacatcttcattatccatagggactataatgttacttatttctcaataagcggaaagatgtacactgagggaggaggaggaaaacgtattcaaaagctcaagtagctccttacccaaccccagggaagcacacacaccctgcaatcacacctccctttctttgagggg

SEQ ID NO: 25563 - DNA, 600 bp, Chicken  19866894240925_2
tcaaagccccatccagcatggccttgagtgcttccagagcgggggcattgacaacctcattgggaaacatgttccagtgtctcaccatcctcacagtaaagaacttcttccccatgtctagtctaaatctaccctctttcagtttaaaaccatttttccttctcctgtcactacatgcccttataaaaagtccctcctcagctttcctgtaggtccccttcagatactggaaggccactataaggtgtctctggagtcttctccaggctcaagagtcccagcattctcagcctgttctyrtagaaaaggtgctctagccctctcataatctttgtaaccctcctctaaacgtgatccaacaacttcttgtgttgagggcttcagaattggatgcagtactcccggtgggttttttctaagaggtcaaataacacatcttcattatccatagggactataatgttacttatttctcaataagcggaaagatgtacactgagggaggaggaggaaaacgtattcaaaagctcaagtagctccttacccaaccccagggaagcacacacaccctgcaatcacacctccctttctttgaggggg

SEQ ID NO: 25564 - DNA, 600 bp, Chicken  19866894240925_3
aaccctcctctaaacgtgatccaacaacttcttgtgttgagggcttcagaattggatgcagtactcccggtgggttttttctaagaggtcaaataacacatcttcattatccatagggactataatgttacttatttctcaataagcggaaagatgtacactgagggaggaggaggaaaacgtattcaaaagctcaagtagctccttacccaaccccagggaagcacacacaccctgcaatcacacctccctttctttgagggggcacgcaaaagacaaagaggctaaaacaaaaccttytagctttcaatatgaggagtgcctccccttcacggggaggcctatgtcaaaaggaatgctaatgcttaaatcactcctcacttccctgcgaagccatacagaaaaacctcacaaacaccacacctaagttataagacaccccttcagttccaaaatgcgcagttaagtttcaatatataaaattaatctccttggggaggtgctcatgtctaagttatcaaaattattactccttgcaactccaggaggtgcacacagaaaagtttcaaattaatgtaaatgctcaaatcactcctccct

SEQ ID NO: 25565 - DNA, 600 bp, Chicken  19866894240929_1
tctgctactgagtgactgttattcagaaagtaacataagctattttacccacttggagttgtttcatatttactctgtcaaagtaaactatcaaagttcctttactgtaaaactgtggtgtgtggtagtattacagatctgagtaactgctctgtagtgaggtttctgaggagatccggaaaagaaagaaaatcactgcttttatcctgtaaagaaagttctagaactgagaacctatacagataacagaatgaagctcttagtctgaatgcgtttgcagttcactcccagctttcaggrcatgctttaattcctcagctcatctgcatttctcctgcatagaacctggtgggtctctaccagtctgtcctacagcctttaagttattagcgtctgtatgctgagaactatatcctgatacttcaaaatccacaaaaagtggtttcatgctaaatgactttcacctagtgcaaattcatctgaagaaaatattataaagggttgaccataaacattcagtgactttttcaggaagaactagcaaatatttttattgattgatttcagtaaattagcaatttacatttgttcttagaagaa

SEQ ID NO: 25566 - DNA, 599 bp, Chicken  19866894240935_1
  misc_feature (1)..(76): n is any nucleotide
nnnnnnnnnnnnnnnnnnnnnnnnnnnnnnnnnnnnnnnnnnnnnnnnnnnnnnnnnnnnnnnnnnnnnnnnnnnntgtgggcaggttttcacccttcaaaagagattatttgcccactataccctatgaagggacacaacaatcaccttgctaaacacacagtatgtacataacaattaaaacaagtgtcactggcaaggaaatggttgccttggtttgctgaacatcctaacttccccttccagatcttctgtaataggcacaacttccattggtcctgaaaaataatcattgaaggytgcttacaaccttgcatctttgtgtcaaattgcaactggaatggcagcattaaattgcaacattgaaattatcaaataaaaagcccaatccatgtgtgaaaatctgattgcttttgagtgagtgagactcaatgataagtttcagcwaactaagctgcagtaaaaccaatatctgctagaggagattttaattatagaagtttgccctcttgcccttttgcagttcatcaaagaaaaatgtgttttgttttaataaattgaacttttgggagaaaactcactcaagataataagctaaa

SEQ ID NO: 25567 - DNA, 600 bp, Chicken  19866894240935_2
cttgctaaacacacagtatgtacataacaattaaaacaagtgtcactggcaaggaaatggttgccttggtttgctgaacatcctaacttccccttccagatcttctgtaataggcacaacttccattggtcctgaaaaataatcattgaaggytgcttacaaccttgcatctttgtgtcaaattgcaactggaatggcagcattaaattgcaacattgaaattatcaaataaaaagcccaatccatgtgtgaaaatctgattgcttttgagtgagtgagactcaatgataagtttcagcwaactaagctgcagtaaaaccaatatctgctagaggagattttaattatagaagtttgccctcttgcccttttgcagttcatcaaagaaaaatgtgttttgttttaataaattgaacttttgggagaaaactcactcaagataataagctaaatgttcaaaagtattaaatgggtaatttcctttgtatcatcaccattaaacaaatgaggaagtgtgtcaagtatttcccatattatgcttttactgccctgtagaggaagagagacatgttcttaacagagataaaaaaggacgtagga

SEQ ID NO: 25568 - DNA, 599 bp, Chicken  19866894240938_1
  misc_feature (1)..(95): n is any nucleotide
nnnnnnnnnnnnnnnnnnnnnnnnnnnnnnnnnnnnnnnnnnnnnnnnnnnnnnnnnnnnnnnnnnnnnnnnnnnnnnnnnnnnnnnnnnnnnnnatggcagcttttaaagagctaacattagagaaggcagcatcttccttcttctgccatttgcaggcttgctgagtgctgtgtggctttcagcaagagtaagccaggctgctgtgcagagacccagtgccgctcacctagcggcaagaagcaggcgagtgggtaaggctgcttctgagagcctgaaatggctcgagatgactcacaygggagcagattgtttcctaaactccagatgaaatcactttgcatattccctgactaaggcaagagggtgcttaccagtgcaacgctctgcccagtgccttcagcacagactgaagtatcgcctctcagctgcgtcactgctgacagcagatgctagggagctatgttgaaagtcttggctactgctttttacccttctggacttcttcactgaggccaaatgtcgctttttcagtgctggcaagaagataacaragcrgttctttgcttttccacctgactgcaaagatttcagtggga

SEQ ID NO: 25569 - DNA, 600 bp, Chicken  19866894240938_2
gtaaggctgcttctgagagcctgaaatggctcgagatgactcacaygggagcagattgtttcctaaactccagatgaaatcactttgcatattccctgactaaggcaagagggtgcttaccagtgcaacgctctgcccagtgccttcagcacagactgaagtatcgcctctcagctgcgtcactgctgacagcagatgctagggagctatgttgaaagtcttggctactgctttttacccttctggacttcttcactgaggccaaatgtcgctttttcagtgctggcaagaagataacaragcrgttctttgcttttccacctgactgcaaagatttcagtgggaaaggcttctggccctgtctgatgggtgttgagaggccayggctccatgctaccaacactcagagagctgatcccagtgcccctaccaaagtactgttggaaactgatttggaacagtgttgcagggaagaaattggagttgccagtgtgcatatcatctagctgataatctgccacaaacatcactgcctgctttcttcagccacgcacactggagaaggtagcagggtaacacgaccagtttaggaaatgggta

SEQ ID NO: 25570 - DNA, 600 bp, Chicken  19866894240938_3
ggctgcttctgagagcctgaaatggctcgagatgactcacaygggagcagattgtttcctaaactccagatgaaatcactttgcatattccctgactaaggcaagagggtgcttaccagtgcaacgctctgcccagtgccttcagcacagactgaagtatcgcctctcagctgcgtcactgctgacagcagatgctagggagctatgttgaaagtcttggctactgctttttacccttctggacttcttcactgaggccaaatgtcgctttttcagtgctggcaagaagataacaragcrgttctttgcttttccacctgactgcaaagatttcagtgggaaaggcttctggccctgtctgatgggtgttgagaggccayggctccatgctaccaacactcagagagctgatcccagtgcccctaccaaagtactgttggaaactgatttggaacagtgttgcagggaagaaattggagttgccagtgtgcatatcatctagctgataatctgccacaaacatcactgcctgctttcttcagccacgcacactggagaaggtagcagggtaacacgaccagtttaggaaatgggtagata

SEQ ID NO: 25571 - DNA, 600 bp, Chicken  19866894240938_4
ttgcatattccctgactaaggcaagagggtgcttaccagtgcaacgctctgcccagtgccttcagcacagactgaagtatcgcctctcagctgcgtcactgctgacagcagatgctagggagctatgttgaaagtcttggctactgctttttacccttctggacttcttcactgaggccaaatgtcgctttttcagtgctggcaagaagataacaragcrgttctttgcttttccacctgactgcaaagatttcagtgggaaaggcttctggccctgtctgatgggtgttgagaggccayggctccatgctaccaacactcagagagctgatcccagtgcccctaccaaagtactgttggaaactgatttggaacagtgttgcagggaagaaattggagttgccagtgtgcatatcatctagctgataatctgccacaaacatcactgcctgctttcttcagccacgcacactggagaaggtagcagggtaacacgaccagtttaggaaatgggtagataacaggtggtgaatgagagctaagaaaatctgaccaatgaacattggagaggaaactgaacgtgggctaatatgttggctc

SEQ ID NO: 25572 - DNA, 600 bp, Chicken  19866894240945_1
cattggaagaaagaaagaatgaaaaaactctgctgatgaataggagcttgtagtctcaaagtaaagtcaggccaatagtaatttatttggaatatttgaaatcctcccatgtgtatgaattttgttaggcataggcttaagtctgcttagttgctgtccttcaaacaaatgtagtcacacagttacaaaggttgagaaattcagtcctaatcaggagactgaatgatacagagctgaaatctgatttccagtgaatatcgcctaaatacttcttctatttaaccatggtgtctgtgtgcmtaaaccctctacatacttctgtaaatctcaagacattayatacatgaatggggaactgtgcaagtctatgtgcttgcaactctgagcccacagaactggagactatttctcatctatatgtagtagtatatgttatctagagcctggccctgctactatgtgttgtattttatttttcagtagcctccagcttataagtgttctgctagattgctgtcagtaagaattttgtagaagagaaaagaggacagtgcttcaaaataatgcttgggaagaacatcatactccctgaatatgaaa

SEQ ID NO: 25573 - DNA, 600 bp, Chicken  19866894240945_2
ataggagcttgtagtctcaaagtaaagtcaggccaatagtaatttatttggaatatttgaaatcctcccatgtgtatgaattttgttaggcataggcttaagtctgcttagttgctgtccttcaaacaaatgtagtcacacagttacaaaggttgagaaattcagtcctaatcaggagactgaatgatacagagctgaaatctgatttccagtgaatatcgcctaaatacttcttctatttaaccatggtgtctgtgtgcmtaaaccctctacatacttctgtaaatctcaagacattayatacatgaatggggaactgtgcaagtctatgtgcttgcaactctgagcccacagaactggagactatttctcatctatatgtagtagtatatgttatctagagcctggccctgctactatgtgttgtattttatttttcagtagcctccagcttataagtgttctgctagattgctgtcagtaagaattttgtagaagagaaaagaggacagtgcttcaaaataatgcttgggaagaacatcatactccctgaatatgaaaaatggccatcatccagttttcacacaaccccattactca

SEQ ID NO: 25574 - DNA, 600 bp, Chicken  19866894240947_1
actgaatcaagaaaacttaattttgacagtcctgatatatagactattttggttaaccaaaaggaacacatacattttctacattagagaaatttccattatttttctctcagccatgaaaatcaattttgatgtgattacactcagaggcttcttgatgtgcttctgacagtacaaaatggatagaaatggtgggtggtgttgaattgaggatactgtggtttgctgaactctgtcacaaaccaaaagtgctaagattaaagcacacacccttaatgtattgagcaaagaagtgagccytaggaaaaatgrtgattacaatgttttgatattgaagattgcaaaagattctgagctttcatcatctcctgttcactgtatttactgtactgacatttgtaggactagaaagagatcaccaaaattcakcagataaaagcagcccttaacaataaacaatggggtaatgcctaaacatagatggacatatgtaaaaggaaaaaccatggtctttggagctgtacragtcttacagggtttcactttcttcatgttgattacattgggctaacatggcttcatggacatcacttccctttc

SEQ ID NO: 25575 - DNA, 600 bp, Chicken  19866894240947_2
aaacttaattttgacagtcctgatatatagactattttggttaaccaaaaggaacacatacattttctacattagagaaatttccattatttttctctcagccatgaaaatcaattttgatgtgattacactcagaggcttcttgatgtgcttctgacagtacaaaatggatagaaatggtgggtggtgttgaattgaggatactgtggtttgctgaactctgtcacaaaccaaaagtgctaagattaaagcacacacccttaatgtattgagcaaagaagtgagccytaggaaaaatgrtgattacaatgttttgatattgaagattgcaaaagattctgagctttcatcatctcctgttcactgtatttactgtactgacatttgtaggactagaaagagatcaccaaaattcakcagataaaagcagcccttaacaataaacaatggggtaatgcctaaacatagatggacatatgtaaaaggaaaaaccatggtctttggagctgtacragtcttacagggtttcactttcttcatgttgattacattgggctaacatggcttcatggacatcacttccctttctgtaaccatttt

SEQ ID NO: 25576 - DNA, 562 bp, Chicken  19866894240947_3
tgatgtgattacactcagaggcttcttgatgtgcttctgacagtacaaaatggatagaaatggtgggtggtgttgaattgaggatactgtggtttgctgaactctgtcacaaaccaaaagtgctaagattaaagcacacacccttaatgtattgagcaaagaagtgagccytaggaaaaatgrtgattacaatgttttgatattgaagattgcaaaagattctgagctttcatcatctcctgttcactgtatttactgtactgacatttgtaggactagaaagagatcaccaaaattcakcagataaaagcagcccttaacaataaacaatggggtaatgcctaaacatagatggacatatgtaaaaggaaaaaccatggtctttggagctgtacragtcttacagggtttcactttcttcatgttgattacattgggctaacatggcttcatggacatcacttccctttctgtaaccattttatttctttttttccatattctaaataagttgtcttttctacatgaaatgtttactgttagcctactagcaaggaagata

SEQ ID NO: 25577 - DNA, 466 bp, Chicken  19866894240947_4
ctgaactctgtcacaaaccaaaagtgctaagattaaagcacacacccttaatgtattgagcaaagaagtgagccytaggaaaaatgrtgattacaatgttttgatattgaagattgcaaaagattctgagctttcatcatctcctgttcactgtatttactgtactgacatttgtaggactagaaagagatcaccaaaattcakcagataaaagcagcccttaacaataaacaatggggtaatgcctaaacatagatggacatatgtaaaaggaaaaaccatggtctttggagctgtacragtcttacagggtttcactttcttcatgttgattacattgggctaacatggcttcatggacatcacttccctttctgtaaccattttatttctttttttccatattctaaataagttgtcttttctacatgaaatgtttactgttagcctactagcaaggaagata

SEQ ID NO: 25578 - DNA, 600 bp, Chicken  19866894240949_1
agcatgcagtaagctataatttctaaagagtaatgtgtccctgtgaaggacacactaaatccatctcacagatcagaagagtcaggcttaccaggtgtgaagagatctgagctgctttcagtcattcccttacatgcatacagaaatgggagcagtaagattcctacctgctctacttggtaaaactgaagtcagttacactgcattaggaaaatagctgtcctactgcgtcatctggggtagataaatacacaaagccaggtaaatcacatttacaggagtgtttcatttagaaaggcrcactaaaaccaaacaaaacaagaagaaataaaaagaggaacatagcagcagctatcagtttggctttcaattcttytttctttttttcttttatgacttccattgagttactaaagctggctgtgcttgatygaatcagcaccccagccattaaacaccagcaccatgtcacacattaggtcttgtagtacttcctgaattacctgtagaggtgctgcaatcatcagcgatttcctaacacagcccacaaccacctgatgtccacagtgcattctcaggctacaaagaggtctgtgattg

SEQ ID NO: 25579 - DNA, 600 bp, Chicken  19866894240949_2
aagagtcaggcttaccaggtgtgaagagatctgagctgctttcagtcattcccttacatgcatacagaaatgggagcagtaagattcctacctgctctacttggtaaaactgaagtcagttacactgcattaggaaaatagctgtcctactgcgtcatctggggtagataaatacacaaagccaggtaaatcacatttacaggagtgtttcatttagaaaggcrcactaaaaccaaacaaaacaagaagaaataaaaagaggaacatagcagcagctatcagtttggctttcaattcttytttctttttttcttttatgacttccattgagttactaaagctggctgtgcttgatygaatcagcaccccagccattaaacaccagcaccatgtcacacattaggtcttgtagtacttcctgaattacctgtagaggtgctgcaatcatcagcgatttcctaacacagcccacaaccacctgatgtccacagtgcattctcaggctacaaagaggtctgtgattgcccatctagatcagccttacagaaatcaatccatgtggactgttggaaatgtggtactctctgctcaacataacct

SEQ ID NO: 25580 - DNA, 600 bp, Chicken  19866894240949_3
catgcatacagaaatgggagcagtaagattcctacctgctctacttggtaaaactgaagtcagttacactgcattaggaaaatagctgtcctactgcgtcatctggggtagataaatacacaaagccaggtaaatcacatttacaggagtgtttcatttagaaaggcrcactaaaaccaaacaaaacaagaagaaataaaaagaggaacatagcagcagctatcagtttggctttcaattcttytttctttttttcttttatgacttccattgagttactaaagctggctgtgcttgatygaatcagcaccccagccattaaacaccagcaccatgtcacacattaggtcttgtagtacttcctgaattacctgtagaggtgctgcaatcatcagcgatttcctaacacagcccacaaccacctgatgtccacagtgcattctcaggctacaaagaggtctgtgattgcccatctagatcagccttacagaaatcaatccatgtggactgttggaaatgtggtactctctgctcaacataacctatgagagattgacactgatcagagatacctctgcttgtacatctgcatkaacagaa

SEQ ID NO: 25581 - DNA, 600 bp, Chicken  19866894240949_4
cttgatygaatcagcaccccagccattaaacaccagcaccatgtcacacattaggtcttgtagtacttcctgaattacctgtagaggtgctgcaatcatcagcgatttcctaacacagcccacaaccacctgatgtccacagtgcattctcaggctacaaagaggtctgtgattgcccatctagatcagccttacagaaatcaatccatgtggactgttggaaatgtggtactctctgctcaacataacctatgagagattgacactgatcagagatacctctgcttgtacatctgcatkaacagaatggttgaccagaatggaaagatctgaaacatctcttaccaagcatcagtagaaaagaaagtgatgtgcagcaacagaatatttaagtcacgtatgtgtatcagaacaggaggcaccaaacatcatgagatggttgtgaatatgagcactcccaggarggctgggmagccctaagatcactgcttggtgttggaaagcatgaaaactgtagtagggaggaaggactgaggagctgcaatagcatacatctgcaagagttaaacattacgatgtcattcagaaacatcacttcac

SEQ ID NO: 25582 - DNA, 600 bp, Chicken  19866894240949_5
gtctgtgattgcccatctagatcagccttacagaaatcaatccatgtggactgttggaaatgtggtactctctgctcaacataacctatgagagattgacactgatcagagatacctctgcttgtacatctgcatkaacagaatggttgaccagaatggaaagatctgaaacatctcttaccaagcatcagtagaaaagaaagtgatgtgcagcaacagaatatttaagtcacgtatgtgtatcagaacaggaggcaccaaacatcatgagatggttgtgaatatgagcactcccaggarggctgggmagccctaagatcactgcttggtgttggaaagcatgaaaactgtagtagggaggaaggactgaggagctgcaatagcatacatctgcaagagttaaacattacgatgtcattcagaaacatcacttcactgatggttcttgaacaacagaagggctgtgggtgaatggttttgccacctggaacagctgagggtttgcacatcgcacagatgttggtgcagactccggttgctttatcccacacattcttatctccagttgtgcaagtaggatgacttgtttttttttttttt

SEQ ID NO: 25583 - DNA, 600 bp, Chicken  19866894240949_6
ttgcccatctagatcagccttacagaaatcaatccatgtggactgttggaaatgtggtactctctgctcaacataacctatgagagattgacactgatcagagatacctctgcttgtacatctgcatkaacagaatggttgaccagaatggaaagatctgaaacatctcttaccaagcatcagtagaaaagaaagtgatgtgcagcaacagaatatttaagtcacgtatgtgtatcagaacaggaggcaccaaacatcatgagatggttgtgaatatgagcactcccaggarggctgggmagccctaagatcactgcttggtgttggaaagcatgaaaactgtagtagggaggaaggactgaggagctgcaatagcatacatctgcaagagttaaacattacgatgtcattcagaaacatcacttcactgatggttcttgaacaacagaagggctgtgggtgaatggttttgccacctggaacagctgagggtttgcacatcgcacagatgttggtgcagactccggttgctttatcccacacattcttatctccagttgtgcaagtaggatgacttgtttttttttttttttttttgat

SEQ ID NO: 25584 - DNA, 600 bp, Chicken  19866894240953_1
tttttgctcactaaactattatcttatgtatgcaaaatgtttcagggaatcactgtggttcatctcttctggaggtacagattccttatgtgtttctcaccactgaaggtcttcttaatatgccagattttcttcagcttttggaatctcagtgagtgaaaatgacctgtttaatcttactaattactttcagctttccagggtatagaaccagttttccaaaatacagatcccttccttgggttggacgggaccttacagttcagtccctctggcatgggctgggttgccatccactamatcaggcactggatcaggctgcccaggaaccattcagcctgtccttgygtgcctccacagatggggcatccacagcttctcggggcagcccatgcctgtgccccaccattctgagagaagaatttcttcctagcatctaatcgaaacctgtcctcttttattttaaaaccatttccccttgtcctatcactatccacacaaaaagtagctctccttgctgtttataagttcattttaagtacttgagggctgcagtgaggtctccctcagagcgttatcttctgtctgaacaagcccagc

SEQ ID NO: 25585 - DNA, 600 bp, Chicken  19866894240953_2
atcactgtggttcatctcttctggaggtacagattccttatgtgtttctcaccactgaaggtcttcttaatatgccagattttcttcagcttttggaatctcagtgagtgaaaatgacctgtttaatcttactaattactttcagctttccagggtatagaaccagttttccaaaatacagatcccttccttgggttggacgggaccttacagttcagtccctctggcatgggctgggttgccatccactamatcaggcactggatcaggctgcccaggaaccattcagcctgtccttgygtgcctccacagatggggcatccacagcttctcggggcagcccatgcctgtgccccaccattctgagagaagaatttcttcctagcatctaatcgaaacctgtcctcttttattttaaaaccatttccccttgtcctatcactatccacacaaaaagtagctctccttgctgtttataagttcattttaagtacttgagggctgcagtgaggtctccctcagagcgttatcttctgtctgaacaagcccagctccctcagcctgtcttcatagggagaggtgctccagccctctgatgat

SEQ ID NO: 25586 - DNA, 600 bp, Chicken  19866894240954_1
ggcagggtcaggtttgcttctgccacaaagagttcctaagacataataaatagagccgagagaaaacaaacctttccctaagtgggaccgcgctgctctgcccagctgcccgaggaactgaatgttttgatgaaatccatgatgatgtatacagaacaattttactcttaaccagctgccaccttctttcctgccgtgctgatctattcggacccaaacactttctcttccttaagagcatagatttgctcgaggagaatcaccgaaaacagggtgaataattcctatgaatcagcgccrtcctgagagaaagcagcactcgtaatcggaaagcaaagcgtccggaggcagcgctgggagggctgcagtgctgtcctgctggcttcccctcgaagggctgctcagcccccctgccctctccataggcacagcacgaggcagacacacagctcggcccccgggaaggggcgtcgggaccctttgccccctcctcygtagaaactgctggtggcgcacagaggcctctgccgcaccgggtgaggttcwcaccactctcaggagctttaattagagccgcgctgcacgcactgctttcatagc

SEQ ID NO: 25587 - DNA, 600 bp, Chicken  19866894240954_2
cgtgctgatctattcggacccaaacactttctcttccttaagagcatagatttgctcgaggagaatcaccgaaaacagggtgaataattcctatgaatcagcgccrtcctgagagaaagcagcactcgtaatcggaaagcaaagcgtccggaggcagcgctgggagggctgcagtgctgtcctgctggcttcccctcgaagggctgctcagcccccctgccctctccataggcacagcacgaggcagacacacagctcggcccccgggaaggggcgtcgggaccctttgccccctcctcygtagaaactgctggtggcgcacagaggcctctgccgcaccgggtgaggttcwcaccactctcaggagctttaattagagccgcgctgcacgcactgctttcatagcttctcctgtttattatttatgatttaaagcacagacgaaacaacgggagaatatattttttggcttcgcttgctaaggaaaaacggcrcgtggtggcacggggcaataaacattacaaataaataagtaagaggatttccacggcagtgcccacctggtgccgggtggggttgcattgcgcgcagagccccatc

SEQ ID NO: 25588 - DNA, 600 bp, Chicken  19866894240954_3
tgctcgaggagaatcaccgaaaacagggtgaataattcctatgaatcagcgccrtcctgagagaaagcagcactcgtaatcggaaagcaaagcgtccggaggcagcgctgggagggctgcagtgctgtcctgctggcttcccctcgaagggctgctcagcccccctgccctctccataggcacagcacgaggcagacacacagctcggcccccgggaaggggcgtcgggaccctttgccccctcctcygtagaaactgctggtggcgcacagaggcctctgccgcaccgggtgaggttcwcaccactctcaggagctttaattagagccgcgctgcacgcactgctttcatagcttctcctgtttattatttatgatttaaagcacagacgaaacaacgggagaatatattttttggcttcgcttgctaaggaaaaacggcrcgtggtggcacggggcaataaacattacaaataaataagtaagaggatttccacggcagtgcccacctggtgccgggtggggttgcattgcgcgcagagccccatctgctgggtcagtgccatcccatgggggtgccgcgtccctgcctggggtgggg

SEQ ID NO: 25589 - DNA, 600 bp, Chicken  19866894240954_4
ctcgaagggctgctcagcccccctgccctctccataggcacagcacgaggcagacacacagctcggcccccgggaaggggcgtcgggaccctttgccccctcctcygtagaaactgctggtggcgcacagaggcctctgccgcaccgggtgaggttcwcaccactctcaggagctttaattagagccgcgctgcacgcactgctttcatagcttctcctgtttattatttatgatttaaagcacagacgaaacaacgggagaatatattttttggcttcgcttgctaaggaaaaacggcrcgtggtggcacggggcaataaacattacaaataaataagtaagaggatttccacggcagtgcccacctggtgccgggtggggttgcattgcgcgcagagccccatctgctgggtcagtgccatcccatgggggtgccgcgtccctgcctggggtgggggaaacaccgcccagaggtacgaggggtttacgggcagatgctgatgctccgacgacgttttcttccctgttagtcctccctttcgtcagcacggcggaaaaagagaccgctgcgagccccacgttaacggcggtcatttaaa

SEQ ID NO: 25590 - DNA, 600 bp, Chicken  19866894240961_1
ctggcggaggtgacagccaagccgctttccatcatctatcagcgctccttgttgacgggtaaggtcccagaagactgtaggcttgccaatgtgactcccatctacaagaagggctgcagggaggatccagggaactacaggcctgttggcctgacctcggtgctggggaagattatagagcagattgtcttgagggagacatgcggcacgtgcaggacaaccaggggatcaggcctagccagcatgggttcacgaagggcaggtcctgcttgaccaacctgatctccttctatgatctaktgacccrtctggtggatgagggaaaggctgttgaagtagtctacctagacttcagcaaagcctttgacactgtctcccacagtattctcctgcagaagctggcagtccgtggcttggacaggtacactcttggctgggtaaggaaccggctggagggccgggcccagaaagtggtggtgaatggagttaaatccagctggcgaccggtcacgagtggtgttccccagggttcggtgctggggcctgtcctcttcactatctttattgatgacctggatgagggcattgagtgcaccctca

SEQ ID NO: 25591 - DNA, 600 bp, Chicken  19866894240961_2
aggtgacagccaagccgctttccatcatctatcagcgctccttgttgacgggtaaggtcccagaagactgtaggcttgccaatgtgactcccatctacaagaagggctgcagggaggatccagggaactacaggcctgttggcctgacctcggtgctggggaagattatagagcagattgtcttgagggagacatgcggcacgtgcaggacaaccaggggatcaggcctagccagcatgggttcacgaagggcaggtcctgcttgaccaacctgatctccttctatgatctaktgacccrtctggtggatgagggaaaggctgttgaagtagtctacctagacttcagcaaagcctttgacactgtctcccacagtattctcctgcagaagctggcagtccgtggcttggacaggtacactcttggctgggtaaggaaccggctggagggccgggcccagaaagtggtggtgaatggagttaaatccagctggcgaccggtcacgagtggtgttccccagggttcggtgctggggcctgtcctcttcactatctttattgatgacctggatgagggcattgagtgcaccctcagtaagtt

SEQ ID NO: 25592 - DNA, 600 bp, Chicken  19866894240965_1
tgcttaatgcagtatttgcttttaccagcagttgaaacctgacttgcattagctgatttgctgcagtattctttccactgttccagttcaagcatcgagtgagtccataaatcagaactattggcatttatctacaatttttggctctgttggacaacatttggagttcagctctgtccttcagaagtataaaggcagataatgtcttctacgttgtcaaaaagtgtattgcttttttacttatcagtgacaattctagatcttttttcaaaagaagcaacatccccacacatttgttaygcattgcccctattttcccttgtcgtatggcatgggtacttactagcgtacttggaatagatgtgccatctattctgagggttagactctttgctttggtttattttgtctgtgtttgtgtgtaatcacctgtttcatcctgtgattaatttgtctaacaagatggaggccttgtggctgtcctaaaggattggaagatgagccgtctagagcaggctcctgtgaattygaatgattgttatccagatttcagtgcatccacctatgaagttggtgcccagattgttgccacctcacagr

SEQ ID NO: 25593 - DNA, 600 bp, Chicken  19866894240965_2
tgcttttttacttatcagtgacaattctagatcttttttcaaaagaagcaacatccccacacatttgttaygcattgcccctattttcccttgtcgtatggcatgggtacttactagcgtacttggaatagatgtgccatctattctgagggttagactctttgctttggtttattttgtctgtgtttgtgtgtaatcacctgtttcatcctgtgattaatttgtctaacaagatggaggccttgtggctgtcctaaaggattggaagatgagccgtctagagcaggctcctgtgaattygaatgattgttatccagatttcagtgcatccacctatgaagttggtgcccagattgttgccacctcacagratcctgtgtgagtcgcagagtgggtggcctccctgcacaagactgaggtgctgctttaccctctccaacaaggagcaatactgcggtttattttctaagagagagatgaacaagtgaattgtttatcctaatctctgtgtgattcattgttgcgtgtgacgcatgcgtctcatttacctccctccttttgtcttggattttggtgatgtgagttttgaaatctgtttta

SEQ ID NO: 25594 - DNA, 570 bp, Chicken  19866894240965_3
gcattgcccctattttcccttgtcgtatggcatgggtacttactagcgtacttggaatagatgtgccatctattctgagggttagactctttgctttggtttattttgtctgtgtttgtgtgtaatcacctgtttcatcctgtgattaatttgtctaacaagatggaggccttgtggctgtcctaaaggattggaagatgagccgtctagagcaggctcctgtgaattygaatgattgttatccagatttcagtgcatccacctatgaagttggtgcccagattgttgccacctcacagratcctgtgtgagtcgcagagtgggtggcctccctgcacaagactgaggtgctgctttaccctctccaacaaggagcaatactgcggtttattttctaagagagagatgaacaagtgaattgtttatcctaatctctgtgtgattcattgttgcgtgtgacgcatgcgtctcatttacctccctccttttgtcttggattttggtgatgtgagttttgaaatctgttttaccttgtccttctgcgtgttctctccctttgtgctgcgtgtg

SEQ ID NO: 25595 - DNA, 599 bp, Chicken  19866894240970_1
  misc_feature (1)..(82): n is any nucleotide
nnnnnnnnnnnnnnnnnnnnnnnnnnnnnnnnnnnnnnnnnnnnnnnnnnnnnnnnnnnnnnnnnnnnnnnnnnnnnnnnnnatgtaaaacctgttacaaataactgtactcttttatatttactgttaatcttgtcttttctggcttaactacacacgggcaacatttatatctccttttctgggaaacatacacacatcataccttttctcaggaaattcactgaattacaaatgtataggccaattgcagcattagaattattttcatagccacttttcttcagcttaaatatctaygttgtcaatgtgaaagccttggattcaaacactgctgtccatctcttaagtacaagaagagggagcactgaaaataacaaaaagcagcctttctgtggattttactgagttacaagttcatttgtaacttctacattcttctgatgtactgttgttcatttttattagaatatcctctgtgaataatttagcaattgcaagatgattcactaccccaaggtgttaccagtgaattgtagaatcactgcaagtgattgaatctagaccaatttagaacttgaatttgtttggctctgagg

SEQ ID NO: 25596 - DNA, 558 bp, Chicken  19866894240970_2
taacaaaaagcagcctttctgtggattttactgagttacaagttcatttgtaacttctacattcttctgatgtactgttgttcatttttattagaatatcctctgtgaataatttagcaattgcaagatgattcactaccccaaggtgttaccagtgaattgtagaatcactgcaagtgattgaatctagaccaatttagaacttgaatttgtttggctctgaggaatgtttagcagcctctgtgacatgattttactggggactcaattttagttttaaatcacttataccatccccargctttgtgattattaacaaactgtggaagcaaagaatcctgtggactacaaggattgcactccccttttagctagaggaagttgttgattattttttttctgtcttttttcttgttcgacttcagagccaacaaccattggtatgcacatagagctgtcttccaatattaaattctgtagttcctaaaatgacaactagatatttgtacacatttgtttatagtttcttagctgttgatgggaggttttttttttttt

SEQ ID NO: 25597 - DNA, 600 bp, Chicken  19866894240993_1
taaacatatccagggatggtgactcaaccacctcccctggggagcctattccggtgcttaacaaccctttctgtaaagaagtgtttcctaatatccaatctaaacttaccctggcacaacttgatgccatttcccctcatcctatcacctgtcagcagtgagaagagaccaaccccgctctcactgtaagcacctttcagatattggaagagagcaataaggtctcccctcagcctccttttccccagactaaacagccccagttccctcagcctctcctcttagggcatattctccaakcccttcaaacataaaacatcaggataaaagaatctcatactaaagagaaagttaacaagaacaaaaccttactataacatggaaaaaaagaaaaagaaaaaaaaaagaaaaccaaaccaaaccacaacaaaaaccaagattcttagagtgataattaccagaatcaaaatagctatactatagtaagaaacaatttttttaccatttagcatgcactaattataaaaatgaaatataggaattctgttttaagtgaatgtccattttcacttagcccctagaaagactaataactgataa

SEQ ID NO: 25598 - DNA, 600 bp, Chicken  19866894240994_1
ctggtaggggcactctttgtaacagaagatcaatggacaacttcctaccattaactaaattaatctttcttctcttcccctttctcctcatctcaccacgaaaggaagaatctctgttaaacggaatgtggcaaattattaaggctgtctatatgaaagatgtaaagctatctgtggtggacaaagaggacttcttagctaataaattagaggaagagcttcaaaaaggattgcactgtcattgtaacgtcaattaatttcttccaatgtcattaacttttgattattggtttactcttyatttaatgtatactttatttccttaaatttttctgtctatgtgaaggccacagatggaaatatatatactaattattttgtctcttgaggtatcaagagggaaggtatttctccatattgtaactgtcagggtcagctggggataattagccaccagctgctctggaagtatacatgggtatacatgggtatacatgttccccatctaccaaaagtcttttgcactgaaatatattttaaaaaataataataatctgaacttaaatcacacagagtgacttggcttacagtgctgtagac

SEQ ID NO: 25599 - DNA, 600 bp, Chicken  19866894240997_1
tagggatgtttccatatctgtactttctaggacctgtcacatgtttttcccagactgcttatccaatgtatcagtcaatccattatgatctcctttatcacttcactatggcatcaaaataaaataaagccatcgcaacagtaacagattaccaaagcaggatgaaattaaaccactgtattcagaaaagaccaaactacaaagaggtagtcaaaattctttagaaagacaaaattaattttccatttaattacactaaaattctaaaatttcaatctccgtgcctattttcccataaamtcrtgttgtctggtagcggactatgcagctgtacctttttgaggagacagtctcaggtaarttgtggtttcacaggtaaaaatgaaaaaaagttaaatacttagcagaatttggttaatgctctgtttttacttttaggcactttaaaagtttcacatttcaaacaacctttagcatgcttttctgacttctcagctttagcaagcttcatataggctcagtggtctaacaagtctttaggccatagagagaagactgacacctctcacctyacgtagctgttcagttttcttttaccag

SEQ ID NO: 25600 - DNA, 600 bp, Chicken  19866894240997_2
ggatgtttccatatctgtactttctaggacctgtcacatgtttttcccagactgcttatccaatgtatcagtcaatccattatgatctcctttatcacttcactatggcatcaaaataaaataaagccatcgcaacagtaacagattaccaaagcaggatgaaattaaaccactgtattcagaaaagaccaaactacaaagaggtagtcaaaattctttagaaagacaaaattaattttccatttaattacactaaaattctaaaatttcaatctccgtgcctattttcccataaamtcrtgttgtctggtagcggactatgcagctgtacctttttgaggagacagtctcaggtaarttgtggtttcacaggtaaaaatgaaaaaaagttaaatacttagcagaatttggttaatgctctgtttttacttttaggcactttaaaagtttcacatttcaaacaacctttagcatgcttttctgacttctcagctttagcaagcttcatataggctcagtggtctaacaagtctttaggccatagagagaagactgacacctctcacctyacgtagctgttcagttttcttttaccagcta

SEQ ID NO: 25601 - DNA, 600 bp, Chicken  19866894240997_3
tccaatgtatcagtcaatccattatgatctcctttatcacttcactatggcatcaaaataaaataaagccatcgcaacagtaacagattaccaaagcaggatgaaattaaaccactgtattcagaaaagaccaaactacaaagaggtagtcaaaattctttagaaagacaaaattaattttccatttaattacactaaaattctaaaatttcaatctccgtgcctattttcccataaamtcrtgttgtctggtagcggactatgcagctgtacctttttgaggagacagtctcaggtaarttgtggtttcacaggtaaaaatgaaaaaaagttaaatacttagcagaatttggttaatgctctgtttttacttttaggcactttaaaagtttcacatttcaaacaacctttagcatgcttttctgacttctcagctttagcaagcttcatataggctcagtggtctaacaagtctttaggccatagagagaagactgacacctctcacctyacgtagctgttcagttttcttttaccagctaaaatgctkgcctacctggcaagattgctaacatactaggttttagatagctaggttta

SEQ ID NO: 25602 - DNA, 600 bp, Chicken  19866894240997_4
caatctccgtgcctattttcccataaamtcrtgttgtctggtagcggactatgcagctgtacctttttgaggagacagtctcaggtaarttgtggtttcacaggtaaaaatgaaaaaaagttaaatacttagcagaatttggttaatgctctgtttttacttttaggcactttaaaagtttcacatttcaaacaacctttagcatgcttttctgacttctcagctttagcaagcttcatataggctcagtggtctaacaagtctttaggccatagagagaagactgacacctctcacctyacgtagctgttcagttttcttttaccagctaaaatgctkgcctacctggcaagattgctaacatactaggttttagatagctaggtttaatgagatggttatcccaccttcatttcaagaaaagatagatgtctgctaatgttttatgaggaataagcataactaaaaaacagaaggtaaaaaatgaactaaaaatactttgttgttgttgttgttgttaattagaagaaagcagatactaaggtatatggaaattttcatatgagcttaatgtttcaactggatacagataagcacata

SEQ ID NO: 25603 - DNA, 600 bp, Chicken  19866894240997_5
ggtagcggactatgcagctgtacctttttgaggagacagtctcaggtaarttgtggtttcacaggtaaaaatgaaaaaaagttaaatacttagcagaatttggttaatgctctgtttttacttttaggcactttaaaagtttcacatttcaaacaacctttagcatgcttttctgacttctcagctttagcaagcttcatataggctcagtggtctaacaagtctttaggccatagagagaagactgacacctctcacctyacgtagctgttcagttttcttttaccagctaaaatgctkgcctacctggcaagattgctaacatactaggttttagatagctaggtttaatgagatggttatcccaccttcatttcaagaaaagatagatgtctgctaatgttttatgaggaataagcataactaaaaaacagaaggtaaaaaatgaactaaaaatactttgttgttgttgttgttgttaattagaagaaagcagatactaaggtatatggaaattttcatatgagcttaatgtttcaactggatacagataagcacatagcattattccaagaggcagcaacaattattttcagtgga

SEQ ID NO: 25604 - DNA, 599 bp, Chicken  19866894240998_1
  misc_feature (1)..(188): n is any nucleotide
nnnnnnnnnnnnnnnnnnnnnnnnnnnnnnnnnnnnnnnnnnnnnnnnnnnnnnnnnnnnnnnnnnnnnnnnnnnnnnnnnnnnnnnnnnnnnnnnnnnnnnnnnnnnnnnnnnnnnnnnnnnnnnnnnnnnnnnnnnnnnnnnnnnnnnnnnnnnnnnnnnnnnnnnnnnnnnnnnnnnnnnnnnnncaccacacaattcacctggcacaggttctacaatgacatttcagtatgtggtttctggctaaaaacaaccccgatctccttcatcccttaactggactcttgagaaagaacygctttttgcagatgtggtgacaatctgcaataggaactagaaggagccaaatgattgctatagcctgctccacatccaactgctcttcactatgtcaccygtggctggtttccaccatttccttctttgctttcaaacaggaaagcacatacattyccaaagaagagcggcaaaggggagtggaacagcagccagtgtagatgggagccatggatgagttttggctctgtaggctcctatggcattgagtttgtgccctgaacaaaaacactgctgtgcatataaggatatgaaagcag

SEQ ID NO: 25605 - DNA, 599 bp, Chicken  19866894240998_2
  misc_feature (1)..(88): n is any nucleotide
nnnnnnnnnnnnnnnnnnnnnnnnnnnnnnnnnnnnnnnnnnnnnnnnnnnnnnnnnnnnnnnnnnnnnnnnnnnnnnnnnnnnnnnncaccacacaattcacctggcacaggttctacaatgacatttcagtatgtggtttctggctaaaaacaaccccgatctccttcatcccttaactggactcttgagaaagaacygctttttgcagatgtggtgacaatctgcaataggaactagaaggagccaaatgattgctatagcctgctccacatccaactgctcttcactatgtcaccygtggctggtttccaccatttccttctttgctttcaaacaggaaagcacatacattyccaaagaagagcggcaaaggggagtggaacagcagccagtgtagatgggagccatggatgagttttggctctgtaggctcctatggcattgagtttgtgccctgaacaaaaacactgctgtgcatataaggatatgaaagcagggcaccacggaagctgagatgcatgctccactgaacacgcacaacaagttaccctgcagtgctgccagagacacctccagctcatcctagggtctgaaat

SEQ ID NO: 25606 - DNA, 599 bp, Chicken  19866894240998_3
  misc_feature (1)..(32): n is any nucleotide
nnnnnnnnnnnnnnnnnnnnnnnnnnnnnnnncaccacacaattcacctggcacaggttctacaatgacatttcagtatgtggtttctggctaaaaacaaccccgatctccttcatcccttaactggactcttgagaaagaacygctttttgcagatgtggtgacaatctgcaataggaactagaaggagccaaatgattgctatagcctgctccacatccaactgctcttcactatgtcaccygtggctggtttccaccatttccttctttgctttcaaacaggaaagcacatacattyccaaagaagagcggcaaaggggagtggaacagcagccagtgtagatgggagccatggatgagttttggctctgtaggctcctatggcattgagtttgtgccctgaacaaaaacactgctgtgcatataaggatatgaaagcagggcaccacggaagctgagatgcatgctccactgaacacgcacaacaagttaccctgcagtgctgccagagacacctccagctcatcctagggtctgaaattaaacctacaggtacaaaatatgccaacagagttcacagagctgctgaagcatcag

SEQ ID NO: 25607 - DNA, 599 bp, Chicken  19866894240999_1
  misc_feature (1)..(97): n is any nucleotide
nnnnnnnnnnnnnnnnnnnnnnnnnnnnnnnnnnnnnnnnnnnnnnnnnnnnnnnnnnnnnnnnnnnnnnnnnnnnnnnnnnnnnnnnnnnnnnnnncaagctatctttgtctgggaagtgatgtagctctctagataccagcctacaactcccatagtctgcacaaaaaaaaaaaaaaaaaaaaaaaaaagaatcagctatagaaacagggggaaaaaaacaacaaacacagaaaaagctctctaagatctcattacaaagtgaaacttgagatattctagggaatattcataagtgtkgttcttagtccgctaaaatctccaaatatcaatgtacttcatagcaaatgccatgagagaatgagtgtacaaattatgtgtccttaagattataactagtggcaaatgagggatttcacactctcctcccatttatgtgtaatctttgtcaagacatagcttcttcaggtctcagatttgccacttattgaagatattctaatagtgtctatgttaaatagacatttttcttccccccacagaatagtaggaccgctgaccacaaaacctgtgtggtcctaaaatacaggaaactacat

SEQ ID NO: 25608 - DNA, 600 bp, Chicken  19866894240999_2
gactatctgtgtctggaatagggatcagacagggatgggaacaggaaacagctcagccaccatgagacctaaatattcagaggtgtctctggatctatatttatttatctaggagtctaaggctatcaacataaaggcttagttgttcgtacacagagcatatacaagactggctaatgcagaaacaaacacacaagtataaaaaatagaacatatctaagttctccatctgctgtgatctccagtctctcaccactctgtgtccctgactcccagcaaaatgcattatgaaacacacayaatttctgggggtaagctatcattagcttacagctgtgctccattggtttggctccataagaactgcagatgggcgatgtgtgtcttgacattgcttttgctgccgtggatgatgttgcttgcagtgctgtccctcgacagtccatgccaactggagcactctggggtggcaattgagagctgcaggtctgaaaagtacaaaggggatgagatggaaaggcagcaggccactagtcatcttctgctgttagggaaaaaaaatgtgtaataaacaataggtagagaggagctaacagaatc

SEQ ID NO: 25609 - DNA, 600 bp, Chicken  19866894241003_1
taattaaaaatgaaaaagccaaatgttttccctctaatcaaaatttctaattttgatcttgcataaactgatttgaatgtacttttaaaaatccctgtaagtttatgcacaagattgtgactgatgtgcaactcagaaaaaaaaaaaagaagtgcctgaaatcaaagaacataactgctcaagatcatcctcatacttcatgctgccaacttgcttacaactaagagtaaggtgaggttctccataggaacgggtgtacaaagattgaagcttgaatatctttttgaaaattcatttaarcctgtgccagaagacaggatggatacttgggccaagatcaacccagggctctgcaagcacaatgctgttgcttagtgctgggaaccagtgcaaagccgatcctcctgacctagcaacacaatgactaaattcttatccttaaaccaagcacagcatgcaggcaatttgctgtgatctcttgagtggtaagcaatgtacttaggtatttaccttgcaatttatttagtcttaaaagcagtgttctgtatggctggacctgcttgctgggctgattttatgtgttccacttctttatttttt

SEQ ID NO: 25610 - DNA, 600 bp, Chicken  19866894241004_1
agcatgaacaaacataaagaacaatacagaaaagcccatggagtaatgccatggtatgataaactgcattgggaataactaaatatgaccatgctcctcttcatctgcccaaccttatgagaatgtccaagtttgtgcctaccaaaatatccatgcaggcacaatatattttcttactttttctcaaatatagggacttcggtatctctgggcgtagggagtctttgttgcctgggttgacacatttctacagactgagtctgggttgctaagtgctaccatagtctttctgcagctcayatggaatagcatggccaaaggagctgaccttgaaatagtgtatcagatacagttcagaagcctccagtaagtcagttcagtctttacatggataaagggattggatggtaatagcattcttgtctttgagattttttgatggttcttagtcatttggcttcttacacatggactggccagcaagccagatggtcataatatctgataaaagttttgagtgaacaaattgtatactgctgtgctttgacaactgagcatctgatgtcaaaagtaatctctatatgcagaataacaaggaga

SEQ ID NO: 25611 - DNA, 599 bp, Chicken  19866894241011_1
  misc_feature (1)..(35): n is any nucleotide
nnnnnnnnnnnnnnnnnnnnnnnnnnnnnnnnnnngttttggtatatgccacaatgtctggcaacacgtttttttctctgtgcaacatgtgaagaacaacttcttgtttgctttttttaacttgccactcactaattgcattggatgtattttggatcatgttccgacaaagccaatatcctctttttctccatgcaactttttgttcagtgggaccgtgccaacttttcctccagcatctctctgccttccccacgtctcagtcacaccagggactttgtactgatttttgatgctatwtttggtstgtgatgtgataggcctaatttctagctaaagagcatctaccaatgattatgtacagtgttccttaaagtaacaaaaaatcactagcgtggcatgttctggtttgcgtgtctccatatatgatggagagctttgttcagagttctggctgtaaattcataccagtaccctaaatccccgctatcagtgtctttggggtgaaacccagtccttgtgtcagaataatccctcctcgcgcaatcatgttgccctctgttggttagctttgattcagaatgttcccaggctcgcta

SEQ ID NO: 25612 - DNA, 599 bp, Chicken  19866894241011_2
  misc_feature (1)..(28): n is any nucleotide
nnnnnnnnnnnnnnnnnnnnnnnnnnnngttttggtatatgccacaatgtctggcaacacgtttttttctctgtgcaacatgtgaagaacaacttcttgtttgctttttttaacttgccactcactaattgcattggatgtattttggatcatgttccgacaaagccaatatcctctttttctccatgcaactttttgttcagtgggaccgtgccaacttttcctccagcatctctctgccttccccacgtctcagtcacaccagggactttgtactgatttttgatgctatwtttggtstgtgatgtgataggcctaatttctagctaaagagcatctaccaatgattatgtacagtgttccttaaagtaacaaaaaatcactagcgtggcatgttctggtttgcgtgtctccatatatgatggagagctttgttcagagttctggctgtaaattcataccagtaccctaaatccccgctatcagtgtctttggggtgaaacccagtccttgtgtcagaataatccctcctcgcgcaatcatgttgccctctgttggttagctttgattcagaatgttcccaggctcgctaattacca

SEQ ID NO: 25613 - DNA, 600 bp, Chicken  19866894241014_1
gcacaatatcttttatcctccagatacatttttcttcaataaaggagtttatctagttaaccttaatatatgaatctaaaccttggttactgtcagtggaccatcctgaaagtgacctatttgttcttcactattaaaattaaataatatgggttttcctttatgtttgtaatttggacaatttgtcttttgccacaaagttaatacggtttcatgatgtaaggcttaatatattgtacagtagtgttaaccttctgtagctctgccaaattgcagtaagagttcagtttcagtttgttycaacaagacttttttgtgttaatatccaatatgcaaacaaagctgaaatattacctatcagaataattgatgtgtatctattaattattgtttgtattgctgtaatacttaagtatgttaatcttggatgatggtcccactgttggagctaccatataaatgcagaacagaaaaagaatgccctggagtttgtacttgaattttaacacaggagatagatatgtgaaggatgattggtgatcataaagaaagagcaatataaayaactgtgtggtggctatgacaggtagtcattggtgy

SEQ ID NO: 25614 - DNA, 600 bp, Chicken  19866894241014_2
gccaaattgcagtaagagttcagtttcagtttgttycaacaagacttttttgtgttaatatccaatatgcaaacaaagctgaaatattacctatcagaataattgatgtgtatctattaattattgtttgtattgctgtaatacttaagtatgttaatcttggatgatggtcccactgttggagctaccatataaatgcagaacagaaaaagaatgccctggagtttgtacttgaattttaacacaggagatagatatgtgaaggatgattggtgatcataaagaaagagcaatataaayaactgtgtggtggctatgacaggtagtcattggtgyacatttccaggtttactactgttgcttaggtaggcttcatgaagtgggaggcttgcagaaagatattgcagtgctrcttttcaaaatgctgtgtgtcagcataaggcagagaagactggccaaaagcaaatgaataaaactatggcaatgacagctgttgccatgaagtagtcagaactgaaacagctaattcttattatgcaggaraagtttacaaggaaagtggaactaaagacaaagtgtagaagtttgaagttacagtga

SEQ ID NO: 25615 - DNA, 600 bp, Chicken  19866894241014_3
caacaagacttttttgtgttaatatccaatatgcaaacaaagctgaaatattacctatcagaataattgatgtgtatctattaattattgtttgtattgctgtaatacttaagtatgttaatcttggatgatggtcccactgttggagctaccatataaatgcagaacagaaaaagaatgccctggagtttgtacttgaattttaacacaggagatagatatgtgaaggatgattggtgatcataaagaaagagcaatataaayaactgtgtggtggctatgacaggtagtcattggtgyacatttccaggtttactactgttgcttaggtaggcttcatgaagtgggaggcttgcagaaagatattgcagtgctrcttttcaaaatgctgtgtgtcagcataaggcagagaagactggccaaaagcaaatgaataaaactatggcaatgacagctgttgccatgaagtagtcagaactgaaacagctaattcttattatgcaggaraagtttacaaggaaagtggaactaaagacaaagtgtagaagtttgaagttacagtgaaaagaaaatgcattcagagatatgaatcatttggtc

SEQ ID NO: 25616 - DNA, 600 bp, Chicken  19866894241014_4
tctattaattattgtttgtattgctgtaatacttaagtatgttaatcttggatgatggtcccactgttggagctaccatataaatgcagaacagaaaaagaatgccctggagtttgtacttgaattttaacacaggagatagatatgtgaaggatgattggtgatcataaagaaagagcaatataaayaactgtgtggtggctatgacaggtagtcattggtgyacatttccaggtttactactgttgcttaggtaggcttcatgaagtgggaggcttgcagaaagatattgcagtgctrcttttcaaaatgctgtgtgtcagcataaggcagagaagactggccaaaagcaaatgaataaaactatggcaatgacagctgttgccatgaagtagtcagaactgaaacagctaattcttattatgcaggaraagtttacaaggaaagtggaactaaagacaaagtgtagaagtttgaagttacagtgaaaagaaaatgcattcagagatatgaatcatttggtcaaaggracaaatcagggatctgatctttcagaggaaattctgaatggttagcagtaaaacaactctgaatttgttc

SEQ ID NO: 25617 - DNA, 600 bp, Chicken  19866894241014_5
acaggagatagatatgtgaaggatgattggtgatcataaagaaagagcaatataaayaactgtgtggtggctatgacaggtagtcattggtgyacatttccaggtttactactgttgcttaggtaggcttcatgaagtgggaggcttgcagaaagatattgcagtgctrcttttcaaaatgctgtgtgtcagcataaggcagagaagactggccaaaagcaaatgaataaaactatggcaatgacagctgttgccatgaagtagtcagaactgaaacagctaattcttattatgcaggaraagtttacaaggaaagtggaactaaagacaaagtgtagaagtttgaagttacagtgaaaagaaaatgcattcagagatatgaatcatttggtcaaaggracaaatcagggatctgatctttcagaggaaattctgaatggttagcagtaaaacaactctgaatttgttctgagaaaagctttttgaattattaagggtartgtaaaatgacaactgagaattttagttgtttgggtgggtagagtattttagacatcttttgttgaattattctgaaaatgtgggacatctttcagtgtt

SEQ ID NO: 25618 - DNA, 600 bp, Chicken  19866894241014_6
ccaggtttactactgttgcttaggtaggcttcatgaagtgggaggcttgcagaaagatattgcagtgctrcttttcaaaatgctgtgtgtcagcataaggcagagaagactggccaaaagcaaatgaataaaactatggcaatgacagctgttgccatgaagtagtcagaactgaaacagctaattcttattatgcaggaraagtttacaaggaaagtggaactaaagacaaagtgtagaagtttgaagttacagtgaaaagaaaatgcattcagagatatgaatcatttggtcaaaggracaaatcagggatctgatctttcagaggaaattctgaatggttagcagtaaaacaactctgaatttgttctgagaaaagctttttgaattattaagggtartgtaaaatgacaactgagaattttagttgtttgggtgggtagagtattttagacatcttttgttgaattattctgaaaatgtgggacatctttcagtgttggtcatcttttttgtatcttttttcaggtgttttagatagttttactcctagctacgtttgagaatagacttttcttaaatctctgcaaagtgttctca

SEQ ID NO: 25619 - DNA, 600 bp, Chicken  19866894241014_7
agagaagactggccaaaagcaaatgaataaaactatggcaatgacagctgttgccatgaagtagtcagaactgaaacagctaattcttattatgcaggaraagtttacaaggaaagtggaactaaagacaaagtgtagaagtttgaagttacagtgaaaagaaaatgcattcagagatatgaatcatttggtcaaaggracaaatcagggatctgatctttcagaggaaattctgaatggttagcagtaaaacaactctgaatttgttctgagaaaagctttttgaattattaagggtartgtaaaatgacaactgagaattttagttgtttgggtgggtagagtattttagacatcttttgttgaattattctgaaaatgtgggacatctttcagtgttggtcatcttttttgtatcttttttcaggtgttttagatagttttactcctagctacgtttgagaatagacttttcttaaatctctgcaaagtgttctcagacctctgtagcataaacaacaaaaggtaacagcagttgcacttgagtttttggctgatagaagtgaaggcttgtagctttactaaataaaggtcatttta

SEQ ID NO: 25620 - DNA, 600 bp, Chicken  19866894241015_1
ctttatttttttcctcttcttctgtattctcagggaaatacatgctttgtttccatttatagtatctaacgtgtaattatccctaaactatgagtggcaattgagtcaggctgtcttaagcacacacaaattgctaaataaataaataaaagcctagttttctaaagaacaaattgacagcaggagaatgatgtgaaattcagtgattgggggagtaaatagttatgtggctacatattctaaagatttgatgtgatcagcagtatccacaattacacagtaagtttgtcaaaaagtgcyaatggaagtactaatgkctagagaactgaaagagcttggcctacaatatgaaaaagctgacaagttacttttatgttttagcatgagagaatctgtcataaataaaggctaataagatcttgaggaaatatttgagctttttttcyacagcatctgctgagcaccaatgaaatgagacattcctctgtccacttgttgaatatggtgtagatggagtgctccccttccagmagaagaattttcattgaagttgtagagtatcccagggtgtgaaaatctgtagtgtctgatgctgagwtc

SEQ ID NO: 25621 - DNA, 600 bp, Chicken  19866894241015_2
tcttctgtattctcagggaaatacatgctttgtttccatttatagtatctaacgtgtaattatccctaaactatgagtggcaattgagtcaggctgtcttaagcacacacaaattgctaaataaataaataaaagcctagttttctaaagaacaaattgacagcaggagaatgatgtgaaattcagtgattgggggagtaaatagttatgtggctacatattctaaagatttgatgtgatcagcagtatccacaattacacagtaagtttgtcaaaaagtgcyaatggaagtactaatgkctagagaactgaaagagcttggcctacaatatgaaaaagctgacaagttacttttatgttttagcatgagagaatctgtcataaataaaggctaataagatcttgaggaaatatttgagctttttttcyacagcatctgctgagcaccaatgaaatgagacattcctctgtccacttgttgaatatggtgtagatggagtgctccccttccagmagaagaattttcattgaagttgtagagtatcccagggtgtgaaaatctgtagtgtctgatgctgagwtcctttaaactcttttcat

SEQ ID NO: 25622 - DNA, 600 bp, Chicken  19866894241015_3
taaaagcctagttttctaaagaacaaattgacagcaggagaatgatgtgaaattcagtgattgggggagtaaatagttatgtggctacatattctaaagatttgatgtgatcagcagtatccacaattacacagtaagtttgtcaaaaagtgcyaatggaagtactaatgkctagagaactgaaagagcttggcctacaatatgaaaaagctgacaagttacttttatgttttagcatgagagaatctgtcataaataaaggctaataagatcttgaggaaatatttgagctttttttcyacagcatctgctgagcaccaatgaaatgagacattcctctgtccacttgttgaatatggtgtagatggagtgctccccttccagmagaagaattttcattgaagttgtagagtatcccagggtgtgaaaatctgtagtgtctgatgctgagwtcctttaaactcttttcatacaaggagttacacagttcttgcttctcttggcaggtgtcaactttgatctgcttccaaagtgttcagcagtctaaactgcttgtaaagagaagagtttccagtggttcctaaatcacaaaataagaat

SEQ ID NO: 25623 - DNA, 600 bp, Chicken  19866894241015_4
tacatattctaaagatttgatgtgatcagcagtatccacaattacacagtaagtttgtcaaaaagtgcyaatggaagtactaatgkctagagaactgaaagagcttggcctacaatatgaaaaagctgacaagttacttttatgttttagcatgagagaatctgtcataaataaaggctaataagatcttgaggaaatatttgagctttttttcyacagcatctgctgagcaccaatgaaatgagacattcctctgtccacttgttgaatatggtgtagatggagtgctccccttccagmagaagaattttcattgaagttgtagagtatcccagggtgtgaaaatctgtagtgtctgatgctgagwtcctttaaactcttttcatacaaggagttacacagttcttgcttctcttggcaggtgtcaactttgatctgcttccaaagtgttcagcagtctaaactgcttgtaaagagaagagtttccagtggttcctaaatcacaaaataagaattaggcagaaactatatgcagcgcagacttttattattcagtctaggaagataataaatagctacgtgagtctggaggaactggaa

SEQ ID NO: 25624 - DNA, 600 bp, Chicken  19866894241015_5
cyaatggaagtactaatgkctagagaactgaaagagcttggcctacaatatgaaaaagctgacaagttacttttatgttttagcatgagagaatctgtcataaataaaggctaataagatcttgaggaaatatttgagctttttttcyacagcatctgctgagcaccaatgaaatgagacattcctctgtccacttgttgaatatggtgtagatggagtgctccccttccagmagaagaattttcattgaagttgtagagtatcccagggtgtgaaaatctgtagtgtctgatgctgagwtcctttaaactcttttcatacaaggagttacacagttcttgcttctcttggcaggtgtcaactttgatctgcttccaaagtgttcagcagtctaaactgcttgtaaagagaagagtttccagtggttcctaaatcacaaaataagaattaggcagaaactatatgcagcgcagacttttattattcagtctaggaagataataaatagctacgtgagtctggaggaactggaaaatctaatcttctgcaaatctgcaagtaagacatcaatgaccataacacaattaataccagtaagat

SEQ ID NO: 25625 - DNA, 600 bp, Chicken  19866894241021_1
tggcacaagatgggtcatatggcaatggattttttgtaaagtataattaaatgaatgatcatggctcagctcccaaagatacatgctgtaattaaactgaacaaacattattcatccaaagaacatgatttaccacaaaaattaaaagttatatctcagttataacaaaaagaactttaaggatgagtggagtctgtcactgctagggtccttagcactaacactacacatgacaagctgtcactagaagccttacggctcatacaaaagtctccagtgagattcagataagaacagcaygatatgtgcagacttaataaattcattagaaagaagggaattgtttctgtgcatctttcttattccaggtaaataaatagccatcaggtccagatatttcaaagatcccataaataaactattcttaggttttaaaagttctggttaggatttttgttttatcttctcygatttatcattattcctataatgatcaaaactatttcttaatgtcttgcctatgtttactcatagccagtgtgtacccttttgtttgtctcattatattgtctgcagctttaaatggtatttctttagctc

SEQ ID NO: 25626 - DNA, 600 bp, Chicken  19866894241021_2
aagaactttaaggatgagtggagtctgtcactgctagggtccttagcactaacactacacatgacaagctgtcactagaagccttacggctcatacaaaagtctccagtgagattcagataagaacagcaygatatgtgcagacttaataaattcattagaaagaagggaattgtttctgtgcatctttcttattccaggtaaataaatagccatcaggtccagatatttcaaagatcccataaataaactattcttaggttttaaaagttctggttaggatttttgttttatcttctcygatttatcattattcctataatgatcaaaactatttcttaatgtcttgcctatgtttactcatagccagtgtgtacccttttgtttgtctcattatattgtctgcagctttaaatggtatttctttagctctgtcatattctttcctccagatatgaccataggaagcaacaatatcctgtctttttacccttttttaacctttgaggaattctactgctaactactattaaaggtctgactgaacctcttctggcacaaccactatcatctttcctttatttagttccttcatcatcat

SEQ ID NO: 25627 - DNA, 599 bp, Chicken  19866894241024_1
  misc_feature (1)..(119): n is any nucleotide
nnnnnnnnnnnnnnnnnnnnnnnnnnnnnnnnnnnnnnnnnnnnnnnnnnnnnnnnnnnnnnnnnnnnnnnnnnnnnnnnnnnnnnnnnnnnnnnnnnnnnnnnnnnnnnnnnnnnnnnctcatcttcaccagaaaagctgcgaaaactaccctgtggctgagtagttcctcatattctgcttgtgataacttaaaatgcagtggggatatttgggcaacctcaaacaccccttagaagaaagtttgggactctaatggtggaaggagtgctgaggagccagtgagtacatgctaatgartatagttacagcattaaaattaggatagttaccactgtgcagtgatatatttgctgggataaacatgataccttggacrtctaccaagacatgaaaatcagttcagtgcagctgactagagcatgtgctgttcctatgcaatgctgtagtaaratgtagtgcttctgtctagmtatcttcaggaaaaaaacaaaacaaaacaaaaacccmaaaaactctcagaacaaagtatagtcaaaggagagacaacagtgttggtttcacctgcattttatcagagacaggagatgcagaatatc

SEQ ID NO: 25628 - DNA, 599 bp, Chicken  19866894241024_2
  misc_feature (1)..(40): n is any nucleotide
nnnnnnnnnnnnnnnnnnnnnnnnnnnnnnnnnnnnnnnnctcatcttcaccagaaaagctgcgaaaactaccctgtggctgagtagttcctcatattctgcttgtgataacttaaaatgcagtggggatatttgggcaacctcaaacaccccttagaagaaagtttgggactctaatggtggaaggagtgctgaggagccagtgagtacatgctaatgartatagttacagcattaaaattaggatagttaccactgtgcagtgatatatttgctgggataaacatgataccttggacrtctaccaagacatgaaaatcagttcagtgcagctgactagagcatgtgctgttcctatgcaatgctgtagtaaratgtagtgcttctgtctagmtatcttcaggaaaaaaacaaaacaaaacaaaaacccmaaaaactctcagaacaaagtatagtcaaaggagagacaacagtgttggtttcacctgcattttatcagagacaggagatgcagaatatctttaatagacatacrcaaataactgattattttcttacttcagcagttcagaagttgaggtacatgattgcactacaaa

SEQ ID NO: 25629 - DNA, 600 bp, Chicken  19866894241024_3
tgtggctgagtagttcctcatattctgcttgtgataacttaaaatgcagtggggatatttgggcaacctcaaacaccccttagaagaaagtttgggactctaatggtggaaggagtgctgaggagccagtgagtacatgctaatgartatagttacagcattaaaattaggatagttaccactgtgcagtgatatatttgctgggataaacatgataccttggacrtctaccaagacatgaaaatcagttcagtgcagctgactagagcatgtgctgttcctatgcaatgctgtagtaaratgtagtgcttctgtctagmtatcttcaggaaaaaaacaaaacaaaacaaaaacccmaaaaactctcagaacaaagtatagtcaaaggagagacaacagtgttggtttcacctgcattttatcagagacaggagatgcagaatatctttaatagacatacrcaaataactgattattttcttacttcagcagttcagaagttgaggtacatgattgcactacaaatcattccgcaagccttctttactctttaaagtactctcggtcccttgcttcactagtctttcaccagagattatt

SEQ ID NO: 25630 - DNA, 600 bp, Chicken  19866894241024_4
tattctgcttgtgataacttaaaatgcagtggggatatttgggcaacctcaaacaccccttagaagaaagtttgggactctaatggtggaaggagtgctgaggagccagtgagtacatgctaatgartatagttacagcattaaaattaggatagttaccactgtgcagtgatatatttgctgggataaacatgataccttggacrtctaccaagacatgaaaatcagttcagtgcagctgactagagcatgtgctgttcctatgcaatgctgtagtaaratgtagtgcttctgtctagmtatcttcaggaaaaaaacaaaacaaaacaaaaacccmaaaaactctcagaacaaagtatagtcaaaggagagacaacagtgttggtttcacctgcattttatcagagacaggagatgcagaatatctttaatagacatacrcaaataactgattattttcttacttcagcagttcagaagttgaggtacatgattgcactacaaatcattccgcaagccttctttactctttaaagtactctcggtcccttgcttcactagtctttcaccagagattattactcctaacatttccaaatt

SEQ ID NO: 25631 - DNA, 600 bp, Chicken  19866894241024_5
tgataacttaaaatgcagtggggatatttgggcaacctcaaacaccccttagaagaaagtttgggactctaatggtggaaggagtgctgaggagccagtgagtacatgctaatgartatagttacagcattaaaattaggatagttaccactgtgcagtgatatatttgctgggataaacatgataccttggacrtctaccaagacatgaaaatcagttcagtgcagctgactagagcatgtgctgttcctatgcaatgctgtagtaaratgtagtgcttctgtctagmtatcttcaggmaaaaaacaaaacaaaacaaaaacccmaaaaactctcagaacaaagtatagtcaaaggagagacaacagtgttggtttcacctgcattttatcagagacaggagatgcagaatatctttaatagacatacrcaaataactgattattttcttacttcagcagttcagaagttgaggtacatgattgcactacaaatcattccgcaagccttctttactctttaaagtactctcggtcccttgcttcactagtctttcaccagagattattactcctaacatttccaaatttccatcttgcc

SEQ ID NO: 25632 - DNA, 600 bp, Chicken  19866894241024_6
tttgggcaacctcaaacaccccttagaagaaagtttgggactctaatggtggaaggagtgctgaggagccagtgagtacatgctaatgartatagttacagcattaaaattaggatagttaccactgtgcagtgatatatttgctgggataaacatgataccttggacrtctaccaagacatgaaaatcagttcagtgcagctgactagagcatgtgctgttcctatgcaatgctgtagtaaratgtagtgcttctgtctagmtatcttcaggaaaaaaacaaaacaaaacaaaaacccmaaaaactctcagaacaaagtatagtcaaaggagagacaacagtgttggtttcacctgcattttatcagagacaggagatgcagaatatctttaatagacatacrcaaataactgattattttcttacttcagcagttcagaagttgaggtacatgattgcactacaaatcattccgcaagccttctttactctttaaagtactctcggtcccttgcttcactagtctttcaccagagattattactcctaacatttccaaatttccatcttgccatagtaggatataaagtgggattagc

SEQ ID NO: 25633 - DNA, 568 bp, Chicken  19866894241024_7
taaaattaggatagttaccactgtgcagtgatatatttgctgggataaacatgataccttggacrtctaccaagacatgaaaatcagttcagtgcagctgactagagcatgtgctgttcctatgcaatgctgtagtaaratgtagtgcttctgtctagmtatcttcaggaaaaaaacaaaacaaaacaaaaacccmaaaaactctcagaacaaagtatagtcaaaggagagacaacagtgttggtttcacctgcattttatcagagacaggagatgcagaatatctttaatagacatacrcaaataactgattattttcttacttcagcagttcagaagttgaggtacatgattgcactacaaatcattccgcaagccttctttactctttaaagtactctcggtcccttgcttcactagtctttcaccagagattattactcctaacatttccaaatttccatcttgccatagtaggatataaagtgggattagcagatctgatctgaaccatctcagtgccctgtgtgcaattctgttcagtaatcagatgtgttaaagcaaaaaa

SEQ ID NO: 25634 - DNA, 600 bp, Chicken  19866894241033_1
ggtcatctatcactaacctgaactcaaggctttgtttgctaactctcaatgaattcacatttattactgatatcatttattaaacatctggttgtatcacagactcgttcaggttggaaaagacctccgagatctcccagtgcaaccccaacccatcccaccatgcccattgaccatgtccccaagtgtcacatctccatggttcttgaacccctccagggatggtgacaccaccacctccctgggcagcctgtgccaatgcatcaccactctgtcagagaagaaatagttcctaatatmcagcygcattctccttcagagctcttactcacaagctgagggagcagcagaacataaagctagggaagcacttggatgagtgagaacttgacatcttcatccaacctataacaaggcaaaagctttcacattcctgaaaacaaggagcactagcacaagycctggttttcactgtgattacacaagacttcaggatgaccccattgaattaacagcagtcttcaattgcggtatggggcaaatctgctttctccattggtgagcacagcgtatgctaagcagctcctactctgcatcata

SEQ ID NO: 25635 - DNA, 600 bp, Chicken  19866894241033_2
tctatcactaacctgaactcaaggctttgtttgctaactctcaatgaattcacatttattactgatatcatttattaaacatctggttgtatcacagactcgttcaggttggaaaagacctccgagatctcccagtgcaaccccaacccatcccaccatgcccattgaccatgtccccaagtgtcacatctccatggttcttgaacccctccagggatggtgacaccaccacctccctgggcagcctgtgccaatgcatcaccactctgtcagagaagaaatagttcctaatatmcagcygcattctccttcagagctcttactcacaagctgagggagcagcagaacataaagctagggaagcacttggatgagtgagaacttgacatcttcatccaacctataacaaggcaaaagctttcacattcctgaaaacaaggagcactagcacaagycctggttttcactgtgattacacaagacttcaggatgaccccattgaattaacagcagtcttcaattgcggtatggggcaaatctgctttctccattggtgagcacagcgtatgctaagcagctcctactctgcatcataaacat

SEQ ID NO: 25636 - DNA, 600 bp, Chicken  19866894241033_3
ccatgcccattgaccatgtccccaagtgtcacatctccatggttcttgaacccctccagggatggtgacaccaccacctccctgggcagcctgtgccaatgcatcaccactctgtcagagaagaaatagttcctaatatmcagcygcattctccttcagagctcttactcacaagctgagggagcagcagaacataaagctagggaagcacttggatgagtgagaacttgacatcttcatccaacctataacaaggcaaaagctttcacattcctgaaaacaaggagcactagcacaagycctggttttcactgtgattacacaagacttcaggatgaccccattgaattaacagcagtcttcaattgcggtatggggcaaatctgctttctccattggtgagcacagcgtatgctaagcagctcctactctgcatcataaacatcttgtggaagtttcatgcagcctcgccccgttttcaccacaaataaaaggaagaaggtgctgcactggaggcagagggaactgtactggggcccagcacaccacctgcacctagccctccccaccagcagccatgtcctgctcctatggcaccaa

SEQ ID NO: 25637 - DNA, 600 bp, Chicken  19866894241035_1
tgaaaatctacaagaaatcatcaccatcccatcaccaccaagtacttcataaattcagacaaaaccaaataaaggttatatacatcctgtcaatgattacaacaaaaaatactaacatgagagcaaaaaaaaaaagtgtaacaatttctcaaattcatattcttgttttattcctatatgtattcatagaggaatattttaaaagattaagcaagagaacaaaggttcatttgtacagtgaaagatcagaaagaaaaaaaggcaaaggtggaagaacagttcagtctaagaacaaactascaaaagaacagtcaaaagggtgaaatgcctgcaggaaacacaaagattcyttaagtatcttacacaacatccaaagacgacttgtaaaatatgtctagaaacatctatgttcaaaagaacaaagaaaatcagatacagctaacacaggaagctattacaagtcatccttcaagaaggtgaagtagtatccagtaagaaaaatggaaaygaatgaattcttgtaagctatagtaaggtagaatcaaaactgattttgtgaagtaatgtgtatatgcataaaagacattaccaatatgaggc

SEQ ID NO: 25638 - DNA, 600 bp, Chicken  19866894241035_2
aaattcagacaaaaccaaataaaggttatatacatcctgtcaatgattacaacaaaaaatactaacatgagagcaaaaaaaaaaagtgtaacaatttctcaaattcatattcttgttttattcctatatgtattcatagaggaatattttaaaagattaagcaagagaacaaaggttcatttgtacagtgaaagatcagaaagaaaaaaaggcaaaggtggaagaacagttcagtctaagaacaaactascaaaagaacagtcaaaagggtgaaatgcctgcaggaaacacaaagattcyttaagtatcttacacaacatccaaagacgacttgtaaaatatgtctagaaacatctatgttcaaaagaacaaagaaaatcagatacagctaacacaggaagctattacaagtcatccttcaagaaggtgaagtagtatccagtaagaaaaatggaaaygaatgaattcttgtaagctatagtaaggtagaatcaaaactgattttgtgaagtaatgtgtatatgcataaaagacattaccaatatgaggctgccacagcatcagtctaaattaaatattttggtttcgtgttcattgtga

SEQ ID NO: 25639 - DNA, 567 bp, Chicken  19866894241035_3
aagcaagagaacaaaggttcatttgtacagtgaaagatcagaaagaaaaaaaggcaaaggtggaagaacagttcagtctaagaacaaactascaaaagaacagtcaaaagggtgaaatgcctgcaggaaacacaaagattcyttaagtatcttacacaacatccaaagacgacttgtaaaatatgtctagaaacatctatgttcaaaagaacaaagaaaatcagatacagctaacacaggaagctattacaagtcatccttcaagaaggtgaagtagtatccagtaagaaaaatggaaaygaatgaattcttgtaagctatagtaaggtagaatcaaaactgattttgtgaagtaatgtgtatatgcataaaagacattaccaatatgaggctgccacagcatcagtctaaattaaatattttggtttcgtgttcattgtgattacagagacttgctctagaatctttatgtaaaagatccaaactgatctttcagaaaaatgagctataaagtgaatcaacaaaacagtagtttttcaaaaaaaaaaaagcagattctacatccag

SEQ ID NO: 25640 - DNA, 474 bp, Chicken  19866894241036_1
agaagtagggggagccttaatgcacaggatatccctcggctcttcctctctcgcaaaaatagaagcccgcgagcgggcggctcggcgcgcacagggctgaccgcggggagctcggcgcggagcgtctcccaccgcacgcagcttccccggcaaactcatttcctttgttaggctccgggatatgcaaatgacggctttggcatttaatggggaagaatcccagattgcgcctcagcacaatacttcgcacacgtggggagggatggaagggcccgagcggcgttcgctccccaacacttycctctcccctcggagcggccttttgtgcagaactccgcgtctggaacaaatgtatattaatggcacggcgccgtgaccctcctctctccggcaccgttcgctctctaataacgaagcccacaaaaatcgctgcgaggaaacaaaaatctgcggagattacagaccgcgctatca

SEQ ID NO: 25641 - DNA, 599 bp, Chicken  19866894241041_1
  misc_feature (1)..(110): n is any nucleotide
nnnnnnnnnnnnnnnnnnnnnnnnnnnnnnnnnnnnnnnnnnnnnnnnnnnnnnnnnnnnnnnnnnnnnnnnnnnnnnnnnnnnnnnnnnnnnnnnnnnnnnnnnnnnnnaataaaataaaataaaataaacaagcttatttcattactggtaacagtggctgtatacccaaagcctgaggctggctaggaacaaccctccactgcatttgcttaatgagagaacatttcctccgctgtaaaactgaacttccacgaagattccagtgttgaggcactgcttgcagcctctggcagaaawgcactcgtggtacagtgagggagactgaagcttgggaatttgaggtctacggtggcatgtaaacctcgaggttctcccaggatcattcacatgccagaagcgtaccaaagatgcaggagatgagttttacagaaaaaaatattcatgtgctagtttggctatcacttcaaccagtagaacacttttgcaccaaacatctgataacatctggcagagcagacagcagaacactgctatcccggctacaagaaagcaatatctgacattcctgatgcttataactgtgatataagtaggat

SEQ ID NO: 25642 - DNA, 599 bp, Chicken  19866894241043_1
  misc_feature (1)..(116): n is any nucleotide
nnnnnnnnnnnnnnnnnnnnnnnnnnnnnnnnnnnnnnnnnnnnnnnnnnnnnnnnnnnnnnnnnnnnnnnnnnnnnnnnnnnnnnnnnnnnnnnnnnnnnnnnnnnnnnnnnnnnactgcaaaagaaaacctgtgacttccaaatgttatgtgcaagtctaactgtacaattatacgagtccaaagctcagtgatgcattatctgttacgcgctctgaaattaaggtgtaacagatagtcgtaaaggtacttaaagatcataacacagccatagttcatcttgagaaaaggtactaaaygtaggagatcaacgtgactgtgaaccacttaatacctacacaaataccacgtttcaaaaatwgagagaaaagaatgggtcaagatccaaataaacatatcacagagttgcacagacacaaatcagaatctgatcagttatgttttttccatttaattttcaattccttggggtagtaaatagagtggagaagatggagcagctgaacaactttgacctccattgcctttttaattatccacggctgatttcttagagaattcacaataattaaaaatgttgtcgagctgaagaaaaatt

SEQ ID NO: 25643 - DNA, 599 bp, Chicken  19866894241043_2
  misc_feature (1)..(54): n is any nucleotide
nnnnnnnnnnnnnnnnnnnnnnnnnnnnnnnnnnnnnnnnnnnnnnnnnnnnnnactgcaaaagaaaacctgtgacttccaaatgttatgtgcaagtctaactgtacaattatacgagtccaaagctcagtgatgcattatctgttacgcgctctgaaattaaggtgtaacagatagtcgtaaaggtacttaaagatcataacacagccatagttcatcttgagaaaaggtactaaaygtaggagatcaacgtgactgtgaaccacttaatacctacacaaataccacgtttcaaaaatwgagagaaaagaatgggtcaagatccaaataaacatatcacagagttgcacagacacaaatcagaatctgatcagttatgttttttccatttaattttcaattccttggggtagtaaatagagtggagaagatggagcagctgaacaactttgacctccattgcctttttaattatccacggctgatttcttagagaattcacaataattaaaaatgttgtcgagctgaagaaaaattaagagaaacaggaaaaaaagtcattcaacaaagtgatatttttatttatacaccctactctt

SEQ ID NO: 25644 - DNA, 600 bp, Chicken  19866894241046_1
catccaaatgtgcacaactaccacattgcatacacatgctatgtgcacatgcgtgcatagcatatattctttgatgcagtgaacaggcagagtgtatatctttacaagtgtccgtgcatagtgcacataaacatacagtgcatacactcacacagtacagacatgcacgtgtccatgtgttatcacaccacacgtgctcacagacatagcacacatacacaattctgccatgcatacagacacagtgaatgcagacactgtgtggactcaaacatgactgcatgtgtcactcttctcatmcttcttttctgggtcctccctggaaagttgctattgctgcaatggtggcagggcaggatgtggcagtactgccctccctcccttcctgctgtgccatgctgagatgaagaggtccatgctctgatggcccgaatctccctacccagataatgccaaccgggtgctgcttgctctctttgtggccgaaatgctgctgaagatgtatgcactgggcctgcgccagtacttcatgtccctcttcaaccgcttcgactgctttgttgtgtgtgcgggggtcctggagatcatcctggtggagct

SEQ ID NO: 25645 - DNA, 600 bp, Chicken  19866894241047_1
gaagcataatagaatataaacagaaccttatttccaccctcttctattaatgccatgaaaaaagaaaagtggtttagcagctgctaattgactggaaatggttaaaagaacaggacaaagttaaaaatccttgaatatgcctcacatcataccatgtaaaaataatctgggatcaaaattcataagaataaaattgaatgtcaataaatgttttctctgctgttttcaccacctatactatcttattttgggctctggttctgaacccactttgctcagccagggaggggaagaggtgawataaggaccttttcctctttgttcagtggcacaagggcagcgcacagtagcaattcctggactccttttggtatgggggggttggaaaccattcattactgtatgctttgatgaacgaggttcagggaaaagctgagtccacagcacagacagcccttgcatcacacaggggagcagaccagccaagggcaaagagcccctggtgccatcggatagacaagtgcagaatgctcagagcctttccccacacctagggcacaacacgtaatggagagactgtgactgcctgaggcactgtcc

SEQ ID NO: 25646 - DNA, 600 bp, Chicken  19866894241052_1
gttacgggcatgctcacgactgtacgttctgatgtaataaaggtttggttgtttctgttgggtggaggcagatggtgatcttcagagctcgatttctgttgtctcagaagcaccctttgctgcaggctgaggccaccaaatagtcaggaacacctggcagcaggggctgatcaaggcagatgtgccttggtgctgtggtagttcaggtttacacgacttcattaatccaagttattttaaacctctggctgtaggtttctacggtaaagatttcaaataatccagcaggcttagccatayaggcttcacaacttctgcttgggctggaaagcactgcattcagactggagtctgtgagcccatgtcaggcaggcgtctgaacaggtggcctcgctgcttcatacctccagtgtgtgcaggtctcctccaggatgcagttatggggtcctcaggacaatcttaggcaagaagcaccgcgatgacaaggaagggtgaaagctccagcccagctggttgtgtggttttgtccattaaattaaaaaagagggggaagtagcttggrgaattgctgtttgctggcagtgggctgactgaagtctt

SEQ ID NO: 25647 - DNA, 600 bp, Chicken  19866894241052_2
ggtaaagatttcaaataatccagcaggcttagccatayaggcttcacaacttctgcttgggctggaaagcactgcattcagactggagtctgtgagcccatgtcaggcaggcgtctgaacaggtggcctcgctgcttcatacctccagtgtgtgcaggtctcctccaggatgcagttatggggtcctcaggacaatcttaggcaagaagcaccgcgatgacaaggaagggtgaaagctccagcccagctggttgtgtggttttgtccattaaattaaaaaagagggggaagtagcttggrgaattgctgtttgctggcagtgggctgactgaagtcttcatctgataccctggattaacccaggttgccttrgctggagcgagaccgagtggtcgtggtgagtccctcccttccagcgcagggcactcggtgaccccacacagctgggggtgctgcgacccctactgctccctggctgtgccgagtgctgcccttcctgcggtgtgcccggacagggaggtggctcctgcaccccactgagctcaggctgtgctgttgggggttccctcctggcttcctgccccagccctatggagtaca

SEQ ID NO: 25648 - DNA, 600 bp, Chicken  19866894241052_3
tgcattcagactggagtctgtgagcccatgtcaggcaggcgtctgaacaggtggcctcgctgcttcatacctccagtgtgtgcaggtctcctccaggatgcagttatggggtcctcaggacaatcttaggcaagaagcaccgcgatgacaaggaagggtgaaagctccagcccagctggttgtgtggttttgtccattaaattaaaaaagagggggaagtagcttggrgaattgctgtttgctggcagtgggctgactgaagtcttcatctgataccctggattaacccaggttgccttrgctggagcgagaccgagtggtcgtggtgagtccctcccttccagcgcagggcactcggtgaccccacacagctgggggtgctgcgacccctactgctccctggctgtgccgagtgctgcccttcctgcggtgtgcccggacagggaggtggctcctgcaccccactgagctcaggctgtgctgttgggggttccctcctggcttcctgccccagccctatggagtacagttgtcgtcaggagtacacctactgctctgatcacgagtatgaacccagaatatccttcactgctgttagga

SEQ ID NO: 25649 - DNA, 600 bp, Chicken  19866894241057_1
ttgttcatctgtgtccctcagcaagctttgagacagtgatgcaaaagaataatcttttacaagggcgaattactgacttcagaccttagcgaaatgtaatttgctgcagaggtaatcacactttgccttactcacttagcccaataatgtccaacaaaatgtagaagttttaaaagaatcaatgttcctccagccacgtgtcacagagcaaagctcacctgtttataaaggtatttcagaggtacatgtgtgatcaaggtggtttattttgccttatgatcatgtttcctcctcccttcmtgttgctccttacccaaactcatttaattttcttagatattcaaaaacatacatttggacatagtgagagagaaaagttttcagaaaagttcacaagtaaggggcattgcattacgctattgcctagaagcaagccagtgaaaaacagcagtgaaggtcacagtacatttacttagtgtttatttgctccaggaaaatgattacttctagaagcagatgacttttccctccatttggatatctgatgcaatacatagaatttttgttttatttatttatttatttatttacgttgcatat

SEQ ID NO: 25650 - DNA, 434 bp, Chicken  19866894241061_1
tacaattcagtgtttccaatgacaatttaatggtatgtcgtcaataatcaacccgctcatcccaattatttgagaagaaactgatctgtaagacaccctttctcttcatttcctggaagctcacagagatgcagtaaaggcagctctgcttcctggagcctgaaaatagcctcacactctgccagccatctccatctgcaatggcacacaaacactgtgtggttctaactccacaaagcactgacttcaagatgtagatataatgcttagtgacacaaagacacatataattgcaaaaawatatatatatatgtgagcaaagaagattatcaggaaggaccaccaccgcttgaatttgtgctcaatagaacaggaacagtgggatttatgtgtaattgtaagccttcatgtgcccttcagagaataattactgg

SEQ ID NO: 25651 - DNA, 576 bp, Chicken  19866894241069_1
agagcagatgggtgcttttccaaaacaagaggtggcagacagtctgctgtcacctggctttgggaatggctttgctgactgttggtgtgctttgaaggttgatccctgtggtggtgaggtcaggaaatgccaaaatgagcatgaagttcaaggagaagggctgcacctgattgcatcccaatatcagctgcgttaacattgtgagtctacatgttttcttcttagccagaagcaatgataccctgtggctgcacagaacagcgtggctaaatgctgagttagaagcatgcagtctttttkatttcctgctttgttgtcacgtatacacaagtaaaccagggaaatccaagtggatgtgcctaggcaggatccgaaactgcctcaaatctgcactgcagtttgatcttctgctcgcgttgctgtatttaggcaatatctgtatagccctttctggggagaagggagattgtaagcttaaaagagtctggctaacatcttttggattgcacactttgttagttttgaaaatgcagatatgacaaagtggtgttgaaaccaggaggggtatgtgtagtg

SEQ ID NO: 25652 - DNA, 600 bp, Chicken  19866894241071_1
agggcggtacagcagagcagtgaaaaccactgcatgatgcaacaaatcttctgctggtatttccatgggcctccctccatgcagtgctggggggagctcagctccctcctgctgtccctcctctctgcttctgccaggcactaaggggaggcaaagaggtttggtggaggagctcagcccagtgtaaagtgcaagtggagagatgggataggctgtgtgaaagggtttagaggaggatggtgggttatctcatctcaagcagagctttatggcactcacagcagggctgctcaccaacartgytgagagtttgcagagctgcgagggtagcatgttccttccagccaagaggaagcgctgccctgtgcacacagccagcttaaataaggtagagataatgactaaggaaggataatcccatcagcataggatgtccatttgctaaagattttgggatgccttactggctagatgtaggctcaaagatctttctctctaatgtctagagcttctgaagtaaatacatgtacagatagaaaagctgtaaagaaattgtctgtttatctggtattggattatgcatctcttggattctgaaat

SEQ ID NO: 25653 - DNA, 600 bp, Chicken  19866894241071_2
gcggtacagcagagcagtgaaaaccactgcatgatgcaacaaatcttctgctggtatttccatgggcctccctccatgcagtgctggggggagctcagctccctcctgctgtccctcctctctgcttctgccaggcactaaggggaggcaaagaggtttggtggaggagctcagcccagtgtaaagtgcaagtggagagatgggataggctgtgtgaaagggtttagaggaggatggtgggttatctcatctcaagcagagctttatggcactcacagcagggctgctcaccaacartgytgagagtttgcagagctgcgagggtagcatgttccttccagccaagaggaagcgctgccctgtgcacacagccagcttaaataaggtagagataatgactaaggaaggataatcccatcagcataggatgtccatttgctaaagattttgggatgccttactggctagatgtaggctcaaagatctttctctctaatgtctagagcttctgaagtaaatacatgtacagatagaaaagctgtaaagaaattgtctgtttatctggtattggattatgcatctcttggattctgaaataaa

SEQ ID NO: 25654 - DNA, 600 bp, Chicken  19866894241073_1
cagtagatgccaacagttgcaacacttaaacataacactatgttaaatacacagtaataataataataataaaaagatcatttagaaaaaaaagaaacatttactttttcaaattttttcttatgcgatgtcatagttttgtatgccgggatgaacatgagatgacgcaatatcaaagaacaaacgaaaaacaaaacaaaacaaacaaaaaacccacaaacccacatgtaaggaaacatgaaaagcctgcaaacaatgtttcagatgtacccttctgacattttcacaaccagacaccastgcacaattccaaagctaacaaagtgctactaycagaaaacaacagctgatctctcggacaccaagaagttctgaaagcatttccagtgactttcactgagaccctctactgaagacttgcacttcgatactgtagttcttactgtaaatctatccagaccaagacaatagttaagtttcattacactaacagtatttcctttaataaaaacactctgcatgaaaataaatcattgtggggaaaaaaaaaaagaaagagaatttgtctatgccacacttatttaaatgatggaaacatta

SEQ ID NO: 25655 - DNA, 600 bp, Chicken  19866894241073_2
aacactatgttaaatacacagtaataataataataataaaaagatcatttagaaaaaaaagaaacatttactttttcaaattttttcttatgcgatgtcatagttttgtatgccgggatgaacatgagatgacgcaatatcaaagaacaaacgaaaaacaaaacaaaacaaacaaaaaacccacaaacccacatgtaaggaaacatgaaaagcctgcaaacaatgtttcagatgtacccttctgacattttcacaaccagacaccastgcacaattccaaagctaacaaagtgctactaycagaaaacaacagctgatctctcggacaccaagaagttctgaaagcatttccagtgactttcactgagaccctctactgaagacttgcacttcgatactgtagttcttactgtaaatctatccagaccaagacaatagttaagtttcattacactaacagtatttcctttaataaaaacactctgcatgaaaataaatcattgtggggaaaaaaaaaaagaaagagaatttgtctatgccacacttatttaaatgatggaaacattaaaaaaamaaacaagaaaacaccacagaattcca

SEQ ID NO: 25656 - DNA, 600 bp, Chicken  19866894241073_3
ttccaaagctaacaaagtgctactaycagaaaacaacagctgatctctcggacaccaagaagttctgaaagcatttccagtgactttcactgagaccctctactgaagacttgcacttcgatactgtagttcttactgtaaatctatccagaccaagacaatagttaagtttcattacactaacagtatttcctttaataaaaacactctgcatgaaaataaatcattgtggggaaaaaaaaaaagaaagagaatttgtctatgccacacttatttaaatgatggaaacattaaaaaaamaaacaagaaaacaccacagaattccaaatccaactggaaatgccaatgtcctcaaaggctcaagattgtgtctattcactgtacttcaagaagcagtgtaacacattctgcgataacaatgctacatatattaaaggaaaactgatagcataaaaccccaacattagaccagctgactgatgttctcacctccaccctttcttattacccaagaagaactttgtacaagcttatgcttgttactgaattaaggatttgcttcttcaaaacaactatggaatttgttaaaaaaaaaaaaaa

SEQ ID NO: 25657 - DNA, 600 bp, Chicken  19866894241073_4
caaaacaactatggaatttgttaaaaaaaaaaaaaatctactcaagggataaacaatacacaaatggtcaaaacatcatctgaataaccactgaacttctgccttttgcaaatctagtctcctgagcataaagaactacacagcgcacactaggatatttttagaaatcagagctccgtgttcacttgtgaccatgccagcacccattactgtgtaagaagttatacatgaccaaaaacaactctaatgcaccatacaagtaagattctagcatgtattttacccataatactcattcayctgactgcttaaagacatgtaaaagctgtgtagttaatacaattcaggcttgaggggttacttttagaggagtaaatgaattggatacacatttgcaaaactaacaaccaaaacacattcatatttctccacatttccttgaagttacagtaaacaatgaaaagcagtttgagcaaattatttctttcgtattgatcctctgcccacatgacaaagatcaaaaaatcctccatgcccttcagttaaaaacaaaaatgtatatatatttacatgtacatagaattcctatgccataattga

SEQ ID NO: 25658 - DNA, 600 bp, Chicken  19866894241073_5
aacagaaagaccttaccagtcagtaagtttgcatgcttctgaaattgctcaggcagtaattctgtcaaaattctgtatttgtttactgcatcaagatggcatacattgctgtcatttctgatagcactctgttgtaccagttaaacaacaaattatttatgcaaagtagctttgaaatggaaaaagtaagagctgcgccttgcacttacaaagaggctcacataatcagaagtactgtgggtgaccccttgaggtccctggcagccgtctctacctgtctccatacaagatccaagaaakaaatagttgcatacatgtcagtagtcagagraatctatttcagtagttggtcactagattataagggaatgtgacaacctctggccaaagtttaccggtttctagctcatcccttttccctccgacttatcaatgatgttttcattaaattaatcaacatgatctgccacaactctgttcacgtgtcctgtcaaattcaacttcactccaactgctgaagcagagtcagcattacttcacaaaactaccccatttcttgcttattcattaaaataatttgtagcaatttgaaaaacagaa

SEQ ID NO: 25659 - DNA, 600 bp, Chicken  19866894241073_6
catgcttctgaaattgctcaggcagtaattctgtcaaaattctgtatttgtttactgcatcaagatggcatacattgctgtcatttctgatagcactctgttgtaccagttaaacaacaaattatttatgcaaagtagctttgaaatggaaaaagtaagagctgcgccttgcacttacaaagaggctcacataatcagaagtactgtgggtgaccccttgaggtccctggcagccgtctctacctgtctccatacaagatccaagaaakaaatagttgcatacatgtcagtagtcagagraatctatttcagtagttggtcactagattataagggaatgtgacaacctctggccaaagtttaccggtttctagctcatcccttttccctccgacttatcaatgatgttttcattaaattaatcaacatgatctgccacaactctgttcacgtgtcctgtcaaattcaacttcactccaactgctgaagcagagtcagcattacttcacaaaactaccccatttcttgcttattcattaaaataatttgtagcaatttgaaaaacagaaatgtttacactaagtttttaacaaagkcttc

SEQ ID NO: 25660 - DNA, 600 bp, Chicken  19866894241073_7
gagraatctatttcagtagttggtcactagattataagggaatgtgacaacctctggccaaagtttaccggtttctagctcatcccttttccctccgacttatcaatgatgttttcattaaattaatcaacatgatctgccacaactctgttcacgtgtcctgtcaaattcaacttcactccaactgctgaagcagagtcagcattacttcacaaaactaccccatttcttgcttattcattaaaataatttgtagcaatttgaaaaacagaaatgtttacactaagtttttaacaaagkcttcacctttaagttgttcttcaaaattaaaatatgagattgcacttcagcaaaaaatcacgaccttcaaacrtaggaagtcaatatcaaaacaagatgtgcaacacttcaccattcaaggaaattgggacagggaagacattaggcaatatgtgtaaaaagaaaagcctaaaaagcaatatgcattttgaacttacttcattttcaagtcttttacttgaccaggcagctagcctgaaaagtggaacttcgctaaatatgaaaaccagkcaccctcactgcgaggccttattctcagct

SEQ ID NO: 25661 - DNA, 600 bp, Chicken  19866894241073_8
tctagctcatcccttttccctccgacttatcaatgatgttttcattaaattaatcaacatgatctgccacaactctgttcacgtgtcctgtcaaattcaacttcactccaactgctgaagcagagtcagcattacttcacaaaactaccccatttcttgcttattcattaaaataatttgtagcaatttgaaaaacagaaatgtttacactaagtttttaacaaagkcttcacctttaagttgttcttcaaaattaaaatatgagattgcacttcagcaaaaaatcacgaccttcaaacrtaggaagtcaatatcaaaacaagatgtgcaacacttcaccattcaaggaaattgggacagggaagacattaggcaatatgtgtaaaaagaaaagcctaaaaagcaatatgcattttgaacttacttcattttcaagtcttttacttgaccaggcagctagcctgaaaagtggaacttcgctaaatatgaaaaccagkcaccctcactgcgaggccttattctcagctttaactgggagatgcaaaacagctgacaactgtccctctctcacccaccaatgtgtgtaacatgcaagaaagt

SEQ ID NO: 25662 - DNA, 600 bp, Chicken  19866894241073_9
gaaatgtttacactaagtttttaacaaagkcttcacctttaagttgttcttcaaaattaaaatatgagattgcacttcagcaaaaaatcacgaccttcaaacrtaggaagtcaatatcaaaacaagatgtgcaacacttcaccattcaaggaaattgggacagggaagacattaggcaatatgtgtaaaaagaaaagcctaaaaagcaatatgcattttgaacttacttcattttcaagtcttttacttgaccaggcagctagcctgaaaagtggaacttcgctaaatatgaaaaccagkcaccctcactgcgaggccttattctcagctttaactgggagatgcaaaacagctgacaactgtccctctctcacccaccaatgtgtgtaacatgcaagaaagtttctgaaaagaaatcctcaggtctcaaagtgcatgttttgcattgcggatgggttgaagtttccataaaagatcaattaaaagctgctgaaagtaacaatctatcacgcatacacagcatgatttctagcgctactcgtaaaattaagcacgtctgtacaagaacttgcctttgcctccagctgtttgtgtttaagc

SEQ ID NO: 25663 - DNA, 600 bp, Chicken  19866894241075_1
aatgtatgggcctgcttctgaaaatatattacatatgtcaaaggaacagtaattaaactgctccctctaagcctttttgatgggccattttcagaatgaatggttgaggctgagaaagggcacttggcatttaagaaccctacctttaggatattattctccttgctttctcatgctcacataatttttcctttttctaccaacttagagcaatgccaatatctactttttcagttaaggaatatctgtaaaattaaagttgtgtgatataaatgtaattgttcttctcataaaaaaaawatatatatatatacatatatatatatacacacatatacatcagtcaaatcttataccagccttgaagaaaagagaaacgcagtagtctgatcataatgaaagtggcaaattttgcattttgccattgattaatagaatctaacaaaaaccaatgtcactcatactaaagcactcaaaataattattacatgttcaatatggtgttacactgaataaacaatgaaaaaaaggcaatgccacagtgagtgtcataagcagtttcttcaacagagacaacagtcattctacgaatatcacaga

SEQ ID NO: 25664 - DNA, 600 bp, Chicken  19866894241090_1
tgctgatcgttcagccagcacgaaatgagtcaccccaaaaggtcaaaatacactgattcaggcttcctcaggccacacaactatcctaagtctgttccatcttcagagactgaaggtggtggctttgtaaaagacctgtccagagtttggaggcagtttggaggtggtggaactcctcatcttgggggggggggaagaaaattctggaagggtctcaagcaggctgtaccgagccccagagaatgctcatttagctgggacccataggagacagctcccgtttgaattcagcagagcccygtagaccacagtgaatacaaaacccaggatgcagcacaaacacagctgtgcagagacacgatcacagagatagcttacttttcagaacacacaaaggttctaaacagtttcattatccgaggtctgcacctaaaaaggagtggcaacgtgtttgtattgtacagccaatgtaaacackggcaggaggaagtttcgactgtctttggaaatttcattgatttctcacaaatgcagcacgtcattctggttttctctttcactaaaaccacttggtttccaggacactgctatatctttctg

SEQ ID NO: 25665 - DNA, 600 bp, Chicken  19866894241090_2
atcttgggggggggggaagaaaattctggaagggtctcaagcaggctgtaccgagccccagagaatgctcatttagctgggacccataggagacagctcccgtttgaattcagcagagcccygtagaccacagtgaatacaaaacccaggatgcagcacaaacacagctgtgcagagacacgatcacagagatagcttacttttcagaacacacaaaggttctaaacagtttcattatccgaggtctgcacctaaaaaggagtggcaacgtgtttgtattgtacagccaatgtaaacackggcaggaggaagtttcgactgtctttggaaatttcattgatttctcacaaatgcagcacgtcattctggttttctctttcactaaaaccacttggtttccaggacactgctatatctttctgaaagatccaggtgcttgtttgttttttaatcgaataaactaatacattataaaaaaaacacatctatcagaaaacgctttcggtattccctgcctaccttttgtcttacgctttggcatcactgtcacagtttggaaagcaattctaaaagcagcctttcctcctctactttcacact

SEQ ID NO: 25666 - DNA, 600 bp, Chicken  19866894241099_1
gcagctaatagttaagtttctgtattgaatacggactgggcagaagttctctgaaatattgtgttttatttggttggcttttttttttttaatcattttctggaggtttaatcctaaacacaagtaatgaatttgaaaagaatattttaaaggatatttattttaaaagcatccatctcttactgaaagtgttctgggtagtgggtggtttgctttgttctgacacagcacctgcagagttagtaaagaaaaactgagctgtttcttccactacctgtgtaagttaaagacttcagtgcygatgaggtcatcactgaacctcaaactacagcacccaacaaaaagtttcagggcaggcacttccaatccacagggtgttgttgctgaccaggtgccyggccagcagcatgtgaccaactgcaagcccagccccagggcttgggaagctatgtggcatcacacaggttgtaaagagaaccattaagtacaaaacgttctgtattaattatcagtacaccttgcatcctagcagtagttaaaggcctgtacatacttgcaggcacaaaatgttacagatcagcactgcccccctcttggcat

SEQ ID NO: 25667 - DNA, 600 bp, Chicken  19866894241099_2
ttctggaggtttaatcctaaacacaagtaatgaatttgaaaagaatattttaaaggatatttattttaaaagcatccatctcttactgaaagtgttctgggtagtgggtggtttgctttgttctgacacagcacctgcagagttagtaaagaaaaactgagctgtttcttccactacctgtgtaagttaaagacttcagtgcygatgaggtcatcactgaacctcaaactacagcacccaacaaaaagtttcagggcaggcacttccaatccacagggtgttgttgctgaccaggtgccyggccagcagcatgtgaccaactgcaagcccagccccagggcttgggaagctatgtggcatcacacaggttgtaaagagaaccattaagtacaaaacgttctgtattaattatcagtacaccttgcatcctagcagtagttaaaggcctgtacatacttgcaggcacaaaatgttacagatcagcactgcccccctcttggcatgagaatgcagaagttggacagcttagctgggacaaacaagactgccctgtttcacatggatacaggatggtagatggtttgggagttcaagattaca

SEQ ID NO: 25668 - DNA, 600 bp, Chicken  19866894241110_1
gccctgaaacagatggaagacagcttcagaaaaaaataagaagattcttctaaaaacttcatcaagctagttgattctttttgaccgaacagagttgacacaaggcacttcacctaaaaacatgccttccttctctcatactgctcccactggggctataagcagcacagtggagagttcactaccaccgaccactccattatcatcacaacaaccatagagtaaccccttatcagtaaaagaagtgggtagtgatggggaaaaggtaacacaatgtgaaatatatgtataatctacaarcacaaaacaggaaaagaccaacacatgaccattaggtggtaggtggcacagtataacatgttcacatttccacagacagatatgccttttagcacaccaacagtagaaactgtctcaatatcttcacattggtaattagagatgccatgcaggcaggcaggcagtattattcctttttcttaatggtgaatggaagttgtaggttgcagaataagaaacagacctgcagtcaaatggcagtcaaaaaactcaaagtcaaatggcccagggaaaaaccaaacagcgtagacagaggtacag

SEQ ID NO: 25669 - DNA, 599 bp, Chicken  19866894241114_1
  misc_feature (1)..(25): n is any nucleotide
nnnnnnnnnnnnnnnnnnnnnnnnnaaacctggggcagatgctgggagggagtggggcaggctgcatggggagggctgcaggaggggccgtggggctaatcctgtctgcctgccccatctgtgtgagttaagctgctctacattctgctttcgaatctgaacacagagccatgctgcagcagcaccacctgtgctcgtgtggggtgctctgtgagcccgcagccctggggtgtgggaattctccttttaagcaggctgctggctgtctcaagcgtgagggctctgtgcagggaggctttrctgcccgatgagatgagagctgagccaacactcctgcttcttgctatggctctcaagctgcggctgctcttctctgggcygcttctgcagtgcactgtgccccattcgtatggggtcaaccagagatggaaaaaccaaaagtgatcttgtgaggtgatgtcattgtcaccacttccagctctgccggcccttcgctggctgcccctcaatgcactgctgtgtccccatgctgaagccagccagcaggcactgcattggagaagacaacttggttgggattatggattttaaaactttgt

SEQ ID NO: 25670 - DNA, 600 bp, Chicken  19866894241114_2
ggaggggccgtggggctaatcctgtctgcctgccccatctgtgtgagttaagctgctctacattctgctttcgaatctgaacacagagccatgctgcagcagcaccacctgtgctcgtgtggggtgctctgtgagcccgcagccctggggtgtgggaattctccttttaagcaggctgctggctgtctcaagcgtgagggctctgtgcagggaggctttrctgcccgatgagatgagagctgagccaacactcctgcttcttgctatggctctcaagctgcggctgctcttctctgggcygcttctgcagtgcactgtgccccattcgtatggggtcaaccagagatggaaaaaccaaaagtgatcttgtgaggtgatgtcattgtcaccacttccagctctgccggcccttcgctggctgcccctcaatgcactgctgtgtccccatgctgaagccagccagcaggcactgcattggagaagacaacttggttgggattatggattttaaaactttgtggaacaatttaagccactggaacttttgctgtaaagaaatataagcttcttttgatgtaaaacactgtgtggaacattaga

SEQ ID NO: 25671 - DNA, 600 bp, Chicken  19866894241114_3
tagctgtctgttcttgctccctttctctttcccagcactacatggcccagcagcacccagctctggtcccaacccatgggaggggtctgggagcagtcaggaaggtgaccatgtgtgccctggtcctgctcctgctccccacgtggagctgtgcatgcactgcctgccctgctctgacacccactgctgctacagggggcattttgctgctgctgtgggactttgctcggctgcaaatatttgtgcaggagtgagttcgtgttttcagcatgagcagcagaagctgtgtgtttaagtcartgggtaacagagcatgtgttccaagagcaaattaattcctgtgcaaatcagagagmtctgctgctatatcagygccccacacagccctccctgtaaccttcatcatggggggaagctgaggaaaggatatgcttcccttcctacctaccaataattgtctgtaatcatcagattaacttgttactgagagctatgaaatgatcctattcccttttgatccaatgaggatgagaataaagcaagaaattaatcagggatccataaataggaacaccagctaagaaatgcattcttaacacr

SEQ ID NO: 25672 - DNA, 600 bp, Chicken  19866894241114_4
ccagctctggtcccaacccatgggaggggtctgggagcagtcaggaaggtgaccatgtgtgccctggtcctgctcctgctccccacgtggagctgtgcatgcactgcctgccctgctctgacacccactgctgctacagggggcattttgctgctgctgtgggactttgctcggctgcaaatatttgtgcaggagtgagttcgtgttttcagcatgagcagcagaagctgtgtgtttaagtcartgggtaacagagcatgtgttccaagagcaaattaattcctgtgcaaatcagagagmtctgctgctatatcagygccccacacagccctccctgtaaccttcatcatggggggaagctgaggaaaggatatgcttcccttcctacctaccaataattgtctgtaatcatcagattaacttgttactgagagctatgaaatgatcctattcccttttgatccaatgaggatgagaataaagcaagaaattaatcagggatccataaataggaacaccagctaagaaatgcattcttaacacrttcataaaccacatgaataatttgtacagtacgatatatgtactatcatgttttga

SEQ ID NO: 25673 - DNA, 600 bp, Chicken  19866894241114_5
ccatgggaggggtctgggagcagtcaggaaggtgaccatgtgtgccctggtcctgctcctgctccccacgtggagctgtgcatgcactgcctgccctgctctgacacccactgctgctacagggggcattttgctgctgctgtgggactttgctcggctgcaaatatttgtgcaggagtgagttcgtgttttcagcatgagcagcagaagctgtgtgtttaagtcartgggtaacagagcatgtgttccaagagcaaattaattcctgtgcaaatcagagagmtctgctgctatatcagygccccacacagccctccctgtaaccttcatcatggggggaagctgaggaaaggatatgcttcccttcctacctaccaataattgtctgtaatcatcagattaacttgttactgagagctatgaaatgatcctattcccttttgatccaatgaggatgagaataaagcaagaaattaatcagggatccataaataggaacaccagctaagaaatgcattcttaacacrttcataaaccacatgaataatttgtacagtacgatatatgtactatcatgttttgataggcattttcactgac

SEQ ID NO: 25674 - DNA, 600 bp, Chicken  19866894241114_6
tgggtaacagagcatgtgttccaagagcaaattaattcctgtgcaaatcagagagmtctgctgctatatcagygccccacacagccctccctgtaaccttcatcatggggggaagctgaggaaaggatatgcttcccttcctacctaccaataattgtctgtaatcatcagattaacttgttactgagagctatgaaatgatcctattcccttttgatccaatgaggatgagaataaagcaagaaattaatcagggatccataaataggaacaccagctaagaaatgcattcttaacacrttcataaaccacatgaataatttgtacagtacgatatatgtactatcatgttttgataggcattttcactgacataccctgtgggtgttcctcttcatgtcacaggaaggaatttttccaggaatgctcatcaatagataaaacctgattgtatcaaataacttggcattgcttctgttcagcaaatgggctcctccgagttggttccagctctggcaagtacttgataaatggagcccagttctcaagttctgttctgattatgtttattcactactggggtagggcagataaggccct

SEQ ID NO: 25675 - DNA, 600 bp, Chicken  19866894241114_7
ggttttaatgattgactaactggaaagttgataaaaagtcactttttctaatgaaatgcttatatgtttgctttcagtgttgtaggaacagtcagcaatgacctctctacttgaattatggtgatgattttttaaaatgttgcatttctcatggagaaactctgatggccgaatctctggagccaccctttgaaattcatcagggataatgttccttatctatcagaaggagattcagtctgacagtaccaggtttatgctcatctgttttcttcatactcactacagcacttctccctyctcagttattgttcccaaagcactgcctggatgtgcaggacagcattctgtttattttgacgtttcttacaagctcttgattttgcaacttgcgttattatactacatagacaagttctactataacttagctatgtatgtgttttcctcttttgccctcagataccgaatgtgtttgtattttgaagtattgagatcttcagaactttacctccgacctgagaatttaatcctattcaatccatgcagtacatacagtgtgcgctatgactgctgggatttggtaaagcatattttcct

SEQ ID NO: 25676 - DNA, 600 bp, Chicken  19866894241115_1
gaaaatgcagcatgactgggagatggtgaaagcaagattgaggggagcagcatctaggtttaagctagacctgggctaagggacaccagctgagactgagtatggaaagaaattatgttgggaaactgatgggtggcaaacacttgcgatttgacaggagaagaatggaataacagcaggaaacagagtgatagtatgatgctagccaaggaacttgacctggggaaggatattagcagttaagtgtgtgtacttaagatgtgcagacagaagacaggaagctagattcgttcaggtaaygaatgggaaactgacactgagctgtcaagggaggactgagaaggggtcttttatagttgccttctgttacatgaacatgtatacaaaatttttcatgcctctaaatctgccatgatgatgcttttatctctagtatttctaagtacagaacttcaagctttaaagatagtgcacagcaagaaaagtaaaagctctcatttggaaaagcacaacgaaatccatcaggaagtacaagctatctgtgatgcactgggcttaccaaactcctcctcgtccgatattcctcctttgttaaacaat

SEQ ID NO: 25677 - DNA, 600 bp, Chicken  19866894241116_1
cacacatatacatatggaataaaagcttgttagctaatgaaagagaagactaaaggtcctacgaatattccatttaacatctgctcataatttcagtcttataaatcccattctctacgatggaattgtaatacacatttaattaaaagtacaggaaaaaacgggaatttttgttagaatactcagagatgctttgataaaacaaagaccatagacctacccacaatttttagtgtacattacaaagtaatattctaccattgaaaacaacaccacaacttcaaatagccttaacacacracaagtatcagccaggactgctacaggtagaaattcagcttacgtaattctttcccagaacacacattctgcttatctggctattcaagttcagcttcccttctcttcatgcactttaataatggacacagagcagcctagctcttcaggagctaaatttggtttcattcagatccatacaactcaaaatctcatgcggacagaggtgatcaatacaaagatctgggagaaagtcctatgcacgtaaaccagaagcagcacrcttccaatggtgacaagcacagtatgacaagagctcag

SEQ ID NO: 25678 - DNA, 600 bp, Chicken  19866894241116_2
gaaaacaacaccacaacttcaaatagccttaacacacracaagtatcagccaggactgctacaggtagaaattcagcttacgtaattctttcccagaacacacattctgcttatctggctattcaagttcagcttcccttctcttcatgcactttaataatggacacagagcagcctagctcttcaggagctaaatttggtttcattcagatccatacaactcaaaatctcatgcggacagaggtgatcaatacaaagatctgggagaaagtcctatgcacgtaaaccagaagcagcacrcttccaatggtgacaagcacagtatgacaagagctcagccaaaacagacatacttgcactaatcctgcagaaatttattctctgtaccccagcagtaccatctcaargggacagaaataccgaagcacactgctatccaaggtacccygtggcagctgctctcagtatccaggatccacaacttaaacgtagcatggatacatctgaactagctgtggccatatcttagactgttagatacatcgaagggacctcagaaactaacagggggcaataaaagataaaatattttgttttgct

SEQ ID NO: 25679 - DNA, 600 bp, Chicken  19866894241116_3
tgcttatctggctattcaagttcagcttcccttctcttcatgcactttaataatggacacagagcagcctagctcttcaggagctaaatttggtttcattcagatccatacaactcaaaatctcatgcggacagaggtgatcaatacaaagatctgggagaaagtcctatgcacgtaaaccagaagcagcacrcttccaatggtgacaagcacagtatgacaagagctcagccaaaacagacatacttgcactaatcctgcagaaatttattctctgtaccccagcagtaccatctcaargggacagaaataccgaagcacactgctatccaaggtacccygtggcagctgctctcagtatccaggatccacaacttaaacgtagcatggatacatctgaactagctgtggccatatcttagactgttagatacatcgaagggacctcagaaactaacagggggcaataaaagataaaatattttgttttgctcaactcgatccatgcatttgaaaagtaactgttccaaagcaaatggaggcagcaaattttggtttacatagttgagggaaatcatcttgggcagagagacacaaata

SEQ ID NO: 25680 - DNA, 600 bp, Chicken  19866894241116_4
gcactttaataatggacacagagcagcctagctcttcaggagctaaatttggtttcattcagatccatacaactcaaaatctcatgcggacagaggtgatcaatacaaagatctgggagaaagtcctatgcacgtaaaccagaagcagcacrcttccaatggtgacaagcacagtatgacaagagctcagccaaaacagacatacttgcactaatcctgcagaaatttattctctgtaccccagcagtaccatctcaargggacagaaataccgaagcacactgctatccaaggtacccygtggcagctgctctcagtatccaggatccacaacttaaacgtagcatggatacatctgaactagctgtggccatatcttagactgttagatacatcgaagggacctcagaaactaacagggggcaataaaagataaaatattttgttttgctcaactcgatccatgcatttgaaaagtaactgttccaaagcaaatggaggcagcaaattttggtttacatagttgagggaaatcatcttgggcagagagacacaaatatctaatctaaaaaagaaaaagtaattttttttaaaccagaa

SEQ ID NO: 25681 - DNA, 600 bp, Chicken  19866894241117_1
gtctcagtttaaaaccattcaaaggacggtttgtgttctgttaactaaagtatctcagtagtcaacagaaattcagcatcaaaccccacaacttcagcaaagcctcctcttgcaatgagcacgatcgtgagaaatcatgacagaatttaaagacctcttccacctctcccataattgttccattctcatacacgcttcccactgccacaggaacgtccttaatggtagcagccagtaatgaggagccacgacaagcaagccaggtgtcccgtgttatcaatcagaaacagaacttattcyggggttttaaatacacactctgttccaagaactcttttattagttatgcgtcttttaaatcaaattctgtggaaagtagcttaaagaacatcacaaccgaaagctgtgctggcccaataaagcacatcaatctcccatactcagcaaatgaatgggcaggtagcagctgctgggctgtacagaactctttcctgactgagaccgagtatgcatttgatgaagttgtctcaaataacgccaggagcaccgctaactgaaagattaaacattctgatttcattaaaaaataaaaaaaccccg

SEQ ID NO: 25682 - DNA, 599 bp, Chicken  19866894241127_1
  misc_feature (1)..(43): n is any nucleotide
nnnnnnnnnnnnnnnnnnnnnnnnnnnnnnnnnnnnnnnnnnntcaccccccacgggccattccaaacacgcagaattattaactcccttaataataaaactatcataaagtatctcccaccagagcatatataatagtccattatttctttaaagaaatatttttatgtatgcttaatagaagccaaaaccaaaagaaaaggtaaacacagtctaagtaataatgcaattcaacaatctctgttgttttatgctgagcattgactgctttcagcagcaatgggcaagccaatcaccccrtatcttgcttgcaccagctacagaagatactaactgtgaatcctatttatcaggtagcatatacttaatttgatacsttacctgcatatgtgctaattaatctgtgtttaatattatcccattattactttatattacttgtatataaattttttggcacaacacaaaatccatcatattaaaaagtacaaatatataaatgtatctcaccaaatatctaaggaaaactaaaaatgaagagttttcaaactaaaaagtgtgactatgaactcttgggataccttccttgtcagaaagat

SEQ ID NO: 25683 - DNA, 600 bp, Chicken  19866894241127_2
tattaactcccttaataataaaactatcataaagtatctcccaccagagcatatataatagtccattatttctttaaagaaatatttttatgtatgcttaatagaagccaaaaccaaaagaaaaggtaaacacagtctaagtaataatgcaattcaacaatctctgttgttttatgctgagcattgactgctttcagcagcaatgggcaagccaatcaccccrtatcttgcttgcaccagctacagaagatactaactgtgaatcctatttatcaggtagcatatacttaatttgatacsttacctgcatatgtgctaattaatctgtgtttaatattatcccattattactttatattacttgtatataaattttttggcacaacacaaaatccatcatattaaaaagtacaaatatataaatgtatctcaccaaatatctaaggaaaactaaaaatgaagagttttcaaactaaaaagtgtgactatgaactcttgggataccttccttgtcagaaagatagaattgcatccagattttatggattctttctggagttttttggtattgtcattattgctagctgttctacttaagtt

SEQ ID NO: 25684 - DNA, 600 bp, Chicken  19866894241127_3
atcccattattactttatattacttgtatataaattttttggcacaacacaaaatccatcatattaaaaagtacaaatatataaatgtatctcaccaaatatctaaggaaaactaaaaatgaagagttttcaaactaaaaagtgtgactatgaactcttgggataccttccttgtcagaaagatagaattgcatccagattttatggattctttctggagttttttggtattgtcattattgctagctgttctacttaagttaattacatcattacatgatttcccatggataacaactygtaattccatctacttattctctacagaggcagaggaacacagtagattaggaggctgccaagctaaaatgacatccagggcaaatttgtatttgtaatagaacatgcaagatttggaaatgctgcttaaaacggaagcaggaaactagcttcaggcactgaatgtatgaaaaaggcaaagacattagaatatctgaagcaacaataagaaagattgtaaacttcattaagagcagaatctgtccataaatcaactgacaggtaagtacaaccatcaatatcaaaataccatttgtaatt

SEQ ID NO: 25685 - DNA, 600 bp, Chicken  19866894241137_1
gctaaaaatctgttttgaatgggagagagtccaaaagaaacccaccaagaacagtaaggtgttaaaaataaaatcacttgatgactaaattgtaaattgtggatttattatagaaaataatcaaattcaaaaaattagatttttgcaaaaaaatgttactgttttgtaagatgaattaggttacgaagaagagaaaatttgccaaaaaagtatactctctgatgttacgtaaagattaaaaagaattcacctatacataattcctaaaattaattgtatgattaccagtatactaatagyaaattggacycaattatccttaacacccagtgcctaatcttctatatgaaatacagagactccttgaatagttatataccttctgacgagtttcaaatgtgttacagaaattatcaactagcaacagcagagcaagctggggagtacatttcctaccttatatagagatataagtagtactaagacgagagcattatgcaccgtagcccattcccctgtatagtggctgctcttagcttgacctgcctcctagctgaggttctgaagtgtgatgtggagaagtcttctctatggtagcct

SEQ ID NO: 25686 - DNA, 600 bp, Chicken  19866894241137_2
tgttttgaatgggagagagtccaaaagaaacccaccaagaacagtaaggtgttaaaaataaaatcacttgatgactaaattgtaaattgtggatttattatagaaaataatcaaattcaaaaaattagatttttgcaaaaaaatgttactgttttgtaagatgaattaggttacgaagaagagaaaatttgccaaaaaagtatactctctgatgttacgtaaagattaaaaagaattcacctatacataattcctaaaattaattgtatgattaccagtatactaatagyaaattggacycaattatccttaacacccagtgcctaatcttctatatgaaatacagagactccttgaatagttatataccttctgacgagtttcaaatgtgttacagaaattatcaactagcaacagcagagcaagctggggagtacatttcctaccttatatagagatataagtagtactaagacgagagcattatgcaccgtagcccattcccctgtatagtggctgctcttagcttgacctgcctcctagctgaggttctgaagtgtgatgtggagaagtcttctctatggtagcctccttcagatg

SEQ ID NO: 25687 - DNA, 600 bp, Chicken  19866894241140_1
gaaatgagacattacagggggaaaaaaaaacaacagcagctcagtgtgctgctgcactggattgcagattctatagttttcttcgtgctgtgaaatcacttttcatacccacttagaaatgataacaaatgcagcattgtcctgaatgtgtacttaagtacaatgcagaaatagagcaaacagctacgtgactgtatctgacttaaatattgttgtcagaatgcttctctgaagaagtcaaagcttgtttatgtcctcgttacctctgcttgtaccagtaaatactggtgacaaatgttwcttggaagggaaaggattttcatatcccattaatttaaagattaattctatcggaaatcaacctgctgtcctggctctgccagtttggcatttacctacctagaacgttctctagagattacaaaatgagatcatttaattttgcttggtttctagggcagaagaaggggctagcagtgtgctctaacatactatgttactctatggcccatcttcattgctcattggagagtcagagttgcccttgctgttgaatagtgagaatccagatacctgtacttttgctcctagttacttggc

SEQ ID NO: 25688 - DNA, 600 bp, Chicken  19866894241143_1
aaaaaaagctcacaaaaaataaaaccaacacacaaaatccaacatctgcaaacagtcgtgcaggaagacagccaaaatctgatcacgagcattaacatttaactactgctgtatttcactgtgtgcccgcacatcttgtacaaaggcagacacccttatgctccatgtccccctgcaagtaagcaagtacacatgctccattcataattaatggcccggctttccaaaaacactaacaactgcatctgcttctgcctgtagaggctttggtcctaaaggcttggcttcaccaaactaatkctctgcctgcaaaatagccagctaggagacactggaacctgcctttgacacctggactccagatgcacccaaaccagcatcaaacaatcacagtcatcctctgaaatcagtgctggcttttccgtacatttcaagggtgatatgtttggacttcaaatattcagttttctgaggtgcttagtgcttaagattgggactaagccctcccaaagcttcaagcaagtacagagcccccagcacccctgctgaactgaacttctacattatttcaagccattccacaacctccgaggacagata

SEQ ID NO: 25689 - DNA, 600 bp, Chicken  19866894241143_2
acctgcctttgacacctggactccagatgcacccaaaccagcatcaaacaatcacagtcatcctctgaaatcagtgctggcttttccgtacatttcaagggtgatatgtttggacttcaaatattcagttttctgaggtgcttagtgcttaagattgggactaagccctcccaaagcttcaagcaagtacagagcccccagcacccctgctgaactgaacttctacattatttcaagccattccacaacctccgaggacagatagacacaaagcagagctgtgtctgcaccaggcagtcygcactaatgcactcagcagggcagcagtgatgttctgggcaggtaggttcctgctaaaaggtattgaaaaccacccatagatgagctggttggatttatttacttgttccccttcccatggaaggaggtattctctgagtagatttgctttgatagagacccagagagaaagcctcaccaaagctgctctcctgctgccaggggactgcctccagtgagcttttggcttttaagaggagacaaaactgttggctagtacagacatgacctgaaaataaccctccatttctcttcctgata

SEQ ID NO: 25690 - DNA, 599 bp, Chicken  19866894241144_1
  misc_feature (1)..(53): n is any nucleotide
nnnnnnnnnnnnnnnnnnnnnnnnnnnnnnnnnnnnnnnnnnnnnnnnnnnnnaaggcacagagtttcttcttactgagtcttaagttttgctttctaaggtgtgcattagcacaggacaaaggctctgtaattttgcaatcaggtcctgtattttacagatcctagatttatccaaacattgcattctcaccagtcttatgtatcctctcactagtgatatgttaagctttagctttatttacagtcttactgctctaaacagctgagccctcatgtgtcagaacagccccctccacarggagcttgcccttgtcataaatagctttccaatgatggaagctaaccagtttccagaacagttttctgatcctagatgagtttttttcctggatatcacaggtgtttgctcaaagcctaagtacaccatagacctatcaactagttgtttgtaaaactctaaaaaygtgccttcaggtttttccaacaagacggcattcacctcttgtgctccttttaaacctcattgagatgcaggcattaatttcacaattcagttttatcacaaaccaattttcaaaaatctaaatcacagtttag

SEQ ID NO: 25691 - DNA, 600 bp, Chicken  19866894241144_2
gatttatccaaacattgcattctcaccagtcttatgtatcctctcactagtgatatgttaagctttagctttatttacagtcttactgctctaaacagctgagccctcatgtgtcagaacagccccctccacarggagcttgcccttgtcataaatagctttccaatgatggaagctaaccagtttccagaacagttttctgatcctagatgagtttttttcctggatatcacaggtgtttgctcaaagcctaagtacaccatagacctatcaactagttgtttgtaaaactctaaaaaygtgccttcaggtttttccaacaagacggcattcacctcttgtgctccttttaaacctcattgagatgcaggcattaatttcacaattcagttttatcacaaaccaattttcaaaaatctaaatcacagtttaggaagattaataaaataaaataaaccctatccttaaactcgagaaaacattccttgccttaggagatgctacagttaagtttaacaaggcataaaacactgcaaacttagattaaaagttcacaagtttatttatttgtctttaagccactgttctaagtgagctaat

SEQ ID NO: 25692 - DNA, 600 bp, Chicken  19866894241146_1
aatcaaaacaagcaaatttgactccacttaatcctcaatttcaagctcttaaaaaaaaaaaaaactccttttccattcttttttgcagagtaaatcacactatgggcaaaaatctcattactaatttcttaggtctggctgagaaactaagcacctgactatagtgttggattctgaagttttaagggagcctaaaaactccaaaaaaaccatgggaaataaagatgaaatattctttctcgaagaaacccatggaccaaatgacatcccacttattatcccaccattttcagatgaatycaaacaatattgctggtaagtttcaattctgagctatcatgatacagctgtacagaaaaagcttcatctgccrcttacgctgctcctgggaaccatcctttttagctgtggattggttgtcttaccttgatccttgaccaagaaattggtagtaacgagaggtgggacctgccctctcactccaagtgacaaacggttctgatccacggttatttctgtcatcttcaatcacttgaatctagaatggaaaacactgagttaatctttggaggcttggtttgaaagcactggataacaaaa

SEQ ID NO: 25693 - DNA, 600 bp, Chicken  19866894241146_2
cattcttttttgcagagtaaatcacactatgggcaaaaatctcattactaatttcttaggtctggctgagaaactaagcacctgactatagtgttggattctgaagttttaagggagcctaaaaactccaaaaaaaccatgggaaataaagatgaaatattctttctcgaagaaacccatggaccaaatgacatcccacttattatcccaccattttcagatgaatycaaacaatattgctggtaagtttcaattctgagctatcatgatacagctgtacagaaaaagcttcatctgccrcttacgctgctcctgggaaccatcctttttagctgtggattggttgtcttaccttgatccttgaccaagaaattggtagtaacgagaggtgggacctgccctctcactccaagtgacaaacggttctgatccacggttatttctgtcatcttcaatcacttgaatctagaatggaaaacactgagttaatctttggaggcttggtttgaaagcactggataacaaaaaatttgcatgtgcaaggcagtgaaaagggaacctgaggcaaacatcactagctctaaaaaaataacaagtcta

SEQ ID NO: 25694 - DNA, 599 bp, Chicken  19866894241154_1
  misc_feature (1)..(90): n is any nucleotide
nnnnnnnnnnnnnnnnnnnnnnnnnnnnnnnnnnnnnnnnnnnnnnnnnnnnnnnnnnnnnnnnnnnnnnnnnnnnnnnnnnnnnnnnnntttgtttgtgtgtgtgtgtgtgtgtgtgtgtgtgtgtgtacgtgtgcacacgcctgccagaagtgaagctgctgcagattcatatactccatgcccaagcaggattgaggttgagtgtgaattccatgaaggcatgtatacaacacctagatagacagccggacacacttgtcagcacagacaggtacactcagcactcactaacataaraagccccatgggcttcatcttagtcctctgtctagctaatcaggagaagggcccacgactgggaaacatctatgtgaatacttgtgaacaaacatacaatgtgaatccctccagcagctgggctcgaacaagacctagctcctggattccagtctccccagtttctgtcatctggacatatgagctygtgagttccacaacacttctccagctgttgctaaggacccattatgtacagaaacatatacacacatgcagtgctcactgcatctggttgggactccctggtccccctggca

SEQ ID NO: 25695 - DNA, 600 bp, Chicken  19866894241154_2
agcaggattgaggttgagtgtgaattccatgaaggcatgtatacaacacctagatagacagccggacacacttgtcagcacagacaggtacactcagcactcactaacataaraagccccatgggcttcatcttagtcctctgtctagctaatcaggagaagggcccacgactgggaaacatctatgtgaatacttgtgaacaaacatacaatgtgaatccctccagcagctgggctcgaacaagacctagctcctggattccagtctccccagtttctgtcatctggacatatgagctygtgagttccacaacacttctccagctgttgctaaggacccattatgtacagaaacatatacacacatgcagtgctcactgcatctggttgggactccctggtccccctggcaaccagctgctcccatggtctcaccctcggacacacattcacaccttgatcccagaccacttcaccagctagtctagctcaatactcamtagtactggtgcacatctgcattcattcyagttgctggcaccaaagatacacaggcctctggcccttgatttcactccagctacttgcactcagagcctc

SEQ ID NO: 25696 - DNA, 600 bp, Chicken  19866894241154_3
acaaacatacaatgtgaatccctccagcagctgggctcgaacaagacctagctcctggattccagtctccccagtttctgtcatctggacatatgagctygtgagttccacaacacttctccagctgttgctaaggacccattatgtacagaaacatatacacacatgcagtgctcactgcatctggttgggactccctggtccccctggcaaccagctgctcccatggtctcaccctcggacacacattcacaccttgatcccagaccacttcaccagctagtctagctcaatactcamtagtactggtgcacatctgcattcattcyagttgctggcaccaaagatacacaggcctctggcccttgatttcactccagctacttgcactcagagcctcgtacatatatgcacacaaaacaggaaaagagttagaaaggaaatttttttaagataggaaagcctgcacttatcaggtgcagtgtacagccagaaaatcatgctgaccagcagcccatatgcagtcagccctttttacgccttttccccttgtttttccatgcatattgccaaatcaccaagatctatcagcttcccaca

SEQ ID NO: 25697 - DNA, 600 bp, Chicken  19866894241154_4
gctgggctcgaacaagacctagctcctggattccagtctccccagtttctgtcatctggacatatgagctygtgagttccacaacacttctccagctgttgctaaggacccattatgtacagaaacatatacacacatgcagtgctcactgcatctggttgggactccctggtccccctggcaaccagctgctcccatggtctcaccctcggacacacattcacaccttgatcccagaccacttcaccagctagtctagctcaatactcamtagtactggtgcacatctgcattcattcyagttgctggcaccaaagatacacaggcctctggcccttgatttcactccagctacttgcactcagagcctcgtacatatatgcacacaaaacaggaaaagagttagaaaggaaatttttttaagataggaaagcctgcacttatcaggtgcagtgtacagccagaaaatcatgctgaccagcagcccatatgcagtcagccctttttacgccttttccccttgtttttccatgcatattgccaaatcaccaagatctatcagcttcccacacttcgtttcttcccctaagcataccgtat

SEQ ID NO: 25698 - DNA, 599 bp, Chicken  19866894241155_1
  misc_feature (1)..(170): n is any nucleotide
nnnnnnnnnnnnnnnnnnnnnnnnnnnnnnnnnnnnnnnnnnnnnnnnnnnnnnnnnnnnnnnnnnnnnnnnnnnnnnnnnnnnnnnnnnnnnnnnnnnnnnnnnnnnnnnnnnnnnnnnnnnnnnnnnnnnnnnnnnnnnnnnnnnnnnnnnnnnnnnnnnnnnnnnnntaataagagtgtcacagaacggttgagcatctacagaccagagagataaattagcagggaaaacttttgcctccaaaattcaaaaaacaaaggataccagaatagaaaaaaatcctggatgccagaacayatttttttttcttctacaaagaagttatatttgactgaggtcaacagcccttttagtacatattattttattacattctttgaaaaacactgacagcagaaaagaacagcttgttctgcaaaccctgcttctgcttgctggcccactgtcaggatactcttctccttcctttgtgctttttcattgccttcacttcacctgcttcttttcctttagacctgcctcctccagatctggacatccctgatttgcttggggatggccactgaataggctgcatgtcaggatcatggcctcac

SEQ ID NO: 25699 - DNA, 600 bp, Chicken  19866894241155_2
acatttagaatgaagcagctaaaatattttgtcatgtaaccactgaaaaggcaaaaaaagtgcctttaaaaaaaactgaataagtaaggaaactcatcgttcagaatttcagactcaagctgtctcttctgcctaatgcttataatgctgatgggaattttgccatggatttccatgggaatattgggtatcctgaagagaagcctgaacagatgcttaagattatgaatttgccattcggggatgatttatttacagatgaaacaaaatgttaaataatacttctaaggtattatcacratacaaaaggctcaatgtcccaatgatctccatggcaagagggcagaaccattaatttcctactaaagactgccttgctttagggacacggccaaatgcatcacagaatcctttactcttacgaacataggctggttttagagcagttttcagctgtttgaggagttatgtaattgcaccaattacatccaattacataattagagtaaataagtaataatataattaggtgttgtaattatgtagttacggcaggtagcactaatgctgataaaatccattatgaaagttgttaagaac

SEQ ID NO: 25700 - DNA, 600 bp, Chicken  19866894241155_3
gccttgctttagggacacggccaaatgcatcacagaatcctttactcttacgaacataggctggttttagagcagttttcagctgtttgaggagttatgtaattgcaccaattacatccaattacataattagagtaaataagtaataatataattaggtgttgtaattatgtagttacggcaggtagcactaatgctgataaaatccattatgaaagttgttaagaactgtggacagggcacgcgagaacaaaacttggagggcttcgtttgctagagtctgtcattgttccaatgggygaaataattaattcaattacygtgcccatagccttttatttttgcaaatgaacggaggaataaaccataggctaattcatttctccctctgagttgctgcaaaaaatgcagtaattaatcaacaacatttttgtctccatttatctatccgcagctaccagaactgcaaatagaaatcttaatgtataaattgcatcgctgaaaagagaaccgaaaacatttagatgttaaccttcactgttccagttattacattaaactgtctcctctgacaaatggacacaaggaacattcaaatac

SEQ ID NO: 25701 - DNA, 600 bp, Chicken  19866894241155_4
caaatgcatcacagaatcctttactcttacgaacataggctggttttagagcagttttcagctgtttgaggagttatgtaattgcaccaattacatccaattacataattagagtaaataagtaataatataattaggtgttgtaattatgtagttacggcaggtagcactaatgctgataaaatccattatgaaagttgttaagaactgtggacagggcacgcgagaacaaaacttggagggcttcgtttgctagagtctgtcattgttccaatgggygaaataattaattcaattacygtgcccatagccttttatttttgcaaatgaacggaggaataaaccataggctaattcatttctccctctgagttgctgcaaaaaatgcagtaattaatcaacaacatttttgtctccatttatctatccgcagctaccagaactgcaaatagaaatcttaatgtataaattgcatcgctgaaaagagaaccgaaaacatttagatgttaaccttcactgttccagttattacattaaactgtctcctctgacaaatggacacaaggaacattcaaatactgctgtattgatgcaatacaa

SEQ ID NO: 25702 - DNA, 600 bp, Chicken  19866894241155_5
cctgcaagtttcttttttgaactggaaaatctgggaagtgaagttacatggggaagtaatttccgtccctttagacaagaattttgttgtctttcaaagagtattataaaacagcataagaaaaatttagagctgctggaatgggttcagaggaggccacaaagatgctcagagagctgaagcacctttcctatgaagtaaggttgaaggagatgggattatttagcttggagaagagaaggctttggggagacctcattgtggccttccagtacttaaaaggaacttataagcaggagrgaaactgactatcaggctagacacagtcttatagtgataggactacaaggaatggttttaaactaaaagagggtagaatgtagttagctgtgaggagggaattctttacttagaaggcagtgaggcattgaacaagctgcccagagaagctgtgggtgctccatccctggaggaaataaaggccaggttggatgggaccctggccagcctgatcttttgggtggcagccctgcccatagcaggaggtgggaactggatggtctttagggtaccttccaacccaagacatgctgtgattct

SEQ ID NO: 25703 - DNA, 509 bp, Chicken  19866894241155_6
gcagtgaggcattgaacaagctgcccagagaagctgtgggtgctccatccctggaggaaataaaggccaggttggatgggaccctggccagcctgatcttttgggtggcagccctgcccatagcaggaggtgggaactggatggtctttagggtaccttccaacccaagacatgctgtgattctatgatgagaacaagaaaatcggagcattccagtttctttcagttatgctatcaccataccttcaaacaagatgcttcactttctgatggacatacaaatcatgaccaagacaaagytgtaccacagtcagtcatatttttggggtcctgatgggcaacrgagaaaagagactaccagaaaatgcagacatttcccctggtgcttagttatactgtaaaccacaccaatggtgggttttttttttgttgtttttttttttttttgcagtacagtagtacaggagtacaattaacaattggttaaccacatttgtaggggtagtgag

SEQ ID NO: 25704 - DNA, 466 bp, Chicken  19866894241155_7
tccatccctggaggaaataaaggccaggttggatgggaccctggccagcctgatcttttgggtggcagccctgcccatagcaggaggtgggaactggatggtctttagggtaccttccaacccaagacatgctgtgattctatgatgagaacaagaaaatcggagcattccagtttctttcagttatgctatcaccataccttcaaacaagatgcttcactttctgatggacatacaaatcatgaccaagacaaagytgtaccacagtcagtcatatttttggggtcctgatgggcaacrgagaaaagagactaccagaaaatgcagacatttcccctggtgcttagttatactgtaaaccacaccaatggtgggttttttttttgttgtttttttttttttttgcagtacagtagtacaggagtacaattaacaattggttaaccacatttgtaggggtagtgag

SEQ ID NO: 25705 - DNA, 600 bp, Chicken  19866894241164_1
aagtcagaactcagaagcagctaaaacaggactgatgtcttgttttgttttctgaacaacctagcaatacttattctttaggaaaaaaagatgttgaataaataaaacacttttttatgtgctgtcaggccttttcaaaagtatgtgtaaaatttattctgccattactttgaaagaataaggagtaacttgttccctatactgcatacagtttactctaagatcagtgaagaattgctggctgaagtagaataattgtataaacatggacctattcttgatagtgaatattaatttttkaaataaaggtggaaagataaagctgacttaagaccctgaaatattaattagaaggaaagaagtagacttcacatggccaaaaaataaatgtatatagcatagacatctagtgtytatactcctttgtaagtcaataagagaattaagtatctccaggttgcaattcttttcaccatcataaaccaaacatctgaaatcagtgatatgaatcatgctctaaaaacattttgtgtggtgatgtctgaacatcattttaggtcactggatttgctgtcattgactttaaaggcagatgagttt

SEQ ID NO: 25706 - DNA, 600 bp, Chicken  19866894241164_2
ttatgtgctgtcaggccttttcaaaagtatgtgtaaaatttattctgccattactttgaaagaataaggagtaacttgttccctatactgcatacagtttactctaagatcagtgaagaattgctggctgaagtagaataattgtataaacatggacctattcttgatagtgaatattaatttttkaaataaaggtggaaagataaagctgacttaagaccctgaaatattaattagaaggaaagaagtagacttcacatggccaaaaaataaatgtatatagcatagacatctagtgtytatactcctttgtaagtcaataagagaattaagtatctccaggttgcaattcttttcaccatcataaaccaaacatctgaaatcagtgatatgaatcatgctctaaaaacattttgtgtggtgatgtctgaacatcattttaggtcactggatttgctgtcattgactttaaaggcagatgagttttacctaggatggagcctttcccttcttcatgtcactgtctattgagtaaaactagttgtcaaggtaaagtgaatggagaagagcagaactgaagccgacaaaggaatgtggggt

SEQ ID NO: 25707 - DNA, 600 bp, Chicken  19866894241166_1
cgtcgcagggcctcactcctgccccagctcagccctcccagggcagcaccccccgcacggccccacaaacctccccacacctgcccggcttttttaaacaagggcttaaggtctgtgcaattcactctgcagcaattggaactgcaaggaggaaaaaaaaaaaaccagcatgcttttaaagagcaactcaaaatgtagattttgcattttgtagattctgctgcccaatccaaagagcagtggggataccaccacttccctagggaacctactgccatgttggtggaagagctttataamcactgtccatttgctctcatgtccaagaaccatgccatacctgccacagcactgctaaagcagacagcaaactctgagcgggacgcactgagcagcacacctgccgtagggttggcctccccaggcacagctgagcacaacgaggggcaggggctgcctgctgccccaggtgcacacactcagcactcctctgtgaagctgtcccacctgggtccgctcccccctgcagagccatggggagcagaaaccgcccctgcagcagtttctcttccccagcagtctcatgaaagtgggcccaca

SEQ ID NO: 25708 - DNA, 564 bp, Chicken  19866894241169_1
gtcaagatatgacacctcctgcttctcccatctgttatcctgttgcagaaggaaactagattagtatgtcaccacctagtctcatccaaaaagactagctacacataatttaagttttgataaagagcatggatcagcaattgccaagtgatggcctcaggtgaatgcgctgtctgtgaatggaggcatcagcctggctgaggttgtgctggaggagtggggctcatgagttgaggaacatctggaaaactttatgaggtatcatggtaagggcaagtgagtttctagagcagtcttatrtgagacactgccytggagctttctgtccctctgtcctttctgcagctgaatatagtgtcttgagacaatagtgattgcaacgagcgaccttcggatgatatttgtagtgaaagaagagaaaacagttagatctctggaacacaccaaaagcgaaatattaaaatatcactgttgttcagatatgttaagaaagtgcccagggagctggtggagtcaccaatcctgggaggtgttcaagaattgtgtaggtgtggcactgaggga

SEQ ID NO: 25709 - DNA, 551 bp, Chicken  19866894241169_2
acctcctgcttctcccatctgttatcctgttgcagaaggaaactagattagtatgtcaccacctagtctcatccaaaaagactagctacacataatttaagttttgataaagagcatggatcagcaattgccaagtgatggcctcaggtgaatgcgctgtctgtgaatggaggcatcagcctggctgaggttgtgctggaggagtggggctcatgagttgaggaacatctggaaaactttatgaggtatcatggtaagggcaagtgagtttctagagcagtcttatrtgagacactgccytggagctttctgtccctctgtcctttctgcagctgaatatagtgtcttgagacaatagtgattgcaacgagcgaccttcggatgatatttgtagtgaaagaagagaaaacagttagatctctggaacacaccaaaagcgaaatattaaaatatcactgttgttcagatatgttaagaaagtgcccagggagctggtggagtcaccaatcctgggaggtgttcaagaattgtgtaggtgtggcactgaggga

SEQ ID NO: 25710 - DNA, 600 bp, Chicken  19866894241172_1
aagaaagccattctaaaaccgtaggagtgatttagatcactaaatcagttttcttgtgaaaattgctgcttatagcactgttcacaatactgagagaatatctgggttttcttgtctccacagactgatttttccttatagttttatagttgctattattattcacaaaatgattacaagttctatgcatacagtgtatctgttgaaagcataaaatgagatgtctttatgtaatatctgtactttcttcatttgcgaggaagaggtaagagaactagcacagcagcctgtgcacattaytgattatcagtcaggaacactttggaggtaagtgatgccctggaggaccagaggaggaaaaaatataaagtctgtctttaagtacagagagaaaggagacttgaaatattaggtctagctggcctaatatcaatattgggaaagatacaggaacaatttactaagcagtcagtttatagtacttaaggataacaagagaaagccaatatgggtttaccaggaaaaagaataccaagtcattctaattactttatttgacaaggtaactagctttatgaatacaaggatgcagtagatatg

SEQ ID NO: 25711 - DNA, 600 bp, Chicken  19866894241173_1
ggatgcatcttgcatgtagttccctgtcagctctcagggccactcatgctcacacaggtagagccagagtaattgtgccacatattctgccattacatttgtatagcaatgcttcatgtacaaagcaaaatctagccttactaaccatccacttcctttcaaaactcagctgctatcagtgcacctagttctccacatggtgactgctgctgctctccatgtgtccgtgcagcctggggcacctgctccctccaatttgaggtcaactctggaaatgcttggttttgtgctccccgaatyggagagctactccaatctatgctctcataggttaaataattttcacatccctgggtaggacagttatttctgaccaccagacaggagcctatgggtgctgcagcatttgtaggtggcactgctacctccagaagtgtatctccttgactctggtgaatctgtgtctaattttcccacatgtaccctcataaacaagcattgctttggtttatctgtatctaattttcctgtatgtctccctgtaaacaagcattgtgttttagtttaaaaacatccatagcaatgatgagcataaaatat

SEQ ID NO: 25712 - DNA, 600 bp, Chicken  19866894241174_1
aaatgtagttcaggagatgatagaatcactgaatggtttgagttggaagggactgtggtgatcacctagctagctccatttcccctgtgatggacggagacaccttctacaagaccaggttgctcaaagcccagtccaacctggccttgaacacctccagaagtggggcatccacaacttctccaggcagcctgttctactgcctcaccaccctcattatgaagaattttttcctaatgtctttcagtttagaaccattactacttgtcctgtcactactctgcgtgagaagaactcccygtctgtcctgtaggcctccttttgttacttgaaagctgctgtaaggtcttcctagtgtcatcttttctctatgctgaataactccagctctctcaatccttattcataagagaggtgctccagccttctaatcatccttgtagccctcatctggactctttccaatggattcatgtccttcttatgttgtgtgtgccagagataatctatgtcaagtagaaacatttttctgcatggggagactggtggcagtgaccactcaagccatccccagtaagctgttttgtactaattgctaac

SEQ ID NO: 25713 - DNA, 599 bp, Chicken  19866894241185_1
  misc_feature (1)..(201): n is any nucleotide
nnnnnnnnnnnnnnnnnnnnnnnnnnnnnnnnnnnnnnnnnnnnnnnnnnnnnnnnnnnnnnnnnnnnnnnnnnnnnnnnnnnnnnnnnnnnnnnnnnnnnnnnnnnnnnnnnnnnnnnnnnnnnnnnnnnnnnnnnnnnnnnnnnnnnnnnnnnnnnnnnnnnnnnnnnnnnnnnnnnnnnnnnnnnnnnnnnnnnnnnnaaaatatcccttacaggcatctgagtgtgctaaatttgtgacaaaattatgaagtatctatgtttatcaaaagggaacatatatatttttaaaaaatayaggattgaattttgcaaaaaataacactattattagagcacagatagcactaaaaaagcagggaaaaatgagaaaggatggaaggcaattatatgagaacttttatctctcatgggtactgtaagtggcagatgatattagagttttcttgaagagtacactagctgtataaaaacccatgttccttaatagcaagtaaattaactacagccttttaaaaggtttaacatgcaaacatatttcttttgataaatactttatattttttctttgtaatgatccaacctgttttgtatact

SEQ ID NO: 25714 - DNA, 600 bp, Chicken  19866894241185_2
aatgagaaaggatggaaggcaattatatgagaacttttatctctcatgggtactgtaagtggcagatgatattagagttttcttgaagagtacactagctgtataaaaacccatgttccttaatagcaagtaaattaactacagccttttaaaaggtttaacatgcaaacatatttcttttgataaatactttatattttttctttgtaatgatccaacctgttttgtatactgctggaggtttaaattctcacagcatttctcctgaactttacaaatcctaaaattactggtaacaawwttttttccagtttaatcccactaattacgattattccagggcagagctctgtagacataatactcgttgacataataacatggatgagctgaataagaatgcatctaacactacttggaacaaagctgcctctctttatgattctgtttttatatgcaaagaataacaacattgtaaggattttaaagtttttatcattatgtacacagtaaatgcttttatggaaaatcttattaaacaaattccagcctgcaaggagaaaatataaccataatttaggtccctattctaccctactt

SEQ ID NO: 25715 - DNA, 600 bp, Chicken  19866894241185_3
atgagaaaggatggaaggcaattatatgagaacttttatctctcatgggtactgtaagtggcagatgatattagagttttcttgaagagtacactagctgtataaaaacccatgttccttaatagcaagtaaattaactacagccttttaaaaggtttaacatgcaaacatatttcttttgataaatactttatattttttctttgtaatgatccaacctgttttgtatactgctggaggtttaaattctcacagcatttctcctgaactttacaaatcctaaaattactggtaacaawwttttttccagtttaatcccactaattacgattattccagggcagagctctgtagacataatactcgttgacataataacatggatgagctgaataagaatgcatctaacactacttggaacaaagctgcctctctttatgattctgtttttatatgcaaagaataacaacattgtaaggattttaaagtttttatcattatgtacacagtaaatgcttttatggaaaatcttattaaacaaattccagcctgcaaggagaaaatataaccataatttaggtccctattctaccctacttc

SEQ ID NO: 25716 - DNA, 600 bp, Chicken  19866894241188_1
cctgcagatcccatgtccacagcccagcccggtgcctggaagtgctctgcagggggactgcactggctggcagacgtgcacgatgctcacgcacaaagtccccttaggataggaaaacacagctttgcagaaattgctattttgacagttgccagcctccaacaccgcgagacaccaattgcagatgttcagtctgacaaagtttttcagcctggaatgtcatcttgaaatgaagagtgatgtggcggcacatcaaagcacttcattctgattgaaaatatcggtgttttctgctctgtwctgtttgggatttggttatattttctgttaaagttctattagctgctttctgcccacccaggacctgcaggaagtgcaaagtgcccgaccctctctgcaggcagctctcagccacagccacggtgccagaggtgagcgtggctctcctgyacatcacattgctgccctttgcataaygactttaatcgtttagcacatttgttaaccccrgcatggagctgtgcagggcagagcgcaggtggactttgcagcagtccctcacatgcagctttggggacctcagcagtgatgcagagggta

SEQ ID NO: 25717 - DNA, 600 bp, Chicken  19866894241188_2
gccagcctccaacaccgcgagacaccaattgcagatgttcagtctgacaaagtttttcagcctggaatgtcatcttgaaatgaagagtgatgtggcggcacatcaaagcacttcattctgattgaaaatatcggtgttttctgctctgtwctgtttgggatttggttatattttctgttaaagttctattagctgctttctgcccacccaggacctgcaggaagtgcaaagtgcccgaccctctctgcaggcagctctcagccacagccacggtgccagaggtgagcgtggctctcctgyacatcacattgctgccctttgcataaygactttaatcgtttagcacatttgttaaccccrgcatggagctgtgcagggcagagcgcaggtggactttgcagcagtccctcacatgcagctttggggacctcagcagtgatgcagagggtaagaagtcccagatgtgaacctggaggctcctcgtgtgcttgcagaggtggccctgcagccggggatgctccggtgctggagcaaagctcggtgctcacagtgctaatgaggggttctgttgtgccaaatgacgtgccgagctctggaagc

SEQ ID NO: 25718 - DNA, 595 bp, Chicken  19866894241188_3
attgcagatgttcagtctgacaaagtttttcagcctggaatgtcatcttgaaatgaagagtgatgtggcggcacatcaaagcacttcattctgattgaaaatatcggtgttttctgctctgtwctgtttgggatttggttatattttctgttaaagttctattagctgctttctgcccacccaggacctgcaggaagtgcaaagtgcccgaccctctctgcaggcagctctcagccacagccacggtgccagaggtgagcgtggctctcctgyacatcacattgctgccctttgcataaygactttaatcgtttagcacatttgttaaccccrgcatggagctgtgcagggcagagcgcaggtggactttgcagcagtccctcacatgcagctttggggacctcagcagtgatgcagagggtaagaagtcccagatgtgaacctggaggctcctcgtgtgcttgcagaggtggccctgcagccggggatgctccggtgctggagcaaagctcggtgctcacagtgctaatgaggggttctgttgtgccaaatgacgtgccgagctctggaagctccttgcaaaggtcctcataag

SEQ ID NO: 25719 - DNA, 562 bp, Chicken  19866894241188_4
cctggaatgtcatcttgaaatgaagagtgatgtggcggcacatcaaagcacttcattctgattgaaaatatcggtgttttctgctctgtwctgtttgggatttggttatattttctgttaaagttctattagctgctttctgcccacccaggacctgcaggaagtgcaaagtgcccgaccctctctgcaggcagctctcagccacagccacggtgccagaggtgagcgtggctctcctgyacatcacattgctgccctttgcataaygactttaatcgtttagcacatttgttaaccccrgcatggagctgtgcagggcagagcgcaggtggactttgcagcagtccctcacatgcagctttggggacctcagcagtgatgcagagggtaagaagtcccagatgtgaacctggaggctcctcgtgtgcttgcagaggtggccctgcagccggggatgctccggtgctggagcaaagctcggtgctcacagtgctaatgaggggttctgttgtgccaaatgacgtgccgagctctggaagctccttgcaaaggtcctcataag

SEQ ID NO: 25720 - DNA, 600 bp, Chicken  19866894241191_1
tgtatgctacctgaaagaaacctgcagaaatccaaaaccattttagaatataaaatgatgatagctgatttcctctctgatttcctaaagaaatgagacatttgtcatgatctgtgtatatctggattgtgtctcaccacttctccagcctctctcttctgaatccactggtaaatttgatatagtcatctccaggaaaattaagaccctccaaatttaattaaagtagatggccagaaggacatggtaagaaagagaaagatccaaaggatcctccagctgctgcagtctctgaggcartaattaaggcactattaggcagccaggcactattagtcatagcatttccaaaatgatttctatgtcctgcgtgcctttaattttagtgtctcccatactgacctggttctaagaaatgggacttgtggaaaaaaactaaaaaaatgttaccttctcaatatcctaagtttgcaagagaaggtcaagatctatggaagggatggagcagtatgtctgagcctaaggctgagggtatgcacgcctgttcctttaacatctcagagtaaagagataaataatggtacagccctattctagaca

SEQ ID NO: 25721 - DNA, 600 bp, Chicken  19866894241200_1
acctccatcttaacatatgtttacaaaggtgccttccattactggtagctgagcccgtcggacctgtaagaaatcctgggctgcccaattcatttttgttataataataattacaaggcaacgttattgatgtaatacaaatggaaatcggtttcagaacatctttcttacgttcatctgaatgagatcccgctgagccaggagctcaccccactggaaagagccattttgtacactgtacagaaaaatacactgcaactttaaattatcactctttcatatgtatccgtgctgagatastacractgaaggctattcagaagttagagatgtgaatattaaataacttttataacattcgtgtaaaaaaatcaacgtctgaaatccccttttaggaatcatttaagagcaggaattcgcttaaatagcactctctcaacattgctacgactggaaaatgctgtacaaatgaagatttagtgcaacgttcaaaccttcacactcaggtgacagaagccacttctgtaatgctggtgccgtaccttcggagaactcagcagcgatacacagaagtaaccttttcactgccttattgctacg

SEQ ID NO: 25722 - DNA, 600 bp, Chicken  19866894241200_2
ccatcttaacatatgtttacaaaggtgccttccattactggtagctgagcccgtcggacctgtaagaaatcctgggctgcccaattcatttttgttataataataattacaaggcaacgttattgatgtaatacaaatggaaatcggtttcagaacatctttcttacgttcatctgaatgagatcccgctgagccaggagctcaccccactggaaagagccattttgtacactgtacagaaaaatacactgcaactttaaattatcactctttcatatgtatccgtgctgagatastacractgaaggctattcagaagttagagatgtgaatattaaataacttttataacattcgtgtaaaaaaatcaacgtctgaaatccccttttaggaatcatttaagagcaggaattcgcttaaatagcactctctcaacattgctacgactggaaaatgctgtacaaatgaagatttagtgcaacgttcaaaccttcacactcaggtgacagaagccacttctgtaatgctggtgccgtaccttcggagaactcagcagcgatacacagaagtaaccttttcactgccttattgctacgtcga

SEQ ID NO: 25723 - DNA, 600 bp, Chicken  19866894241200_3
aaaaaaatcaacgtctgaaatccccttttaggaatcatttaagagcaggaattcgcttaaatagcactctctcaacattgctacgactggaaaatgctgtacaaatgaagatttagtgcaacgttcaaaccttcacactcaggtgacagaagccacttctgtaatgctggtgccgtaccttcggagaactcagcagcgatacacagaagtaaccttttcactgccttattgctacgtcgagaaaacagccacaggcctacctcatttcaaagcagccttgtttaaataaagcaataaaaygtgtattrtacagactaaggagggaaaaaatcacagaagcgtatggctcgtgtcakaaacttgtttttttctacttcagtttgaggagtggacaacgtaatgcagcartcccttgccttgcacagcgtccaacattcccttccttccacgctccttgcagacaaccgaaactgagcagcccgtgtggaaacagcccacgtcccactgacggggtagggataactgacagcagtcacatgaagttactggaataatgacataagtcagacttgttgacgtattttattgtgagatggggag

SEQ ID NO: 25724 - DNA, 600 bp, Chicken  19866894241200_4
caacgtctgaaatccccttttaggaatcatttaagagcaggaattcgcttaaatagcactctctcaacattgctacgactggaaaatgctgtacaaatgaagatttagtgcaacgttcaaaccttcacactcaggtgacagaagccacttctgtaatgctggtgccgtaccttcggagaactcagcagcgatacacagaagtaaccttttcactgccttattgctacgtcgagaaaacagccacaggcctacctcatttcaaagcagccttgtttaaataaagcaataaaaygtgtattrtacagactaaggagggaaaaaatcacagaagcgtatggctcgtgtcakaaacttgtttttttctacttcagtttgaggagtggacaacgtaatgcagcartcccttgccttgcacagcgtccaacattcccttccttccacgctccttgcagacaaccgaaactgagcagcccgtgtggaaacagcccacgtcccactgacggggtagggataactgacagcagtcacatgaagttactggaataatgacataagtcagacttgttgacgtattttattgtgagatggggagtctggtaa

SEQ ID NO: 25725 - DNA, 600 bp, Chicken  19866894241200_5
ttaaatagcactctctcaacattgctacgactggaaaatgctgtacaaatgaagatttagtgcaacgttcaaaccttcacactcaggtgacagaagccacttctgtaatgctggtgccgtaccttcggagaactcagcagcgatacacagaagtaaccttttcactgccttattgctacgtcgagaaaacagccacaggcctacctcatttcaaagcagccttgtttaaataaagcaataaaaygtgtattrtacagactaaggagggaaaaaatcacagaagcgtatggctcgtgtcakaaacttgtttttttctacttcagtttgaggagtggacaacgtaatgcagcartcccttgccttgcacagcgtccaacattcccttccttccacgctccttgcagacaaccgaaactgagcagcccgtgtggaaacagcccacgtcccactgacggggtagggataactgacagcagtcacatgaagttactggaataatgacataagtcagacttgttgacgtattttattgtgagatggggagtctggtaaaaaactagaaaatgaccatgatgtaacaaggaacttaaaaataagttt

SEQ ID NO: 25726 - DNA, 600 bp, Chicken  19866894241200_6
agatttagtgcaacgttcaaaccttcacactcaggtgacagaagccacttctgtaatgctggtgccgtaccttcggagaactcagcagcgatacacagaagtaaccttttcactgccttattgctacgtcgagaaaacagccacaggcctacctcatttcaaagcagccttgtttaaataaagcaataaaaygtgtattrtacagactaaggagggaaaaaatcacagaagcgtatggctcgtgtcakaaacttgtttttttctacttcagtttgaggagtggacaacgtaatgcagcartcccttgccttgcacagcgtccaacattcccttccttccacgctccttgcagacaaccgaaactgagcagcccgtgtggaaacagcccacgtcccactgacggggtagggataactgacagcagtcacatgaagttactggaataatgacataagtcagacttgttgacgtattttattgtgagatggggagtctggtaaaaaactagaaaatgaccatgatgtaacaaggaacttaaaaataagtttcagatttgtaacatacatacatgaatacaggaacaaattggcacaaaaaagt

SEQ ID NO: 25727 - DNA, 599 bp, Chicken  19866894241204_1
  misc_feature (1)..(162): n is any nucleotide
nnnnnnnnnnnnnnnnnnnnnnnnnnnnnnnnnnnnnnnnnnnnnnnnnnnnnnnnnnnnnnnnnnnnnnnnnnnnnnnnnnnnnnnnnnnnnnnnnnnnnnnnnnnnnnnnnnnnnnnnnnnnnnnnnnnnnnnnnnnnnnnnnnnnnnnnnnnnnnnnnncagcattgcctaaggttgttgtgatcaaagagcaggacccagcacttgatataattgatgctcatgcaactagcctgagcccattgatttagcttgtccaaatcactctgtagggccttcctaccctcaggcatatcracagttccccccaactcggtgtcatatgtgcacttactgatagtgcactccattccctcatccagatcatcagtaaatatattaaacagggttggttctggtactgaacttaggggaacaccactactgaccagtcacaatctgaaattaactcaattcaccaccactctctgggctatccagtatatwctttatatacagagtacatctacccaaggcacgagatgcagattctaaaggataatactgtaggagataaagtcaaatgttttactaaagtctaggacaacttttgtcta

SEQ ID NO: 25728 - DNA, 600 bp, Chicken  19866894241204_2
aagagcaggacccagcacttgatataattgatgctcatgcaactagcctgagcccattgatttagcttgtccaaatcactctgtagggccttcctaccctcaggcatatcracagttccccccaactcggtgtcatatgtgcacttactgatagtgcactccattccctcatccagatcatcagtaaatatattaaacagggttggttctggtactgaacttaggggaacaccactactgaccagtcacaatctgaaattaactcaattcaccaccactctctgggctatccagtatatwctttatatacagagtacatctacccaaggcacgagatgcagattctaaaggataatactgtaggagataaagtcaaatgttttactaaagtctaggacaacttttgtctacaggctttcccttgtccactgggtgagtcacctggtcatagaaggagatcaggttggttaagcagcacctgtcatgaaccctggctaagcacaatcccctggttgttctgcacttgttatgtgataatacttaagatgatcttctccataaccttctccaatagaaaagacccttaagatctttcccata

SEQ ID NO: 25729 - DNA, 600 bp, Chicken  19866894241214_1
agacaacaatatgtttctcttttgatatcaaaccatcatttttagagctcacttagctgaggaagtttatctgaagaaacgtgaaagctgtcaaaatttgtgtagctgttttaagcaagtctgatataatcagaagtctttgtctatcagatgactcctctttctctgtatttttgtatgatctataaataatgactacaaaatattttcctaaaaccaagtatcttctaacagaactatcagaggtttaaaaaaaaaaaaaagcatcaaaagacaaacaaaacaaacatgatatatgarcatttaataattaggagtaatacattgctaattaagattctgagtaacagaaatacagagaaaaacatgcaattcatcactattgttatccatatttttctagagtaattctcttatttcatcagataaataaaagaaacccgaacacttcttttggttgatttttcactcagtcttatctattcacaagcagagaacatcagttctccattacttcctaggacacagaagcaacacatgcatgttgtctctcccagtcatttcaacacaccatcaagcatagtctagactaagaattca

SEQ ID NO: 25730 - DNA, 600 bp, Chicken  19866894241214_2
gaattcaaccaagcaactgaaagagggagactttaaactgcaagtttagggcaagcttgtaattctgaggagatgtttctgtaacagttgtgaagcattaattttcacatcattctgattcttgagtcggttatttttatgtcacatttctctgcactcagatgacataattcagtagaataacagctatgattgtacagttagagagacaaaaattcccttgttatgaaaatcatggaaagccaaaacctctgccataccatggttcacaggcaatgtcttccccatgtagtatggtgmtgttcatccatctttacaacgtgcagagctttctagcctggtagcagtgctacctttactcattcagaccactctgtgaacatgggagggagaaatagtacactctacccgctattacaggtttrtgtcaaagctgaatcaagtagacaacagaggatataaacatacttttgagcgttaattccatcaatggcctgaatcagcctctcattcagttcctcttcaaatcttcttttctgagattttgttctgaaatgaaaaatgtaatgaatttaatttcttacattgttaataaagctt

SEQ ID NO: 25731 - DNA, 600 bp, Chicken  19866894241214_3
gtcggttatttttatgtcacatttctctgcactcagatgacataattcagtagaataacagctatgattgtacagttagagagacaaaaattcccttgttatgaaaatcatggaaagccaaaacctctgccataccatggttcacaggcaatgtcttccccatgtagtatggtgmtgttcatccatctttacaacgtgcagagctttctagcctggtagcagtgctacctttactcattcagaccactctgtgaacatgggagggagaaatagtacactctacccgctattacaggtttrtgtcaaagctgaatcaagtagacaacagaggatataaacatacttttgagcgttaattccatcaatggcctgaatcagcctctcattcagttcctcttcaaatcttcttttctgagattttgttctgaaatgaaaaatgtaatgaatttaatttcttacattgttaataaagcttaaatataagcatctgtgtaatatctggtcaacatttatgttgcaataacttctacaggcttcagacacactaagcctcttaagcacttgacaaaaacagtctgctccacctctccctctatcaat

SEQ ID NO: 25732 - DNA, 600 bp, Chicken  19866894241215_1
aagataaatgtgcactgctaatctgtaactcttctcttcctcatgataaaaggaagtcagtactttctttttttcaatttagtgagaaatatttgcttttgtagggaataatgtaaatcaactgctttctaaatgtgtaaatgccttgtacactgggattttgctttagaataacagttttgcagagcaggtgcaaattcttcttgagcgcaattaaccattacagaaacattaacttttactacaaaaacagtaagcgcttcaaaatgcaaaaacaagatggaaaagcttaaagcaaascaaagataacatctctcactatttcgtacaaacagaccatgttacaaataaaaccatttgaacattgaattatttttaaaatgaaaatcttgccaaggttaaaaataggaaagaaaactgaattaatttataacaggagtttgcttagccattcttaaaacccaaaggaaacccatttatctacctctagaaccagcagctcttgagatattacagtgctgctttgttctctttcagcacaaagcagcatcaaaatcactgctctgaaacacccatgcagctattttctcacactcttgc

SEQ ID NO: 25733 - DNA, 600 bp, Chicken  19866894241217_1
ggtataaccaggcaaactgataaatatttttatctctgcaagaaaaagatcttcgctgtaaaggcagcagaacagtctcagtgggaagaggtcaccagtgtttggagatttagcatccctcccatgttcaaagcagagaaggattgctgtgatgcaactgtaacagcggatatttctacggtacaattggagagtgaagggtggagaaggcattgtgattctagagtctgcagtgctcctgtaggaaataccagctgccaacctcactgcccatattctagcccttactttgctctggtyttttgtgtcctgtctctgtggatgtgracagttctgcaaataycaactcttatcaactgcatcttacagaagtatttaaccttaaaagcaaaactaagcagaacagaacaatctcttcttccttaagctatttaccataaatcctatgtagttttgcagaatgagtgtagatattrgcctaaatgatcaatggagaaggaagtccttgcttttcatgcatttttaattaagtttatacgtatgggaaagactttgattcttgtttaactaaaatcatggaaagtaatgttgyccccagct

SEQ ID NO: 25734 - DNA, 600 bp, Chicken  19866894241217_2
ttttatctctgcaagaaaaagatcttcgctgtaaaggcagcagaacagtctcagtgggaagaggtcaccagtgtttggagatttagcatccctcccatgttcaaagcagagaaggattgctgtgatgcaactgtaacagcggatatttctacggtacaattggagagtgaagggtggagaaggcattgtgattctagagtctgcagtgctcctgtaggaaataccagctgccaacctcactgcccatattctagcccttactttgctctggtyttttgtgtcctgtctctgtggatgtgracagttctgcaaataycaactcttatcaactgcatcttacagaagtatttaaccttaaaagcaaaactaagcagaacagaacaatctcttcttccttaagctatttaccataaatcctatgtagttttgcagaatgagtgtagatattrgcctaaatgatcaatggagaaggaagtccttgcttttcatgcatttttaattaagtttatacgtatgggaaagactttgattcttgtttaactaaaatcatggaaagtaatgttgyccccagctcagtgaacaggacttgtgctgtcaggt

SEQ ID NO: 25735 - DNA, 600 bp, Chicken  19866894241217_3
aaaagatcttcgctgtaaaggcagcagaacagtctcagtgggaagaggtcaccagtgtttggagatttagcatccctcccatgttcaaagcagagaaggattgctgtgatgcaactgtaacagcggatatttctacggtacaattggagagtgaagggtggagaaggcattgtgattctagagtctgcagtgctcctgtaggaaataccagctgccaacctcactgcccatattctagcccttactttgctctggtyttttgtgtcctgtctctgtggatgtgracagttctgcaaataycaactcttatcaactgcatcttacagaagtatttaaccttaaaagcaaaactaagcagaacagaacaatctcttcttccttaagctatttaccataaatcctatgtagttttgcagaatgagtgtagatattrgcctaaatgatcaatggagaaggaagtccttgcttttcatgcatttttaattaagtttatacgtatgggaaagactttgattcttgtttaactaaaatcatggaaagtaatgttgyccccagctcagtgaacaggacttgtgctgtcaggttaaaggcgtcaggatt

SEQ ID NO: 25736 - DNA, 600 bp, Chicken  19866894241217_4
tacggtacaattggagagtgaagggtggagaaggcattgtgattctagagtctgcagtgctcctgtaggaaataccagctgccaacctcactgcccatattctagcccttactttgctctggtyttttgtgtcctgtctctgtggatgtgracagttctgcaaataycaactcttatcaactgcatcttacagaagtatttaaccttaaaagcaaaactaagcagaacagaacaatctcttcttccttaagctatttaccataaatcctatgtagttttgcagaatgagtgtagatattrgcctaaatgatcaatggagaaggaagtccttgcttttcatgcatttttaattaagtttatacgtatgggaaagactttgattcttgtttaactaaaatcatggaaagtaatgttgyccccagctcagtgaacaggacttgtgctgtcaggttaaaggcgtcaggatttcacgccagctttttagaaatataataattttgggcttactgttgttaattacgtgttttcatgcaatctaatcagtcttcaagaatgtgcatgaatcaaggctggcttgtgcatgctcacagcatagccagt

SEQ ID NO: 25737 - DNA, 600 bp, Chicken  19866894241217_5
ctctggtyttttgtgtcctgtctctgtggatgtgracagttctgcaaataycaactcttatcaactgcatcttacagaagtatttaaccttaaaagcaaaactaagcagaacagaacaatctcttcttccttaagctatttaccataaatcctatgtagttttgcagaatgagtgtagatattrgcctaaatgatcaatggagaaggaagtccttgcttttcatgcatttttaattaagtttatacgtatgggaaagactttgattcttgtttaactaaaatcatggaaagtaatgttgyccccagctcagtgaacaggacttgtgctgtcaggttaaaggcgtcaggatttcacgccagctttttagaaatataataattttgggcttactgttgttaattacgtgttttcatgcaatctaatcagtcttcaagaatgtgcatgaatcaaggctggcttgtgcatgctcacagcatagccagtcagtcatatttaactcggctgtcagatccgcaggcacgggcacacagcctgggatgagtgcaggttcgagattattttgatagcttctcttcttcgtggccaaggagataaggctg

SEQ ID NO: 25738 - DNA, 600 bp, Chicken  19866894241230_1
gacagggcagcttcctacagcaaactgctttaacaacacattccagtacagtttgacagctggtaaacatgctgacacacttagcatttattttccactttgcaccatgaaaaaaacctgaggtttagtacagattacaaacaccaccagcagcagcaatagctggacagtgttttattccaacacacagtaccctataaaagtcttagatttatgtctaaatacttcgtacaggaaaacatttcagccaagtatctgattgaattcttgtttagtttagctttgtttttagcaagaatrgagggaaggagagggcagatgggcacacagaaaaaaagtatcaggaaactagcatgagagaaatagctatccacttcctttgggtaccatttatatggctctaagtgcaagttgaaaaattttacactgaaaattaatgcagcaaaccaagatctgctgtacatagttgtctatttttattcatctactgctgctaaagtgacagtcacttaataagtaagatctctgtgttctctgtgaagaagttcactaactatacatttatgcataattttatttccagtcccaccccactcacag

SEQ ID NO: 25739 - DNA, 600 bp, Chicken  19866894241234_1
cattgaaaggaaaccccatgttttaaaactgggccgggaaatagaagtcgaatgatgttggctgagaaagcttgcaaatgataagtcagttagtcttgctttggagaactacttatatctgatgttacctacttcggatagaattccataaaatttactttcttcccagaaattacatcataagcatcattcacagtggaatatgttaaatgaattttgtaacagtgaggtcaagcatgactgaaagcaggttgttctctttcagaaaagcaacaaactttaaagctgtttaaagagctktttaaagacatgatgagtcctgcaacttatcagtaacaagctagcggtgttggctgaccccaggtgatgaatcttctaagctgggctgccgaactgcagaagcagtgaggagtagcatccagttgtgatcctgacaaattttggaagcttttgcttgattgcatctgtgtgacattatggaagaaaatcagacatcccagagcttatctctagtgcttaattttcacttttctttttaatgtgggcatgaaactgttctcttttgtcttgcatggtaataggaggaccatatcagtgtaa

SEQ ID NO: 25740 - DNA, 600 bp, Chicken  19866894241235_1
cgtagtgccaacaggcagtgcactgctgcagataggagcaaataatgtcatttcttagcaatggaaagcagacagttttcctaaaaaggaagatttcagttgaacaggaggtataactcccttgacactgagatctatgcaactttggaggagtttccttagggataagtggtgggaacatcacctgaggcatttataagtaatcacagttccgcagggaatagctctgcactgacagatgtgactgggggtcacccttaacccctcccccccccccacctacacctgctttccttctcraaaaccacgtgtactcacacacccatattgcacccatatgatttcctagtataaaaaaaccaccataacgttttaaaacctatttctaattgagtcgaacgcacctcccaacagctccacctgatgagctttttcagcctcaatgcaattcaaggatcattttttcgcatgttagaactccacttctgcatgaaaagagagcagaaaaacatccccgaaaatgttaaaaataaattattaaaatggtttgcagataatgctgctgcctctgtgccaggtaactgctcacagcagattcca

SEQ ID NO: 25741 - DNA, 599 bp, Chicken  19866894241236_1
  misc_feature (1)..(111): n is any nucleotide
nnnnnnnnnnnnnnnnnnnnnnnnnnnnnnnnnnnnnnnnnnnnnnnnnnnnnnnnnnnnnnnnnnnnnnnnnnnnnnnnnnnnnnnnnnnnnnnnnnnnnnnnnnnnnnntctgagaagtcccaactgaagtactggcctctcaacaagaaactgaacccttagtcccacatttagagagaagagcaaggctgtgtgcaagcaaccctaattcattatctttaccattctgaccaccttactctccacctgcccttttccagagtactcagcaatctacacctaagttcctcaaacccygaacatatccccacaatggcccagctagccagtgattcccagtatagctatccccaaggagagaaaaactccagttaaacacatctctgctccacatttggtgactcacccctgaaacaccaggcaaggacacatactgagatttggatcagctgccttcaaggtcagcacctcaaacaggagcaaatgtcactcgcttccttcatcacctcccaacagtgccttccccaccctcttcactgctttcatctcatattccagagcatccagcttactcacagctccagcatttgaggaca

SEQ ID NO: 25742 - DNA, 600 bp, Chicken  19866894241236_2
atccccacaatggcccagctagccagtgattcccagtatagctatccccaaggagagaaaaactccagttaaacacatctctgctccacatttggtgactcacccctgaaacaccaggcaaggacacatactgagatttggatcagctgccttcaaggtcagcacctcaaacaggagcaaatgtcactcgcttccttcatcacctcccaacagtgccttccccaccctcttcactgctttcatctcatattccagagcatccagcttactcacagctccagcatttgaggacaaaaagakgctttgggattggcagccagtgatgtgacagcattgacagcaagtacagtctcatggcaggtagatgggatgaattaattgcgtgagtgggcaaacctgggagagccgtctggagcagctgaaccacagagggctggagcaatacagccttgccagtagacctgatatgggtctactgaatacatccaccagacctgaacagactaggggtgtgtcttgatcatgaggcagctggaaggcagctggtgctgtttcccagaggactttccaacaggaaattcyaccatgtgatttttcttt

SEQ ID NO: 25743 - DNA, 600 bp, Chicken  19866894241236_3
atttgaggacaaaaagakgctttgggattggcagccagtgatgtgacagcattgacagcaagtacagtctcatggcaggtagatgggatgaattaattgcgtgagtgggcaaacctgggagagccgtctggagcagctgaaccacagagggctggagcaatacagccttgccagtagacctgatatgggtctactgaatacatccaccagacctgaacagactaggggtgtgtcttgatcatgaggcagctggaaggcagctggtgctgtttcccagaggactttccaacaggaaattcyaccatgtgatttttctttaggcwacacaaagtcactccraggcccctcctcaccctccctctctagttttctgcagattgatttaagctagcacaagtaaattgaacttgcagtatcccatggaaatcccctccaygyttgtcacgtttggcgttcctcgattccatccttaaactatctcgaatgctggagaggactgggtgagtttgtaattatgcataataactactcctttccccaaagcgtatcaacccctatcaaaatycacatgctggggcaggaagataggacaccttgcct

SEQ ID NO: 25744 - DNA, 600 bp, Chicken  19866894241236_4
gggattggcagccagtgatgtgacagcattgacagcaagtacagtctcatggcaggtagatgggatgaattaattgcgtgagtgggcaaacctgggagagccgtctggagcagctgaaccacagagggctggagcaatacagccttgccagtagacctgatatgggtctactgaatacatccaccagacctgaacagactaggggtgtgtcttgatcatgaggcagctggaaggcagctggtgctgtttcccagaggactttccaacaggaaattcyaccatgtgatttttctttaggcwacacaaagtcactccraggcccctcctcaccctccctctctagttttctgcagattgatttaagctagcacaagtaaattgaacttgcagtatcccatggaaatcccctccaygyttgtcacgtttggcgttcctcgattccatccttaaactatctcgaatgctggagaggactgggtgagtttgtaattatgcataataactactcctttccccaaagcgtatcaacccctatcaaaatycacatgctggggcaggaagataggacaccttgcctgttctgcagctgaatcccttcag

SEQ ID NO: 25745 - DNA, 600 bp, Chicken  19866894241236_5
gatgtgacagcattgacagcaagtacagtctcatggcaggtagatgggatgaattaattgcgtgagtgggcaaacctgggagagccgtctggagcagctgaaccacagagggctggagcaatacagccttgccagtagacctgatatgggtctactgaatacatccaccagacctgaacagactaggggtgtgtcttgatcatgaggcagctggaaggcagctggtgctgtttcccagaggactttccaacaggaaattcyaccatgtgatttttctttaggcwacacaaagtcactccraggcccctcctcaccctccctctctagttttctgcagattgatttaagctagcacaagtaaattgaacttgcagtatcccatggaaatcccctccaygyttgtcacgtttggcgttcctcgattccatccttaaactatctcgaatgctggagaggactgggtgagtttgtaattatgcataataactactcctttccccaaagcgtatcaacccctatcaaaatycacatgctggggcaggaagataggacaccttgcctgttctgcagctgaatcccttcagcagacttgctatcaca

SEQ ID NO: 25746 - DNA, 600 bp, Chicken  19866894241236_6
ctgaaccacagagggctggagcaatacagccttgccagtagacctgatatgggtctactgaatacatccaccagacctgaacagactaggggtgtgtcttgatcatgaggcagctggaaggcagctggtgctgtttcccagaggactttccaacaggaaattcyaccatgtgatttttctttaggcwacacaaagtcactccraggcccctcctcaccctccctctctagttttctgcagattgatttaagctagcacaagtaaattgaacttgcagtatcccatggaaatcccctccaygyttgtcacgtttggcgttcctcgattccatccttaaactatctcgaatgctggagaggactgggtgagtttgtaattatgcataataactactcctttccccaaagcgtatcaacccctatcaaaatycacatgctggggcaggaagataggacaccttgcctgttctgcagctgaatcccttcagcagacttgctatcacaggctgttaccgctcaacaaaggacaaaamgaaaaggttaagggaaacttcccatctgtcagattccccagcaaacttcagagagcaaactggtcaga

SEQ ID NO: 25747 - DNA, 600 bp, Chicken  19866894241236_7
gaaccacagagggctggagcaatacagccttgccagtagacctgatatgggtctactgaatacatccaccagacctgaacagactaggggtgtgtcttgatcatgaggcagctggaaggcagctggtgctgtttcccagaggactttccaacaggaaattcyaccatgtgatttttctttaggcwacacaaagtcactccraggcccctcctcaccctccctctctagttttctgcagattgatttaagctagcacaagtaaattgaacttgcagtatcccatggaaatcccctccaygyttgtcacgtttggcgttcctcgattccatccttaaactatctcgaatgctggagaggactgggtgagtttgtaattatgcataataactactcctttccccaaagcgtatcaacccctatcaaaatycacatgctggggcaggaagataggacaccttgcctgttctgcagctgaatcccttcagcagacttgctatcacaggctgttaccgctcaacaaaggacaaaamgaaaaggttaagggaaacttcccatctgtcagattccccagcaaacttcagagagcaaactggtcagagt

SEQ ID NO: 25748 - DNA, 600 bp, Chicken  19866894241236_8
gctgtttcccagaggactttccaacaggaaattcyaccatgtgatttttctttaggcwacacaaagtcactccraggcccctcctcaccctccctctctagttttctgcagattgatttaagctagcacaagtaaattgaacttgcagtatcccatggaaatcccctccaygyttgtcacgtttggcgttcctcgattccatccttaaactatctcgaatgctggagaggactgggtgagtttgtaattatgcataataactactcctttccccaaagcgtatcaacccctatcaaaatycacatgctggggcaggaagataggacaccttgcctgttctgcagctgaatcccttcagcagacttgctatcacaggctgttaccgctcaacaaaggacaaaamgaaaaggttaagggaaacttcccatctgtcagattccccagcaaacttcagagagcaaactggtcagagtggacggcaaggcagaggacagcaaacccagctggagggtggaaggaggatgcggggtggcggagcaggcgtgctgctaacaggtttattccgctggcagggattcccttcagcggcaggcgggtgag

SEQ ID NO: 25749 - DNA, 600 bp, Chicken  19866894241236_9
ttctgcagattgatttaagctagcacaagtaaattgaacttgcagtatcccatggaaatcccctccaygyttgtcacgtttggcgttcctcgattccatccttaaactatctcgaatgctggagaggactgggtgagtttgtaattatgcataataactactcctttccccaaagcgtatcaacccctatcaaaatycacatgctggggcaggaagataggacaccttgcctgttctgcagctgaatcccttcagcagacttgctatcacaggctgttaccgctcaacaaaggacaaaamgaaaaggttaagggaaacttcccatctgtcagattccccagcaaacttcagagagcaaactggtcagagtggacggcaaggcagaggacagcaaacccagctggagggtggaaggaggatgcggggtggcggagcaggcgtgctgctaacaggtttattccgctggcagggattcccttcagcggcaggcgggtgagctctgcagaccagtgagctcaatctgtgctaagcagattagttccttaccggtgaaaggttctgggcagcagcagagagttgctcaccatgtgatacgagggg

SEQ ID NO: 25750 - DNA, 600 bp, Chicken  19866894241240_1
tagtgaggggcccaaaactgagtacagtacttgaggtgaggcctcaccagagctgagtacagggggacattcacctccctgctcctgctggcagcgctattactgaaacaagccaggatgccattggctttcttggctacctgggcacactgctggctcatattcagctgagtgtcaactaatactcccaggtgtgtttcctctacagagccataggcctgatgcattgcctggacttgctgtggccaaagagcaggacgtagcatttgatcttgtagaacttcatccctttagactcarctcagctatcctgcctgtttagatacttctgaagggcctttctatccccaggcagattgacgcttccccccaacttagtatcatttgcaaccttactgagggtgtggtcaatcacctcattcaggtcattcataaagatattaaacaggccccagtaccaacccctgggaagtatcactcatgacttgtctccatttggatttaactccattcactaccactctctgggcctgaccatccagctagttcttaacccgcaaagagtgtacttgtccaagccgtgggctgccagcttctccg

SEQ ID NO: 25751 - DNA, 540 bp, Chicken  19866894241248_1
atatgagtgatgcacacaacaaaacctactcacaacacaacatactagaaaaagctgaagcctaccaatcccacttgcattattgtctctgcctcaaaaagtaactatctacaacatgccaatgattgaattattttcagtacacaaacacttacataaaatgttatgaattcacttcagttcacttcaaattaactttatgtaaaagattttttaaaatcactatcaaattcctttttttaaaaataaaaaagatgcttattttgatgactgtcaataaagacactaatacaaggaaawtaatatttcagttatgaaattccaatgagaaatataagtcaaagggactgtaaaggtggactaacaatcatagacacttagccactaaaaattcagtgaacttaggggatagatcagttttctgagccccgtttccttatttagaatctaatagttttcagatgcaaaaccaagagaagggtttctctggacttttcccaaatagaaatatctgttcacttgatatgcaattttatatat

SEQ ID NO: 25752 - DNA, 599 bp, Chicken  19866894241250_1
  misc_feature (1)..(103): n is any nucleotide
nnnnnnnnnnnnnnnnnnnnnnnnnnnnnnnnnnnnnnnnnnnnnnnnnnnnnnnnnnnnnnnnnnnnnnnnnnnnnnnnnnnnnnnnnnnnnnnnnnnnnnntctccccccttcctcctgacaggatgagatggagcggggactgtcctttcagctcggtgctgtgcctgtattttggatcatagtctacagccctgccttccaaataaacagttatctaagatgcacttatcaacaacgtggtggaggacagaaaacccattaacaccttaaaaacatctggtaacattcagtggctrgaattccgaggctgactgtgcacggaggcctttaaaggcagcagccacactgctttgggctggggcttatctctgctcacatgtgcacgcagcacaactggtcgtggagttatcctggtcatcacaatcatatgtttataaaagagcaatattcaattgttcttgtcctcactgtggtggaaagtgacataaccaatgaaaacaaaaccagtctttgctctgttttcttaatttttttttcccaacaacgaggagaactgtagtttcttgtacttggtacttccgatccaaagcttaat

SEQ ID NO: 25753 - DNA, 512 bp, Chicken  19866894241250_2
gccacactgctttgggctggggcttatctctgctcacatgtgcacgcagcacaactggtcgtggagttatcctggtcatcacaatcatatgtttataaaagagcaatattcaattgttcttgtcctcactgtggtggaaagtgacataaccaatgaaaacaaaaccagtctttgctctgttttcttaatttttttttcccaacaacgaggagaactgtagtttcttgtacttggtacttccgatccaaagcttaatggcactcagatacttaactgtctcgtcacaacactaatggaagkcctccagagccacagctcagtaaacaatttaacctatcacaaagtgacagccaccttttctcactgctccttcctcctcatcttactcctccccttgtgccaccagaggcattgtgcagycccggctcttggccgaagarggyccttcagcagagcactgtgcagcactcagatgaaaacctcttcttttggcagtgggatcagctttaagt

SEQ ID NO: 25754 - DNA, 392 bp, Chicken  19866894241250_3
tgtcctcactgtggtggaaagtgacataaccaatgaaaacaaaaccagtctttgctctgttttcttaatttttttttcccaacaacgaggagaactgtagtttcttgtacttggtacttccgatccaaagcttaatggcactcagatacttaactgtctcgtcacaacactaatggaagkcctccagagccacagctcagtaaacaatttaacctatcacaaagtgacagccaccttttctcactgctccttcctcctcatcttactcctccccttgtgccaccagaggcattgtgcagycccggctcttggccgaagarggyccttcagcagagcactgtgcagcactcagatgaaaacctcttcttttggcagtgggatcagctttaagt

SEQ ID NO: 25755 - DNA, 372 bp, Chicken  19866894241250_4
gtgacataaccaatgaaaacaaaaccagtctttgctctgttttcttaatttttttttcccaacaacgaggagaactgtagtttcttgtacttggtacttccgatccaaagcttaatggcactcagatacttaactgtctcgtcacaacactaatggaagkcctccagagccacagctcagtaaacaatttaacctatcacaaagtgacagccaccttttctcactgctccttcctcctcatcttactcctccccttgtgccaccagaggcattgtgcagycccggctcttggccgaagarggyccttcagcagagcactgtgcagcactcagatgaaaacctcttcttttggcagtgggatcagctttaagt

SEQ ID NO: 25756 - DNA, 369 bp, Chicken  19866894241250_5
acataaccaatgaaaacaaaaccagtctttgctctgttttcttaatttttttttcccaacaacgaggagaactgtagtttcttgtacttggtacttccgatccaaagcttaatggcactcagatacttaactgtctcgtcacaacactaatggaagkcctccagagccacagctcagtaaacaatttaacctatcacaaagtgacagccaccttttctcactgctccttcctcctcatcttactcctccccttgtgccaccagaggcattgtgcagycccggctcttggccgaagarggyccttcagcagagcactgtgcagcactcagatgaaaacctcttcttttggcagtgggatcagctttaagt

SEQ ID NO: 25757 - DNA, 600 bp, Chicken  19866894241255_1
aggatgtcccagatcatgtgtgatttatatggtttccaagcatttgcatatttgcatctatgtttgtatgggtgttggtgagcagaagtgattgaccctggtcctaaaccaagtacagaagccgtgccatgtgttctgctcagacactgtggtgatgaagggccgacgtgtgttaggatgcacaaactttgtgaagcaataatagagtaaccacatcaattagctgtgatctgtagcctgtgggtcacagcagatttaattcccattcactgctgaaggaaagtctctcctacacacatrtatcttcctcatgaggggaggagagggacagtgctgagttctgctctctgtgacagcaacagggccagagggaatggcatgaatctgtgtcaggggagggacagctgggggttagggacaggggctgcaccacagggyggtgggcacgacccccagtgctggaattcaagaagtgtttggacagcgatctcagacatagggtctgatttttggatggtgctgtgtggagcatggagttggcctttatgatccttgtgggtctcttccagctcagaatattgtatgattgtatgatatgca

SEQ ID NO: 25758 - DNA, 493 bp, Chicken  19866894241255_2
ctcagacactgtggtgatgaagggccgacgtgtgttaggatgcacaaactttgtgaagcaataatagagtaaccacatcaattagctgtgatctgtagcctgtgggtcacagcagatttaattcccattcactgctgaaggaaagtctctcctacacacatrtatcttcctcatgaggggaggagagggacagtgctgagttctgctctctgtgacagcaacagggccagagggaatggcatgaatctgtgtcaggggagggacagctgggggttagggacaggggctgcaccacagggyggtgggcacgacccccagtgctggaattcaagaagtgtttggacagcgatctcagacatagggtctgatttttggatggtgctgtgtggagcatggagttggcctttatgatccttgtgggtctcttccagctcagaatattgtatgattgtatgatatgcacacacatatatgtacatatacacatgtgcag

SEQ ID NO: 25759 - DNA, 600 bp, Chicken  19866894241261_1
acagttgagatcagaataagtgggttctgcctcagctcttggcaggagatgttgttcaaaatgctaattagtgcaaaaagtaattatccaaatagagaataacaagaaatttccttctgtccccttcaccctacccgtgcttcctctttgtctcagggcagtattcaccaagggcaagcctatagctcctgacccatttgatgaggcagtggtagtttgcagcagttgtaatttaggtgattatttcaatgccttgtttctgttctatgagaattcttcagatccagatactttgttggkttttttttattttttttaaatggaaagaaatgttttgtagatagaattttaatgaagagctccatagccccacaagctcctccatggacaagtgtttgaatatttcataatctatattaataacttcttttaagtttctacagtctcataagagcagaacagatgagctcttgatggaactgaactgtcaatccgaacatagtgacattagaaaatagctctgtctccaagyctagctgcatgaaatgtcccttcttgccaagggagcagcaaagtacagtttaaatgtcccctattatg

SEQ ID NO: 25760 - DNA, 600 bp, Chicken  19866894241261_2
ttaggtgattatttcaatgccttgtttctgttctatgagaattcttcagatccagatactttgttggkttttttttattttttttaaatggaaagaaatgttttgtagatagaattttaatgaagagctccatagccccacaagctcctccatggacaagtgtttgaatatttcataatctatattaataacttcttttaagtttctacagtctcataagagcagaacagatgagctcttgatggaactgaactgtcaatccgaacatagtgacattagaaaatagctctgtctccaagyctagctgcatgaaatgtcccttcttgccaagggagcagcaaagtacagtttaaatgtcccctattatgacatctcaagagtataaaaattgggaagggtattaaaaatgagtaattacaaatgaagagtgataggtaatggtgaataaaaagtaggtaagtactgctctcccactgcccttttgatttgcagagactcggctaaagaccaaaagcgtatttctcaccggccccagttaaaattcaaatcctatggactgacagtgcaaaacactgtcaaaaaagctgtcaagttgtatca

SEQ ID NO: 25761 - DNA, 599 bp, Chicken  19866894241262_1
  misc_feature (1)..(27): n is any nucleotide
nnnnnnnnnnnnnnnnnnnnnnnnnnntttgtaatgctttgtttgacttcttataggctcaggcatatatacatacatacacaaatatatatgtttctatgctttgggcatggcaatctgcagaacaaaaagagcagagccccatgttagtgaagggctgctgatccagcatgacagtgcccatccttgtaagtcctgaccatggggcctctgagcccccatcctacagtcccaaggttgagcaatgggaggttcactggtgctgtgaaattgaacaccttagcaagaatgctccccacratacaagaaaatgtgtcagagaataatagaatagtagtaaaatagaataatagtataatagaactcttcattagaaggacccatagagttcacctagtccagctcccttgcaatgaacggggacaccaacagctagatcaggtgctcagaaccccgtccagcctggccttgaatgtctcctggaaaaaggcattcaccactctctgggcaacctgttccagtgcttcaccacycttactgtaaaaaacttctttattatacccagtctaaatctctcgtcttttagtttgaagccattt

SEQ ID NO: 25762 - DNA, 600 bp, Chicken  19866894241262_2
aaggttgagcaatgggaggttcactggtgctgtgaaattgaacaccttagcaagaatgctccccacratacaagaaaatgtgtcagagaataatagaatagtagtaaaatagaataatagtataatagaactcttcattagaaggacccatagagttcacctagtccagctcccttgcaatgaacggggacaccaacagctagatcaggtgctcagaaccccgtccagcctggccttgaatgtctcctggaaaaaggcattcaccactctctgggcaacctgttccagtgcttcaccacycttactgtaaaaaacttctttattatacccagtctaaatctctcgtcttttagtttgaagccatttccccttgtcctatcacagcaactaaatagtgtgtcacccccattaaatgcatttctcagggtcacgtctctctggggcactcctggatgagtggctcttcatcttgcaggcttccagcacaagaactagctcagctaagtcttttctcatataaatagcctgttggcacataaaccatgctcaggggctgcattctaccaataaattctggtttctgctctgaacatccaccta

SEQ ID NO: 25763 - DNA, 600 bp, Chicken  19866894241264_1
ccaaggacaaccaggtttctccatgcactaagataacaaagaaagatatttcaaaactggatagaaatacttatgttttgcttactgtgtatcattcagtattgtgcaatgttgaacaacaatggtagaaggactatctcaagcacagagaatattcacaacagtaaaagaactgctaatctcatctgaaaacatgggtatgatgctttcagaagttgggctaacacctttgtgcctcactgcctggtgctacactggggccttctgctacctaccatatgccccttcccctacagagcyacaatgagtgaagtatggaatgtgtgtttgtgtatgagggtaaaaacatgtctttggcagggaccctcctgtgacattacatgcaattttaaaaaacaaagggtaaaagagagacatgaaggaaaatatacccattttatccccctccattctcttaagatttgcaattaccatatgggatcttgttttgcagggctctggatcagtatcaaggattttgtttcttcagttttaagaacttttcatcactttttccttctagcctggaaatgcaaccttaaatactttaccagggaatgc

SEQ ID NO: 25764 - DNA, 600 bp, Chicken  19866894241264_2
tcagatgaatatagaatatgaactaattagtagggaggggtaaagatctggtagatgactattattatgattattgtgcaacagataagcatgtacaggactgcagtgtgtgggaagccggaatacaaaatctgcccttctgagttaggcagcattgggttaagctgagtattcttctgccagtcatctttaatgtgtgctgcatctggaaaatgtgagaaaccacaacaacaaacccacccatgtgcagttcttaagaagagagttgaaggtgaaactccttcctgatctccaagtgargaatgaaatttatcttcatttcttctgtctcagcaagtattgtgatatgaaacaatctacttcaaattctgtgcttaactaaggtatactcttcatgccctagtgtttctcctcctccaacagttacttggtgtaaagctgattttttttatttgcatgaattctatatttaaaaatatgtatctcacaaaaccaaacaagtgaacaaagtgttcaaacaggtttctgattcatgagccttgctggatttggatgtgatccctaaagatggtactgcccacggctgtcctgtgtacttat

SEQ ID NO: 25765 - DNA, 600 bp, Chicken  19866894241271_1
gttatgaaggaaattcattactcggagggcggtggggcactgacccaggctgtcctgagagctgtgggtgtcccatccccagcagtgctcaaggccatggatggaccctgatttggtggggggcagccagcccagggcaggggctgggggtgctgtgaggtccctcccaacccaaccattctgcgattctatttgcaaccccttcctgcagctctcaggtcctgcatgggagcagaggcctctgctgtgtcccagaacgcccacttctacctcaaataccatcccagagcccctctcccrctgtctctcctcccagggtggcttggtgccctctccttgcccacagcaaagtacaagtttcagaaagggctgaccgtgcaccggggccatccccactctctcctaccatccctgctgaggtcccagacgcgcagggtcctgtcccgcgatgccgacaccaggatgaggctcccattgggcgcaaagctcaggtccctgacaacatcctggtgccccagaaggctgaagagaagatgtcctgcagagagcggccacgtcagtcaccctcacacccacactccgcttggggcagcagctcag

SEQ ID NO: 25766 - DNA, 600 bp, Chicken  19866894241272_1
aattactttgatactacagtaatgagttttcaagggcaagaactggtgaaatagataagacttcaacatatgagtggttggagattgttggcattggtgaaggggcgtggtatctatggccaacttcaattggtttgccttttgtgagaaaaagacttctttttttctgaaatgatggtataattactattctgctattggacagaatctctgtgcaatgaggattaaataatctgaagaaatgttagtacttgagcaacatttctctgtatacttccacgtgctatacctgcttgctascaatagtatgctgtaattagcctccctgggaatcttaattccagaagcaaagtcattaatttcagttcattctttttccggtgtatgtacacatacgtaggcaaacacaatgtgcagctgacagaaccacatgtctgagtttatacacacaacacttgacaactcttttgagagcatttcaagttaaggacacaataaccattacattcaggaacaagataaactaatatttctgaactgctcttcgacttctcacggtataacttatctaggcagttttaaattgaccgtagtgtgtgc

SEQ ID NO: 25767 - DNA, 600 bp, Chicken  19866894241272_2
caagataaactaatatttctgaactgctcttcgacttctcacggtataacttatctaggcagttttaaattgaccgtagtgtgtgcctgtcatgttgaggttatgtgggatatctgcatataagcagcagtttgccctgatcagtacaaatttcttcagagcagctatggaatcttcacgtactggacaagtgctgatgcattgtggctaatggatttcttcctaccaatttcataccttttaaattcaggctgcttttgataaagtcatgctacgtcctctttttgagctcaattcctycttcagccttcttcctcagtctgtatttgtgagagatcaatttccgtgctgtcttctggcagatgagaattctgtgcttaatatgtaaattatttttgttctttttattagctttatgtgaattatgtttaacctactggcattttccrtatttccaaacatgtcatccatttcaaggatgtagggtatttgctgacagaataatcaaatctgtgtaataagagtaagtgaagggaaggatgtgattatgcgactggggtgagttatcatggcttcagcctcacagaaatattctcttag

SEQ ID NO: 25768 - DNA, 600 bp, Chicken  19866894241272_3
atttcttcagagcagctatggaatcttcacgtactggacaagtgctgatgcattgtggctaatggatttcttcctaccaatttcataccttttaaattcaggctgcttttgataaagtcatgctacgtcctctttttgagctcaattcctycttcagccttcttcctcagtctgtatttgtgagagatcaatttccgtgctgtcttctggcagatgagaattctgtgcttaatatgtaaattatttttgttctttttattagctttatgtgaattatgtttaacctactggcattttccrtatttccaaacatgtcatccatttcaaggatgtagggtatttgctgacagaataatcaaatctgtgtaataagagtaagtgaagggaaggatgtgattatgcgactggggtgagttatcatggcttcagcctcacagaaatattctcttagatttggctgtgcagtgcaagatttgccttagtatttccccagcagtccttttccaccactgccattgcagctgtttcatggatggttccagttgttctgttgtttatcctataatctctttcccaaaacttgaggcacttgttcctagg

SEQ ID NO: 25769 - DNA, 600 bp, Chicken  19866894241272_4
tgttcctaggaagacaaacacaagtctgaatttctaggggaagacataaggaaaacacaatcaacagttcttctccactgttcccctcagctgccagcagaaaatgaccaaccatcacgttttttgagctgtgtctctgtgatgagcccatccccgggagccatccaaaacacaggaatgaacattctgcattacaccaaagggacccgtaccctgaattgtggcttttcacagctgcagaggcctagagaaagaaattgccaaaatcagagtaggcatctgtatctgagttagtcatcraggttccctttggagaaaaaactttcacccatgcgagtgttcagttcacctaccccagagcaaatgcttaaaacaaggctaatgaattgccccctaaagcgtgcctatttctctccattgagcatgaagggagctgggatgactaggtcaactgtcaacatcttgattatcagtgtctgaagttaggaaacataatctcccactcgtgcagtgttttaatggatgaccttgggatttctgggggtaaattatgactgaagaaagggaggaaagccatgctgttatttgagtaaaaaaaaa

SEQ ID NO: 25770 - DNA, 600 bp, Chicken  19866894241297_1
agctttggtttaagatatccttttggacacaactatgtaaaatgtattttaagatgaagctaaccctggagcataagaaattgcacaagaccagtctcactttcttactgcaacttaatggccttacgaacatacagtgcaatcttctaatgaaatgagatggaaagggaggctcgagctccagatgtctctttctgacccaatttatgtcacagaaaaactcaccacactatcacttgtctctggaactgatatagccttcaccaacagttcaatgcccgttgtctgtcaagaagaatyaggaaaacagggatcagaagagtttttaagagcctgcccaactacataccaactatgcatcagattgaggcaatttttgcaaatcattacaatcccatcaaacagactgctgggaactcagcagtgctcctcatagctttgggaagatagtcctccttacatgtcacagctgtgtagatytgctcaaatgggaaaaagacagagtaccagtgttcagagctttgtttgtatactagcatatcagttgaaatctgtggggctatattcactgtcacactgctgctctaaagcagcctcgga

SEQ ID NO: 25771 - DNA, 508 bp, Chicken  19866894241297_2
ccagatgtctctttctgacccaatttatgtcacagaaaaactcaccacactatcacttgtctctggaactgatatagccttcaccaacagttcaatgcccgttgtctgtcaagaagaatyaggaaaacagggatcagaagagtttttaagagcctgcccaactacataccaactatgcatcagattgaggcaatttttgcaaatcattacaatcccatcaaacagactgctgggaactcagcagtgctcctcatagctttgggaagatagtcctccttacatgtcacagctgtgtagatytgctcaaatgggaaaaagacagagtaccagtgttcagagctttgtttgtatactagcatatcagttgaaatctgtggggctatattcactgtcacactgctgctctaaagcagcctcggaacattttgcaccagccatgtgatcagctaacatatgggactgaggttatttgtgcctcttccaccttttatctcattctgctttgtag

SEQ ID NO: 25772 - DNA, 600 bp, Chicken  19866894241298_1
gattttcttccaaaattttaatatcatccaaagtacacaatcattattaactagctgacctcagtctacgatagtcaagctatatagctggcataaagcaaatgaaaaagctgacatctcagtagaaacacaggtattttacttctttcaaagaggactatttaatctagaaaaaattagacaatgtttgggagaaggcagaagtagctttaaaatgcattttaattttcttttgtttatattatcatagaatcatagaatcatagaatcaccaaggttggaaaagacccacagaatcayccagtccaaccatccacgcatcaccaatagttctcactaagccatgtccctcaacacagcgtccaaacattccttgaacgtgactccaccacctccctgggcagcccattccagtgcctgaccaccctttcagagaagaaatatttcctaaagtccagcctgaaccaatatcttatttggaatgttctttactaaattgccatgttacattaaaacagctggcatgacaaaatatttgccatcgttctatttgcagggatttaacttatacagtccttcagtacaacatgagtgtaattg

SEQ ID NO: 25773 - DNA, 600 bp, Chicken  19866894241305_1
tgagcagacagagcccttttatcacagctgtgctcttatcagaccatctcctctattccttccttccccagccattgtggaagcagacatcctgcccaaggcatccaaacccacaatctgccgcttcttctaccgagcctctggatttttgccagcagccccttgagagggtcccagatgtgactgctgcttctgtgctgccctgaacgtatccggtgaaaacaaagggccgcactcagcacggttgccgcttcggaggccaacacttcctcctctgtcagggctgtacggtgggagacrgtggtgctgaggcaccccagggtaagcgggctgaagtggagggtcgcacacagccaaaggggtgccyacactataggaagaaacccatcttttgagtgcacctctcagctgctctgcgggctcaccggcagttcccacaaagccgggaggtgtgtatgggatgctgatgcctygcacccgcgtcctgtgtgaaaagacattgggttttgatgctgcttctgcttagaggaaaaaggattcctaagagagtcattccgctctatttcagtgtaactcagactcggggcactgcttgccttg

SEQ ID NO: 25774 - DNA, 600 bp, Chicken  19866894241305_2
ccagccattgtggaagcagacatcctgcccaaggcatccaaacccacaatctgccgcttcttctaccgagcctctggatttttgccagcagccccttgagagggtcccagatgtgactgctgcttctgtgctgccctgaacgtatccggtgaaaacaaagggccgcactcagcacggttgccgcttcggaggccaacacttcctcctctgtcagggctgtacggtgggagacrgtggtgctgaggcaccccagggtaagcgggctgaagtggagggtcgcacacagccaaaggggtgccyacactataggaagaaacccatcttttgagtgcacctctcagctgctctgcgggctcaccggcagttcccacaaagccgggaggtgtgtatgggatgctgatgcctygcacccgcgtcctgtgtgaaaagacattgggttttgatgctgcttctgcttagaggaaaaaggattcctaagagagtcattccgctctatttcagtgtaactcagactcggggcactgcttgccttgccgttcgtaaaaccaaaatggtttgactaatatttctgggagaagttttggggagagagaagggaag

SEQ ID NO: 25775 - DNA, 600 bp, Chicken  19866894241305_3
ccagatgtgactgctgcttctgtgctgccctgaacgtatccggtgaaaacaaagggccgcactcagcacggttgccgcttcggaggccaacacttcctcctctgtcagggctgtacggtgggagacrgtggtgctgaggcaccccagggtaagcgggctgaagtggagggtcgcacacagccaaaggggtgccyacactataggaagaaacccatcttttgagtgcacctctcagctgctctgcgggctcaccggcagttcccacaaagccgggaggtgtgtatgggatgctgatgcctygcacccgcgtcctgtgtgaaaagacattgggttttgatgctgcttctgcttagaggaaaaaggattcctaagagagtcattccgctctatttcagtgtaactcagactcggggcactgcttgccttgccgttcgtaaaaccaaaatggtttgactaatatttctgggagaagttttggggagagagaagggaagtgaaaatagcaacccgttccagctctgtggctttggtctgtgatggtttcgtgctacttgggtaggtttggcaattttyggtagtaagatcagaaacacaacacca

SEQ ID NO: 25776 - DNA, 600 bp, Chicken  19866894241305_4
gaggtgtgtatgggatgctgatgcctygcacccgcgtcctgtgtgaaaagacattgggttttgatgctgcttctgcttagaggaaaaaggattcctaagagagtcattccgctctatttcagtgtaactcagactcggggcactgcttgccttgccgttcgtaaaaccaaaatggtttgactaatatttctgggagaagttttggggagagagaagggaagtgaaaatagcaacccgttccagctctgtggctttggtctgtgatggtttcgtgctacttgggtaggtttggcaattttyggtagtaagatcagaaacacaacaccacgggctgccattgtatgtgattggaggtgcctgtgaggagccatgggaatgaagcaaatgtgcattgctkccgggtttccttgtgccttcatcttgtaaccctctgctttttcttgtagcttaggtcttcagcatcgcttccctaccttgacacacactgccagggttcctgtagcctgygtgcacttttctgttttcttaagcatttctgcacacaataaaaygttcagaagggttttcacccattcatcagttcttaggcatcgagggtga

SEQ ID NO: 25777 - DNA, 538 bp, Chicken  19866894241305_5
agagagtcattccgctctatttcagtgtaactcagactcggggcactgcttgccttgccgttcgtaaaaccaaaatggtttgactaatatttctgggagaagttttggggagagagaagggaagtgaaaatagcaacccgttccagctctgtggctttggtctgtgatggtttcgtgctacttgggtaggtttggcaattttyggtagtaagatcagaaacacaacaccacgggctgccattgtatgtgattggaggtgcctgtgaggagccatgggaatgaagcaaatgtgcattgctkccgggtttccttgtgccttcatcttgtaaccctctgctttttcttgtagcttaggtcttcagcatcgcttccctaccttgacacacactgccagggttcctgtagcctgygtgcacttttctgttttcttaagcatttctgcacacaataaaaygttcagaagggttttcacccattcatcagttcttaggcatcgagggtgatttcatctgtgaggctgtgctttgtttgttaaaag

SEQ ID NO: 25778 - DNA, 428 bp, Chicken  19866894241305_6
agagagaagggaagtgaaaatagcaacccgttccagctctgtggctttggtctgtgatggtttcgtgctacttgggtaggtttggcaattttyggtagtaagatcagaaacacaacaccacgggctgccattgtatgtgattggaggtgcctgtgaggagccatgggaatgaagcaaatgtgcattgctkccgggtttccttgtgccttcatcttgtaaccctctgctttttcttgtagcttaggtcttcagcatcgcttccctaccttgacacacactgccagggttcctgtagcctgygtgcacttttctgttttcttaagcatttctgcacacaataaaaygttcagaagggttttcacccattcatcagttcttaggcatcgagggtgatttcatctgtgaggctgtgctttgtttgttaaaag

SEQ ID NO: 25779 - DNA, 384 bp, Chicken  19866894241305_7
ctttggtctgtgatggtttcgtgctacttgggtaggtttggcaattttyggtagtaagatcagaaacacaacaccacgggctgccattgtatgtgattggaggtgcctgtgaggagccatgggaatgaagcaaatgtgcattgctkccgggtttccttgtgccttcatcttgtaaccctctgctttttcttgtagcttaggtcttcagcatcgcttccctaccttgacacacactgccagggttcctgtagcctgygtgcacttttctgttttcttaagcatttctgcacacaataaaaygttcagaagggttttcacccattcatcagttcttaggcatcgagggtgatttcatctgtgaggctgtgctttgtttgttaaaag

SEQ ID NO: 25780 - DNA, 600 bp, Chicken  19866894241309_1
taataaactactttacgtgtggagagaaacaccacggacttctttaataagccattcatgatggagcaggcaacgcttagagaacagaaaatcatttgtgggtcttggtgatgtgttcccactgttccctgctgcgaatctcttgccaggtatgtctgcgtcggtgcgcccatctgggctgcgtgtaaatctgctgctaagtctgtaactcacagggagggcatctctgccaggagccgctgctcatcaattacaggcagagcgggacaggcagcccattcctcactccctgccgacacyayggcctcttccacagccgctttatctcccactgagctggcccagacgaagccttttacagggagtgcatcaggcagccccatgcttctgctgttgctctaaacccacatctcactttggattatgtaatggcactccctgcttttagtgcatccagcggaggcagctgctgcctgtcactttttccaaggcttggaaatgcagatggacccctgtgggtcatgaggctgcatttgtggaggggagaggcaaagagcagactgcgttttgggactgaaaagcgtgtttgggtgcagaggg

SEQ ID NO: 25781 - DNA, 600 bp, Chicken  19866894241309_2
ataaactactttacgtgtggagagaaacaccacggacttctttaataagccattcatgatggagcaggcaacgcttagagaacagaaaatcatttgtgggtcttggtgatgtgttcccactgttccctgctgcgaatctcttgccaggtatgtctgcgtcggtgcgcccatctgggctgcgtgtaaatctgctgctaagtctgtaactcacagggagggcatctctgccaggagccgctgctcatcaattacaggcagagcgggacaggcagcccattcctcactccctgccgacacyayggcctcttccacagccgctttatctcccactgagctggcccagacgaagccttttacagggagtgcatcaggcagccccatgcttctgctgttgctctaaacccacatctcactttggattatgtaatggcactccctgcttttagtgcatccagcggaggcagctgctgcctgtcactttttccaaggcttggaaatgcagatggacccctgtgggtcatgaggctgcatttgtggaggggagaggcaaagagcagactgcgttttgggactgaaaagcgtgtttgggtgcagaggggc

SEQ ID NO: 25782 - DNA, 570 bp, Chicken  19866894241311_1
attggcttgatggttgcactcagaattgcagtcaatggctcagtgtccaagtggagactggtgataagtggtgttcctcagggattgttactgggaccagtgttatttaacatctgtgtaggcaacaaggacaatgggatcaagtgcaacctcagcaatctgcaaatgacaccaagctgagtggtgcacttgacacaccagaagactttaaagttcccttttgactcaaaccattctgtgatgaccaaacattttcaggcatgctcattcatatgtgggcatgcttcaggagactaaagwttccttctcaccaggaaaagctaaccaggtctgttgcttttgatgaggtaataaatcctggatacagaatatctcactttttctgatatacttatttagagaactgactacagaagaatgtcagtaagcactcttgtttgtgtaaaaataaataaataaataaataaattcaaaataagaaactgcaccaaaaataccctgttataatatagctcttatgtccaggggaacaaagtagggcaaaatgaaatctaaagggctccccatatt

SEQ ID NO: 25783 - DNA, 600 bp, Chicken  19866894241315_1
attttctttctagaggctgttcctccatcaaagtgacttggactttaataacaccatcttaaatacgtacattaacaccaatgcagatgttttcccctgtctctaaggaaaacagttttattgagcttctataacaatcttgaacagtaagtgaaagacagcattaatacaatcacttaaagctacgttaacaatcgtatgcatgatgctgtcatgtttaaaaatgtattcaaaatttgaatggtctattttatatttggcaaattaacactatgttctcttggcaccaaagggaattarcaaaagcatcttacacaaatccataagcaaacagctcaaaatgtaatttattttaataacagcaatctcctccaaggaaacaagtgcttgcttctctaaggatgtttattaacagataaaataactttgataagaacaaaatgctatagttgtttctagctgcattatcctaactaatgagtactatttagtaactatttgaaacaacaaaatgagatgcagattcccatattttccaactcaggtatgtaaataagacaaactgaaattacacatagtaagtggttaccatcataaata

SEQ ID NO: 25784 - DNA, 600 bp, Chicken  19866894241324_1
cgcagcccagtcagctgacgttagcggggtaacgagaggttacggccggatcacgaaggcacactgacatggcatcttcccgttctgcagaggaaagtcaagcacagaagtcgtaggagtcccgtcggcttctgagtcttcttcttgctgcagctgggcatgcggagaggtggctcctcttgcttccctttgaaatgaaagcggaagggcgaagcagaaaacgctccattttgggaacaagatatgaagtcctttaatgttttggctcagatattcctcaaagcttctgttgtggcactstgagcaagtcaaggctgcatctctcagactctttccaattctggatgctcccatcagtcccagcctggatggaggcaccgggtgagccactcgtgaaccgagcatcattacctgtcattaactcacctggargctcctatttcttccatgctattctcctgtggagcaaagcagctccttaaaaacaggaaaaagccaactgtccaccawcagctttycagaggagtccaatagcaacctgcaccaagggcagggaaggccatcacggtggcttcaaggttttcttctcgtgctccctta

SEQ ID NO: 25785 - DNA, 600 bp, Chicken  19866894241324_2
tgagtcttcttcttgctgcagctgggcatgcggagaggtggctcctcttgcttccctttgaaatgaaagcggaagggcgaagcagaaaacgctccattttgggaacaagatatgaagtcctttaatgttttggctcagatattcctcaaagcttctgttgtggcactstgagcaagtcaaggctgcatctctcagactctttccaattctggatgctcccatcagtcccagcctggatggaggcaccgggtgagccactcgtgaaccgagcatcattacctgtcattaactcacctggargctcctatttcttccatgctattctcctgtggagcaaagcagctccttaaaaacaggaaaaagccaactgtccaccawcagctttycagaggagtccaatagcaacctgcaccaagggcagggaaggccatcacggtggcttcaaggttttcttctcgtgctcccttatttgtagtagactccctatggggcaatgctaagagcyccacagagcatcctgctcastgctgctgctccaggtgttggtgctgcgtggtgggtgtctgctccacatgtccacggagagcagagtcccatcag

SEQ ID NO: 25786 - DNA, 600 bp, Chicken  19866894241324_3
gaagcagaaaacgctccattttgggaacaagatatgaagtcctttaatgttttggctcagatattcctcaaagcttctgttgtggcactstgagcaagtcaaggctgcatctctcagactctttccaattctggatgctcccatcagtcccagcctggatggaggcaccgggtgagccactcgtgaaccgagcatcattacctgtcattaactcacctggargctcctatttcttccatgctattctcctgtggagcaaagcagctccttaaaaacaggaaaaagccaactgtccaccawcagctttycagaggagtccaatagcaacctgcaccaagggcagggaaggccatcacggtggcttcaaggttttcttctcgtgctcccttatttgtagtagactccctatggggcaatgctaagagcyccacagagcatcctgctcastgctgctgctccaggtgttggtgctgcgtggtgggtgtctgctccacatgtccacggagagcagagtcccatcagaaagccatacccgggagggaagcactgctgctggggggcagcagtttggaggatggaggaatttgaggaagatgaaga

SEQ ID NO: 25787 - DNA, 600 bp, Chicken  19866894241324_4
aaacgctccattttgggaacaagatatgaagtcctttaatgttttggctcagatattcctcaaagcttctgttgtggcactstgagcaagtcaaggctgcatctctcagactctttccaattctggatgctcccatcagtcccagcctggatggaggcaccgggtgagccactcgtgaaccgagcatcattacctgtcattaactcacctggargctcctatttcttccatgctattctcctgtggagcaaagcagctccttaaaaacaggaaaaagccaactgtccaccawcagctttycagaggagtccaatagcaacctgcaccaagggcagggaaggccatcacggtggcttcaaggttttcttctcgtgctcccttatttgtagtagactccctatggggcaatgctaagagcyccacagagcatcctgctcastgctgctgctccaggtgttggtgctgcgtggtgggtgtctgctccacatgtccacggagagcagagtcccatcagaaagccatacccgggagggaagcactgctgctggggggcagcagtttggaggatggaggaatttgaggaagatgaagaccagctgg

SEQ ID NO: 25788 - DNA, 548 bp, Chicken  19866894241324_5
attctggatgctcccatcagtcccagcctggatggaggcaccgggtgagccactcgtgaaccgagcatcattacctgtcattaactcacctggargctcctatttcttccatgctattctcctgtggagcaaagcagctccttaaaaacaggaaaaagccaactgtccaccawcagctttycagaggagtccaatagcaacctgcaccaagggcagggaaggccatcacggtggcttcaaggttttcttctcgtgctcccttatttgtagtagactccctatggggcaatgctaagagcyccacagagcatcctgctcastgctgctgctccaggtgttggtgctgcgtggtgggtgtctgctccacatgtccacggagagcagagtcccatcagaaagccatacccgggagggaagcactgctgctggggggcagcagtttggaggatggaggaatttgaggaagatgaagaccagctggaatcccatgggctctgatggctgtctgatggcaacagtggttgccgtaattgcttttggggatgata

SEQ ID NO: 25789 - DNA, 528 bp, Chicken  19866894241324_6
tcccagcctggatggaggcaccgggtgagccactcgtgaaccgagcatcattacctgtcattaactcacctggargctcctatttcttccatgctattctcctgtggagcaaagcagctccttaaaaacaggaaaaagccaactgtccaccawcagctttycagaggagtccaatagcaacctgcaccaagggcagggaaggccatcacggtggcttcaaggttttcttctcgtgctcccttatttgtagtagactccctatggggcaatgctaagagcyccacagagcatcctgctcastgctgctgctccaggtgttggtgctgcgtggtgggtgtctgctccacatgtccacggagagcagagtcccatcagaaagccatacccgggagggaagcactgctgctggggggcagcagtttggaggatggaggaatttgaggaagatgaagaccagctggaatcccatgggctctgatggctgtctgatggcaacagtggttgccgtaattgcttttggggatgata

SEQ ID NO: 25790 - DNA, 600 bp, Chicken  19866894241329_1
aaatggaaatttctgctttgatttagcaatactttcaccctttaaaagtcggtactgtttattgaaatggagcatttgatggaaaacacatagaacatcaaccgtttcacttgataggtttttctttctgttcctgttcctattgccatgcaaacttagcccactgcagcgggtggcgacttggagttgatctgtaatcagaccaggcaataccaagatgagaacttagcagttagatcaaaatgaatcagaatgttttattatggatggggcactgaaaggagactgatttctatataytgtaagaatggggaaaagtataaaaatctatataacttcctaactcgccttgtttaaatcgttgcagctttaacagcataatgtctccataactgcttctataaatgtcttgaaactggtaagcgctaaccaaatgtatctgaagacttagaaagtatttcaagcttttcagccgctgacgttcgtatattcctgcagtggctcgtggcaaaagatgtggatccttttggttttacactgtacaataatcgtttgttcagccacttaagataaaagcttacggtttactttcttgcttgc

SEQ ID NO: 25791 - DNA, 600 bp, Chicken  19866894241330_1
tccccacagctcggtggaggcgggagggggaggcgctgggccaggcggcagcagaaaggctgcactgcccattttaggcgaaattgtgagcagaggagcggggaggggagaagcactacgaaccttcctcttcttgaagtgctgccgtgccaggaagcccctgcacgccgcctggaacagggtgatgttcctgctggtctgcgtgtcccgctgctcctccagcctggccagtgagccagcacggaaaaacacctggaggggggagcgcagtgagatgccagcatccctcccgtgtcacawcaacgggaacagggtgctctccctttgtgcccagccccgtggccctcatcccagcgtgggtggccccgcgtggggcttttgttccccraggaatggcgtagggggagcacacagtgctgcccttgtgccatgtgcccgcctctgccccgtccatagagagcaacgatgcccctgcagggctcatacccggctcagacccatgtgatagctgctcttctccaggtccagcgactccaggagctcctcgactgcctgtggggaaggagaagcatcagcgtgtgggacatggggtgcgggatg

SEQ ID NO: 25792 - DNA, 600 bp, Chicken  19866894241330_2
agcagaggagcggggaggggagaagcactacgaaccttcctcttcttgaagtgctgccgtgccaggaagcccctgcacgccgcctggaacagggtgatgttcctgctggtctgcgtgtcccgctgctcctccagcctggccagtgagccagcacggaaaaacacctggaggggggagcgcagtgagatgccagcatccctcccgtgtcacawcaacgggaacagggtgctctccctttgtgcccagccccgtggccctcatcccagcgtgggtggccccgcgtggggcttttgttccccraggaatggcgtagggggagcacacagtgctgcccttgtgccatgtgcccgcctctgccccgtccatagagagcaacgatgcccctgcagggctcatacccggctcagacccatgtgatagctgctcttctccaggtccagcgactccaggagctcctcgactgcctgtggggaaggagaagcatcagcgtgtgggacatggggtgcgggatgcaggatgtgggggtgcaaggctgcgtacccgcttctcatccaccacgatgtagttgcggccatgcttcttggtgaggtgtggggccag

SEQ ID NO: 25793 - DNA, 599 bp, Chicken  19866894241334_1
  misc_feature (1)..(22): n is any nucleotide
nnnnnnnnnnnnnnnnnnnnnntcccattgaaatccttgacactgcatattaacctggtagctgagccataaaatgcaatgcatattaaaaatcagcagcctgcacttccagtgctttcaaaatagccagtcttttttgtgatatatatacacgacgtgaaagagttctggaaatcctagaagtatgagcatttttatggtgagggcaatgtgtttgcacaggagagctgtcacttggctcagcgggttggatagatattaaagtatttagtgcttttcttagtgggatcgtgctcccarttgtgttcagcccatgtrgaaagtcccattgacttggggacagcagtgctggaggaccaggactgcagaatgttgggatgggtggggggtcactggcatcctcctgccctcgttatggaattatggaatggtggcactgtttgcatccttcatcactatcctttgtgctaattaggttacttcttgctgccgctgtttggagctccagccttggtgtgccggagtgctatgaaagtccacagcacacatagtccagatccaaacgaaacattgcaatggatatccatctctactcattt

SEQ ID NO: 25794 - DNA, 599 bp, Chicken  19866894241334_2
  misc_feature (1)..(4): n is any nucleotide
nnnntcccattgaaatccttgacactgcatattaacctggtagctgagccataaaatgcaatgcatattaaaaatcagcagcctgcacttccagtgctttcaaaatagccagtcttttttgtgatatatatacacgacgtgaaagagttctggaaatcctagaagtatgagcatttttatggtgagggcaatgtgtttgcacaggagagctgtcacttggctcagcgggttggatagatattaaagtatttagtgcttttcttagtgggatcgtgctcccarttgtgttcagcccatgtrgaaagtcccattgacttggggacagcagtgctggaggaccaggactgcagaatgttgggatgggtggggggtcactggcatcctcctgccctcgttatggaattatggaatggtggcactgtttgcatccttcatcactatcctttgtgctaattaggttacttcttgctgccgctgtttggagctccagccttggtgtgccggagtgctatgaaagtccacagcacacatagtccagatccaaacgaaacattgcaatggatatccatctctactcattttagaataatttccatttg

SEQ ID NO: 25795 - DNA, 490 bp, Chicken  19866894241334_3
ctttgcagaatccttgcaaaaaaatgggtgggttttacgtctgcagcctggagatctgcactgagagctgcatatgggctttgtcccctttcttccatcaacacgtcacttcttttacgcagaggagtctgatttgtgcttacagttcaggctgaggtacattgaaacagactggatgtctccttctgagttattttatttaaaaataaccccaaagggggatgaagtcaggttccttgtgcctcatctgtgctttggtcaatgcgctggcaatcggcacttgtcctctttctctccgtktccctcatccccgtraccccatagcagaaagaaaggtggagcaaagctcagcattggtcctcctgtggcctcacagacaaagcataatggtttttaactaaaataggacccgcatgtgcagcccacagtgatgcttttctgtgtttcatgaaagccagaccttgctcgcttttcctctgtcgagccagca

SEQ ID NO: 25796 - DNA, 475 bp, Chicken  19866894241334_4
gcaaaaaaatgggtgggttttacgtctgcagcctggagatctgcactgagagctgcatatgggctttgtcccctttcttccatcaacacgtcacttcttttacgcagaggagtctgatttgtgcttacagttcaggctgaggtacattgaaacagactggatgtctccttctgagttattttatttaaaaataaccccaaagggggatgaagtcaggttccttgtgcctcatctgtgctttggtcaatgcgctggcaatcggcacttgtcctctttctctccgtktccctcatccccgtraccccatagcagaaagaaaggtggagcaaagctcagcattggtcctcctgtggcctcacagacaaagcataatggtttttaactaaaataggacccgcatgtgcagcccacagtgatgcttttctgtgtttcatgaaagccagaccttgctcgcttttcctctgtcgagccagca

SEQ ID NO: 25797 - DNA, 600 bp, Chicken  19866894241335_1
tgtagagctgagaattcacactgctttgtgtgcagcagttccctggatatgcagctatgtgtgcacagcaaccggtttcattcatgttacagtgctgtacagcggtgggtgaagcagggtgttgctcatattttggaataaaagataccttaaggtgagcctgtgaacaggcatttggcaggttaaggtggtaagatcaatactgaagcatctgaacattgtcaagcaccagtgctttgtatttctagttcagctaagtgcccctgaggccccaaagccacctgatgggagtgttgcacrtaaagttgtcatgtggcctctccagctttacttgagagaatagcaacccactgtgagtggagcccccaccaaataaagagcctgggggctccgtgtaaatgtctgatctaggaacaatacagtgaaaagaagcaaagaactatagcctaaagctgagaaggtgaaagcaatttaacctactactaaagaaaaaaatgtatgtgatatctgcctgctcattccattaaaactgctgcattttcagtctctgtgcatcttcattgggctcctctggcagttgagtcaggtgccagcatagct

SEQ ID NO: 25798 - DNA, 600 bp, Chicken  19866894241338_1
acagcagcagcaatccacagagacaaaaccaagccagttacaaaacacatattttaaaaggttttgcttcctttttcagtgcccctggtccagcactggtggatgccccacaccagtcccagcaacccaaggctgcacccgagactgccaaggaaagatggcaaaaccaaaagcaaagcaagtaggccattttcttttcactagctggcttagcacagcccttcccagggcacaaggccgtgccattctgcccaccattcccagtcaatctgcaacaacgtggtgccgagctgcccaccrtgagagcatgcctgcaccaccaaaggacccggggcacattaggcagtgtcatccttcaccctagctcaaaaatactcgacagatcagaaaacatcatttctttgtgcacatacatacacaacattacatacacagagaaacatccgtacttctgcctttcacaagggccaaagatgaggctgttaggccctttgcagttaatgccacgttagttgttggtgtcagcacaccctgatctgctctcccaggctccagatgattcccacagtcgggatccagatctcttgctctgacgcacat

SEQ ID NO: 25799 - DNA, 599 bp, Chicken  19866894241342_1
  misc_feature (1)..(136): n is any nucleotide
nnnnnnnnnnnnnnnnnnnnnnnnnnnnnnnnnnnnnnnnnnnnnnnnnnnnnnnnnnnnnnnnnnnnnnnnnnnnnnnnnnnnnnnnnnnnnnnnnnnnnnnnnnnnnnnnnnnnnnnnnnnnnnnnnnnnnnnntttaataagtgtaccgtatgttgtcttgggacatggcacatagcatttgttggatacaatttatggttcattacttgtaaagaatcatcaataaaactactgccagtaattaaatgttgcatattttggtactgagagaagcagttattaaaacaaatcagagytgcgttagaagccacatgacaatttatgagttgattttttttttttgtattgatatatctacaacatttttaagctaccatgttgtcagcttaatactcttagaggggtgtaaagcatcctttaattataaaattcacaatttatttccacaaaggctagaagcagcatgatttatcatagctatacttactatygcctatcattgctagacctcagggtttttgtggttttattatttatttttggtgttttgagagggtgtccagtgtcttgactgtaaagaaccaaattacgtgag

SEQ ID NO: 25800 - DNA, 600 bp, Chicken  19866894241342_2
tttatggttcattacttgtaaagaatcatcaataaaactactgccagtaattaaatgttgcatattttggtactgagagaagcagttattaaaacaaatcagagytgcgttagaagccacatgacaatttatgagttgattttttttttttgtattgatatatctacaacatttttaagctaccatgttgtcagcttaatactcttagaggggtgtaaagcatcctttaattataaaattcacaatttatttccacaaaggctagaagcagcatgatttatcatagctatacttactatygcctatcattgctagacctcagggtttttgtggttttattatttatttttggtgttttgagagggtgtccagtgtcttgactgtaaagaaccaaattacgtgaggataaaaacacaacagtgtcaaatggaatacccagagatgggatgggtgttaggtcccaggatctgactatattctctgtcttaagattcacattggagatcattgaaatagaaggaaaatgactaaaaaaaaytgtgttgatatgaatacactttcactgtttgtatgcttcatgcaagtctagatctgaactga

SEQ ID NO: 25801 - DNA, 600 bp, Chicken  19866894241342_3
aaaactactgccagtaattaaatgttgcatattttggtactgagagaagcagttattaaaacaaatcagagytgcgttagaagccacatgacaatttatgagttgattttttttttttgtattgatatatctacaacatttttaagctaccatgttgtcagcttaatactcttagaggggtgtaaagcatcctttaattataaaattcacaatttatttccacaaaggctagaagcagcatgatttatcatagctatacttactatygcctatcattgctagacctcagggtttttgtgyttttattatttatttttggtgttttgagagggtgtccagtgtcttgactgtaaagaaccaaattacgtgaggataaaaacacaacagtgtcaaatggaatacccagagatgggatgggtgttaggtcccaggatctgactatattctctgtcttaagattcacattggagatcattgaaatagaaggaaaatgactaaaaaaaaytgtgttgatatgaatacactttcactgtttgtatgcttcatgcaagtctagatctgaactgaatgcatttgattatattcataccctgagagtac

SEQ ID NO: 25802 - DNA, 600 bp, Chicken  19866894241342_4
tactgccagtaattaaatgttgcatattttggtactgagagaagcagttattaaaacaaatcagagytgcgttagaagccacatgacaatttatgagttgattttttttttttgtattgatatatctacaacatttttaagctaccatgttgtcagcttaatactcttagaggggtgtaaagcatcctttaattataaaattcacaatttatttccacaaaggctagaagcagcatgatttatcatagctatacttactatygcctatcattgctagacctcagggtttttgtggttttyttatttatttttggtgttttgagagggtgtccagtgtcttgactgtaaagaaccaaattacgtgaggataaaaacacaacagtgtcaaatggaatacccagagatgggatgggtgttaggtcccaggatctgactatattctctgtcttaagattcacattggagatcattgaaatagaaggaaaatgactaaaaaaaaytgtgttgatatgaatacactttcactgtttgtatgcttcatgcaagtctagatctgaactgaatgcatttgattatattcataccctgagagtactattt

SEQ ID NO: 25803 - DNA, 600 bp, Chicken  19866894241342_5; identical to SEQ ID NO: 25802

SEQ ID NO: 25804 - DNA, 600 bp, Chicken  19866894241342_6; identical to SEQ ID NO: 25802

SEQ ID NO: 25805 - DNA, 600 bp, Chicken  19866894241342_7
ttcacaatttatttccacaaaggctagaagcagcatgatttatcatagctatacttactatygcctatcattgctagacctcagggtttttgtggttttattatttatttttggtgttttgagagggtgtccagtgtcttgactgtaaagaaccaaattacgtgaggataaaaacacaacagtgtcaaatggaatacccagagatgggatgggtgttaggtcccaggatctgactatattctctgtcttaagattcacattggagatcattgaaatagaaggaaaatgactaaaaaaaaytgtgttgatatgaatacactttcactgtttgtatgcttcatgcaagtctagatctgaactgaatgcatttgattatattcataccctgagagtactattttccctgaaattaaaaactgctttcaactcttgtgagcttttcttgtgattcgttaaacagtagtcaaagacactaaaatccactgaataccaaaaaaaaagagctgccaaaaagaaatgtaattgtcctgatgcatccaagtccactaacctggcactcctgttatttccatgccaggtgttcaggatgtctaaactagg

SEQ ID NO: 25806 - DNA, 600 bp, Chicken  19866894241343_1
gggagaacgtaacgccagctggaaggggaagtaaccagccagatgggaaaccaggaggagaaaggagattttttgtccaaaacacagccaaagaagctattaaagtcagctggtttagaaaagcactgaagcaagacactgtcttccctcgtgcctgtgcttccatgcagcccagccccagtcctgccctgcagagtgatgccctcctctgtgtgggcacagccctgggcacagcgtgtcccacaccacgtcctccaagtgaaaccagccctggtagtggcacaaccaacgctggcagcratgtggagctggggatgcgtggagtgccttcagcagcgcacagtgcccagtggccctgkgagaacccyctgcagcccctgtcctgccgtggctttgtctgcacatgatgctgggaagaagcacagttagccgtctgtgggaagcagctcctctgcccaccatcctcctggctgcttgaagaaccaccacagtgtcatggcacccagaaacctcctctcagaaacctgaagcaaaagagagatgggctgagccgcaccggctgggagaggggccgggggcggctccctgctgccctgcttg

SEQ ID NO: 25807 - DNA, 600 bp, Chicken  19866894241343_2
gaaaggagattttttgtccaaaacacagccaaagaagctattaaagtcagctggtttagaaaagcactgaagcaagacactgtcttccctcgtgcctgtgcttccatgcagcccagccccagtcctgccctgcagagtgatgccctcctctgtgtgggcacagccctgggcacagcgtgtcccacaccacgtcctccaagtgaaaccagccctggtagtggcacaaccaacgctggcagcratgtggagctggggatgcgtggagtgccttcagcagcgcacagtgcccagtggccctgkgagaacccyctgcagcccctgtcctgccgtggctttgtctgcacatgatgctgggaagaagcacagttagccgtctgtgggaagcagctcctctgcccaccatcctcctggctgcttgaagaaccaccacagtgtcatggcacccagaaacctcctctcagaaacctgaagcaaaagagagatgggctgagccgcaccggctgggagaggggccgggggcggctccctgctgccctgcttggggtcctggggcacaggcaggggagcagggagactgctcctacagctgctcagcaatga

SEQ ID NO: 25808 - DNA, 600 bp, Chicken  19866894241343_3
ttttttgtccaaaacacagccaaagaagctattaaagtcagctggtttagaaaagcactgaagcaagacactgtcttccctcgtgcctgtgcttccatgcagcccagccccagtcctgccctgcagagtgatgccctcctctgtgtgggcacagccctgggcacagcgtgtcccacaccacgtcctccaagtgaaaccagccctggtagtggcacaaccaacgctggcagcratgtggagctggggatgcgtggagtgccttcagcagcgcacagtgcccagtggccctgkgagaacccyctgcagcccctgtcctgccgtggctttgtctgcacatgatgctgggaagaagcacagttagccgtctgtgggaagcagctcctctgcccaccatcctcctggctgcttgaagaaccaccacagtgtcatggcacccagaaacctcctctcagaaacctgaagcaaaagagagatgggctgagccgcaccggctgggagaggggccgggggcggctccctgctgccctgcttggggtcctggggcacaggcaggggagcagggagactgctcctacagctgctcagcaatgagcacaccat

SEQ ID NO: 25809 - DNA, 600 bp, Chicken  19866894241345_1
agtatccaaattacatctcagctaatgtggttgcttcagaaggtagaagaaaagaagcagtaaaatagagaggtggtggaagcctcatccttggaggcactcaaggtgaggctgaatggggctctgagcacctgatctagctgtaggtgtccctgttcactgcagggaacttggactataaatggcctttaggagtcccttccaactcaaatgattctatgaaagcaggagcctgctactctgggatgttaaacagtgccctccaagcttgctattcccttgccctcctctagttcctcsttatggcagtcctcaattccctacacttttgtttattagaagatggttctgtcttctattatttcgaaatatgaccactggcctttcatgggattttccaggcgcttccctaaggggagagatctcattgctttgggatgggaagccaaaccacagagctctgatgtgtagcctccgttacattggcactgtgatgtgggactttgcttctgccccttccttttcccactgagctcactgacatccttaagtgatagagctacattaataggacttcaaagcggatttcaaacgtttcct

SEQ ID NO: 25810 - DNA, 600 bp, Chicken  19866894241345_2
ggtacttgagggagaactgaagggaatcaatcatctattttgttacgtagtaagactgttccattttcctcacttattaaagcctaaaaatagactaaatacttaaaatatttaaaaaaaaaaaaaagccaaacaaacaaaaaaatgaacacagaagaacccttaaaccaggtcaagaaagtatccctgatagatgtttggcatggactatccgtatcaaactgagataacaaatcagaatgaagaggagaaagtaattgttttcatttgtctatgctactcatatcagtgttgcaaatwaatacactttacaggatttrgaaggctttcaaaagccagaattgcagtgggatcatccttatagcaatatctyaaaacagctgctactagagagtggatgaagaatgcaaagtatgttttctgattagttttgtgtttatttctgttctatccaaccagctctgatattccatctcagcattaaaagcttcytcaggttgataagggcagaactgagcaattacttatctacggaacatgttttggtcttaaactcttcttttctcctatatttatagtaactcttttcacataattagc

SEQ ID NO: 25811 - DNA, 600 bp, Chicken  19866894241345_3
agggaatcaatcatctattttgttacgtagtaagactgttccattttcctcacttattaaagcctaaaaatagactaaatacttaaaatatttaaaaaaaaaaaaaagccaaacaaacaaaaaaatgaacacagaagaacccttaaaccaggtcaagaaagtatccctgatagatgtttggcatggactatccgtatcaaactgagataacaaatcagaatgaagaggagaaagtaattgttttcatttgtctatgctactcatatcagtgttgcaaatwaatacactttacaggatttrgaaggctttcaaaagccagaattgcagtgggatcatccttatagcaatatctyaaaacagctgctactagagagtggatgaagaatgcaaagtatgttttctgattagttttgtgtttatttctgttctatccaaccagctctgatattccatctcagcattaaaagcttcytcaggttgataagggcagaactgagcaattacttatctacggaacatgttttggtcttaaactcttcttttctcctatatttatagtaactcttttcacataattagcaaatctgttccattttagga

SEQ ID NO: 25812 - DNA, 600 bp, Chicken  19866894241345_4
ttattaaagcctaaaaatagactaaatacttaaaatatttaaaaaaaaaaaaaagccaaacaaacaaaaaaatgaacacagaagaacccttaaaccaggtcaagaaagtatccctgatagatgtttggcatggactatccgtatcaaactgagataacaaatcagaatgaagaggagaaagtaattgttttcatttgtctatgctactcatatcagtgttgcaaatwaatacactttacaggatttrgaaggctttcaaaagccagaattgcagtgggatcatccttatagcaatatctyaaaacagctgctactagagagtggatgaagaatgcaaagtatgttttctgattagttttgtgtttatttctgttctatccaaccagctctgatattccatctcagcattaaaagcttcytcaggttgataagggcagaactgagcaattacttatctacggaacatgttttggtcttaaactcttcttttctcctatatttatagtaactcttttcacataattagcaaatctgttccattttaggagtggattttcatattcagttgcctaaagctgttgcaggggaatacgaacgttc

SEQ ID NO: 25813 - DNA, 600 bp, Chicken  19866894241345_5
gatgtttggcatggactatccgtatcaaactgagataacaaatcagaatgaagaggagaaagtaattgttttcatttgtctatgctactcatatcagtgttgcaaatwaatacactttacaggatttrgaaggctttcaaaagccagaattgcagtgggatcatccttatagcaatatctyaaaacagctgctactagagagtggatgaagaatgcaaagtatgttttctgattagttttgtgtttatttctgttctatccaaccagctctgatattccatctcagcattaaaagcttcytcaggttgataagggcagaactgagcaattacttatctacggaacatgttttggtcttaaactcttcttttctcctatatttatagtaactcttttcacataattagcaaatctgttccattttaggagtggattttcatattcagttgcctaaagctgttgcaggggaatacgaacgttcagttgctttcccaaaacygacgcttgctcaggcagaacgaggacttgactgttcagctattcgtttgcattttcagctcccaggcaagcagagatactatttttacatgtagaaatgag

SEQ ID NO: 25814 - DNA, 600 bp, Chicken  19866894241345_6
gagtggatgaagaatgcaaagtatgttttctgattagttttgtgtttatttctgttctatccaaccagctctgatattccatctcagcattaaaagcttcytcaggttgataagggcagaactgagcaattacttatctacggaacatgttttggtcttaaactcttcttttctcctatatttatagtaactcttttcacataattagcaaatctgttccattttaggagtggattttcatattcagttgcctaaagctgttgcaggggaatacgaacgttcagttgctttcccaaaacygacgcttgctcaggcagaacgaggacttgactgttcagctattcgtttgcattttcagctcccaggcaagcagagatactatttttacatgtagaaatgagtctggtatatttaaacaataaaggaacatgtaagatcagcaccagaaattaaattcttcacttcacattgttgccaaccatacacgtcattgaaaatcgactggcaatgctgcatggcaggcgtttccatttctaacaaaatgctcatatagtagaaaactatctataaaattgctgtgctgtagtatgcattaaagac

SEQ ID NO: 25815 - DNA, 600 bp, Chicken  19866894241350_1
agaaaatacagcaaagcattgtattaatctgagatgtggagtatgtatacaaatacaagtgatataaagtgaatctgaagactacctgaaagaaaaaatccaaggctgcagtatggtttgcaggagaatacacagcttctatggtaactccttcttgtacacattctgtttgctcttgtaggaaaagcacttcattgatatactggtgtatcttctcattggtcatattgacacacagctattgcaaaacaaagaaaacatgaggattagaagtctactggataattaattggtgtaggstttactgcagatttaatattaaatttgatgaaacgccatttcacaacataytatctctctgtagaccactgattaggaagaccaagggaaatttacattttaacagctattagtattaaattgggaataaacagttttctgtttgcatagatcattgtgaattcatcataaraatcatcaaataccacccctaacaaacagtgcaaatttattygaattctactgatggaagtagagcaactttaagtataaactgttatgcttaatattcttctgctgtatatattcagggagagtatg

SEQ ID NO: 25816 - DNA, 600 bp, Chicken  19866894241350_2
aatacaagtgatataaagtgaatctgaagactacctgaaagaaaaaatccaaggctgcagtatggtttgcaggagaatacacagcttctatggtaactccttcttgtacacattctgtttgctcttgtaggaaaagcacttcattgatatactggtgtatcttctcattggtcatattgacacacagctattgcaaaacaaagaaaacatgaggattagaagtctactggataattaattggtgtaggstttactgcagatttaatattaaatttgatgaaacgccatttcacaacataytatctctctgtagaccactgattaggaagaccaagggaaatttacattttaacagctattagtattaaattgggaataaacagttttctgtttgcatagatcattgtgaattcatcataaraatcatcaaataccacccctaacaaacagtgcaaatttattygaattctactgatggaagtagagcaactttaagtataaactgttatgcttaatattcttctgctgtatatattcagggagagtatgcagatgcaacgtgctttctgaaaaaaatatctccacatttgcttaagatcc

SEQ ID NO: 25817 - DNA, 600 bp, Chicken  19866894241350_3
ctcttgtaggaaaagcacttcattgatatactggtgtatcttctcattggtcatattgacacacagctattgcaaaacaaagaaaacatgaggattagaagtctactggataattaattggtgtaggstttactgcagatttaatattaaatttgatgaaacgccatttcacaacataytatctctctgtagaccactgattaggaagaccaagggaaatttacattttaacagctattagtattaaattgggaataaacagttttctgtttgcatagatcattgtgaattcatcataaraatcatcaaataccacccctaacaaacagtgcaaatttattygaattctactgatggaagtagagcaactttaagtataaactgttatgcttaatattcttctgctgtatatattcagggagagtatgcagatgcaacgtgctttctgaaaaaaatatctccacatttgcttaagatcctgattatgtagttattttagtattagcaaatatgttcaaaccctgcttccacatagaagagcactgaaagaactcactgggttttgttcaaatagatcacataaaacacctagaaatacta

SEQ ID NO: 25818 - DNA, 600 bp, Chicken  19866894241350_4
ctcattggtcatattgacacacagctattgcaaaacaaagaaaacatgaggattagaagtctactggataattaattggtgtaggstttactgcagatttaatattaaatttgatgaaacgccatttcacaacataytatctctctgtagaccactgattaggaagaccaagggaaatttacattttaacagctattagtattaaattgggaataaacagttttctgtttgcatagatcattgtgaattcatcataaraatcatcaaataccacccctaacaaacagtgcaaatttattygaattctactgatggaagtagagcaactttaagtataaactgttatgcttaatattcttctgctgtatatattcagggagagtatgcagatgcaacgtgctttctgaaaaaaatatctccacatttgcttaagatcctgattatgtagttattttagtattagcaaatatgttcaaaccctgcttccacatagaagagcactgaaagaactcactgggttttgttcaaatagatcacataaaacacctagaaatactagatgactctctccgttttattgatatgctaagggaaagttgg

SEQ ID NO: 25819 - DNA, 600 bp, Chicken  19866894241350_5
ttacaaacaggtgagggttgaatcagcttattccaggaccttttgtactttattcaaagttcataatcttcaaagaagtttaataactttgttgaataaatcttaaactattttatttatattaaaatggaaattctagtgggaaattctaaaatctcctccaactatcaatacaaaattaagaaaacagaaattcttagagggctgggagacactttatatgaggaatgatgcaaggaacagctgcacaaagtctcttttaacataaaaccagtcacatatttgttttggccataaacyataccttccatgaacaaatggtataaaagcaattccaccagcaagtcatgttaaaaaatatgtaatatttagatcaggcataaatgtamaggcttaaaaaccaggtaagggaaaagaaaatgagaaaagaataatatctrtctgaattttccatcaactcctcatgctagaatagccaccctgcacttgttcwgcaatgaagtaggttactgtcagcaactataagaagaaatagaacatgaaacacattttgtaaccacgtgtctgttactaattgcctwtaccaatgcatgaaagtgc

SEQ ID NO: 25820 - DNA, 600 bp, Chicken  19866894241350_6
tgttgaataaatcttaaactattttatttatattaaaatggaaattctagtgggaaattctaaaatctcctccaactatcaatacaaaattaagaaaacagaaattcttagagggctgggagacactttatatgaggaatgatgcaaggaacagctgcacaaagtctcttttaacataaaaccagtcacatatttgttttggccataaacyataccttccatgaacaaatggtataaaagcaattccaccagcaagtcatgttaaaaaatatgtaatatttagatcaggcataaatgtamaggcttaaaaaccaggtaagggaaaagaaaatgagaaaagaataatatctrtctgaattttccatcaactcctcatgctagaatagccaccctgcacttgttcwgcaatgaagtaggttactgtcagcaactataagaagaaatagaacatgaaacacattttgtaaccacgtgtctgttactaattgcctwtaccaatgcatgaaagtgcagacaaaagacagcttcaaataataccactgtttttgtttttgtttttgtttttaaagcaggatttttgacttattttgttaccaatga

SEQ ID NO: 25821 - DNA, 600 bp, Chicken  19866894241350_7
gggaaattctaaaatctcctccaactatcaatacaaaattaagaaaacagaaattcttagagggctgggagacactttatatgaggaatgatgcaaggaacagctgcacaaagtctcttttaacataaaaccagtcacatatttgttttggccataaacyataccttccatgaacaaatggtataaaagcaattccaccagcaagtcatgttaaaaaatatgtaatatttagatcaggcataaatgtamaggcttaaaaaccaggtaagggaaaagaaaatgagaaaagaataatatctrtctgaattttccatcaactcctcatgctagaatagccaccctgcacttgttcwgcaatgaagtaggttactgtcagcaactataagaagaaatagaacatgaaacacattttgtaaccacgtgtctgttactaattgcctwtaccaatgcatgaaagtgcagacaaaagacagcttcaaataataccactgtttttgtttttgtttttgtttttaaagcaggatttttgacttattttgttaccaatgaaagtataaagttgatttctattatttagttattttatggaaagagacagct

SEQ ID NO: 25822 - DNA, 600 bp, Chicken  19866894241350_8
ttcttagagggctgggagacactttatatgaggaatgatgcaaggaacagctgcacaaagtctcttttaacataaaaccagtcacatatttgttttggccataaacyataccttccatgaacaaatggtataaaagcaattccaccagcaagtcatgttaaaaaatatgtaatatttagatcaggcataaatgtamaggcttaaaaaccaggtaagggaaaagaaaatgagaaaagaataatatctrtctgaattttccatcaactcctcatgctagaatagccaccctgcacttgttcwgcaatgaagtaggttactgtcagcaactataagaagaaatagaacatgaaacacattttgtaaccacgtgtctgttactaattgcctwtaccaatgcatgaaagtgcagacaaaagacagcttcaaataataccactgtttttgtttttgtttttgtttttaaagcaggatttttgacttattttgttaccaatgaaagtataaagttgatttctattatttagttattttatggaaagagacagctttttaaattttgtgtcaggcaaatatacattttgccacttgctttccaaattc

SEQ ID NO: 25823 - DNA, 600 bp, Chicken  19866894241350_9
tttgttttggccataaacyataccttccatgaacaaatggtataaaagcaattccaccagcaagtcatgttaaaaaatatgtaatatttagatcaggcataaatgtamaggcttaaaaaccaggtaagggaaaagaaaatgagaaaagaataatatctrtctgaattttccatcaactcctcatgctagaatagccaccctgcacttgttcwgcaatgaagtaggttactgtcagcaactataagaagaaatagaacatgaaacacattttgtaaccacgtgtctgttactaattgcctwtaccaatgcatgaaagtgcagacaaaagacagcttcaaataataccactgtttttgtttttgtttttgtttttaaagcaggatttttgacttattttgttaccaatgaaagtataaagttgatttctattatttagttattttatggaaagagacagctttttaaattttgtgtcaggcaaatatacattttgccacttgctttccaaattcaaattctagttccaaaatctcttcagaagactcttaacattattttagaaagcatatataacgttacaagcttgtacttcacaggaca

SEQ ID NO: 25824 - DNA, 600 bp, Chicken  19866894241359_1
tgagaagctggggtcacacagtagcttagtgactttcccaaagatgcagagcaacttacaccataattatgtaaacattcaaaccgatcaccagtgtcagctgctactgaaagggccattgcatgctgctggccattcacacctactcttttctagcataagcacaggcagagcagggaagaaaccaacaacacagcagaagaataactattctgttccttaatttcagccagatgcattccttggtccagcgcaactacgtggtgatttgtgccaacaaaatggagcggagagagcccrgatctgcccagtaaggtrcgaactgaatcaacgcaaagtgtaaattcactgcaggatctaggcagttcacctagacagacataaatttgaatgtaacaaggcctcaggacatagaatgaagtcatcccaaagcattagctaaaggcgtcactgtgtatatagtatcggtagccctgatgattaagtctgctggtcaaagcacccacctgtggtacacaagcaggggactctccaggccccagtcaagcgatatgaaaaggctgaagcaccaatttattgccacttatacttgtttcttat

SEQ ID NO: 25825 - DNA, 600 bp, Chicken  19866894241359_2
cagtagcttagtgactttcccaaagatgcagagcaacttacaccataattatgtaaacattcaaaccgatcaccagtgtcagctgctactgaaagggccattgcatgctgctggccattcacacctactcttttctagcataagcacaggcagagcagggaagaaaccaacaacacagcagaagaataactattctgttccttaatttcagccagatgcattccttggtccagcgcaactacgtggtgatttgtgccaacaaaatggagcggagagagcccrgatctgcccagtaaggtrcgaactgaatcaacgcaaagtgtaaattcactgcaggatctaggcagttcacctagacagacataaatttgaatgtaacaaggcctcaggacatagaatgaagtcatcccaaagcattagctaaaggcgtcactgtgtatatagtatcggtagccctgatgattaagtctgctggtcaaagcacccacctgtggtacacaagcaggggactctccaggccccagtcaagcgatatgaaaaggctgaagcaccaatttattgccacttatacttgtttcttataacttacttcatttggtt

SEQ ID NO: 25826 - DNA, 519 bp, Chicken  19866894241359_3
cctgatgattaagtctgctggtcaaagcacccacctgtggtacacaagcaggggactctccaggccccagtcaagcgatatgaaaaggctgaagcaccaatttattgccacttatacttgtttcttataacttacttcatttggttaccaaatctggaacagctcagtggcaagccacctttcttcatccgtacagcatgtcacagccaagagcagcaagtctctgatgtgacaggctgtgactgcagaggaaggccagagtggttgattcctatgaggtccttccctttgtttacagcracaatacagaagctatgtgagttaagtgcacatgtatctggttacaacataagctggccaactgcagggtttagggaagctgagccaacatctgcccctcagacagatgagaaaccaagctgctgagcctccaagagctggccaaaagcccagctgtggcaggcagctaaccaacaggcttcatgtcttgggaaatgctttgggcaagaactcctaaat

SEQ ID NO: 25827 - DNA, 546 bp, Chicken  19866894241363_1
tgatgctgtagctgttctcacctctcaaaatgatcacctcttaaaatacagaagaaactgttgcaatattacaatactaaagggtaaatgtgcctggaattgtgctccatttctcattatacgtagggatctgtctggcatgcatcatagccataatataggatgaaagcttttttttttaggatatgagaaacatccagatctataaaactgtaggcactctgtactacgtcttaaaattactattctagaatacatgaggtccaatggagacagtttgatctcctgcagtccaaattmtttttttttttcccccggtatcttctttttcccatcacatttaaccaattttattaktttacgtcttcccacaaatgaaacgaaacatgtgtgaacaggtatgtttgggagtttttttgtgtgctaatattttagaagttatttgtaagagcacttgctgctaatgcatagcaaaagagaatggggacctatccacaaatgcacttcccagctggattttgctagttgatttcctctgtgtaggaa

SEQ ID NO: 25828 - DNA, 489 bp, Chicken  19866894241363_2
ctgttgcaatattacaatactaaagggtaaatgtgcctggaattgtgctccatttctcattatacgtagggatctgtctggcatgcatcatagccataatataggatgaaagcttttttttttaggatatgagaaacatccagatctataaaactgtaggcactctgtactacgtcttaaaattactattctagaatacatgaggtccaatggagacagtttgatctcctgcagtccaaattmtttttttttttcccccggtatcttctttttcccatcacatttaaccaattttattaktttacgtcttcccacaaatgaaacgaaacatgtgtgaacaggtatgtttgggagtttttttgtgtgctaatattttagaagttatttgtaagagcacttgctgctaatgcatagcaaaagagaatggggacctatccacaaatgcacttcccagctggattttgctagttgatttcctctgtgtaggaa

SEQ ID NO: 25829 - DNA, 599 bp, Chicken  19866894241382_1
  misc_feature (1)..(40): n is any nucleotide
nnnnnnnnnnnnnnnnnnnnnnnnnnnnnnnnnnnnnnnntatgaaaatgccccaggtatgtggagtattttgatgaagatattcccctttctacttataagagccagtgcagcatatctccatactgcaaaatacaaaggtggtaagaccactattctccatccagctgcactggcattcattctgtaattctggtaggacagatgttcttgatggagactggaaataaatctgatactatgcataaaggaatagatgttagctaaagtagtggttaacttatttctcccattcactgwcactttacttcccagtgttttctcctacagaatktgattctgaagagtaaggcagttcttgctctctagaccccttaatcataactactgtgttaatttctaacatctgtctatactgtggagtaacttcactactgctcttgttttccactgcaaatcatgctcaaagcatttgcctttggagaccgtcagtagagggcttcctgtcacacagagacatgtcttggcaaagccaagaaatggatgccttaatgtgtgctcgattttatttatttatttatttattaacataaaggtca

SEQ ID NO: 25830 - DNA, 599 bp, Chicken  19866894241382_2
  misc_feature (1)..(6): n is any nucleotide
nnnnnntatgaaaatgccccaggtatgtggagtattttgatgaagatattcccctttctacttataagagccagtgcagcatatctccatactgcaaaatacaaaggtggtaagaccactattctccatccagctgcactggcattcattctgtaattctggtaggacagatgttcttgatggagactggaaataaatctgatactatgcataaaggaatagatgttagctaaagtagtggttaacttatttctcccattcactgwcactttacttcccagtgttttctcctacagaatktgattctgaagagtaaggcagttcttgctctctagaccccttaatcataactactgtgttaatttctaacatctgtctatactgtggagtaacttcactactgctcttgttttccactgcaaatcatgctcaaagcatttgcctttggagaccgtcagtagagggcttcctgtcacacagagacatgtcttggcaaagccaagaaatggatgccttaatgtgtgctcgattttatttatttatttatttattaacataaaggtcactgagggaagctgccgacaaagaaagaaaggaaa

SEQ ID NO: 25831 - DNA, 600 bp, Chicken  19866894241390_1
agtgggtttttttccgagtcagtttcctagcccatgccgtgcagtttaggttgctcttacagagtagtggccatccacatgatgaatgagaccttattttctatgggcctcggtccttacttcctagacctgctaattcatctgaacctctgttctgccactgattccccaacattttctgtttctcactcctcactggaggtttcatgcccagattcaaaatgggtagaatgcaagaagagccattaataacttctgcagggctcctcattcttgcgaggattgcaggagctgaattgygcaccctttgtatttaagtggaatcaacccatgtctgaatgtgagaaggaaaactggaggaaacactcaggcacagcatggtcacaaccacagtcacaccaccttttgtccactggagactccattgtccctaagagggcatttctgcatggcttcatggtgaagtgagtctacatcaattctgagaaaggctgagctgaaaataatccattcaatgcttttttggggggagtgtagtcttagcagagatgtctatgaggatgctgtgggagatgacagagggactctccctggaggcat

SEQ ID NO: 25832 - DNA, 600 bp, Chicken  19866894241406_1
tgtgcctggaggagcttcaaacctgatagctgctcaggttttgtctctccaatctatacactctttgctgagagagaccttcacatcatcctaaccaaaaagcacttccaagaggcaagactggcatgtaccactcacaaatgccccctgtgcccgtgctttctgctcctgcagcagctcagtgtcaccagtggtactgaagtgcgctatccagtggtgctgttgcctttctgctttgatcctgcttcgctctgacttgaacagacctcttcttgtgtacaggattcatctcatctagaygcagatgtgtgagtctgaatgagtcattctgggctcattttggagttaatgaggaaagagatgctcctgatgagtaattcatctgccctgtctatcctccatccacttcccaagagaggcatctcttgtccttcttggctgccctcctctctctgctaagtacaaaggtggtcactcagacctagatgytgtttcttggctcagtcagagcccccgcctgtacaattagccaaaaatgccccaaacatattcatgacactgagtaaaaagggctaaaaatgcactagctgaattcccaga

SEQ ID NO: 25833 - DNA, 526 bp, Chicken  19866894241406_2
agtggtactgaagtgcgctatccagtggtgctgttgcctttctgctttgatcctgcttcgctctgacttgaacagacctcttcttgtgtacaggattcatctcatctagaygcagatgtgtgagtctgaatgagtcattctgggctcattttggagttaatgaggaaagagatgctcctgatgagtaattcatctgccctgtctatcctccatccacttcccaagagaggcatctcttgtccttcttggctgccctcctctctctgctaagtacaaaggtggtcactcagacctagatgytgtttcttggctcagtcagagcccccgcctgtacaattagccaaaaatgccccaaacatattcatgacactgagtaaaaagggctaaaaatgcactagctgaattcccagaggtccagtttagcagtacactccactccacctaaaagtcaaaagttatcctaaataattccttctggcagcttaatagcaggtatttgactgtaatgcttccttgatgacatttg

SEQ ID NO: 25834 - DNA, 600 bp, Chicken  19866894241420_1
ttttttttttttttcaggaagccatagggccacgagcctactgcccccctgtcacgggcacagatttatctagataactctgtgacaagggcgaacttgtttagttatactcttaaaacaaaatccaagtaattcatgtgctcgtagtaagtaaataaccttggaaacattccgttaattcataaaacatatccattctgaacaccattctttcctccataatgaactgccttacttgaaaaataagtctgaaaacatatgcagaattacgtgacacaggacattgacaattcttcttcyttttttttttttttcttattaattttaaagaaacaaacagacgttgtcacggagttatctagataaatgctcccttctgaggtaatcaatatccagtatgcatggagcccctgggccagtcacaatagggtgtttttgccagtctttaccagtgaggcttatttcggcctccaacacagtcaattcttgagaacccccagtcactccagaaatatggattgattctgtyctttcatgacttgagggcattagagtgcactgtgcacaggtatccaccaatgccttatatttctgtggttc

SEQ ID NO: 25835 - DNA, 600 bp, Chicken  19866894241420_2
ccttacttgaaaaataagtctgaaaacatatgcagaattacgtgacacaggacattgacaattcttcttctttttttttttttttcttattaattttaaagaaacaaacagacgttgtcacggagttatctagataaatgctcccttctgaggtaatcaatatccagtatgcatggagcccctgggccagtcacaatagggtgtttttgccagtctttaccagtgaggcttatttcggcctccaacacagtcaattcttgagaacccccagtcactccagaaatatggattgattctgtyctttcatgacttgagggcattagagtgcactgtgcacaggtatccaccaatgccttatatttctgtggttctgatgtgccaggcccagtaaactctgttatccctctcccccccgacygaggacagggcccctctattcattacctgtggtaactagaacaactacattgatgactggtctgttctgtaattttctcacctgtgctcgcagaacaggagtagcttggtcatgccacttcctcatgtcttctccatggtcatggaggtaacgctacaaggcaatacgcgatgcagttctac

SEQ ID NO: 25836 - DNA, 600 bp, Chicken  19866894241420_3
cacggagttatctagataaatgctcccttctgaggtaatcaatatccagtatgcatggagcccctgggccagtcacaatagggtgtttttgccagtctttaccagtgaggcttatttcggcctccaacacagtcaattcttgagaacccccagtcactccagaaatatggattgattctgtyctttcatgacttgagggcattagagtgcactgtgcacaggtatccaccaatgccttatatttctgtggttctgatgtgccaggcccagtaaactctgttatccctctcccccccgacygaggacagggcccctctattcattacctgtggtaactagaacaactacattgatgactggtctgttctgtaattttctcacctgtgctcgcagaacaggagtagcttggtcatgccacttcctcatgtcttctccatggtcatggaggtaacgctacaaggcaatacgcgatgcagttctactattgtttctcacttgagcaggaaagcatttgccttcaatagctgagatttttgatgatacaggtgaggagggggatccatcctctttaattaattgggttttcattattttgatcag

SEQ ID NO: 25837 - DNA, 577 bp, Chicken  19866894241436_1
attttccaacattaatgaaaatgtcttttctgcaaatgattccagtattaaagcagttaatattctgtataactactgagaaacttgctgaagaagtactctgcagagaaaaaataggcacttttaagcatactaatataactacgtatattgttacacagataaattagcagacacttcagcatgttatttatgtgaagtataactcaatatgtaagatacaccaaagcttaaaaaaatgcgttggatgcggtatatggcacagataaaaaacaagtagaagggaagattttaaacgcygttttacagaggcttcataaaatgtctcaccttaactagataagccttacaagttccaacaaagtcatatgtaagtccatcgaatgtcctgtaatgccgatccccatatgcagtacacatggatgggcacggatggaaggtgcattgaaaagatccatgctggcaaatgctgaaaaacgtatgaccaacagtggtaatatcaactgtaaccatggacaattacagctattgcactgagaagcaaaactactgaggacagaagcattttaaatttcat

SEQ ID NO: 25838 - DNA, 599 bp, Chicken  19866894241442_1
  misc_feature (1)..(74): n is any nucleotide
nnnnnnnnnnnnnnnnnnnnnnnnnnnnnnnnnnnnnnnnnnnnnnnnnnnnnnnnnnnnnnnnnnnnnnnnnntgatgagatgagaagcaggcagtcctctgggctggagtgaatcactgaaacagccacctcgagggtgggatgcaactgtgtggtgacagcacctaatctgttcaggcagggatgagggtggctatacccagcctaaaacagaagagagaagagaaacaaggcaatgagcaccaaaattcctccctgccactggtttcctaaaatcacaggggaggaatgagatccmgatctctcattattagcccattagcaatgggccctgatgcactgtgaccctctcaagtgactccaatgyctaaggcaccttagggacttacatccactcatagaaatatccccactactggccatttccaccctcctcactggagtcratgtggcaggggttgaggytgctgtagggacagagctaggtgctgtgaagacaaagagcctgttggactttacacagctccacgtgctgcaacttgtatcctgtcctcctcccacagcagagaaaacagaagggctgcgagaggtgtcctg

SEQ ID NO: 25839 - DNA, 599 bp, Chicken  19866894241442_2
  misc_feature (1)..(5): n is any nucleotide
nnnnntgatgagatgagaagcaggcagtcctctgggctggagtgaatcactgaaacagccacctcgagggtgggatgcaactgtgtggtgacagcacctaatctgttcaggcagggatgagggtggctatacccagcctaaaacagaagagagaagagaaacaaggcaatgagcaccaaaattcctccctgccactggtttcctaaaatcacaggggaggaatgagatccmgatctctcattattagcccattagcaatgggccctgatgcactgtgaccctctcaagtgactccaatgyctaaggcaccttagggacttacatccactcatagaaatatccccactactggccatttccaccctcctcactggagtcratgtggcaggggttgaggytgctgtagggacagagctaggtgctgtgaagacaaagagcctgttggactttacacagctccacgtgctgcaacttgtatcctgtcctcctcccacagcagagaaaacagaagggctgcgagaggtgtcctggcttggcttcccctcactgctgtcctcctcacgcccaggacagagttagccacacgctgacctcagtgt

SEQ ID NO: 25840 - DNA, 600 bp, Chicken  19866894241442_3
actgtgtggtgacagcacctaatctgttcaggcagggatgagggtggctatacccagcctaaaacagaagagagaagagaaacaaggcaatgagcaccaaaattcctccctgccactggtttcctaaaatcacaggggaggaatgagatccmgatctctcattattagcccattagcaatgggccctgatgcactgtgaccctctcaagtgactccaatgyctaaggcaccttagggacttacatccactcatagaaatatccccactactggccatttccaccctcctcactggagtcratgtggcaggggttgaggytgctgtagggacagagctaggtgctgtgaagacaaagagcctgttggactttacacagctccacgtgctgcaacttgtatcctgtcctcctcccacagcagagaaaacagaagggctgcgagaggtgtcctggcttggcttcccctcactgctgtcctcctcacgcccaggacagagttagccacacgctgacctcagtgtgccaagatgtacaaaagctgctgccttttcctgctggtctgttggaacgtgcaacggttctcccctccctgctctccctc

SEQ ID NO: 25841 - DNA, 600 bp, Chicken  19866894241442_4
taatctgttcaggcagggatgagggtggctatacccagcctaaaacagaagagagaagagaaacaaggcaatgagcaccaaaattcctccctgccactggtttcctaaaatcacaggggaggaatgagatccmgatctctcattattagcccattagcaatgggccctgatgcactgtgaccctctcaagtgactccaatgyctaaggcaccttagggacttacatccactcatagaaatatccccactactggccatttccaccctcctcactggagtcratgtggcaggggttgaggytgctgtagggacagagctaggtgctgtgaagacaaagagcctgttggactttacacagctccacgtgctgcaacttgtatcctgtcctcctcccacagcagagaaaacagaagggctgcgagaggtgtcctggcttggcttcccctcactgctgtcctcctcacgcccaggacagagttagccacacgctgacctcagtgtgccaagatgtacaaaagctgctgccttttcctgctggtctgttggaacgtgcaacggttctcccctccctgctctccctcgctgccttttgtagtcgtc

SEQ ID NO: 25842 - DNA, 600 bp, Chicken  19866894241444_1
gagttgcatggtttaccttatcctgccgtatggttaaaagcttttttcatgattgctaagctaaatgaatttagttttccattccttgaatctcatactgcagtatgagaagcacagaggttatttctcactccatgagagtccaaagcattttaaccagattctgtgaaggtagaaggagtctcagcagtgtgtcctctcccacctaaaatggtgcagagcatgtgacataggtgatgctaacaatgctacattttccttgtgtccttctgtcagactctgttctgtttctggtttcayagattagaacaagtgaaactttacttagaaactgaatgcaacttgtgtatgtcacgcgaaacccctgccagatgcctccattctcatacaacacagttggctggcatgtctagcataaattcagtcctgctgctgctgcaaagtttctgcagtacagaccacagttgtgcacagacctggtaaccaaactgttcagtacaaccaacttctcactcttttcttctgtgctccctcacaagctattttgtttatgggctctcacttctggtggtgtccagtcattaatcagcctgtgarcaa

SEQ ID NO: 25843 - DNA, 600 bp, Chicken  19866894241444_2
cayagattagaacaagtgaaactttacttagaaactgaatgcaacttgtgtatgtcacgcgaaacccctgccagatgcctccattctcatacaacacagttggctggcatgtctagcataaattcagtcctgctgctgctgcaaagtttctgcagtacagaccacagttgtgcacagacctggtaaccaaactgttcagtacaaccaacttctcactcttttcttctgtgctccctcacaagctattttgtttatgggctctcacttctggtggtgtccagtcattaatcagcctgtgarcaatgcatttgtacccttagtccctgaactacattagtatagaagggtagggcactgcctgagcttaacagttgcagtgttcacctttaaatttggaaatacttggattaaactcttggattagaactagctgtatgaaactagcaatatttgtataaacatctgtttatataaaaatgagaacaacagaaatattttcattatttctaaaaaagaaaaagatgatcagatttggaccatattcacactgtatttaactccattaaaaaagaaatggatttatatcaacgagtttagttg

SEQ ID NO: 25844 - DNA, 600 bp, Chicken  19866894241451_1
cttccaaattaccacaccaaacagagcactgcgttagtgacaaaggtctgatcacagagtcatagaatggcctgggttgaaaaggaccacaatgctcattgagttccaaccccctgctatgtgcagggtcgccaaccagcagcccaggctgcccagagccacatcaccaagttcccctcttctgccagctgtgcaataagcataccccaccactgtactgatagtacaacttacaggaactcatttcttcacttctgtttggtgactcttctatcgttcagtataacaacaacaacaacraagtaaggcctctacaatttcttaaaaaataataataaaaaagagcagtagtctttatttgccacctgggacatttctccaaatgaaacacagttacgtcagttggaggcagtagtctatgtacacatttttcactgcttttcttcccagattcccaatgcttaagtggaacgtgttgctttacagaaactagaatcatactgcaggatacggacaacaccasgaaagccttgctatcaatagcagttccatcagcagcattcagactgtatatgtcccccctcattgcccgttctagtt

SEQ ID NO: 25845 - DNA, 439 bp, Chicken  19866894241451_2
gtacaacttacaggaactcatttcttcacttctgtttggtgactcttctatcgttcagtataacaacaacaacaacraagtaaggcctctacaatttcttaaaaaataataataaaaaagagcagtagtctttatttgccacctgggacatttctccaaatgaaacacagttacgtcagttggaggcagtagtctatgtacacatttttcactgcttttcttcccagattcccaatgcttaagtggaacgtgttgctttacagaaactagaatcatactgcaggatacggacaacaccasgaaagccttgctatcaatagcagttccatcagcagcattcagactgtatatgtcccccctcattgcccgttctagttggaccagatgacccacaggtcccttccagctcacatgagcctgattctatcagtattactgg

SEQ ID NO: 25846 - DNA, 600 bp, Chicken  19866894241456_1
ctttgcttatttcagaatcccaggatctggcccctccacgagtcccaaagccaacacttaatgaaaacagacaaaggacaagagaaaaagaacgatatacacagagcacagcattgtttctgaaaggaaatgttttttcagtttcccatgaggcatcagtagctcttcaaacagtgcccaaacctcaagtatgccagcaattcaacattcaaatgagagctcattacctcaacccaccgcttacaattttagtcactttcgtttttcagaacccaaatcagagctccgggaattgctgcraatagctgacaggcacagtgcttccaggagcatggcagctgagcattcatacaggtcaggaggtaggacaccctgccattccccatgcaggatttcttcycagcagccagrggccctgttgcagccagcctttgctggctccttctcktctcccaccaaagcagaagacagcactgccattttagactgatttagcagacttcaaacagaatttgtcctggttccaaaaggaatacaaatggctaagaaaggaggagacacagttaagtgctttgttatccactacactacacctttgtt

SEQ ID NO: 25847 - DNA, 515 bp, Chicken  19866894241456_2
acagagcacagcattgtttctgaaaggaaatgttttttcagtttcccatgaggcatcagtagctcttcaaacagtgcccaaacctcaagtatgccagcaattcaacattcaaatgagagctcattacctcaacccaccgcttacaattttagtcactttcgtttttcagaacccaaatcagagctccgggaattgctgcraatagctgacaggcacagtgcttccaggagcatggcagctgagcattcatacaggtcaggaggtaggacaccctgccattccccatgcaggatttcttcycagcagccagrggccctgttgcagccagcctttgctggctccttctcktctcccaccaaagcagaagacagcactgccattttagactgatttagcagacttcaaacagaatttgtcctggttccaaaaggaatacaaatggctaagaaaggaggagacacagttaagtgctttgttatccactacactacacctttgtttcctgggagatttgg

SEQ ID NO: 25848 - DNA, 504 bp, Chicken  19866894241456_3
cattgtttctgaaaggaaatgttttttcagtttcccatgaggcatcagtagctcttcaaacagtgcccaaacctcaagtatgccagcaattcaacattcaaatgagagctcattacctcaacccaccgcttacaattttagtcactttcgtttttcagaacccaaatcagagctccgggaattgctgcraatagctgacaggcacagtgcttccaggagcatggcagctgagcattcatacaggtcaggaggtaggacaccctgccattccccatgcaggatttcttcycagcagccagrggccctgttgcagccagcctttgctggctccttctcktctcccaccaaagcagaagacagcactgccattttagactgatttagcagacttcaaacagaatttgtcctggttccaaaaggaatacaaatggctaagaaaggaggagacacagttaagtgctttgttatccactacactacacctttgtttcctgggagatttgg

SEQ ID NO: 25849 - DNA, 467 bp, Chicken  19866894241456_4
tgaggcatcagtagctcttcaaacagtgcccaaacctcaagtatgccagcaattcaacattcaaatgagagctcattacctcaacccaccgcttacaattttagtcactttcgtttttcagaacccaaatcagagctccgggaattgctgcraatagctgacaggcacagtgcttccaggagcatggcagctgagcattcatacaggtcaggaggtaggacaccctgccattccccatgcaggatttcttcycagcagccagrggccctgttgcagccagcctttgctggctccttctcktctcccaccaaagcagaagacagcactgccattttagactgatttagcagacttcaaacagaatttgtcctggttccaaaaggaatacaaatggctaagaaaggaggagacacagttaagtgctttgttatccactacactacacctttgtttcctgggagatttgg

SEQ ID NO: 25850 - DNA, 600 bp, Chicken  19866894241459_1
aaccctgtcctggccatccacactgcatgccttacatccaacacacatctcaatacctcagtaattccagtttcttgccttcctttatgaattcttttcctccacctcatggctgcgagcgctagcttcttctggtttacattgattccaggcaaaacattaagtatggaatcacttccccactcataatcttcttcctagaataatcataggcatgaattacaaagtcttgtcaactttattagcagaaagattaataataaaaaaccatccagaacaaatcactacacagtctagctytgtgcatcaattttatctgagcaaagcagctcttgataaaattagagatatgtctcttaaatgcacataattatcatgtccatgcataaaaactccccgcagttttaaatcaactcttgtttcctgtaacattaatgcacattacatacaaccacgctactcctgtggacatcagcagtggaattcaacagtagtgcaaagccactgtggatgcttgggaagagagtgctcagaacgcacaggcttatggagtgggtatctttaaaactttgctgatgtayagaaaagattaagatttaa

SEQ ID NO: 25851 - DNA, 600 bp, Chicken  19866894241459_2
tcactacacagtctagctytgtgcatcaattttatctgagcaaagcagctcttgataaaattagagatatgtctcttaaatgcacataattatcatgtccatgcataaaaactccccgcagttttaaatcaactcttgtttcctgtaacattaatgcacattacatacaaccacgctactcctgtggacatcagcagtggaattcaacagtagtgcaaagccactgtggatgcttgggaagagagtgctcagaacgcacaggcttatggagtgggtatctttaaaactttgctgatgtayagaaaagattaagatttaattcctggtgtacaagatccacaacctcaagctgatacaccagcgaaaaattaacacgagatattcaagcttcaatttccagaaacaccaataaggtataggtatttcatttgtcctgtgctaggacaagtttggtcaggaatctgttttcagagacaagattgccaaaagtttctgagatgctggagcccctaaaaatcccaaggttcagccactccagactactgtttgcttttgagaagtcattttccagtaaaataaagagacattaagagaaatgca

SEQ ID NO: 25852 - DNA, 600 bp, Chicken  19866894241462_1
tcccagacccagtctctcatcctgttctacctctcaaagcatgaacacattcatttaagatgagtctcagaacattattctttgtgaatgtgctgcactttgtgtagcagatagtcagcttcactgtagtaataatgagttccaaggctttttcacaccacaggtacccaaggacacattgtccctcacctcttgtactacagtcctaaagaaatatttgaaatggctgtatctgtaaaatttaatgatatgatatagttccagaacattctgagactcattttgtaataaaaagacaargagtcaaaatgctacatttacttcaaagtttaggaagcgtgagctgataatttagttttctaaatcaaacactctcttggtgtgcaaaaatataagtattttttcagaaaaacaaacaaacaaaaaaacaaatgaagttgtgttttgtacattcagctctgaaatattaacaaaaaattgttacgtcaaccctgtcattccaaatttgaactaggacagtttgcttatcttcagcagatgagtactctaaaaagaaacactggttcaccaaactcggaccatgacaagacggtttgaggt

SEQ ID NO: 25853 - DNA, 599 bp, Chicken  19866894241468_1
  misc_feature (1)..(191): n is any nucleotide
nnnnnnnnnnnnnnnnnnnnnnnnnnnnnnnnnnnnnnnnnnnnnnnnnnnnnnnnnnnnnnnnnnnnnnnnnnnnnnnnnnnnnnnnnnnnnnnnnnnnnnnnnnnnnnnnnnnnnnnnnnnnnnnnnnnnnnnnnnnnnnnnnnnnnnnnnnnnnnnnnnnnnnnnnnnnnnnnnnnnnnnnnnnnnnntgactatcccagctctgggctgatggatgctaaacaaatttatagccgtttttgtctctatagatacatattttccaagaaactaggggtttttaagagaactattccrttttatctgcgtaggtttctgtcaaaccaggtacttctccctctctattaccatgtcccttaactgtcccatgtttgtcctttcactaggttatattttaccaccagaagatttattttaccaccagaatttatattttactgcagaaagattaaaaaatatatakagagagagaactcattatcagaaggaatggtcacccaaaagtacagaaaggatatttatcatccctgtaagctgtttcaattaggtcatgcaaaataagttctggtcaacaggatcagataatcaaggggtat

SEQ ID NO: 25854 - DNA, 599 bp, Chicken  19866894241468_2
  misc_feature (1)..(25): n is any nucleotide
nnnnnnnnnnnnnnnnnnnnnnnnntgactatcccagctctgggctgatggatgctaaacaaatttatagccgtttttgtctctatagatacatattttccaagaaactaggggtttttaagagaactattccrttttatctgcgtaggtttctgtcaaaccaggtacttctccctctctattaccatgtcccttaactgtcccatgtttgtcctttcactaggttatattttaccaccagaagatttattttaccaccagaatttatattttactgcagaaagattaaaaaatatatakagagagagaactcattatcagaaggaatggtcacccaaaagtacagaaaggatatttatcatccctgtaagctgtttcaattaggtcatgcaaaataagttctggtcaacaggatcagataatcaaggggtatgaggtcacagagaggtgtggggtaatgatgatttgagagctttgacaccttgcctgaggtttggccagagccagggagagctcgtggtctgctctacatcaactccataaagctggtgagggagatcacaagatcaatcatgcccaaaatagaattgtagaaaata

SEQ ID NO: 25855 - DNA, 600 bp, Chicken  19866894241473_1
aggttggcattcagaagaaacccataagacaaaggaaaaaagctcagctggaccccccgtactgagtcgtctgcgtgatatttggcccagctgcacgaagggggcagtctgctcgtagccaaaccccgcgctgctctgcaaccacatctgctgaaatagctttgagcgtcggctggcaatgcctgcacttcgtcaaagaaaacatttaaggaagttcccttgcggaagtgctctgaacagcgcgctttgcaagcggagctccgaggagcagatccctcccggggggacggagcgtgtttktgtgtgtgtgtctgcatgtgtgcccacgcgggcatctccgctggtcgcacgctttccttccaggtgacctcgtgcctgtttggagggctgttgatttacaatgcagattcrtctgtcctcgcctgcctgttgttgcctctcctgaatttgactgggatataagaggctgtttgctctctgatgccaacggtggtgatggcagagagccctgccacgtgagaggcagagatagaggagaggggacgaaggaggagtaaactgtgcaactcctattgcttctggtcgtctggggagcgcatc

SEQ ID NO: 25856 - DNA, 600 bp, Chicken  19866894241473_2; identical to SEQ ID NO: 25855

SEQ ID NO: 25857 - DNA, 600 bp, Chicken  19866894241473_3
agaagaaacccataagacaaaggaaaaaagctcagctggaccccccgtactgagtcgtctgcgtgatatttggcccagctgcacgaagggggcagtctgctcgtagccaaaccccgcgctgctctgcaaccacatctgctgaaatagctttgagcgtcggctggcaatgcctgcacttcgtcaaagaaaacatttaaggaagttcccttgcggaagtgctctgaacagcgcgctttgcaagcggagctccgaggagcagatccctcccggggggacggagcgtgtttttgtgtgtgtgtktgcatgtgtgcccacgcgggcatctccgctggtcgcacgctttccttccaggtgacctcgtgcctgtttggagggctgttgatttacaatgcagattcrtctgtcctcgcctgcctgttgttgcctctcctgaatttgactgggatataagaggctgtttgctctctgatgccaacggtggtgatggcagagagccctgccacgtgagaggcagagatagaggagaggggacgaaggaggagtaaactgtgcaactcctattgcttctggtcgtctggggagcgcatctacgggacaatg

SEQ ID NO: 25858 - DNA, 600 bp, Chicken  19866894241473_4; identical to SEQ ID NO: 25857

SEQ ID NO: 25859 - DNA, 600 bp, Chicken  19866894241473_5
ctcgtagccaaaccccgcgctgctctgcaaccacatctgctgaaatagctttgagcgtcggctggcaatgcctgcacttcgtcaaagaaaacatttaaggaagttcccttgcggaagtgctctgaacagcgcgctttgcaagcggagctccgaggagcagatccctcccggggggacggagcgtgtttttgtgtgtgtgtctgcatgtgtgcccacgcgggcatctccgctggtcgcacgctttccttccaggtgacctcgtgcctgtttggagggctgttgatttacaatgcagattcrtctgtcctcgcctgcctgttgttgcctctcctgaatttgactgggatataagaggctgtttgctctctgatgccaacggtggtgatggcagagagccctgccacgtgagaggcagagatagaggagaggggacgaaggaggagtaaactgtgcaactcctattgcttctggtcgtctggggagcgcatctacgggacaatgtcagtgcttacccctgtcctgcagcccccagaggtgaaggagtatctgtccaagggcgaacgcttcatcaaatgggacgatgtgagtaccgagacttct

SEQ ID NO: 25860 - DNA, 599 bp, Chicken  19866894241477_1
  misc_feature (1)..(26): n is any nucleotide
nnnnnnnnnnnnnnnnnnnnnnnnnntggggtcttttggactctctgcagttccttggttttctctaagccaacagctttgtgagttttcacctgtaaagatgcatcctcgctgctcacttgtgcttaaagattatcgacacaatcctcgtgaaagcaattaaaatccagataacaacagttaattaaaaattaatctctactaattcttacagtttcctaacctacgtgagctaccatttcaactacttgggaagggctgtggggatattcctgatttgtactactaacaaattgactstgttccgttactacaagaatcctagtggattaagaaatttcttctactttatattaacaaaatataaaaaaagattcagtgttttaaatattctatattaactaatgatttgaccatattacctgttacaggaccaggttttatattagttttaaattatcagtacaattcacataacttgcttctcccatgttgtcattgcttcagtacttttcttataatgggttaatwtttgaaagtgtgatgtttcctttatttaatctgagtaaaaatcacctaaatcatgatgcttccctttc

SEQ ID NO: 25861 - DNA, 600 bp, Chicken  19866894241477_2
gctaccatttcaactacttgggaagggctgtggggatattcctgatttgtactactaacaaattgactstgttccgttactacaagaatcctagtggattaagaaatttcttctactttatattaacaaaatataaaaaaagattcagtgttttaaatattctatattaactaatgatttgaccatattacctgttacaggaccaggttttatattagttttaaattatcagtacaattcacataacttgcttctcccatgttgtcattgcttcagtacttttcttataatgggttaatwtttgaaagtgtgatgtttcctttatttaatctgagtaaaaatcacctaaatcatgatgcttccctttcatctttrccttctacatatgttcttttgacactccagagtttctcactgtgtgagaatttaactgaagggtaacacggccaaaaatgtaaagctgcattagcctgacagtgtagttgatttggagaaaagcctatttacataaactgtttatttacagatgyttatatttttgagaactacacaatgttgcagyacagaaaatagatacctggaaggggaaaggatcttggt

SEQ ID NO: 25862 - DNA, 600 bp, Chicken  19866894241477_3
gttactacaagaatcctagtggattaagaaatttcttctactttatattaacaaaatataaaaaaagattcagtgttttaaatattctatattaactaatgatttgaccatattacctgttacaggaccaggttttatattagttttaaattatcagtacaattcacataacttgcttctcccatgttgtcattgcttcagtacttttcttataatgggttaatwtttgaaagtgtgatgtttcctttatttaatctgagtaaaaatcacctaaatcatgatgcttccctttcatctttrccttctacatatgttcttttgacactccagagtttctcactgtgtgagaatttaactgaagggtaacacggccaaaaatgtaaagctgcattagcctgacagtgtagttgatttggagaaaagcctatttacataaactgtttatttacagatgyttatatttttgagaactacacaatgttgcagyacagaaaatagatacctggaaggggaaaggatcttggtcacttagttatatctttgacaaagaaaattgtgccagaaaatagatcctgaattgatgcaagttaaagatctgat

SEQ ID NO: 25863 - DNA, 454 bp, Chicken  19866894241477_4
agtacaattcacataacttgcttctcccatgttgtcattgcttcagtacttttcttataatgggttaatwtttgaaagtgtgatgtttcctttatttaatctgagtaaaaatcacctaaatcatgatgcttccctttcatctttrccttctacatatgttcttttgacactccagagtttctcactgtgtgagaatttaactgaagggtaacacggccaaaaatgtaaagctgcattagcctgacagtgtagttgatttggagaaaagcctatttacataaactgtttatttacagatgyttatatttttgagaactacacaatgttgcagyacagaaaatagatacctggaaggggaaaggatcttggtcacttagttatatctttgacaaagaaaattgtgccagaaaatagatcctgaattgatgcaagttaaagatctgataagttagtt

SEQ ID NO: 25864 - DNA, 422 bp, Chicken  19866894241477_5
tgtcattgcttcagtacttttcttataatgggttaatwtttgaaagtgtgatgtttcctttatttaatctgagtaaaaatcacctaaatcatgatgcttccctttcatctttrccttctacatatgttcttttgacactccagagtttctcactgtgtgagaatttaactgaagggtaacacggccaaaaatgtaaagctgcattagcctgacagtgtagttgatttggagaaaagcctatttacataaactgtttatttacagatgyttatatttttgagaactacacaatgttgcagyacagaaaatagatacctggaaggggaaaggatcttggtcacttagttatatctttgacaaagaaaattgtgccagaaaatagatcctgaattgatgcaagttaaagatctgataagttagtt

SEQ ID NO: 25865 - DNA, 600 bp, Chicken  19866894241487_1
cacaaatgcataggctgggctgctttgcagtgacgtgatttggccaagtacagagttagaaggaaaaaacttaaacttttaacttaagccctgaccatgcaacatcatggtaagcacatgcgctggctggtgagattggccaacattagcaagtattttaaatacagaaaatacaattttctcctgcagtactgctgtctcctaagctgatttttcatactgctcttgcaagctttgctggcttttactgtgctgtggggtgggaagcttaaagcacaaagacttccggcactgtggatragctttttggctgctgccatttgcagaagaaagtgattttattaatttatcatggttgtggggttttttgggggtgatgaatgctagtaggatgctagtagtgtgatttccctccttccacagctttcctcccagataagcacacttaggtgcccagcctcgttccacccacatctctccatatgttcacccagttatcatgggactgtgcccaaacacagccattgaattgaagttttcaaagaagtgagagttcagtatctgaaagcaaaaggtgataatcaagaacacgctgaaaat

SEQ ID NO: 25866 - DNA, 600 bp, Chicken  19866894241493_1
tcttgccatcaagatgtcttctttgctgggcaacccctcacgtccagtctccaaaagactacagttattggtctctcagaatgttttttgatcacataccgaagctgggagacctttttgctcattggtgaattttgtaacctaattagtatgactcacagaactagacatattgcatttttgaccatgccttgtttcaggttgttgtgctgagtttgaacagaatagtgcaatcctatcccattagcatgaactgaatgacactatgccttgagcaagcgcacttggtaacttccattwggtccttttgttctggattgctaagtcacctcccactgccaataaaggtgagcaagatgtctcgccacatccatatctcttctttatttcttagcacatcatctttttctttgtgttataatacatccatgaaaataaggcctggattagaagcctattatcagcaactttacatcttctttctgttaggccttattgatccatgtttttatttctggttctacaaaatagccaccactagcttcgcaggtaattcatctcaggattctttcagggaattcataatactatgaaaaaagc

SEQ ID NO: 25867 - DNA, 600 bp, Chicken  19866894241493_2
cacatcatctttttctttgtgttataatacatccatgaaaataaggcctggattagaagcctattatcagcaactttacatcttctttctgttaggccttattgatccatgtttttatttctggttctacaaaatagccaccactagcttcgcaggtaattcatctcaggattctttcagggaattcataatactatgaaaaaagccaatgttataaacaatattgttgatgttattaattttagcaattttaataataatcattttagtcataaactgagaacaatatgaaaacatatratgtatgacatgcataatgacagaaggatgattttacactgttgctgacatttgtgatgaatttagcatgatccttgaatctaagttttttgtttgaactttttgactgcttttcctaattcatcaaggatttagagaacaatcagctgttttagcaggacagactgttaatgatctaacagatgatacatatgtggagtcatgaaggttaacatagaaatccctgatctgaatcagtcagaacagatttgcaggaggatgatccatatgtttggtgaaagccctggctacagaattttt

SEQ ID NO: 25868 - DNA, 600 bp, Chicken  19866894241500_1
gagaaattttattgcttacagtatgttcttgtaaaaaagtttggaaatttgttctcaaatgtgtggaggtaatactaggaaaatgcttctgatatgaagtagcttcttcccaatgtatcttcatgtatttttattcttcccatacttctccagagaaatttcatgagaaccaggtgagtccagctgagtgtaaaaggaatgtttgtgtctgagtataaactaagctcgtgtctctcacagcagaagcaggtacccttcttttccaattttgaacggctacaggactgcttgttttctttyaaaggtgcctcttggatggtttttgttaggcaaaagcgtaagctggtgttatgttgtgggaggagcgtaagacaaggaagaaacagaaaacatttttcacaacccctggaaagctttcaaaaagaacgaagtattaattcactaggggaaggtttgaagaaagtgcacacagctgctatcaagtaaattgtgctgggctgatcggatgacaaaaatgttggaatacacttcagggactgtaattgcggtgccaaaggaaatctggtagaagttccataagcaagcaggagtttttgatgg

SEQ ID NO: 25869 - DNA, 600 bp, Chicken  19866894241507_1
ccttctccttctcctcaaacacaacggaagctttccctccagtttcagagaagctgctctgaaaataaagaaccagataagctttctccagtttttacccaagccaggccattgccatctagtcacatacacaggccaaagccatcacgacccactccaaatgatatgaacaagcagggagaaacttcaaagaacagcatgacacttgacctgaatgatacttcacattgtgatggcaatggtagtaacagtagtgcagttataccaagtgaagagacagtgttcacaccagtagatgaraaatgtcggctggatgttaatgcagagctcaactccagtattgaggacctccttgaggcctccatgccaacaagtgatggcacagttacwttcaagtccgaagttgcagttctktctcccgagagggctgaaaatgatgatacttacaaagatgatgtaaatcataatcaaaaatgcaaggaaaagatggaagctgaagaagaggaagctttagctattgctatggcaatgtctgcatctcaagatgccctgccaataattccccaactacaggtcgaaaatggtgaagatatcataatt

SEQ ID NO: 25870 - DNA, 600 bp, Chicken  19866894241507_2
gtttttacccaagccaggccattgccatctagtcacatacacaggccaaagccatcacgacccactccaaatgatatgaacaagcagggagaaacttcaaagaacagcatgacacttgacctgaatgatacttcacattgtgatggcaatggtagtaacagtagtgcagttataccaagtgaagagacagtgttcacaccagtagatgaraaatgtcggctggatgttaatgcagagctcaactccagtattgaggacctccttgaggcctccatgccaacaagtgatggcacagttacwttcaagtccgaagttgcagttctktctcccgagagggctgaaaatgatgatacttacaaagatgatgtaaatcataatcaaaaatgcaaggaaaagatggaagctgaagaagaggaagctttagctattgctatggcaatgtctgcatctcaagatgccctgccaataattccccaactacaggtcgaaaatggtgaagatatcataattattcagcaagatgtaagtatacacatgggaatttcagaataaacttctaaattgaggttccataatttaagatggtgctggtgtgttttc

SEQ ID NO: 25871 - DNA, 600 bp, Chicken  19866894241507_3
ccatctagtcacatacacaggccaaagccatcacgacccactccaaatgatatgaacaagcagggagaaacttcaaagaacagcatgacacttgacctgaatgatacttcacattgtgatggcaatggtagtaacagtagtgcagttataccaagtgaagagacagtgttcacaccagtagatgaraaatgtcggctggatgttaatgcagagctcaactccagtattgaggacctccttgaggcctccatgccaacaagtgatggcacagttacwttcaagtccgaagttgcagttctktctcccgagagggctgaaaatgatgatacttacaaagatgatgtaaatcataatcaaaaatgcaaggaaaagatggaagctgaagaagaggaagctttagctattgctatggcaatgtctgcatctcaagatgccctgccaataattccccaactacaggtcgaaaatggtgaagatatcataattattcagcaagatgtaagtatacacatgggaatttcagaataaacttctaaattgaggttccataatttaagatggtgctggtgtgttttcagagttacacaaacacgacttgac

SEQ ID NO: 25872 - DNA, 600 bp, Chicken  19866894241509_1
atcctgcattttgccaagttacagtattcttaaatttatactccgaagtcaggaaaacagagaaacagctactcttttttttcattctgctatttgaccagaagctcctacacttacagatggtcaataaatatattctagtaagcaaacttcctgaaaggtgtcaattctgtacatttattttagtccatgatacagctttctggtaaagtaattgctctcactcattctcatataatttgtttgacagtgcttttcatacacaatcgtcttctacaaagtaccaaaagttttcttgcrttaattatgcatattctcatttcattcttatctgaaccagtttctacactaatcactaaaccccctattgtaaaaggtaacaaaaggtttaaagtaacacaacaggtctgcaacccagcatcatcccacctgaaatcatatatttttaatgtgcactgctacatactgacccagaaaataactgctgtgcagaaacattacccatatttgcaacattcttgttaactacctcaacgggcccaacttgagagtctatggaaatctgtagttctctaatgtcttttaatgcagacatgggct

SEQ ID NO: 25873 - DNA, 600 bp, Chicken  19866894241514_1
tcatctgttctctaaccatgaaacaatggttcctgcaatcattgaaatgagccataactattattattctttttaggactaaggatgatagcatagagccactctcagcattacgctatgaattaaataaaaatggcaccctagaaatcaaagaaacaaagaaggaagattcgggatcatacgcttgctgggctgcaaattctgttggaaaaagagcaatcacagcaaatctggatataagaggtaatacctcatttatcttccttacttaatacatgtctgcagtgaacaccatgtgcrttacagcaggatgagtgagggggctttgattgtaaagttcagatattagagcagcagtatgtgctgctccagttctgttttgaagtatttcattgtttggttgggcatgtttcctgagggtcgtgatgaggktggatattttctgttgaggacacagattcaggatggtgagttgtatacaaagttatttaggaattgggccttgccaataaaaaaaaacttaaatgcttggttagcaaagtcctcaaatgcactctgggattcagatttgctgtaactaactcaagaaaaaaaaagtct

SEQ ID NO: 25874 - DNA, 600 bp, Chicken  19866894241514_2
atggcaccctagaaatcaaagaaacaaagaaggaagattcgggatcatacgcttgctgggctgcaaattctgttggaaaaagagcaatcacagcaaatctggatataagaggtaatacctcatttatcttccttacttaatacatgtctgcagtgaacaccatgtgcrttacagcaggatgagtgagggggctttgattgtaaagttcagatattagagcagcagtatgtgctgctccagttctgttttgaagtatttcattgtttggttgggcatgtttcctgagggtcgtgatgaggktggatattttctgttgaggacacagattcaggatggtgagttgtatacaaagttatttaggaattgggccttgccaataaaaaaaaacttaaatgcttggttagcaaagtcctcaaatgcactctgggattcagatttgctgtaactaactcaagaaaaaaaaagtctttttgtgttctacttcaggccagtctctttgctttgtaagttttacagttataataaacatgaaattgtacaatgaaattctcacaaagcaatatttcacctgtaaagagaagtgctttcttcctacttact

SEQ ID NO: 25875 - DNA, 600 bp, Chicken  19866894241516_1
cccatctcacccaaaactcccttcccccagcccaaagtgtttgacttcaaagattacttccatgtactgagggcttttacccacaggaaaaacagctttccatataattggagaaatgtgggtttgaaaaagcaaggaaacaaacgaacaaacatgcctctgagatgcgttttgctaagaggaatcacccccagtcaggcccgttttactaacttggcagaaaatactgaaaacaagattgttgattctttgttatctgcaaagtccatctgttttgtgctagtctgtttaacctcctarggttgcattcccaagttaatgtgaaacgattagcttcagattaaagcaggaccccagaagataaacaaaaaaaggctgaatagatatggaaaagcagaacaacgaacaaaaaagctcatttcaagacaacagaattggggaagagctacttgtgcgaacagagccttttgtcagtagtgcagagccacagaaacagcattcaaggtgtgaccttccgtgccttttaggcagtggttggtgaagcctcctttggtttgccgtaggcaggtctttcttcctcctagatttcccccctacgtt

SEQ ID NO: 25876 - DNA, 600 bp, Chicken  19866894241517_1
tgatggtgtttgtcttctaaagtagtggttaagcatgatgggccctgctttcctggaaatggctgagcatctgcctgctgatgtgaagtagggaatgctttgcttgtgcatgcagctttgctttaccactagttaaaagcaacaacaactttacttttgccattgggcaacctcatctagtgggtggtaaccctggctgcagcaggggggttggatctgaatgatctttaaggtccctttcaacacaagctatcctgtgattctatgaatgtctttatctgagcccatgagtttttacakttccagttctctttatcatcctgctgcaatggaattcggtaagcagctgtgtggctctgagctgcctgcctattgggattaaacctcaacagacaaaaaatatgctattttctattggactataaactagactgaaaagctggaaaaattatatagccttggagggcttgaaaactatatttgtgtctgaaatagttttttttttttctttgtagttttttgactctgttgtcatttcagatggtcccaggagttgttagaatgatcttacatgctcagttattctcctgattgtatcta

SEQ ID NO: 25877 - DNA, 600 bp, Chicken  19866894241522_1
gaagttggaaaatagactacaatttatcagtatatacagggctagatgggcctgaaactatgcgtgcagaaaagccccacatacccagagctgtaccttacaaatgaatcttttgtttttgtcagctcatggatcactgagttcttcaaagtcagtcaatcaaataatgcttctggtcattggattttctgtccttacaaggtttggcagctctcagagttgttatctgcaagatgtaaccacccctttggtcatgccaaaatacagatttggtcttctgcaacaatggaaattaatctyctgtggaaattagtggaggaggaggaagtaaggacatattttgaagaaaacattttttaggctctcttctacagaatagaaattcctcagtcctccaataagcttgaataaaaagaagcatcagtggtttagccttgggattaacacaaatttcctcgtacagcacagttttaccctgactgagctgtaagtgtccctgttcattgcaggggacattttaaaagtcccttccaactcaaatagttctatgattctatgaagaccaaacagaagaaaaaccaacaaaccaacaattcgtgt

SEQ ID NO: 25878 - DNA, 599 bp, Chicken  19866894241526_1
  misc_feature (1)..(106): n is any nucleotide
nnnnnnnnnnnnnnnnnnnnnnnnnnnnnnnnnnnnnnnnnnnnnnnnnnnnnnnnnnnnnnnnnnnnnnnnnnnnnnnnnnnnnnnnnnnnnnnnnnnnnnnnnnacaattctgactgaagctctttaaacctaaagagattattgatgctgaactccaatcttcctgttctcacatctctccactgcccaccagaacgacggccatcttccaaatcccacgatctaatttgtggactccaccatttcagtgttttcagatttggtttattatgacttgcactctcatttaatagagcmgttacagtatccactattactctatgagtttggtgagttctaaagcatgcacaggaagaaattaggaacctaagtacatagcttcaaataattttaatggttatggtcaggttaaaataaattcaacacattcctgatctgaggaaaaatatcttacactttcawcagcaggtttttaaacacgacagtaccaatatgcctttaaagtttaaccaacaaatttagattgagatgtatgaaagtttcataggaagctggggtatgggttatctttcatgtaactaaccctccagcaaaat

SEQ ID NO: 25879 - DNA, 600 bp, Chicken  19866894241526_2
cctgttctcacatctctccactgcccaccagaacgacggccatcttccaaatcccacgatctaatttgtggactccaccatttcagtgttttcagatttggtttattatgacttgcactctcatttaatagagcmgttacagtatccactattactctatgagtttggtgagttctaaagcatgcacaggaagaaattaggaacctaagtacatagcttcaaataattttaatggttatggtcaggttaaaataaattcaacacattcctgatctgaggaaaaatatcttacactttcawcagcaggtttttaaacacgacagtaccaatatgcctttaaagtttaaccaacaaatttagattgagatgtatgaaagtttcataggaagctggggtatgggttatctttcatgtaactaaccctccagcaaaattagcttctgttgtaacaaattcacattgagggaraagctgtagttcttctccccctgtaacaagatgttcatatgcagaaagtacmgtttctaaaagcaaatctctttattacagttagttaccttagaaaagcatcttcaacttcttctacaagtatgttacaaa

SEQ ID NO: 25880 - DNA, 600 bp, Chicken  19866894241526_3
tgagttctaaagcatgcacaggaagaaattaggaacctaagtacatagcttcaaataattttaatggttatggtcaggttaaaataaattcaacacattcctgatctgaggaaaaatatcttacactttcawcagcaggtttttaaacacgacagtaccaatatgcctttaaagtttaaccaacaaatttagattgagatgtatgaaagtttcataggaagctggggtatgggttatctttcatgtaactaaccctccagcaaaattagcttctgttgtaacaaattcacattgagggaraagctgtagttcttctccccctgtaacaagatgttcatatgcagaaagtacmgtttctaaaagcaaatctctttattacagttagttaccttagaaaagcatcttcaacttcttctacaagtatgttacaaagaactcactgtgattatgtgcagaagatttatttaaattgctatatggagggacaccatcaattttaaagataacgattaaaaaactgtctgtagagttgattcagtatgcagtaaaactttaaaggtcctaagtgataaccttttaaaatgtttccttcctattaat

SEQ ID NO: 25881 - DNA, 600 bp, Chicken  19866894241526_4
aaataattttaatggttatggtcaggttaaaataaattcaacacattcctgatctgaggaaaaatatcttacactttcawcagcaggtttttaaacacgacagtaccaatatgcctttaaagtttaaccaacaaatttagattgagatgtatgaaagtttcataggaagctggggtatgggttatctttcatgtaactaaccctccagcaaaattagcttctgttgtaacaaattcacattgagggaraagctgtagttcttctccccctgtaacaagatgttcatatgcagaaagtacmgtttctaaaagcaaatctctttattacagttagttaccttagaaaagcatcttcaacttcttctacaagtatgttacaaagaactcactgtgattatgtgcagaagatttatttaaattgctatatggagggacaccatcaattttaaagataacgattaaaaaactgtctgtagagttgattcagtatgcagtaaaactttaaaggtcctaagtgataaccttttaaaatgtttccttcctattaatatgtgtaaaaaccccaactaacaaaatgcagtttattacttaaggcagaagt

SEQ ID NO: 25882 - DNA, 600 bp, Chicken  19866894241527_1
acaagcaggaaaagcagcacggtggcatccgagacgtcgggtgaagaaggaagtcgggcctctgagaggaagaggattgtcatcaagatggaaccagaggacagtcctgcagacgagctgaaagattataacattatcaaggtgacagataaagactgcaacgagtcttcagataacgatgacctagatgatgagcaggaagagccactttacaggtactacgttgaggaagagatgagagagaagaggaatgctcggaagactttaaaaccccgtttatccatggatgaggatgaaagraggtgtttaaagagtccgcggcaccttaacaggaaagctccctccgtccaggaagatgtggagaacgctccctgtgaactctgtgggctaacgatcaccgaggaggatttgtcctctcattatttatccaaacacatagaaaacatatgtgcctgtggcaagtgtggtcaaatactggtcaagggcaaacagttacaggatcatgcacagacctgtggagaaccccaggacctgaccatgaatggtatcagaaattctgaggaaaaaatggacttggaagaaaaccccgaggagcagtcg

SEQ ID NO: 25883 - DNA, 600 bp, Chicken  19866894241530_1
atacatttctaggtgaattgttttctttctatggggagtaaatgcaaaccactgggagaagaaacatatatcagctatttttcacttttaaaatatgcgttaggtttaatctgtatttgcctagttgtaatgcctactatttgtgggaattcatgggcctcaaatcaggtgtgataggttcttcttgctccaaaaatcgaatatatttttatgccaagcattgcaagaaatgaaacaaagacatcaagtacaaataagagtgattttaagcctccatatggatgccaaatagcttgaacrttaagcttgaaactcatctcagtgctttgctgcttcccttttcattttgtcagtgatatgtagtgcaagttgtaaattgctgccattacagtaacagtgtggagagcattcatatggggcaatgtctgatctgtatgaagctcctggagatgatggcatgtactgtaggctctcggagagytgggcatagtatgctgtgtctaactccygcagaaaacaaaygtttccagattgtcctttattgcaatgtttatgctgtttcccatcagttttatttccatctgtaaaagggtcccaggc

SEQ ID NO: 25884 - DNA, 600 bp, Chicken  19866894241530_2
ttcttgctccaaaaatcgaatatatttttatgccaagcattgcaagaaatgaaacaaagacatcaagtacaaataagagtgattttaagcctccatatggatgccaaatagcttgaacrttaagcttgaaactcatctcagtgctttgctgcttcccttttcattttgtcagtgatatgtagtgcaagttgtaaattgctgccattacagtaacagtgtggagagcattcatatggggcaatgtctgatctgtatgaagctcctggagatgatggcatgtactgtaggctctcggagagytgggcatagtatgctgtgtctaactccygcagaaaacaaaygtttccagattgtcctttattgcaatgtttatgctgtttcccatcagttttatttccatctgtaaaagggtcccaggctgaacagtgaaccgcattggccagatagataccagaacactctggggaagcacatctttgttattcaggcaaaatgcaagctttccaaaaataattaaaaacaagacaacagaagtgatctattctcacttctctcaccttttcacaggggtttatgtgcttctttggacacctgtttgga

SEQ ID NO: 25885 - DNA, 600 bp, Chicken  19866894241530_3
tatgccaagcattgcaagaaatgaaacaaagacatcaagtacaaataagagtgattttaagcctccatatggatgccaaatagcttgaacrttaagcttgaaactcatctcagtgctttgctgcttcccttttcattttgtcagtgatatgtagtgcaagttgtaaattgctgccattacagtaacagtgtggagagcattcatatggggcaatgtctgatctgtatgaagctcctggagatgatggcatgtactgtaggctctcggagagytgggcatagtatgctgtgtctaactccygcagaaaacaaaygtttccagattgtcctttattgcaatgtttatgctgtttcccatcagttttatttccatctgtaaaagggtcccaggctgaacagtgaaccgcattggccagatagataccagaacactctggggaagcacatctttgttattcaggcaaaatgcaagctttccaaaaataattaaaaacaagacaacagaagtgatctattctcacttctctcaccttttcacaggggtttatgtgcttctttggacacctgtttggacttgaaggttctggagaggagttttgtt

SEQ ID NO: 25886 - DNA, 600 bp, Chicken  19866894241530_4
gcaagaaatgaaacaaagacatcaagtacaaataagagtgattttaagcctccatatggatgccaaatagcttgaacrttaagcttgaaactcatctcagtgctttgctgcttcccttttcattttgtcagtgatatgtagtgcaagttgtaaattgctgccattacagtaacagtgtggagagcattcatatggggcaatgtctgatctgtatgaagctcctggagatgatggcatgtactgtaggctctcggagagytgggcatagtatgctgtgtctaactccygcagaaaacaaaygtttccagattgtcctttattgcaatgtttatgctgtttcccatcagttttatttccatctgtaaaagggtcccaggctgaacagtgaaccgcattggccagatagataccagaacactctggggaagcacatctttgttattcaggcaaaatgcaagctttccaaaaataattaaaaacaagacaacagaagtgatctattctcacttctctcaccttttcacaggggtttatgtgcttctttggacacctgtttggacttgaaggttctggagaggagttttgttgttttttaggggg

SEQ ID NO: 25887 - DNA, 599 bp, Chicken  19866894241531_1
  misc_feature (1)..(148): n is any nucleotide
nnnnnnnnnnnnnnnnnnnnnnnnnnnnnnnnnnnnnnnnnnnnnnnnnnnnnnnnnnnnnnnnnnnnnnnnnnnnnnnnnnnnnnnnnnnnnnnnnnnnnnnnnnnnnnnnnnnnnnnnnnnnnnnnnnnnnnnnnnnnnnnnnnnncgtacatgtgtatataacacacagtgtgctgtgcactgctgactgaaagtggcaaagaggaagagaaaaaaacaagtctggttacaactttatgatatagcatgaagtctaaatgctagggcaaaaggcatgaagattccagctacattttrtggtttttgtttgtaagctatttccttaacttgttctttggattaaatatatattactttgtttataaattaggtatcaaaaagtatatattttactttaaaaattggtcatgatgtgacatccaagcatttttataaggtgggtgggatactttaaatacaaatgcgaagcaagtactatttttttgttaaaagttatttttcatatttctacaacaggattttacatttgaaaaacatgatttattcacatcacgtcaaaatgaattagagatagtgaaactctatcagtcagtatg

SEQ ID NO: 25888 - DNA, 600 bp, Chicken  19866894241534_1
aaataattcatccatttcatgaattgttggaactaaagccagtgatcaagaactgcaatgttaacagagcagatggcatgacttcttaaaagcctgtttgacacatttttggcacaactatgtttctagttgagaaatttttgaagctcttgaagcgttagagctatcagctgaattaaatgactgtttaatatttttaaagaaaagtgctttatcatagagattcctttcccttcctgtgcttaatgataagccatttgtgtttctataatagtttactcataatccatgttgttttamaattttcgtcgagattttgttgaaaattaggtaatatgctctgtcttttatttgaaaatctatataacgtgactgttcagttttcagttgacagtagtgaatgtctcccagttttcaaaataggattaagtccattattaagacaattaaatttgttcttagtagtagtgatttgaaattggatctcatgtatgctggatcaatgatgtaacctgtacgctactggttattctggtgtttttccttctttttgtcttttattagcttttcagttggacaagggaattgatatgggggtga

SEQ ID NO: 25889 - DNA, 599 bp, Chicken  19866894241535_1
  misc_feature (1)..(48): n is any nucleotide
nnnnnnnnnnnnnnnnnnnnnnnnnnnnnnnnnnnnnnnnnnnnnnnntagataaatattactcttaatcttgtttacattcacagccaacagagaaatagtttataactcacatcttgattctacattttgggaaattaaggctgaaagtaaatgataatcttcaccgctgaaaacttacgaactaccacaggactaaacttactttcccataacaaagctgtgtggagagagcatcttgaaaagtaaactgtttgtcttagtttcagctgggacagaattattttcttcagagcgtcygctatgatgccatgttttggttcttggagaaaaacaacgttgataacacaccaatgtttatagttgttggtaaacagtgttgtggagagccaaggccattctgctgctcagtgaggggctggcctacacaacacggtcacaggccacgagccagaagctgaagtggaatacagcaattgaaccaaatatcacaaaatgaacaggaggaaaaaagtgacaatccccacctcctcagtgaagcccagaatgtgaaattcacagcacaggtgtaattaatggagtcaggggtgaaactcatg

SEQ ID NO: 25890 - DNA, 600 bp, Chicken  19866894241537_1
ggcagacagggaaggccgactgacccgagtactgaaactgaagggaagcctaccttcaccaaagactagatgtaaactagaccgcaaaagcacttgctttttatgaaactcagctttcccctgagaacaaaaaccaaaacaaacaaacaaaccagcccagcccacacaaacaagcagggactcgaagcacagctgacagaaggcctttgctcccatcccaagcttagggcacctcagtctgatgtacctgctgagctgggacaacctctgcttcctgctggcaaggaagcactgtggcaygacacaaagagcaaacatagggtaagtaatcacagaatcatagaatggcctgggttgaaaaggaccacaatgaccatcgagtttcaacccctctactatgtgcagggtcgccaaccactacaccaggctgcccagagccacatccagcctggccttgaatgcctgcagggatggggcatccacagcctcctcaggcaacctgttccagtgcatcaccaccctctgtgcgaaaaactaaataaattatacaaaaaaaatacataaataactaaatatataaatatataataaggtgcccac

SEQ ID NO: 25891 - DNA, 600 bp, Chicken  19866894241537_2
aaaaggaccacaatgaccatcgagtttcaacccctctactatgtgcagggtcgccaaccactacaccaggctgcccagagccacatccagcctggccttgaatgcctgcagggatggggcatccacagcctcctcaggcaacctgttccagtgcatcaccaccctctgtgcgaaaaactaaataaattatacaaaaaaaatacataaataactaaatatataaatatataataaggtgcccactaattacagcattacactcccttataaaaccttacgaaaccccaaaacgccttgtaygttcttactgacagacaaatacatacttgtgtgcatgagtagacacacgcttaatatggtaataagacttgacatcaaatgacacctaacatttcttaaggctacttaagttgaagccttcaaaccaaaagtttcgtactcatgcagtaattgtccaggcacaccacaaaacaacacaacatcaaagaggaaagcatctatctactcctgcataacagctaaatccatacaattaaccccctgtaacatcactctgtaaatgcaaacacatgttctacttctatgtccctcagaagatcc

SEQ ID NO: 25892 - DNA, 600 bp, Chicken  19866894241547_1
cagaagctttcatgcaataagcaggattaagacacacagctgtaggcttttctgtgacctttgggtatttaaacagtcttggcctggcttcatgattgtgagtagacttctatttgtttccaacccagcactctccctgcacagaaatgcttgaaacagtggatttcagtatgtctttaatgtcattctcaggaaagtaaaaaataatgctggaagtgatcatcagactttattcctctatttctgtgatgttatgattctctgtgttttcaagccccttctgtagcagtttcatgctcrccttcggtgcattttctaggagatctgaaattctgcatttgcctatatagatgtagtggttttaaaggctttctccaagctgttctcccactagagggtactcctgctacatcagaaatcagcattcaggcctggacctggttcgcaatgcgtccctctccttcggagcaggctgttcattgacagcacaacctggatgcgttcagtcgtgctgcctccctgcttcagcagccatggagctgccttgtcgctggctgtgcaggggcccagagatgctgcactgccattttgacctctcct

SEQ ID NO: 25893 - DNA, 600 bp, Chicken  19866894241552_1
tttctactaacatgcttgcattttctattcatactgcatctgttgtattaaagcatatatttctccaaggtgaacccccgttgatgtttatagtgatcactctgctttgagatctttaaggaccctcccaacccacacaattctatgctcatgggaacaggcacatcttattaatgtaatgatcctaggtcagtatcttttgttttgttaggaagacatcttgccactcaggagttcttgagttttgaccctgccttcactagtggcatctactcctgcttgacaagttatttaatgtcyttgtcttgtacatataagaaatttaaggccatgaattaacagatatccagccagaagggaccaaatctgtgacctttgtctttaatccatgagctcctattatttgagaaattcaagttagccattcacagctgaagcaaatttatctttctctgtctaaagaaataccaggagaaggtgtgaatcaagggaaagtgttgctttttatatcctttcaaaatccaatggggaacgtattgggctattgtctataaatcattttggaagtgctatatataatgccagcctttaaaagtccac

SEQ ID NO: 25894 - DNA, 600 bp, Chicken  19866894241552_2
catataagaaatttaaggccatgaattaacagatatccagccagaagggaccaaatctgtgacctttgtctttaatccatgagctcctattatttgagaaattcaagttagccattcacagctgaagcaaatttatctttctctgtctaaagaaataccaggagaaggtgtgaatcaagggaaagtgttgctttttatatcctttcaaaatccaatggggaacgtattgggctattgtctataaatcattttggaagtgctatatataatgccagcctttaaaagtccacatttaatgtyatttgtggtatctgaaaaactatactacgttttctgaaatgggaatgctggactaccttagtgctataggctgactctgatgatttcatgaccaccagtaaaaagctaggactaaagtgctaaatattaccttcagtagcaactcactttatgttgatccatgatgacagtggcatcattattcttgctccctgggagccagtgaaatgctggttaatgaaggagttggagctgttggaagccccttctgatgtcagtcactgccagcttctcgtgtccaagatggacacggtgctgcag

SEQ ID NO: 25895 - DNA, 600 bp, Chicken  19866894241570_1
agtgatttaataggacatgtcatttttaattactttggaagagcgttcataagtctaaaaatgcaagtcatgtcctcttggcattacagcttctaaaagcgtttttatgtaacctgcaggaacaagcatggtattttttcatcctctaagtgcatgatagttttacgttttggtgatctgaagcacatgattcaaggtaaattagttttaactgagttctcggaaagaaattgctgccagtttctgagcttaaatggcctaaaattagctcatccaactctactatacatcactgtcttygctgggcccttgttccctccaccctcttcgtatcatctaatgcggtataatctctaactaacaagatggggaaaatgccataccactctaatctccccatccatatcacagctgctgctgattccagtggccatctgtagcaaataattggttttttttcttttatactgatcttgagttctaggcaaatcactggaatttaaaaatgatacaagaactcctttataggagaaggtggtttgctttgaaaatatgtcagatgcgttttaacctgcagtctatcataactaatgttagcta

SEQ ID NO: 25896 - DNA, 600 bp, Chicken  19866894241570_2
aatgtagcagtgccgggagccaacatgtttgtggatttaatgggaattgcaaaacactgaaacatcctgttccagaaaggagactaatacaggtgcggtttggttaagctctgaggtttgggacgagtcgtaggcttgtcaaagaaatgaaacgcctgggaaaggtctcaagcaacaaagctagctcttgctgctggtaggaagcacgccatccagcagagctggggttggccactggccagctagatttggtcgtttgtcagctgcaacatttctatcaaggtttgaaagcttccaacstttgaaaacgtacagagtatgttttgctacccagttgagtgtgatagctgagcaagcttgcagtgtgtgttggagcaccaaaataatattgaaaataatttgtcccattctgtgttttttcttaatttcttaacagaagaaaactaggaagattgatttctagctgaaacgagacaaaatgatggtgtgggatgagtatatatatgtttatgaatgtgggaataagatttagcttacttcaactgaaaatgatcatgcttggtgtatggtgagccaagtctcagcagctgatgatgacag

SEQ ID NO: 25897 - DNA, 600 bp, Chicken  19866894241572_1
aatgcacagacggagctgaaaaaatctgtgaaagagaggcatagtaaattgatacatagcataccatctgcttgcatgtgtgagtgatgttataacaaactgcaggaggcacagctaaagcaacagtagagagccaactcctttacggtgtttgaaggtcttctgccggtcttctgcctaggatcagctttgtgttgtcatttgctgtggcactgtaccaagagggccatattggctaacttctgcacacttagactaatacccatctgtggcttcctttgagtatccagtgagcacccyagaattagatttcaattgctttgatttttgcaaggcttgtgaaacacactggatatcaccaatcaaccaggttggagtttaaatacttctgacaaggcttattctgtaaaacagcaagaaaaccaacgtagaacttctaaattcttgaactattttccatacagaactaaaacttctgttttttcacagatgttgttaaaataatatttgcattagttctcacttttggcaaaggacctgtaaaagctgcatgtctgttcttattgttgttattttgacgtcagggtactataagtgcac

SEQ ID NO: 25898 - DNA, 600 bp, Chicken  19866894241572_2
acacactggatatcaccaatcaaccaggttggagtttaaatacttctgacaaggcttattctgtaaaacagcaagaaaaccaacgtagaacttctaaattcttgaactattttccatacagaactaaaacttctgttttttcacagatgttgttaaaataatatttgcattagttctcacttttggcaaaggacctgtaaaagctgcatgtctgttcttattgttgttattttgacgtcagggtactataagtgcacgtgtcagatgaaagtagttgaacagagtctttgccacggccaytgtttgtgatgccacacaagctgtggtgtatgatctcttgtatgagttgctggcaatgtaggtagggggcagctcagcaaaagcaaaagggcatgaaggaaatggatgaaatattgcgggttttattatggcaagaaaagaatggggtggttaaccagtagggcagcttgccctgacactggcattacacatctggccatggttaggtgagctggcttggtactcatagcacgtcacttctgcttgtgtgggtcaggaatgaggcgggggccaaggaggcagcgctgcctgtcctgcctg

SEQ ID NO: 25899 - DNA, 599 bp, Chicken  19866894241575_1
  misc_feature (1)..(43): n is any nucleotide
nnnnnnnnnnnnnnnnnnnnnnnnnnnnnnnnnnnnnnnnnnnaaaattcttctttagaatattttattttaaaagcacatctcaagtttccaatttatggtcatgcctctcccacgagagcaataaggaaaacaatagccatccatctctgctaaaagctgtgttatctctttgtatatttaagacagttttaagacacagtcgctgaaacccaactagacataaatatgcccctagaaaatgtcatttgtttatttctaaaaacgtgaaatgtgagaagagggaaagaaaaaagatcycttgataccatgggatttattagcaaaaaatcaaaccttcagctcagaggaaactcacaatagaacaccgcaaagatttttctccattcttcaattcatcccacgtactggagaacaaatataagctatttttaaggtcagctgctctatgagttggagtcccacagttctttgaacattcctcctgtacttcagaactgcagacgttgcaaaactcagataaacttgtcatggtggcgcagcacatagcagaactgtgactgacacactatgcaaggcatgaagcagcctacatgaaa

SEQ ID NO: 25900 - DNA, 600 bp, Chicken  19866894241575_2
attcctcctgtacttcagaactgcagacgttgcaaaactcagataaacttgtcatggtggcgcagcacatagcagaactgtgactgacacactatgcaaggcatgaagcagcctacatgaaagagttacctatcaatgtacttgtttttttctgataatggctgccccctcacttcttttcttttgatccctcttctgcccttctcataattgcagctaagggcaatctggagctaatttcagagctttcttggatttgctgtaataattgtgcaacctccttgcaaatcaacttgctcsctcattttacataaaaccagtactacttctcaccactggtagccctcctcaggcctgctatttcaacacaagacactcagtagtttatcctttacctacacataatcagaggggttaaaactcaatgatcattgtggtcctttccaacccaggccattctacgattctacaaggtaagcacatcattggtatctgcattaagataaaaaaagttctgcaactgctggcatgcataggctctttactgcaaaaagaatcaacacctttcccagaccatgggttccacgcttgggaaagaga

SEQ ID NO: 25901 - DNA, 600 bp, Chicken  19866894241597_1
ctcaggtgggagccgagcttggtgcactgcaagggagcaaagagacacaaggggaggatgcacacaagatggcagcaagcagaaagtgcccaggaatcccagagcttgcaaagccctctgcataccttggagtgcagtgtggtgtaccgctggcttgcatcctccagcttgctctttaccacgctcccagatgaccctgcatccccagcagctccctcagcatccagcaccttctgacccgacatggtgatgaagcgtaggtcgcctttgtgggagatgacatcttcagagaagctgccytgccggagcagcagctgccggagggacgcagggtcgctgtcccctttgcacatcccctccaggtcctgctctgcttgcttcagccaygcctcgaactccccgtggtcccgcaagaacttctgcagctcatcccgcagcacttgcacttgcttcagctgcacctcggaacgcgccagggatgccgcgtagcgctccttcagctccgccagcccgccctgcagccgggccctctcctccccaggcaggctgtggccatgcttgtccaggaacgcctgcgctgcctgagtcgccaggatgatg

SEQ ID NO: 25902 - DNA, 600 bp, Chicken  19866894241597_2
gcccaggaatcccagagcttgcaaagccctctgcataccttggagtgcagtgtggtgtaccgctggcttgcatcctccagcttgctctttaccacgctcccagatgaccctgcatccccagcagctccctcagcatccagcaccttctgacccgacatggtgatgaagcgtaggtcgcctttgtgggagatgacatcttcagagaagctgccytgccggagcagcagctgccggagggacgcagggtcgctgtcccctttgcacatcccctccaggtcctgctctgcttgcttcagccaygcctcgaactccccgtggtcccgcaagaacttctgcagctcatcccgcagcacttgcacttgcttcagctgcacctcggaacgcgccagggatgccgcgtagcgctccttcagctccgccagcccgccctgcagccgggccctctcctccccaggcaggctgtggccatgcttgtccaggaacgcctgcgctgcctgagtcgccaggatgatgtcctgctgctgggacagcagctcctggtgctgggcctggaacacaccgaccaacatggagcggtgacccccatgaccgaggtcactg

SEQ ID NO: 25903 - DNA, 599 bp, Chicken  19866894241598_1
  misc_feature (1)..(141): n is any nucleotide
nnnnnnnnnnnnnnnnnnnnnnnnnnnnnnnnnnnnnnnnnnnnnnnnnnnnnnnnnnnnnnnnnnnnnnnnnnnnnnnnnnnnnnnnnnnnnnnnnnnnnnnnnnnnnnnnnnnnnnnnnnnnnnnnnnnnnnnnnnnnntgatgattgtaaaatgtctagatatagataaaaagcacatttagacagtgagatatttgtcatttaccaaaaaaaaaggaaaaagtaataatcaaatcacatataaaaattcttccttgcaacataataatgattacctgttctgaaagctcaaatgtwtattttatgtgtactcatttttagtaaacacaggttcaggccaacagttttaaagatgatgccatacaaatatgctgctgtcaatctagaacaatgaaaaattctaaaacattttctccgcgtaaaccaaactcatctttccataatgggagtcttaaattaacagagaactaaaagctgagtaatacaacttcattcctgatcacgggtcgcacaatatttgcgtttttttctatgtggaattttacctgtaatgtgtatgcatgttttctgctactaactattaaaacataacatag

SEQ ID NO: 25904 - DNA, 600 bp, Chicken  19866894241603_1
aataacaaacagcaggacacaatccctgagcttttcactttcaccacttgttttacactggagaactgaaacttactcaagctgctacattttttttttaacccagttgctatgaacacagggaacagttttcccaacataatgaagaggcactggactgcaacctgcaaaactcaggtcagcacaagatgagttttaaaacacctgcagtttcagtggcctctagggatattgtttctcttgagaagttcctgaaaataagccaattacatctcgtgaatttgattttgtgtcagtagsgttctcgtaactacagaactaacaggacagcagtgaagtacatgcaatatactatcaaataatttcaagaaagtaaaattaaaaaaaagcctaaggaaaaaaaccatgtgtaaactaactgttgtaggaaaacaatgataagacttttgtgagaaagtaaaccacaacctaatatgccaccaatagcaaaaattctttggctctgggctgaagtcagggcgtaatcttggagtctccaacaaaacctcaaagcctcccacttttaataaggaatgggatttctcactacccaggtggcac

SEQ ID NO: 25905 - DNA, 600 bp, Chicken  19866894241603_2
tagcaaaaattctttggctctgggctgaagtcagggcgtaatcttggagtctccaacaaaacctcaaagcctcccacttttaataaggaatgggatttctcactacccaggtggcactaattaggcaaaaaaacccacaataacaacatacaatttgtttctactatttgcagtttccactattttcttaaactttagaagcatgacatagtgcaagaggaaaaagtaaacctaaaatgttacaagctcaaggactgcattaccacggtttgttctctgtaaatgtccagctcccagtgraaaaaaacaaraaacaaacccatactaaactgyttccctctcttttctctccccaaaactcctagaatcagttataagaacacaccaaaaacaacacaagaacagagacaggcatattatcttgccagattcttaagctaaagcatttcacayatttacttacctggtccagcatgtggtccaaacttgtgaaacactttgtgactgaattcttctgcaataagctagaaaaagagttcaactgttagtcaagaatatttatgttcaaagctagaaagaactcattttcagcaaagtctg

SEQ ID NO: 25906 - DNA, 600 bp, Chicken  19866894241603_3
ctttggctctgggctgaagtcagggcgtaatcttggagtctccaacaaaacctcaaagcctcccacttttaataaggaatgggatttctcactacccaggtggcactaattaggcaaaaaaacccacaataacaacatacaatttgtttctactatttgcagtttccactattttcttaaactttagaagcatgacatagtgcaagaggaaaaagtaaacctaaaatgttacaagctcaaggactgcattaccacggtttgttctctgtaaatgtccagctcccagtgraaaaaaacaaraaacaaacccatactaaactgyttccctctcttttctctccccaaaactcctagaatcagttataagaacacaccaaaaacaacacaagaacagagacaggcatattatcttgccagattcttaagctaaagcatttcacayatttacttacctggtccagcatgtggtccaaacttgtgaaacactttgtgactgaattcttctgcaataagctagaaaaagagttcaactgttagtcaagaatatttatgttcaaagctagaaagaactcattttcagcaaagtctgtacacctcttt

SEQ ID NO: 25907 - DNA, 600 bp, Chicken  19866894241603_4
gggcgtaatcttggagtctccaacaaaacctcaaagcctcccacttttaataaggaatgggatttctcactacccaggtggcactaattaggcaaaaaaacccacaataacaacatacaatttgtttctactatttgcagtttccactattttcttaaactttagaagcatgacatagtgcaagaggaaaaagtaaacctaaaatgttacaagctcaaggactgcattaccacggtttgttctctgtaaatgtccagctcccagtgraaaaaaacaaraaacaaacccatactaaactgyttccctctcttttctctccccaaaactcctagaatcagttataagaacacaccaaaaacaacacaagaacagagacaggcatattatcttgccagattcttaagctaaagcatttcacayatttacttacctggtccagcatgtggtccaaacttgtgaaacactttgtgactgaattcttctgcaataagctagaaaaagagttcaactgttagtcaagaatatttatgttcaaagctagaaagaactcattttcagcaaagtctgtacacctctttcagttaaatttctaattactag

SEQ ID NO: 25908 - DNA, 533 bp, Chicken  19866894241603_5
tttgtttctactatttgcagtttccactattttcttaaactttagaagcatgacatagtgcaagaggaaaaagtaaacctaaaatgttacaagctcaaggactgcattaccacggtttgttctctgtaaatgtccagctcccagtgraaaaaaacaaraaacaaacccatactaaactgyttccctctcttttctctccccaaaactcctagaatcagttataagaacacaccaaaaacaacacaagaacagagacaggcatattatcttgccagattcttaagctaaagcatttcacayatttacttacctggtccagcatgtggtccaaacttgtgaaacactttgtgactgaattcttctgcaataagctagaaaaagagttcaactgttagtcaagaatatttatgttcaaagctagaaagaactcattttcagcaaagtctgtacacctctttcagttaaatttctaattactagtatttactaaaaccctaagtgaacagtaagttcagtattaaactacgtattca

SEQ ID NO: 25909 - DNA, 600 bp, Chicken  19866894241606_1
tgcaggtgcatctgatctgttcatttttattcccaagcagaattattctttcttaaagcaaaagatgttatttcagtatgtttatcttaaatcaatacccttaaaatcatgtcatcaaaaacagtacgttttcatttttccaaccaattagtaaacagggattgtgaaagatcgccaataacaatctgagagggtcagcactccctctgcctctccccagaacaggagatgagaggaaccagcaaacgttcttccaaattgtactgaattcagcaagtctgaatccaaaggttactccaktctcagtagcatgtacttcatcttcagtgccttcacttgtaccatcgataccttatgttacacattaaagatgaaaaaacaccactatgtacatctgaaattcagcatcaggttttgatcagtgtgttcttccacagacaccagcttaaaactgaacttagcacccagtcacttatttttaaaagcctgaatgtgatgtgtaccacatcctaaaggactatgaatgacacctcaaactaagccaccataccctcatttcaagtctctgaaaagctaagagagtctcagggcagggtaggc

SEQ ID NO: 25910 - DNA, 364 bp, Chicken  19866894241609_1
tcataaaaaatacctttaaatccaatatttgcatatttcctagtccatctacgctcctccagatcgccatacgcatgatagacacaatataacagaattgtggagggcaccaagtccaacctccctgctaaagcacgttccttacagaaggccacacaggtaggcaaccaggcagatcttgaatacctccagaggagactccacaacctccacaggcatcctgttccaatgttccattgctctgacagtgaaggagttcttccttgcattagtatggaacttccttagttccagtttctmcccattgccccatgttctactgcagccaaaaagagtctgctgccattggctcaactcccatact

SEQ ID NO: 25911 - DNA, 600 bp, Chicken  19866894241619_1
gcctgccataagaactcaaaaagttgtttctttttctaattttaaaaataaatccttctcacccttgaagccaaaagacagagagacaggctgtaaagatattgcaggatttattcctagcaaagcagctgctattttcatgtgcagagagctgagtgggggagtcaggggtccaaggagcttagtgctgtacagctgttggctggctgtgttgcagtgttggcacagctgctcgcagggccatggagcccagcccatggcagcttctcctgtgccaggagagcctggcaagtggggatkgggaaggtgtagtgagtttctgcagggaatcctgtctgggacataaggaggaatggggaggttggtggccctgcctgttggcaggggggttggagattcatgatccttgaggtcccttccaacccaggccattctgtgaaaagaaggaatgccctgtgaggagcagggcctgctagcaggtaacagagagcctgacagctgttcctgaagcaaggttgtccctgtggtgtcggtatgaggtagggggtgaggtctgtctgtctgaagatgttaccctcccacctggagggtaagagcatc

SEQ ID NO: 25912 - DNA, 600 bp, Chicken  19866894241623_1
cttagagtcaccaggaaaaatccccttgacttgagagatctcagaacatggcacaacagataataaaagatattccagaaataatttgtcagcagttgttgatgttcttgattctcagtattgctataaaacttgggcaaacaggaactagaactgctaaccacagcatgccgttctaattaactatttttcagatcctatttaattccttcccagttgagcaccagacagtaatctctgcactagaaaataattgttttttcaattagaggccatatttaggaataaaaagtaccctgsaattttgtacttagagtctgctggagggtgcaaataagtgaatttagattactttatactcaatgatgctgtcatagtctttgataattcaagatttactgttaaaataactgtggagctaatgagaggcatgtttttgtgtcagtgtatctgcttgtcagtgaagaggaaattaagctttctgtcagtttacagttttctagattgtccttggcactggcaattggtgtatgcagagcagataaaccctttgcattctcttcactgccatgtctccaagctgcacgtgcgctgcactgt

SEQ ID NO: 25913 - DNA, 599 bp, Chicken  19866894241625_1
  misc_feature (1)..(183): n is any nucleotide
nnnnnnnnnnnnnnnnnnnnnnnnnnnnnnnnnnnnnnnnnnnnnnnnnnnnnnnnnnnnnnnnnnnnnnnnnnnnnnnnnnnnnnnnnnnnnnnnnnnnnnnnnnnnnnnnnnnnnnnnnnnnnnnnnnnnnnnnnnnnnnnnnnnnnnnnnnnnnnnnnnnnnnnnnnnnnnnnnnnnnnnagtcatgtgtttagcccacaacccccctctccccttgggatgagctgcccagagaggttgtggagcctcctctggagatactcaaaacatgcctagaggctttcccgtgtgacctgmtgtagggaacctgcttcagcttcaaggttgggcaagatgatctccagatctcaattccaccctctaggactccgtgattctctgaaatacagttacacttgtagaaaccaagaacacaggtaaagcctgcaaacatgacagtctatatcctggaaagcaatgactaaaaagcatacaagaatcctagtagattaacaactgaagataaactctgttacatccctgtcacagtgccgtacgcagtactgttgagagtaatccaaggagactgcattgaggtctaggagttatgtctaaag

SEQ ID NO: 25914 - DNA, 600 bp, Chicken  19866894241626_1
cttgaaaatcccgtcctgtgtatttttctggcatagagtagttattttttctggcaaagagtagttatttttatgttgctaagctgtatagctcaaattgtagggaacagactgacggtccagttctctcaagcaggtgagtcagtggtgcacgcaaatgacagagcagttaggcttctggtttgtacctatctccgtgctttcccgagttgtgctgtactgcatttcttccattaaaacagatctcacgtgtcctttgttcgcggataaaagcagctgcagatctgctgttcagagggygcagcacctgtggcttaccttacatgcaggagagcagtaatttgagaaagagaagcaggtaggagactggcatctgcttgcattcaccttctcacattgctgttgcaaggatgcaattatttatgtatgtcttttgccttttgaatgcagtcaaccagagtctgagcagtgtgtttcagcgctggagcattttgcagtgcttttctttgaggaagggacacgcatggggtagggtcttgagtggtagggtcataatcgagttgctttttcatgctaggtgaactaatgttagctccttgc

SEQ ID NO: 25915 - DNA, 600 bp, Chicken  19866894241635_1
tcagcagctggcgaaacttgcgaccaaaaccctgaactgtgcgttgccccaatccctgtgtctggcttcatggagccaggagttagcagcctcattgtctcagggctcagacctgtgattctctgcctctcaagatgcagaagagaaacaactctattaacttgtaaagacagcttatgttgttacatttagtaacaacagcaggaggtaatgctacattatagctgaaaaaaatactaccaactaagaattcacatacattcggaaatttcaagtgaacagggaagaatcatcacctaygggatattttaacacagattcctctcccccacaagtatagctggaagaaatgcccatcctgggaagaatctgtttacagcataccttccaagtaagcatttctaatttgtttgtcaacactattcaagcagcaaattaccttaaaattgagatcttaggataattcacaggaaacttgacagaacatcaactcagctaccctaactcacctcctgggacatcaaagcgctgctcttcccaatcccaccgtgatggacaaacgtgcacatcagtcatcccgcacggaccccgcaaagggct

SEQ ID NO: 25916 - DNA, 600 bp, Chicken  19866894241636_1
attttctttactgtttttttctttatttgatgaatggggtagccaagataatggaaatgttaagcatctatttaaaaactattgctcaggttccaggttcccagtgcaaatcatttatttatcctttatttgtttttatgcagacccatattcgtaggcctctttgtggaagaggtggagaaggcagattctaaataacattatttccagagaatgttcagtgtatcactttaaaaactttcagatctgacgtttctggggaaaaaagagataggtctgaggagattgatgattgagtgrgcgtgtaggtctttgctggtgttccactggcattaagcccagggtatgtagtggtcaagttgaaaaatggcagcagcaatattagaaaatacatttaatgaagaaaaggaatgaaagttacatagcaccatccttattcttgaaatcytccaaattcagctttgtctgagaagtctttgccatgtcctttacaactgatggtcttattaacaaatcttaatgcttgaagcttttcactgctacttgctggccgtttatagacaggaatgaaatcttctggataattgaggataatctttt

SEQ ID NO: 25917 - DNA, 600 bp, Chicken  19866894241636_2
tattcgtaggcctctttgtggaagaggtggagaaggcagattctaaataacattatttccagagaatgttcagtgtatcactttaaaaactttcagatctgacgtttctggggaaaaaagagataggtctgaggagattgatgattgagtgrgcgtgtaggtctttgctggtgttccactggcattaagcccagggtatgtagtggtcaagttgaaaaatggcagcagcaatattagaaaatacatttaatgaagaaaaggaatgaaagttacatagcaccatccttattcttgaaatcytccaaattcagctttgtctgagaagtctttgccatgtcctttacaactgatggtcttattaacaaatcttaatgcttgaagcttttcactgctacttgctggccgtttatagacaggaatgaaatcttctggataattgaggataatcttttgtctctagaagttctggatgcccccaccctggacatgttcaaggtcatatgcaacttgacctaatggaaagcatctctgcctatggcagcagaattggagtagatcttgaaacccttcacacccaaataattctgtcattctattctg

SEQ ID NO: 25918 - DNA, 600 bp, Chicken  19866894241639_1
agaaaaatcacagaccttaggaaaagaaaaaagttgctttattgaaaacagcattgtgcttaaatgctttgccacttcaaattctgtttcaacattttacagtgtcagttaaggtattacaagacagtctttcttctaaaaaaatagagaaaatcgtagtagcaaaataatagctttatccaagaataatgcacagcaggctcaagtacagaagccagacatttgaaaatgcacctctttacatacagtggtacactgtatgtggaatacaattaaacaggctgacatttgagggctacycatcagtgcagccaatccacacgaggacttccaaaagaaaggcagtcagtgttaagtgtttcaaaacagtgaggcagctccaactaaaccacaactggttgttcagtagggagatcacgtatcccaagtccagaacaacagaacactgttaagcccactcacctcaacattaagttaaaccacaataataaacagagaatcaaaatcatttctggttatgtttcactacccaatagatgagttccttcttcattatcactaggagggctttgcaggctggaactggagctgtttgcagaa

SEQ ID NO: 25919 - DNA, 600 bp, Chicken  19866894241641_1
tcttttagcttcagttaaactaaaatactttgaggaattgagcccgactcattcaagtcctccccaccattttcactacctgaagcctgctcagtgcctggcaagatgaagtgagaatcttgactccaaccaactgccgttaaaccaccttctttttttctttctgaaaaatgcaatttcacagtattcgtttgaaacatagatgctgggtatagtgtcatgaaactgagtggacatttcctcttcttgcataaatgcaaggcactgtggaaagccatgcaagcaccatacacaagtgcrtgtgtgagatgaggaaatctttcacagcgttgaatgttggatgaccaacaactttgagtagcaaatgggccatgcaaagccaacaggaatgcctgacttctcccccggacagaagaagacatctcccctggggtgcagcagtgagcaccaggcagggtttgcctctgcaggctttgcaatggtccattcattttctttggatttgagagggatcttggcgtatgggagcttgggatgtacaaacagaaaagctatttgtgctttgagtaaggaagtttgaatctgacctgtagtcaggct

SEQ ID NO: 25920 - DNA, 600 bp, Chicken  19866894241642_1
ttaagaagctgaagttgtgctatagttctttgttttcctggcttacctggtctattacttctacacatctgcatatgactgtcagttctttcataaagggtgctctgttagatttgagctgaactcatgtatactttacagagtcacttgtacttaattatccaatgctttaattctgctgatgtttccttttaatagagtaccctgagtgacagatctttttcagaacaaaactttaaggaatatgggtgcttgctaccttctttaaaaactcagaagaaaaaatggattggctcaatrggatttgttcattctttcagaattttttagactcagactctaccccaacttctgttttttttgtgcactgatactagagtgctctttcaagcagttcccttggcagtaaggagcttgttactgtaagtgaatggaaagctctgtcttctggtcatttgctgctggttactcaataaaggcattgacttcagtggaggctgcatatcctgccttccagcatagaggttaaatgctgcaatgtcagtggccaagataagtagtgagtaggataatttttttttggtcaatgaccattagttt

SEQ ID NO: 25921 - DNA, 600 bp, Chicken  19866894241650_1
cttccttgcaaaatcctacctcttctattttgtttgtgaaagccattttccaactccaagatgaggaaaaagctttaaggccatccatacaactcaaggcagtttcatctctgtcagactttgttgcttaagcaactattacaagttgatgaccaccagctactgttatcactaaaggataaaaggctccttccctgtgcctttaagggtgcagcatctctttctacatcttcagaggagagtgatgccacacttaccaggagctgcaggcagcaggacatattctacagtaaaagccarcaatgaattctgctggaagcaggaaactcagcagcagcatgaaatgcaggaaaacatacttacataccgaacagtctactaaattaaaaaaacagggcattgatcttggtatacattttcatatttaactacatattaatctctgcatataaagatctcttccccaccaccagttctttatgcctcagcagaatttctattcagcagcagaaatagccatgtagatcttaagtacaaattgatccatctgctataaagactaactgcatgtgagaacacaactctaagcgagctgtcagt

SEQ ID NO: 25922 - DNA, 600 bp, Chicken  19866894241650_2
atgttctcccagctgtagactagatggacctgacaagcaaaagcaaaggctgagagaaaatcagtccctgccatcaatccagtgtgtggcagccggtactaccttcggcatacagtaggcaaaagctatctgtagggaaagctcacatgcaaaattaagatacaacaaaggctacacagtggctgtcagagctgtgctttcagcacctggtagaacgtggcaagtcaccccttcttccctttcctttcctggagccatgagctagcaacatgcaggccagcatttaccacagagaaaccmgaaattcccatcgtagcttatccttgaaaaacgtgcctatgggcaggcttcaggagatgtgcaaakcaaacacctttcatcttatcttcagtaataaaagaaccacgagaaaaatacgcatttatagaaaacaatttttcagactacatccaccccacagccaagaagcaagacaagcaggaacacgtgtcactgattatggcacgtctctggaaggtacccagacaatttcattgcgggctcaagtagaatttattggcacctctgaataataagctttgaatggaaacacaaatggct

SEQ ID NO: 25923 - DNA, 600 bp, Chicken  19866894241650_3
cctgccatcaatccagtgtgtggcagccggtactaccttcggcatacagtaggcaaaagctatctgtagggaaagctcacatgcaaaattaagatacaacaaaggctacacagtggctgtcagagctgtgctttcagcacctggtagaacgtggcaagtcaccccttcttccctttcctttcctggagccatgagctagcaacatgcaggccagcatttaccacagagaaaccmgaaattcccatcgtagcttatccttgaaaaacgtgcctatgggcaggcttcaggagatgtgcaaakcaaacacctttcatcttatcttcagtaataaaagaaccacgagaaaaatacgcatttatagaaaacaatttttcagactacatccaccccacagccaagaagcaagacaagcaggaacacgtgtcactgattatggcacgtctctggaaggtacccagacaatttcattgcgggctcaagtagaatttattggcacctctgaataataagctttgaatggaaacacaaatggctggaacaggcaacttgcctgcccttgtaggatttcatctacgttctatggaaaaaaagcaccatgtg

SEQ ID NO: 25924 - DNA, 457 bp, Chicken  19866894241650_4
cgtgtcactgattatggcacgtctctggaaggtacccagacaatttcattgcgggctcaagtagaatttattggcacctctgaataataagctttgaatggaaacacaaatggctggaacaggcaacttgcctgcccttgtaggatttcatctacgttctatggaaaaaaagcaccatgtgcttcttctgtttgacttctggtcacatactcgtattttccctttatagccacttttcttcctctgcaatcatcatacctccaggccatcctcttctggcagctctctgcacagtgtccktagaggaatgggcctggcatagcccagtgctttttgtaaactatagcctcaccaatttccacgtctgactggaagtctgtgatagtgcaatcattcttgcactggatgaaaaagcagaaaagtttcctgcatccctcttgcctgtatccttaactaa

SEQ ID NO: 25925 - DNA, 599 bp, Chicken  19866894241653_1
  misc_feature (1)..(82): n is any nucleotide
nnnnnnnnnnnnnnnnnnnnnnnnnnnnnnnnnnnnnnnnnnnnnnnnnnnnnnnnnnnnnnnnnnnnnnnnnnnnnnnnnncaattctacttctgttttattctaaattttgttttatttggataaagggtataaatgacagagacatggaactattttagaaatccatttcaaaaatggttttgaaggtgccacccaaactgtcattttaactacttttctaactaacttaagtaaagttttaactactgtgtcaaaggatgagatgccttctcaagacatgacacacattaacctcmacagagggttgtttgcacatctcagcttgatatctcaacagatgaacttcaaaaatacctgaaaagtaaaccatccatctagtctcattatccagccttattctttgggtgaggtgaaatgatgacctcagatgactgaaataaacccatgggggttccctcaacatcaaaccacacaaccttctgctctgaacattaccatgttacctgctctgcaggtaatcgttaggaaaaaacatgctgtgcaccacaaataaaaattaagctttacttgcagcaaagaaccacatgattaatta

SEQ ID NO: 25926 - DNA, 599 bp, Chicken  19866894241664_1
  misc_feature (1)..(126): n is any nucleotide
nnnnnnnnnnnnnnnnnnnnnnnnnnnnnnnnnnnnnnnnnnnnnnnnnnnnnnnnnnnnnnnnnnnnnnnnnnnnnnnnnnnnnnnnnnnnnnnnnnnnnnnnnnnnnnnnnnnnnnnnnnnnnnaatctttgcctttgcagatggaattttctctaaaatgagataacgaaagattattttaaatgtgtttgcaagtctctgaccattcaagatctttttggttaggctgggctgagtaaagcgggttgagcagagcaacagggcagggtctcctattggctttcagtggaagccatscatccctctgcaatctcagaatctttttacttyaaaatatttcagatatccttcagttgctgagaggtccccagaagcagctggtgtgtaagtgctgtacggtactgtgcaacttcctgctgaaggccagtgaggtttttaaggaaagctaggagcccttgcttgaacatgggtgaaagtcagtacttaaatactgttttcttattacagctgtggattcacaagggacccgggacaatatatttatttgggtcagcgtagttattcagagaaactactgcttgggagaactcaggctg

SEQ ID NO: 25927 - DNA, 599 bp, Chicken  19866894241664_2
  misc_feature (1)..(93): n is any nucleotide
nnnnnnnnnnnnnnnnnnnnnnnnnnnnnnnnnnnnnnnnnnnnnnnnnnnnnnnnnnnnnnnnnnnnnnnnnnnnnnnnnnnnnnnnnnnnnaatctttgcctttgcagatggaattttctctaaaatgagataacgaaagattattttaaatgtgtttgcaagtctctgaccattcaagatctttttggttaggctgggctgagtaaagcgggttgagcagagcaacagggcagggtctcctattggctttcagtggaagccatscatccctctgcaatctcagaatctttttacttyaaaatatttcagatatccttcagttgctgagaggtccccagaagcagctggtgtgtaagtgctgtacggtactgtgcaacttcctgctgaaggccagtgaggtttttaaggaaagctaggagcccttgcttgaacatgggtgaaagtcagtacttaaatactgttttcttattacagctgtggattcacaagggacccgggacaatatatttatttgggtcagcgtagttattcagagaaactactgcttgggagaactcaggctgagctgtgtgtgtgaaaggcamtaccctctccca

SEQ ID NO: 25928 - DNA, 600 bp, Chicken  19866894241664_3
atctttttacttyaaaatatttcagatatccttcagttgctgagaggtccccagaagcagctggtgtgtaagtgctgtacggtactgtgcaacttcctgctgaaggccagtgaggtttttaaggaaagctaggagcccttgcttgaacatgggtgaaagtcagtacttaaatactgttttcttattacagctgtggattcacaagggacccgggacaatatatttatttgggtcagcgtagttattcagagaaactactgcttgggagaactcaggctgagctgtgtgtgtgaaaggcamtaccctctcccatccttacccctgccattacactgctttcgtggctcagcagggagggctggggcctaccttgggaagtctgctgctctgagcgcacatgtggggtagatgagccattggaaaaagctttctgcttgggtggtgttgctgttacggtgtgattcgaaatcactgccaggaacactggaaatggcgagttgtaaagttagagatgtgttgttgtttgaactgaagaactcgaagcagtttctagaataacttgcatgctgaagcagtggacaagaagygatggagcacccg

SEQ ID NO: 25929 - DNA, 600 bp, Chicken  19866894241664_4
gtgtgaaaggcamtaccctctcccatccttacccctgccattacactgctttcgtggctcagcagggagggctggggcctaccttgggaagtctgctgctctgagcgcacatgtggggtagatgagccattggaaaaagctttctgcttgggtggtgttgctgttacggtgtgattcgaaatcactgccaggaacactggaaatggcgagttgtaaagttagagatgtgttgttgtttgaactgaagaactcgaagcagtttctagaataacttgcatgctgaagcagtggacaagaagygatggagcacccggcagtttgcagtacagtaccggagacacggagctttcttgccggtgtgccatttcccaatgtgcagaattttccttctgtattaatattggaaactatatttgccaaaatctcctggctctcccaaaagaagggaaaacagcagcatgggagttgttccataacgggaacctttcagtagcgttaactctgcaccattactctctccttagttttgattttttttttttttttgtttttagtgagaaggtacaaataattttttaaataaccactaacatatcaacc

SEQ ID NO: 25930 - DNA, 600 bp, Chicken  19866894241666_1
atatttgcaattcatggaatagccccatctgccctgtcacctccaagtgctgaaggcaccaaaccccctgagggtccactggaaaatggtgagggaagggggaaataaggactctgcccctcgagggctgccagcagcctgcacagacagcgatcggggtctggaaatctatctgtctttgagcaactgtctccctctgtcctcccaaaatctatggggcttcatatgttaatgtacccttttgggaagccctctgatggaaggcattactgcagaaaatgtcagagtcctttggtggargcttgcagcgcgatgagttatatggcccaaaggcacgtgagcgtcatacagacaaggaaatgtgtctcctgatgtcttctggccagcagagaacatcaggaatgaaatctagatcctaaatgtcaaccccattttgaaacaggggtgtatttctctttgtagagrgaatgggcagaaatcagccagcccgtgcctgtacacgtagtgcctgccagcttccacgcgagtcacgcacrctgcttttccttccccaaccatttctcttcagctcctgcaatgctgttttacaccaatctgtag

SEQ ID NO: 25931 - DNA, 600 bp, Chicken  19866894241666_2
aatctatctgtctttgagcaactgtctccctctgtcctcccaaaatctatggggcttcatatgttaatgtacccttttgggaagccctctgatggaaggcattactgcagaaaatgtcagagtcctttggtggargcttgcagcgcgatgagttatatggcccaaaggcacgtgagcgtcatacagacaaggaaatgtgtctcctgatgtcttctggccagcagagaacatcaggaatgaaatctagatcctaaatgtcaaccccattttgaaacaggggtgtatttctctttgtagagrgaatgggcagaaatcagccagcccgtgcctgtacacgtagtgcctgccagcttccacgcgagtcacgcacrctgcttttccttccccaaccatttctcttcagctcctgcaatgctgttttacaccaatctgtagggtttagccacgcatatcaagaaagtaaatggtagatgttgggtgaaggagacattatgcagaggaaggagttatggggaggttataaatatgagcgatggaaaaggaaaattaaacagaaacgaaagcattatagctcagttgtcctcaaaggacccgttatct

SEQ ID NO: 25932 - DNA, 600 bp, Chicken  19866894241666_3
cccttttgggaagccctctgatggaaggcattactgcagaaaatgtcagagtcctttggtggargcttgcagcgcgatgagttatatggcccaaaggcacgtgagcgtcatacagacaaggaaatgtgtctcctgatgtcttctggccagcagagaacatcaggaatgaaatctagatcctaaatgtcaaccccattttgaaacaggggtgtatttctctttgtagagrgaatgggcagaaatcagccagcccgtgcctgtacacgtagtgcctgccagcttccacgcgagtcacgcacrctgcttttccttccccaaccatttctcttcagctcctgcaatgctgttttacaccaatctgtagggtttagccacgcatatcaagaaagtaaatggtagatgttgggtgaaggagacattatgcagaggaaggagttatggggaggttataaatatgagcgatggaaaaggaaaattaaacagaaacgaaagcattatagctcagttgtcctcaaaggacccgttatctttcagggagtacgtacgagtgaagtaaaggggagaagaaacatactcagcatrctcactgccatctcctgg

SEQ ID NO: 25933 - DNA, 600 bp, Chicken  19866894241666_4
ccacgcgagtcacgcacrctgcttttccttccccaaccatttctcttcagctcctgcaatgctgttttacaccaatctgtagggtttagccacgcatatcaagaaagtaaatggtagatgttgggtgaaggagacattatgcagaggaaggagttatggggaggttataaatatgagcgatggaaaaggaaaattaaacagaaacgaaagcattatagctcagttgtcctcaaaggacccgttatctttcagggagtacgtacgagtgaagtaaaggggagaagaaacatactcagcatrctcactgccatctcctggtggacagagaaacagccctattcctccctgccccattagctgcccgtatccgatactgcttttaggttttttcagaactgtagatttaaatgctgtggttaggaaagggcaccattcatattttggaaatgtgtcacatgcaaaaagcagacgagcttcaggcctcctgggtcctttgctgaatcaaattcccctggagcacagagggagcagggccaatcccagcgctgaccacacaggtctctgacaactctgccacagctcctgtgacgactgtggtag

SEQ ID NO: 25934 - DNA, 600 bp, Chicken  19866894241667_1
ctcttccaatataacaagactgcaaagagacttatatttaatcttaagaaaagttgaattcctgatagctgttaagaggaaaccagaggatttcagtcacataggaaattacttccctcgtaaagtatcttgttctccaggtgataataaaacacatgagaatctgtccatcttcacagctggatttgtccactgaagcacagacgcattctttgtctttcagaaaaaggtttaaatattctttcagctcatgaaagccaaacctaaaacttttagaataattttattactaaacataasaactgtttttactctgtttctaatgctttgctttattagtacttttctaaacaggtaaagtgaaagattaaagaccactcatgaagggtttagttaagagatgtggtttggcacttagttggaaataaagcaatcttccctctagaacagcacatttgatcctctcttgcaaaaatggaacctgaagtattctgaataaaattagtaatagttgtgttggtggtattcaaggtgcctgcagttggcagactgttacatactgctacgggccgagatctgtagccctgcttggaaactcca

SEQ ID NO: 25935 - DNA, 600 bp, Chicken  19866894241667_2
gtttttactctgtttctaatgctttgctttattagtacttttctaaacaggtaaagtgaaagattaaagaccactcatgaagggtttagttaagagatgtggtttggcacttagttggaaataaagcaatcttccctctagaacagcacatttgatcctctcttgcaaaaatggaacctgaagtattctgaataaaattagtaatagttgtgttggtggtattcaaggtgcctgcagttggcagactgttacatactgctacgggccgagatctgtagccctgcttggaaactccacttytgctgaatggaagaaaaatcccgctgtgtttgtcatcytttttttcctcctttctttttgccttgctgtccaataaagtagctctgaggcctggccctcragcctatagtgttctttacagctccagctgcagttttgtggcaacgtttcagcattgtacaggataaaaagagcactctgattcaagcatgtggaaaggaggtacacaatgtaaacctacaacatatccactgtgcaccaaagggggttgccacatgatagcagcagtctgccaaatcctctgaacttttggcatccgat

SEQ ID NO: 25936 - DNA, 600 bp, Chicken  19866894241667_3
ttttctaaacaggtaaagtgaaagattaaagaccactcatgaagggtttagttaagagatgtggtttggcacttagttggaaataaagcaatcttccctctagaacagcacatttgatcctctcttgcaaaaatggaacctgaagtattctgaataaaattagtaatagttgtgttggtggtattcaaggtgcctgcagttggcagactgttacatactgctacgggccgagatctgtagccctgcttggaaactccacttytgctgaatggaagaaaaatcccgctgtgtttgtcatcytttttttcctcctttctttttgccttgctgtccaataaagtagctctgaggcctggccctcragcctatagtgttctttacagctccagctgcagttttgtggcaacgtttcagcattgtacaggataaaaagagcactctgattcaagcatgtggaaaggaggtacacaatgtaaacctacaacatatccactgtgcaccaaagggggttgccacatgatagcagcagtctgccaaatcctctgaacttttggcatccgataatagggagggtgcagtaaaagaaaatcaaggaaggaa

SEQ ID NO: 25937 - DNA, 600 bp, Chicken  19866894241667_4
ggtttggcacttagttggaaataaagcaatcttccctctagaacagcacatttgatcctctcttgcaaaaatggaacctgaagtattctgaataaaattagtaatagttgtgttggtggtattcaaggtgcctgcagttggcagactgttacatactgctacgggccgagatctgtagccctgcttggaaactccacttytgctgaatggaagaaaaatcccgctgtgtttgtcatcytttttttcctcctttctttttgccttgctgtccaataaagtagctctgaggcctggccctcragcctatagtgttctttacagctccagctgcagttttgtggcaacgtttcagcattgtacaggataaaaagagcactctgattcaagcatgtggaaaggaggtacacaatgtaaacctacaacatatccactgtgcaccaaagggggttgccacatgatagcagcagtctgccaaatcctctgaacttttggcatccgataatagggagggtgcagtaaaagaaaatcaaggaaggaaattattaaggagttgggaaaagggtacgacttatgtcattttttgcagggcaaactctttat

SEQ ID NO: 25938 - DNA, 600 bp, Chicken  19866894241673_1
ctgaacttcctgagaacagaggcaggctgtctttatcagatagtttttgattattcgagcctggaacagcaaatgacaacttgatgcccaagaagcagctccttaccccacttttaagtgcaagtcttcccaacatgttggccaaccctggatgtctccatggtgctgacgttggaattgtgcgtcagtgtttctgttcaggtgctagctgatgggcttctctggggcacagaaatattttctcctaaatagagaagaacttactgttccctgaatgagcaagacatatttttagatgargaggcaattcaatttttatcagtgattttaagttcagagcaatttttttgctcatcactgtgagcatatggccccagaaaatggcagatacatgtgttcaagccagctacartacatctctatgtgtgatctatttgggggttgtgcactgagtttccataaacatcaatacacacaattttgttctgtcttattgtacattctccagggtctgccctgagcctgcttttggaactcaggtttgagctcccttctctgtgatcccttcatcatcaaattcccacccaaggtcaattgact

SEQ ID NO: 25939 - DNA, 600 bp, Chicken  19866894241673_2
tttaagtgcaagtcttcccaacatgttggccaaccctggatgtctccatggtgctgacgttggaattgtgcgtcagtgtttctgttcaggtgctagctgatgggcttctctggggcacagaaatattttctcctaaatagagaagaacttactgttccctgaatgagcaagacatatttttagatgargaggcaattcaatttttatcagtgattttaagttcagagcaatttttttgctcatcactgtgagcatatggccccagaaaatggcagatacatgtgttcaagccagctacartacatctctatgtgtgatctatttgggggttgtgcactgagtttccataaacatcaatacacacaattttgttctgtcttattgtacattctccagggtctgccctgagcctgcttttggaactcaggtttgagctcccttctctgtgatcccttcatcatcaaattcccacccaaggtcaattgactgcaaagtccactaaggaataatatcttttcaagactctgcctggagaaatttttaagaaaaatggtgtgaaatcattcctgcaaaaggaaagtgaccctgaatgggttggtg

SEQ ID NO: 25940 - DNA, 600 bp, Chicken  19866894241684_1
ctttccagtgagtaagtgtcgtgtcagtgggtcgctgttttctgaggtggatggcagtttggaaaaacctgtgtcatctcatgtcatcagcctgtagctcacaagtctgtaaaggtttctgcttaagtgggctttcagtgtgctcttgtggcagagaccaaacgttatctctaatgggacaaatggctcacaggcgcttctaatggaggatgaggactgaaggtatgtcaagagactagaattgaagctctttgagattatgcttgggaagcctgaaaaagggtgtgttatttaaattgrgtcctaggcacttacccatggtaatagtgctaatggttatggtggagaaggcagttatgttctgagtagagaggatggattgtcatgcaccagttgtgacataatcttgcacacagtggcagcttagcagtttaggttgctgctggagtcctgcagtgtggttattgtggcttattcccaggtgtcaaactaaccagacctgtttcctgttttctccaggttctacgtggcggagccagtcagcgtcctttgaccccaaaccagaaccagcagggacagcagactgatccgctggtggct

SEQ ID NO: 25941 - DNA, 600 bp, Chicken  19866894241684_2
ctaggcacttacccatggtaatagtgctaatggttatggtggagaaggcagttatgttctgagtagagaggatggattgtcatgcaccagttgtgacataatcttgcacacagtggcagcttagcagtttaggttgctgctggagtcctgcagtgtggttattgtggcttattcccaggtgtcaaactaaccagacctgtttcctgttttctccaggttctacgtggcggagccagtcagcgtcctttgaccccaaaccagaaccagcagggacagcagactgatccgctggtggctgcygccgccgtcaactctgcccttgcctttggacaagggctggcagcmgggatgccaggtagggagcccaagggggctgtgacttctccagtgaccagtgagatccaagaagattacatctcragtctctgcatggtgtcacgtttrcctggcattcagcagttttcattttattacagcgtttcatggttttaatctgtgggtatacaaggcattttggagaggctgttwcatacagcataaccacctgtgcagcattaagttaaagcagggtgtagattcctgtatcccaggtgaaacaaa

SEQ ID NO: 25942 - DNA, 600 bp, Chicken  19866894241684_3
aggcagttatgttctgagtagagaggatggattgtcatgcaccagttgtgacataatcttgcacacagtggcagcttagcagtttaggttgctgctggagtcctgcagtgtggttattgtggcttattcccaggtgtcaaactaaccagacctgtttcctgttttctccaggttctacgtggcggagccagtcagcgtcctttgaccccaaaccagaaccagcagggacagcagactgatccgctggtggctgcygccgccgtcaactctgcccttgcctttggacaagggctggcagcmgggatgccaggtagggagcccaagggggctgtgacttctccagtgaccagtgagatccaagaagattacatctcragtctctgcatggtgtcacgtttrcctggcattcagcagttttcattttattacagcgtttcatggttttaatctgtgggtatacaaggcattttggagaggctgttwcatacagcataaccacctgtgcagcattaagttaaagcagggtgtagattcctgtatcccaggtgaaacaaatgttatcagctgtactgacacattaattgcatacccagagctgat

SEQ ID NO: 25943 - DNA, 600 bp, Chicken  19866894241684_4
ttagcagtttaggttgctgctggagtcctgcagtgtggttattgtggcttattcccaggtgtcaaactaaccagacctgtttcctgttttctccaggttctacgtggcggagccagtcagcgtcctttgaccccaaaccagaaccagcagggacagcagactgatccgctggtggctgcygccgccgtcaactctgcccttgcctttggacaagggctggcagcmgggatgccaggtagggagcccaagggggctgtgacttctccagtgaccagtgagatccaagaagattacatctcragtctctgcatggtgtcacgtttrcctggcattcagcagttttcattttattacagcgtttcatggttttaatctgtgggtatacaaggcattttggagaggctgttwcatacagcataaccacctgtgcagcattaagttaaagcagggtgtagattcctgtatcccaggtgaaacaaatgttatcagctgtactgacacattaattgcatacccagagctgatggctcccattgaaagtcatttccttgattttctatggttcatgctaccttaygtgattattttaagacctctgag

SEQ ID NO: 25944 - DNA, 600 bp, Chicken  19866894241684_5
gtcctgcagtgtggttattgtggcttattcccaggtgtcaaactaaccagacctgtttcctgttttctccaggttctacgtggcggagccagtcagcgtcctttgaccccaaaccagaaccagcagggacagcagactgatccgctggtggctgcygccgccgtcaactctgcccttgcctttggacaagggctggcagcmgggatgccaggtagggagcccaagggggctgtgacttctccagtgaccagtgagatccaagaagattacatctcragtctctgcatggtgtcacgtttrcctggcattcagcagttttcattttattacagcgtttcatggttttaatctgtgggtatacaaggcattttggagaggctgttwcatacagcataaccacctgtgcagcattaagttaaagcagggtgtagattcctgtatcccaggtgaaacaaatgttatcagctgtactgacacattaattgcatacccagagctgatggctcccattgaaagtcatttccttgattttctatggttcatgctaccttaygtgattattttaagacctctgagatatcttagtactgttcattagcc

SEQ ID NO: 25945 - DNA, 600 bp, Chicken  19866894241684_6
ggagccagtcagcgtcctttgaccccaaaccagaaccagcagggacagcagactgatccgctggtggctgcygccgccgtcaactctgcccttgcctttggacaagggctggcagcmgggatgccaggtagggagcccaagggggctgtgacttctccagtgaccagtgagatccaagaagattacatctcragtctctgcatggtgtcacgtttrcctggcattcagcagttttcattttattacagcgtttcatggttttaatctgtgggtatacaaggcattttggagaggctgttwcatacagcataaccacctgtgcagcattaagttaaagcagggtgtagattcctgtatcccaggtgaaacaaatgttatcagctgtactgacacattaattgcatacccagagctgatggctcccattgaaagtcatttccttgattttctatggttcatgctaccttaygtgattattttaagacctctgagatatcttagtactgttcattagccttgtctgcccatccctgtcaagtgcttgattttaacaggttaaggacttccctgtcataatttcgtccagacaaatactagtgg

SEQ ID NO: 25946 - DNA, 521 bp, Chicken  19866894241684_7
agatccaagaagattacatctcragtctctgcatggtgtcacgtttrcctggcattcagcagttttcattttattacagcgtttcatggttttaatctgtgggtatacaaggcattttggagaggctgttwcatacagcataaccacctgtgcagcattaagttaaagcagggtgtagattcctgtatcccaggtgaaacaaatgttatcagctgtactgacacattaattgcatacccagagctgatggctcccattgaaagtcatttccttgattttctatggttcatgctaccttaygtgattattttaagacctctgagatatcttagtactgttcattagccttgtctgcccatccctgtcaagtgcttgattttaacaggttaaggacttccctgtcataatttcgtccagacaaatactagtggcttagaaaagaaaaagaggcaaaagcagagttttgttataattctgcaggagagaagctgctgtaggggttttagctctgatccatgaga

SEQ ID NO: 25947 - DNA, 600 bp, Chicken  19866894241696_1
aggacagagttgttttttaataagtccaagaaattcctaatgtatttactttcttcattggtaacttgattcagaatttcttctgcaattcagaaaatgattattgaaggtaaaattttgttatctccagtaaaacgtgtgatttaattgatactgtttgtaattgttactataaagattgctcggatttctgtggaaattgtattcaattttattgtttttattgcttctgaaataggatatattgctgtttttaatttaactttcataatgtatctcctacgttcagatgctgtaacwgtgtacagatggtgaagctgggaaatgctgacattttagattttgcctggtgtttgttaataagaggagaggactctaaagttacaccattgttttctgcaaacaagaattaatttcttcaaattcttgtgcatttatgtgcatgaatatgaaaaattcatgggaagtgtgagcctgctcttatttgcaaaatatttgaggggaatgtggttgagtggtatgaattgtcaatgtaatctctggagatcaggaagtatatactaaactttatttggtagtgtcattcttgcttaaggcctg

SEQ ID NO: 25948 - DNA, 600 bp, Chicken  19866894241709_1
ctttcgtatttatatggtcggctggcttgcttttccttttcatcaatagcttcatacttgtacagattatttcacattatcaacaggaaacacaagttgccagaaaagtcaaagagcagtaataagtagaccaaaattcagaagtgacatcgttgtctttagcaaggcttttcataccagcagcactttgattaacataaatatgtacattgtataatggatgttgtatgtaagcaatgctttgttagggttccaagggcattcataggtcttaactgcagcgagcagccactggcctaycctgatgtctgtctgtaagggaaccygcctgccatgtggactaaaactgcattgtagccttgacctggctgccagstgctgctgcttatgactgaactcactggaaggaccttagacctggttcatcacttgccacatctggagctgcaggtggactccgttacctgcagtcatctctgcctgctgttgctaratgyggtggggctgtgccgtggccgctgagggaatggcctgtgctggaggcttctttctgactcatgccttcccaccaagcagccccagttatgctccccaacaccc

SEQ ID NO: 25949 - DNA, 600 bp, Chicken  19866894241709_2
ttgcttttccttttcatcaatagcttcatacttgtacagattatttcacattatcaacaggaaacacaagttgccagaaaagtcaaagagcagtaataagtagaccaaaattcagaagtgacatcgttgtctttagcaaggcttttcataccagcagcactttgattaacataaatatgtacattgtataatggatgttgtatgtaagcaatgctttgttagggttccaagggcattcataggtcttaactgcagcgagcagccactggcctaycctgatgtctgtctgtaagggaaccygcctgccatgtggactaaaactgcattgtagccttgacctggctgccagstgctgctgcttatgactgaactcactggaaggaccttagacctggttcatcacttgccacatctggagctgcaggtggactccgttacctgcagtcatctctgcctgctgttgctaratgyggtggggctgtgccgtggccgctgagggaatggcctgtgctggaggcttctttctgactcatgccttcccaccaagcagccccagttatgctccccaacaccctttttcttactgttactatgctctgt

SEQ ID NO: 25950 - DNA, 600 bp, Chicken  19866894241709_3
ttatcaacaggaaacacaagttgccagaaaagtcaaagagcagtaataagtagaccaaaattcagaagtgacatcgttgtctttagcaaggcttttcataccagcagcactttgattaacataaatatgtacattgtataatggatgttgtatgtaagcaatgctttgttagggttccaagggcattcataggtcttaactgcagcgagcagccactggcctaycctgatgtctgtctgtaagggaaccygcctgccatgtggactaaaactgcattgtagccttgacctggctgccagstgctgctgcttatgactgaactcactggaaggaccttagacctggttcatcacttgccacatctggagctgcaggtggactccgttacctgcagtcatctctgcctgctgttgctaratgyggtggggctgtgccgtggccgctgagggaatggcctgtgctggaggcttctttctgactcatgccttcccaccaagcagccccagttatgctccccaacaccctttttcttactgttactatgctctgtccttgttaaggactgtggcttctgtctaggaaaaaaatatatgtttaata

SEQ ID NO: 25951 - DNA, 600 bp, Chicken  19866894241709_4
aacataaatatgtacattgtataatggatgttgtatgtaagcaatgctttgttagggttccaagggcattcataggtcttaactgcagcgagcagccactggcctaycctgatgtctgtctgtaagggaaccygcctgccatgtggactaaaactgcattgtagccttgacctggctgccagstgctgctgcttatgactgaactcactggaaggaccttagacctggttcatcacttgccacatctggagctgcaggtggactccgttacctgcagtcatctctgcctgctgttgctaratgyggtggggctgtgccgtggccgctgagggaatggcctgtgctggaggcttctttctgactcatgccttcccaccaagcagccccagttatgctccccaacaccctttttcttactgttactatgctctgtccttgttaaggactgtggcttctgtctaggaaaaaaatatatgtttaatataatgggatgttgtgagttggatggtcttatacattccagtaagtaggtggggggtgttttgcaagaattaagctaacaaataaagaaataaataaaagttaataaatatgctggga

SEQ ID NO: 25952 - DNA, 600 bp, Chicken  19866894241709_5
taaatatgtacattgtataatggatgttgtatgtaagcaatgctttgttagggttccaagggcattcataggtcttaactgcagcgagcagccactggcctaycctgatgtctgtctgtaagggaaccygcctgccatgtggactaaaactgcattgtagccttgacctggctgccagstgctgctgcttatgactgaactcactggaaggaccttagacctggttcatcacttgccacatctggagctgcaggtggactccgttacctgcagtcatctctgcctgctgttgctaratgyggtggggctgtgccgtggccgctgagggaatggcctgtgctggaggcttctttctgactcatgccttcccaccaagcagccccagttatgctccccaacaccctttttcttactgttactatgctctgtccttgttaaggactgtggcttctgtctaggaaaaaaatatatgtttaatataatgggatgttgtgagttggatggtcttatacattccagtaagtaggtggggggtgttttgcaagaattaagctaacaaataaagaaataaataaaagttaataaatatgctgggatttt

SEQ ID NO: 25953 - DNA, 599 bp, Chicken  19866894241718_1
  misc_feature (1)..(28): n is any nucleotide
nnnnnnnnnnnnnnnnnnnnnnnnnnnnaattcctccttttggctgaagagggaaaaattaatctcttcactgaagataatatgaaaataatttcctgcaggaaatccaccctgttttcacacagggaagaagtattacccaggaaccagctatgaagctggcaagaacagcacatatcgtgtgccagcgggcacccagtgcccttactggagcagcagccagctgcctggtagctgtccaccgagctcgagcagctacaccagctcctgattcagtcagtgtctgcacagcttgggaaratacagagcctgcagctccagagatctgctccagcctcaccccctgctggttgacacaaaatggcccctgtttggctcctactgaatagagcagaaatacgygccattgaaagaggccatcgttagctttctgccttgacagcaagatcgtaaggcttcagttcctgctcattccagacagggttttctgatggcaggttgtgtttaggcaccagcctgcttggctgccccagtgagacctrtgctgtctccaggactggccattctgggactgccagcactaaagcaagtcagggaay

SEQ ID NO: 25954 - DNA, 600 bp, Chicken  19866894241718_2
aaatccaccctgttttcacacagggaagaagtattacccaggaaccagctatgaagctggcaagaacagcacatatcgtgtgccagcgggcacccagtgcccttactggagcagcagccagctgcctggtagctgtccaccgagctcgagcagctacaccagctcctgattcagtcagtgtctgcacagcttgggaaratacagagcctgcagctccagagatctgctccagcctcaccccctgctggttgacacaaaatggcccctgtttggctcctactgaatagagcagaaatacgygccattgaaagaggccatcgttagctttctgccttgacagcaagatcgtaaggcttcagttcctgctcattccagacagggttttctgatggcaggttgtgtttaggcaccagcctgcttggctgccccagtgagacctrtgctgtctccaggactggccattctgggactgccagcactaaagcaagtcagggaaygagaacyaaacaaatcccaacactattctgaggactgctttaacacagcttaaaaagtaaaacaaaaatctgagtggaaaacatttctatctttagccatcag

SEQ ID NO: 25955 - DNA, 583 bp, Chicken  19866894241718_3
cgagctcgagcagctacaccagctcctgattcagtcagtgtctgcacagcttgggaaratacagagcctgcagctccagagatctgctccagcctcaccccctgctggttgacacaaaatggcccctgtttggctcctactgaatagagcagaaatacgygccattgaaagaggccatcgttagctttctgccttgacagcaagatcgtaaggcttcagttcctgctcattccagacagggttttctgatggcaggttgtgtttaggcaccagcctgcttggctgccccagtgagacctrtgctgtctccaggactggccattctgggactgccagcactaaagcaagtcagggaaygagaacyaaacaaatcccaacactattctgaggactgctttaacacagcttaaaaagtaaaacaaaaatctgagtggaaaacatttctatctttagccatcaggagcaagacttatctaagcagccccacacaggaactggcaatgggaatgggggtaagttagggttcaacttgttcctaaacaacttgttttaattgttctgtcagggccacagtgggatgcta

SEQ ID NO: 25956 - DNA, 526 bp, Chicken  19866894241718_4
ratacagagcctgcagctccagagatctgctccagcctcaccccctgctggttgacacaaaatggcccctgtttggctcctactgaatagagcagaaatacgygccattgaaagaggccatcgttagctttctgccttgacagcaagatcgtaaggcttcagttcctgctcattccagacagggttttctgatggcaggttgtgtttaggcaccagcctgcttggctgccccagtgagacctrtgctgtctccaggactggccattctgggactgccagcactaaagcaagtcagggaaygagaacyaaacaaatcccaacactattctgaggactgctttaacacagcttaaaaagtaaaacaaaaatctgagtggaaaacatttctatctttagccatcaggagcaagacttatctaagcagccccacacaggaactggcaatgggaatgggggtaagttagggttcaacttgttcctaaacaacttgttttaattgttctgtcagggccacagtgggatgcta

SEQ ID NO: 25957 - DNA, 519 bp, Chicken  19866894241718_5
agcctgcagctccagagatctgctccagcctcaccccctgctggttgacacaaaatggcccctgtttggctcctactgaatagagcagaaatacgygccattgaaagaggccatcgttagctttctgccttgacagcaagatcgtaaggcttcagttcctgctcattccagacagggttttctgatggcaggttgtgtttaggcaccagcctgcttggctgccccagtgagacctrtgctgtctccaggactggccattctgggactgccagcactaaagcaagtcagggaaygagaacyaaacaaatcccaacactattctgaggactgctttaacacagcttaaaaagtaaaacaaaaatctgagtggaaaacatttctatctttagccatcaggagcaagacttatctaagcagccccacacaggaactggcaatgggaatgggggtaagttagggttcaacttgttcctaaacaacttgttttaattgttctgtcagggccacagtgggatgcta

SEQ ID NO: 25958 - DNA, 600 bp, Chicken  19866894241739_1
ttggggtgaggcactgaatctgtagtttgataacctggttggcttcattggaggtcttctagtacacaaccggtcagaaagaccagcgtgagatagcacagttttggaataaactcagtcaggtttcttgtttaaagcattttgctgagttacgtttgtaccggcaggatttgtgttggattagacttgtctaagcttctatgactttatgctggttcacacatcacccagcttcctgcatcagggataaacatggtccatgcccaggttgagtattctgactaattcagaagtggtcaygttctgtgccaagaccttccccagatcaagtttgtactgctacagagtctaaggattttttattattttactttttttcctctactaactggtttatttgatcatggaactgtggcttgacaaagtgagaagttattaaacttgctccagcatggtctttgaatgtggaaatgcttaatttccctttccatgccttagtttgtgaggctgatgctcttaacgaccagctgtgctctttctgtcatgaaatctgcagggtgaagaacttgctctgcagatggactgctgtactgttgtagt

SEQ ID NO: 25959 - DNA, 600 bp, Chicken  19866894241739_2
actgtggcttgacaaagtgagaagttattaaacttgctccagcatggtctttgaatgtggaaatgcttaatttccctttccatgccttagtttgtgaggctgatgctcttaacgaccagctgtgctctttctgtcatgaaatctgcagggtgaagaacttgctctgcagatggactgctgtactgttgtagtcatagcaaacatatagcgaaggctgtgtaacccctggctgccctcagtctgcttgttcagaagaactgtgcactgagggcaggctaggaaagcatcagttcatttacrcagtcttggaggcttagcatgctgtttattggtgcagggaagatgaggctcctgttgcagttcagggacagcaaacccagaaggcacagcaattgcagcccagcttgtttactagcgagggcttgaccggtttgtggtgagtgcatgggtccatgttcctcccagtgttatctgattatatgatctttgtctgaagagagaagtgtgaggttcatcttcaaatcttcttggtgggctgtaaatagcaaataaatgtttctttctggttttggaagtgatttgtaccatcgatgatttcct

SEQ ID NO: 25960 - DNA, 600 bp, Chicken  19866894241747_1
gcataaataacttcatgcctacctgaaatgcattggttcttacctccatcttcaggtgctgtgcactgctgattctgtggttgtgagtgggaaatatattgaagaggaaatggaagcattcgaggagcagaaaaaggaaaaagagatccatatgaagaaatgatacgatacagcactttaaaaaccaaagtacattggataattcagtatagagtagagctaggcgtggttcttcatgttaaaatgtcgtcttaaaaagcttaatattgcatgagaggatagttgtgcattgcatactgrcagagcatctttagcagttgcaagcccttaggtggacaaatgccaggcaggtaggagcagtgcctacccagggctgtcatggagcagctggcagcactgaagccctggctatgcccagctcacagggactaccatgagcactgcaggtagccgggtccgctcagttatgtgccctcacgtgtcacagtgtggtttatgagcccctgttacaaacttaataccttaattacagaaagactaaaaccttaattatggcactgtgtcacagaagggaagatcatayacaccagtgttctgtac

SEQ ID NO: 25961 - DNA, 600 bp, Chicken  19866894241747_2
tgtgcattgcatactgrcagagcatctttagcagttgcaagcccttaggtggacaaatgccaggcaggtaggagcagtgcctacccagggctgtcatggagcagctggcagcactgaagccctggctatgcccagctcacagggactaccatgagcactgcaggtagccgggtccgctcagttatgtgccctcacgtgtcacagtgtggtttatgagcccctgttacaaacttaataccttaattacagaaagactaaaaccttaattatggcactgtgtcacagaagggaagatcatayacaccagtgttctgtacccttggagaaacaaccactgagatgctgctgcttttgctgggctagcagctatttatccacttacactagcacaagmactacagtatctctattaccagttctcagtctccctgagcttggacttatgtttcagaatcactgtgagatccactgcatttctcccatttaagtagtgttcaaagcgtccttctcaggagaccatcttccaaacccctgcttaccccatcagggagctattaattcctcctttcttttaaaccaaagtggattttgtactagtta

SEQ ID NO: 25962 - DNA, 514 bp, Chicken  19866894241747_3
catggagcagctggcagcactgaagccctggctatgcccagctcacagggactaccatgagcactgcaggtagccgggtccgctcagttatgtgccctcacgtgtcacagtgtggtttatgagcccctgttacaaacttaataccttaattacagaaagactaaaaccttaattatggcactgtgtcacagaagggaagatcatayacaccagtgttctgtacccttggagaaacaaccactgagatgctgctgcttttgctgggctagcagctatttatccacttacactagcacaagmactacagtatctctattaccagttctcagtctccctgagcttggacttatgtttcagaatcactgtgagatccactgcatttctcccatttaagtagtgttcaaagcgtccttctcaggagaccatcttccaaacccctgcttaccccatcagggagctattaattcctcctttcttttaaaccaaagtggattttgtactagttaacatcaat

SEQ ID NO: 25963 - DNA, 600 bp, Chicken  19866894241750_1
gtgtctgggaaaaagaagcctaaggtccagttctgtcttcctctgtgacgttggataattgaattattcttccaaggtgattcggaagatagccaaataaaaatttgcacgaaactcaaatagcagaaaaaatgagtccaaataagtgccaaagggcaaagatcaatggtaaaataatctgatgattgttactgatattgtggttactgcaacacttcacatatatttttttgttcttagtttttttgtagcagttttagctaaacagaagtttcacatatatgtctcagaaatactatrtagactattcctgtctaaggaatagaaaagaaaaatgaaatatttacaaaactatcaacatttcttatagaatactttacaattataagtgctttccctttcttacaaagatctacaaactaaaagcatgtaacagaaagagccaagagacctctaagatgctattaattgaggagtataacctctctcttgtccatttgtttccttaaataacaagcttgccttagtgggaaatgagaaaaggtgctgtggccagccctagcaacacatcttgtcctgtagctaaattacttaacatca

SEQ ID NO: 25964 - DNA, 600 bp, Chicken  19866894241754_1
ctgatactaaacatccaggtaaaacgttaactaaaggtgtttctgtggattaagtatagtaaataggtgcttagagttgatgcttggagctgcatgtcatcaacaggggaaaagaatccaacaacaactatgggtctcacggtgacctagctgtaaagaatgttctgttaaaggactttctggttttgtgcaacaaatgactgcatgcacaaagtcttacaaagaaaagaatatacatttttcttagcgctgtattttaagttaaggagaaattacacaaagggtagggcttctgacttygtgtgatttttatcttttaaatgagaaacagtgctccccrtgcaaccagaaatctggtgtagaaatatcttttcctgtaagagatgagattgaaatcataggatagagagctgccactctgtgatgtctagatgtctagcctcccttttactttgctatttttgtcatataaggtgtcctggtgtgatgttagctctcctttctgtcatctttgcaggtgtaagaactgtcttttctgttgttaattaatacagaccttggaccaacactgtcttcaggggcatttgccaggcagggagt

SEQ ID NO: 25965 - DNA, 600 bp, Chicken  19866894241754_2
ttctgtggattaagtatagtaaataggtgcttagagttgatgcttggagctgcatgtcatcaacaggggaaaagaatccaacaacaactatgggtctcacggtgacctagctgtaaagaatgttctgttaaaggactttctggttttgtgcaacaaatgactgcatgcacaaagtcttacaaagaaaagaatatacatttttcttagcgctgtattttaagttaaggagaaattacacaaagggtagggcttctgacttygtgtgatttttatcttttaaatgagaaacagtgctccccrtgcaaccagaaatctggtgtagaaatatcttttcctgtaagagatgagattgaaatcataggatagagagctgccactctgtgatgtctagatgtctagcctcccttttactttgctatttttgtcatataaggtgtcctggtgtgatgttagctctcctttctgtcatctttgcaggtgtaagaactgtcttttctgttgttaattaatacagaccttggaccaacactgtcttcaggggcatttgccaggcagggagtccctgagtggagctgagctgttgtcttgcaatgtgtttgt

SEQ ID NO: 25966 - DNA, 600 bp, Chicken  19866894241756_1
tagagaagtaaagttttacagaggagatattaagaattaatggaatcacagaattattaaagttggaaataaccactaagaatcatccagtccaaccatcagcctacccccaccatgcccactgaccatgtccctcagtgccacacccacatggttcttcaacacctccagggatggtgactccaccacctccctgagcagcctacatctgaacacagcactcaaggtgcagcctcaccagtgtagagtacaaaaatgttgcccttttcagcatcccttttctgtactgtgtacgattcyggagttacatcttttctcaactgttagcactttcccaagtaatactggtttttctctctttattcacagctgtttctgttctaaactcggctcctcatgctctcaggccaatcatgtcaatctggtggagtaaaggtctaaaggtaaattatgttcacatctctttttaggtatttttgtgtccagtaattgtattgggtatcttcacagtgattgagaatcaggtgtcccagtgtattttccagcccttctgtaatttgcaaatgctcacagtcagaaatggtatattacaaagagccg

SEQ ID NO: 25967 - DNA, 353 bp, Chicken  19866894241758_1
caaaaacccatgagtcagcaaaggagtaaatccagataggcaaagtaatcagtacgaggatatctgcaatggccaggttcaagatcagcaggactgaaggagacatttgcttcattttagtacaaacagtccagatgacaatgcaatttccaggagtcccaataataaatgacaagctcagtatcatgcaaactaccagcttcacggtgttccatgtcatgtgggtactggtttcctcagcttgactcattctggatattcttcagacctttttggaaggcaatatccttggcaccttgygctctgcttttattctgaccatgcaagaaagcaaacttggagaaacttcccta

SEQ ID NO: 25968 - DNA, 599 bp, Chicken  19866894241761_1
  misc_feature (1)..(128): n is any nucleotide
nnnnnnnnnnnnnnnnnnnnnnnnnnnnnnnnnnnnnnnnnnnnnnnnnnnnnnnnnnnnnnnnnnnnnnnnnnnnnnnnnnnnnnnnnnnnnnnnnnnnnnnnnnnnnnnnnnnnnnnnnnnnnnnntaaacgaagttataatttaattttaaggtccataatttatttaaacttcttcactttagaaatgttacatttgcctagactgtatcccgggctgcatcaaaagaggggtggcagcaggacaatgaaggtgattgtccctctctgttctgccctcgtgaggccccatttggartactgcaaccagccctggggacaccagctcaagaaagacatacagctgttgtagagggtccagaggaggccatgaggatgctcagagggctagaggacctctcctatgaagaaaggctgaaggagttgggcttgtttaacttggagaagagaaagctccaggaagatcttactgtggcctttcagtacttataagggaacttataaggtcagaaaaccaacttgttgcatggtctgataggaataagacaaggggaaatgcctttaaactaaaagagggaagatttaatttgaatgtta

SEQ ID NO: 25969 - DNA, 600 bp, Chicken  19866894241761_2
cttataagggaacttataaggtcagaaaaccaacttgttgcatggtctgataggaataagacaaggggaaatgcctttaaactaaaagagggaagatttaatttgaatgttagaaaaacattcttcactcagagggtggtgaggcactggcacaggctgcccggagaagaacggtgaatgccccatccctagaatcgttcaaggccaggggccttgtagcctgagctggtgggtggcagctctgccctacccaagccattctatgattctattaatttctcttaattattcatgtaaaawaataataataataaaaacataaataaataaataaataaataaataaataaaaatgaggaattagctttgagtttggctactttaccagccaaaatcagagaaggaaattggtcttcttctgaggcacaatacaagagataaaggtacgctttggcagctgttggtaccaaacatcagcagatctacacagtacagaaaaccttttcatcaaaagtgcaagagagcatttaaggtccaagccaacacaaagtgaatttttccaaatatttaccatcagaaacatagtgatgctgtggattg

SEQ ID NO: 25970 - DNA, 599 bp, Chicken  19866894241765_1
  misc_feature (1)..(141): n is any nucleotide
nnnnnnnnnnnnnnnnnnnnnnnnnnnnnnnnnnnnnnnnnnnnnnnnnnnnnnnnnnnnnnnnnnnnnnnnnnnnnnnnnnnnnnnnnnnnnnnnnnnnnnnnnnnnnnnnnnnnnnnnnnnnnnnnnnnnnnnnnnnnnctgctcctgcactccatctctccgtgctctccagcgattgctttggtccagttggtggatttgcacttaaacaggacttgtgtgtgcccctcgcaacgccagcaccgcgcacggccggatccccgcctgcctcactctgcagctgaagccgtgcgatcrttccacacatccacccgtgtgctccaggagccccaggagcagcctgcgcccagccgaggtgctgcgccygccccaacaccgacacgaggcacagagagccccgtagggaggaagtcctggcaccaaacgattgtgggtgaactgaagcattattacaacgggttccacttgctctggattgacaccaaggttgctgccaggatggtgtggaggctgctgcacggtcaggtcctcactaggagagagaggcgaagggtaagtgccagacatacaaacaacaacttgctaaaatggggtat

SEQ ID NO: 25971 - DNA, 599 bp, Chicken  19866894241765_2
  misc_feature (1)..(72): n is any nucleotide
nnnnnnnnnnnnnnnnnnnnnnnnnnnnnnnnnnnnnnnnnnnnnnnnnnnnnnnnnnnnnnnnnnnnnnnnctgctcctgcactccatctctccgtgctctccagcgattgctttggtccagttggtggatttgcacttaaacaggacttgtgtgtgcccctcgcaacgccagcaccgcgcacggccggatccccgcctgcctcactctgcagctgaagccgtgcgatcrttccacacatccacccgtgtgctccaggagccccaggagcagcctgcgcccagccgaggtgctgcgccygccccaacaccgacacgaggcacagagagccccgtagggaggaagtcctggcaccaaacgattgtgggtgaactgaagcattattacaacgggttccacttgctctggattgacaccaaggttgctgccaggatggtgtggaggctgctgcacggtcaggtcctcactaggagagagaggcgaagggtaagtgccagacatacaaacaacaacttgctaaaatggggtattaagaggcttactgtagctaaagacatttaaccgtgtggtttctgtgcttctttgggacagttctttta

SEQ ID NO: 25972 - DNA, 599 bp, Chicken  19866894241766_1
  misc_feature (1)..(168): n is any nucleotide
nnnnnnnnnnnnnnnnnnnnnnnnnnnnnnnnnnnnnnnnnnnnnnnnnnnnnnnnnnnnnnnnnnnnnnnnnnnnnnnnnnnnnnnnnnnnnnnnnnnnnnnnnnnnnnnnnnnnnnnnnnnnnnnnnnnnnnnnnnnnnnnnnnnnnnnnnnnnnnnnnnnnnnnnaggtggagtttctcctcctttgtctcctcccggtaagaaggagcagtcggtgcgagggaggcgggtgctggggaagggcttcagcagaagacgcaggggaagcggacgaggtctcttctgtctccctctgcrgacgggggagtgggctccgtgtgctgcaatcgagccccttgtcacaagcagctttcccccaggagcaagctcttcatgacagaaaccttcccaggcagcatccggagygggaacggcagcttcacctagggacagagaggacagtagcatcggggacaaggacacctgctccccgcctctcccagggcacgtgctgcagaccatgggaaatggcatgagcaaggtaaagggagcgctggggtgcagctctgcagagagctgggtgctgcaggacaggcttgcagcactggaggtgggag

SEQ ID NO: 25973 - DNA, 599 bp, Chicken  19866894241766_2
  misc_feature (1)..(60): n is any nucleotide
nnnnnnnnnnnnnnnnnnnnnnnnnnnnnnnnnnnnnnnnnnnnnnnnnnnnnnnnnnnnaggtggagtttctcctcctttgtctcctcccggtaagaaggagcagtcggtgcgagggaggcgggtgctggggaagggcttcagcagaagacgcaggggaagcggacgaggtctcttctgtctccctctgcrgacgggggagtgggctccgtgtgctgcaatcgagccccttgtcacaagcagctttcccccaggagcaagctcttcatgacagaaaccttcccaggcagcatccggagygggaacggcagcttcacctagggacagagaggacagtagcatcggggacaaggacacctgctccccgcctctcccagggcacgtgctgcagaccatgggaaatggcatgagcaaggtaaagggagcgctggggtgcagctctgcagagagctgggtgctgcaggacaggcttgcagcactggaggtgggagatgctggttgggctctgtttgctgtgtgatgccgagcagcgttacgcgtgccagggagccaccacgctgatgctgaaaacagcacaaggcacagctggtggaaaaact

SEQ ID NO: 25974 - DNA, 600 bp, Chicken  19866894241771_1
tcatcactgttaagtaactcatcagaaaataaagagggaattatcaaatgggaattgccaagtaattagttctctgaagcagatgacatacaactgttaaagggaggggcttccctgttagtcatatgtcagagtagagcccactaatctgtaaataaaaatgcatttcacatgattagcgcaatgggtttttaaccactagcggtacacgaagaattaatttgcaactttttgtgctgtaataaagccggcaagattttctccctttgcatacaatgcatttcccaacgctgcggctcrcccgctgtcacactgcctggagacagacggccatgaagccrggctgctaccagggaggggacgtgctgaagggctaaggaagaggctaagtgcatttactatcatagtaaccggaaaaggcactccctgctcagctgctccacgtgacgctgacaaggacggcaccaatgagcaaccgttccctggcacaccaattctgagcgcggcgcagggaggattaagcctgctttctgcacttagccttccccgctgaagcctgactttcttcaagcagctcgtctcacagaaatgttcagtttg

SEQ ID NO: 25975 - DNA, 600 bp, Chicken  19866894241771_2
tatcaaatgggaattgccaagtaattagttctctgaagcagatgacatacaactgttaaagggaggggcttccctgttagtcatatgtcagagtagagcccactaatctgtaaataaaaatgcatttcacatgattagcgcaatgggtttttaaccactagcggtacacgaagaattaatttgcaactttttgtgctgtaataaagccggcaagattttctccctttgcatacaatgcatttcccaacgctgcggctcrcccgctgtcacactgcctggagacagacggccatgaagccrggctgctaccagggaggggacgtgctgaagggctaaggaagaggctaagtgcatttactatcatagtaaccggaaaaggcactccctgctcagctgctccacgtgacgctgacaaggacggcaccaatgagcaaccgttccctggcacaccaattctgagcgcggcgcagggaggattaagcctgctttctgcacttagccttccccgctgaagcctgactttcttcaagcagctcgtctcacagaaatgttcagtttgcaaaacctgaagggccttggtgcatgggtacctgacaaaca

SEQ ID NO: 25976 - DNA, 600 bp, Chicken  19866894241790_1
cccgagggataagggactgactgggctacggatggtttgcagagatgttgcccagtggggcaggctgaatgcaacagggcaactggagtatactcgttggtattctggtccagcatattggtgcccgtggcagggatctggcagcagcatgcagacagcatgcagtccccaggatggagcaaggcacagaggatgcccaccacctgctctgagcttctgccctatccaaaacccacgcactgggtcacggcggggctggggttttgcagccgtgttgcccatcagtcagagcaccaaacrcagccccgctctggtcctgagcacctctcgacagcagctcacagctggagaaccacgtcaaatcaaccccctgtgaaggagggggggaggttttgctttgatctgcacgcagagcatgtggcttggaaagcgctcgcctgtttccttctgcttctggctttaggtctggctaagtaacctggaaatgagcacagattcatcattcagggacaaaacgaaacatgttttagttagattgaagtgaaatttgagaaatgctgtccttcctaaaatttcttaatatatatatcattatttttt

SEQ ID NO: 25977 - DNA, 599 bp, Chicken  19866894241792_1
  misc_feature (1)..(6): n is any nucleotide
nnnnnnatgcccttgctgacagcagtcttctgttacccagagcatccaaaatgaggtgggatctccacagacacaaaattaccagccagccaaaaactatcagtctgaatgcaagaggcaacttactttccagttctgcaatcatgcaagaaaccagggcagacagcagccccctttggggagctgatttgggatgggggcttaggcactgccaatttctcttccttgtgttgcctttgtccagttacttgtctgatagaaaagctgtgaacaaagttcataacagctgctcagaaatgytacttgatyatgttagcagctcagcacrttccaccaggttgtttacaagtcttacagttctgatactggacttttcctggaagctgagcaggcaaaggaccagtcatggagctatcagggctgacataatgggtaatcccagtgtactttgctcattgcagacactcactgcmtttctttcaggtagaagcagattgcccaagctgctgtcagtgcccacaacatagacagaaggtgcttttctcacagatttttacaagtttcagttctgctagttgagagtgatagaagaaaccaca

SEQ ID NO: 25978 - DNA, 600 bp, Chicken  19866894241792_2
cccttgctgacagcagtcttctgttacccagagcatccaaaatgaggtgggatctccacagacacaaaattaccagccagccaaaaactatcagtctgaatgcaagaggcaacttactttccagttctgcaatcatgcaagaaaccagggcagacagcagccccctttggggagctgatttgggatgggggcttaggcactgccaatttctcttccttgtgttgcctttgtccagttacttgtctgatagaaaagctgtgaacaaagttcataacagctgctcagaaatgytacttgatyatgttagcagctcagcacrttccaccaggttgtttacaagtcttacagttctgatactggacttttcctggaagctgagcaggcaaaggaccagtcatggagctatcagggctgacataatgggtaatcccagtgtactttgctcattgcagacactcactgcmtttctttcaggtagaagcagattgcccaagctgctgtcagtgcccacaacatagacagaaggtgcttttctcacagatttttacaagtttcagttctgctagttgagagtgatagaagaaaccacagaatgacaga

SEQ ID NO: 25979 - DNA, 600 bp, Chicken  19866894241792_3
tctgttacccagagcatccaaaatgaggtgggatctccacagacacaaaattaccagccagccaaaaactatcagtctgaatgcaagaggcaacttactttccagttctgcaatcatgcaagaaaccagggcagacagcagccccctttggggagctgatttgggatgggggcttaggcactgccaatttctcttccttgtgttgcctttgtccagttacttgtctgatagaaaagctgtgaacaaagttcataacagctgctcagaaatgytacttgatyatgttagcagctcagcacrttccaccaggttgtttacaagtcttacagttctgatactggacttttcctggaagctgagcaggcaaaggaccagtcatggagctatcagggctgacataatgggtaatcccagtgtactttgctcattgcagacactcactgcmtttctttcaggtagaagcagattgcccaagctgctgtcagtgcccacaacatagacagaaggtgcttttctcacagatttttacaagtttcagttctgctagttgagagtgatagaagaaaccacagaatgacagaggttggaagggacttctga

SEQ ID NO: 25980 - DNA, 600 bp, Chicken  19866894241792_4
ctttggggagctgatttgggatgggggcttaggcactgccaatttctcttccttgtgttgcctttgtccagttacttgtctgatagaaaagctgtgaacaaagttcataacagctgctcagaaatgytacttgatyatgttagcagctcagcacrttccaccaggttgtttacaagtcttacagttctgatactggacttttcctggaagctgagcaggcaaaggaccagtcatggagctatcagggctgacataatgggtaatcccagtgtactttgctcattgcagacactcactgcmtttctttcaggtagaagcagattgcccaagctgctgtcagtgcccacaacatagacagaaggtgcttttctcacagatttttacaagtttcagttctgctagttgagagtgatagaagaaaccacagaatgacagaggttggaagggacttctgagtccatctgatccaacccctgcttcagcagggacatccagagcctcttgcccagcacatccaggtggcttatgaagatctccaaggaggagattctctgggcaatctgtgccagtgttccatcagcctcacattaaaaagttctt

SEQ ID NO: 25981 - DNA, 600 bp, Chicken  19866894241793_1
tggatttagggttttggttctcattgcagtgcacttcagatggaattcagcctggacaagagctatgggattgtgatcccagctgagggggtgaagtagcgtatggaagagctgtattgacgtgctgagggaaaagctgaagaagccttttacaaataattacaggaaaagataggtgaaaaaatctttcattttcttattaagagaagtgtggtcagtaacgttacatacaaggcatctaaggacatcaaaagctagctttaagcacagctctatagcatgttagaacttgacctaagragctacagcaaaggcttgtggaagcttctgatttttctcccctgtaatgtggtccttgggcagtcagacagctacgcaatatgacagattcaaagcacgttgcatttgaaaatatcaaagaaattaagaataccacaccactgagaggtacatgcactcacaatgtatatgcaatcgtgcacatttacgtgcatgtttgtgcaaacatgtgtatcgtgatggttaccctcagagggtttttctaatctaaaaaccatgttttattcatattcatctaaagtatcaattgctgggttttct

SEQ ID NO: 25982 - DNA, 600 bp, Chicken  19866894241795_1
tgcaagcgctgagatcccacagctcagatgtttcccaccactcaggtgcatggaggcacttggcttgggtggaggcagtgggcactgggtgagccgcagagcagaggtcacacagcattttctttggtttgcccagccatatatttccccctaggcacccctatgggcttgccctctttcctattcactgtgatcaacccttatctatttatttattcattcatttgttcatctatctatttatttattatctcttgaaagcaacaaagttgtcatttacagtctccctaatgttctttyggctaaacaaaacccagtgcctggaaatctggaggctggctggtgttttaaggcygaagagatgccctcatggcccacagctttgcctccaggatatcccttgctgttaagctgcagctgatatggcttttctctccagcagcctgtgactgcaaaggggaaaaatctttgggttgctggagtctgagccacgttcccagaagactgtcatcctttctccctgtgtgtgtgttgacatggcaggatggagggctgcagcttgcctgctgcaaataggaggataattcctctggcccactg

SEQ ID NO: 25983 - DNA, 600 bp, Chicken  19866894241795_2
gcacttggcttgggtggaggcagtgggcactgggtgagccgcagagcagaggtcacacagcattttctttggtttgcccagccatatatttccccctaggcacccctatgggcttgccctctttcctattcactgtgatcaacccttatctatttatttattcattcatttgttcatctatctatttatttattatctcttgaaagcaacaaagttgtcatttacagtctccctaatgttctttyggctaaacaaaacccagtgcctggaaatctggaggctggctggtgttttaaggcygaagagatgccctcatggcccacagctttgcctccaggatatcccttgctgttaagctgcagctgatatggcttttctctccagcagcctgtgactgcaaaggggaaaaatctttgggttgctggagtctgagccacgttcccagaagactgtcatcctttctccctgtgtgtgtgttgacatggcaggatggagggctgcagcttgcctgctgcaaataggaggataattcctctggcccactgactcgtgggctgtaataagtttatgtctgcaaagcacggcgacagcgaggtggtc

SEQ ID NO: 25984 - DNA, 600 bp, Chicken  19866894241804_1
tatacctatatatagtagagagttgggatgtgatcgcaaccagcaacatacagacttcatagatgccggcttaaagctactgttaaattttattttcttttttttaggtttgttaaagttctgcactgtaggattttgtggaattggtagcttaattgatttcatacttatttcaatgcaggtaagttagcgctttcaaagcaaaatacgattctgtatttgctaaatttttgcttactaattccttgttagcattttaaccttaagaactgttatggattgaaaaatcaaggcatttcytgtagctctgtttacagcttgatattgcagaacacaggtgcaaaggatacttactgtttgtattaaaatgagatagatgaactgtcttcaaatacttataaggaatagcttggaatctacagcaccataaattcagtgtrtcagaacctctgagctctttctgtgacacctgagaggtgtcctggtgttcccagagtcctgaagttctgcatttacatgtgctttggtactggtggagcccatcacctgggatgttaaagcagcatgcacttgagaagacattgcccattttttccctgc

SEQ ID NO: 25985 - DNA, 600 bp, Chicken  19866894241804_2
gaattggtagcttaattgatttcatacttatttcaatgcaggtaagttagcgctttcaaagcaaaatacgattctgtatttgctaaatttttgcttactaattccttgttagcattttaaccttaagaactgttatggattgaaaaatcaaggcatttcytgtagctctgtttacagcttgatattgcagaacacaggtgcaaaggatacttactgtttgtattaaaatgagatagatgaactgtcttcaaatacttataaggaatagcttggaatctacagcaccataaattcagtgtrtcagaacctctgagctctttctgtgacacctgagaggtgtcctggtgttcccagagtcctgaagttctgcatttacatgtgctttggtactggtggagcccatcacctgggatgttaaagcagcatgcacttgagaagacattgcccattttttccctgcctcttcaaacctaagtcccacatcaccagagagctgttactgtaggattccggatggttaaatccccagctggggtgacatcttgtgacatcatttaattgccaaattgtcttattttacaatgcatccattgagcacaa

SEQ ID NO: 25986 - DNA, 600 bp, Chicken  19866894241806_1
atctatttgaagttgtagttcttttctaataactcccattcattttgaaacagtgcctactggtaaccagtggcaacaactgaatgcaattcagctaggaactgaatggagcaaacataactgctggtctgatgacatgtttacaggctctctactcctgtaacttgggaacactggaattgctataatggatgagaaagacgggctattttgtggttatgctctctgaggcagcctgcatcacagcctttagaaagaagtctgcttctgtaccggcaaagaggttatgttgcatcaccrtgccccaaatgagcctttatttgtggtttttaaagctttactgcctgaattgtggtttcctggttgtaagcgaggattcggcttcaactttcagggtctgttctttgctaatacatcttctagggagcaactgagtcactctcgtttctcctacatgtaactctgttrgtttctcgaggtarggaaaaatgsaaaatttaagttcttttatttcagtttatattgacagctattaatcagtacaccaatttcagtttaactttggtgtgtctttaaataaattatgtcttagggtggcca

SEQ ID NO: 25987 - DNA, 600 bp, Chicken  19866894241806_2
gaacactggaattgctataatggatgagaaagacgggctattttgtggttatgctctctgaggcagcctgcatcacagcctttagaaagaagtctgcttctgtaccggcaaagaggttatgttgcatcaccrtgccccaaatgagcctttatttgtggtttttaaagctttactgcctgaattgtggtttcctggttgtaagcgaggattcggcttcaactttcagggtctgttctttgctaatacatcttctagggagcaactgagtcactctcgtttctcctacatgtaactctgttrgtttctcgaggtarggaaaaatgsaaaatttaagttcttttatttcagtttatattgacagctattaatcagtacaccaatttcagtttaactttggtgtgtctttaaataaattatgtcttagggtggccacataggccattaatacacacagtgtgttttaatgggtggcaaatggcccctgctgctccgtgactgtcaggttggtcatttctgcagatcttattatgtcacactttataaatcatttgccttcacctcataacagttacaagaattgtaccagctagagaaaaaagc

SEQ ID NO: 25988 - DNA, 600 bp, Chicken  19866894241806_3
ctataatggatgagaaagacgggctattttgtggttatgctctctgaggcagcctgcatcacagcctttagaaagaagtctgcttctgtaccggcaaagaggttatgttgcatcaccrtgccccaaatgagcctttatttgtggtttttaaagctttactgcctgaattgtggtttcctggttgtaagcgaggattcggcttcaactttcagggtctgttctttgctaatacatcttctagggagcaactgagtcactctcgtttctcctacatgtaactctgttrgtttctcgaggtarggaaaaatgsaaaatttaagttcttttatttcagtttatattgacagctattaatcagtacaccaatttcagtttaactttggtgtgtctttaaataaattatgtcttagggtggccacataggccattaatacacacagtgtgttttaatgggtggcaaatggcccctgctgctccgtgactgtcaggttggtcatttctgcagatcttattatgtcacactttataaatcatttgccttcacctcataacagttacaagaattgtaccagctagagaaaaaagctatggttccccttg

SEQ ID NO: 25989 - DNA, 600 bp, Chicken  19866894241806_4
tgagaaagacgggctattttgtggttatgctctctgaggcagcctgcatcacagcctttagaaagaagtctgcttctgtaccggcaaagaggttatgttgcatcaccrtgccccaaatgagcctttatttgtggtttttaaagctttactgcctgaattgtggtttcctggttgtaagcgaggattcggcttcaactttcagggtctgttctttgctaatacatcttctagggagcaactgagtcactctcgtttctcctacatgtaactctgttrgtttctcgaggtarggaaaaatgsaaaatttaagttcttttatttcagtttatattgacagctattaatcagtacaccaatttcagtttaactttggtgtgtctttaaataaattatgtcttagggtggccacataggccattaatacacacagtgtgttttaatgggtggcaaatggcccctgctgctccgtgactgtcaggttggtcatttctgcagatcttattatgtcacactttataaatcatttgccttcacctcataacagttacaagaattgtaccagctagagaaaaaagctatggttccccttgctgtgtctgc

SEQ ID NO: 25990 - DNA, 600 bp, Chicken  19866894241814_1
ctcaggctgaaaaaatgaagagaaattgagcaggaatatgggaaatggggaagtaagactatccaataactaaattagttttgctagactcttcctgagcacagaagcttgtttatttttttctatgattatgcttcacaaatctattggaatgccttgaaagggtcagtcaccattcagacaggatatatttgttgataaggtctactttgtgcattaatagagtccaggaccaaagattcttaaacaaagtaactgcagaattgtggaaacagaagagggaactagcaagagattttycaaaattaacaagagttactttatcwtttgacatgtacttaagctgtgggtcttctttccacaaaacattgattctgaaatttcaaacatttttaaaaagcaatctgataagttaagcaatgggattaaggattctatagaaagggtaaattcagggcttcagcgcacaagtgcaagattgcagtgggaaggccctgggaacagtttttctattaaatctcctggattttgctttgagtaactgctccatatgagtccaaatatgtgattttttttattatttttttatttttttttttt

SEQ ID NO: 25991 - DNA, 600 bp, Chicken  19866894241814_2
tgagcaggaatatgggaaatggggaagtaagactatccaataactaaattagttttgctagactcttcctgagcacagaagcttgtttatttttttctatgattatgcttcacaaatctattggaatgccttgaaagggtcagtcaccattcagacaggatatatttgttgataaggtctactttgtgcattaatagagtccaggaccaaagattcttaaacaaagtaactgcagaattgtggaaacagaagagggaactagcaagagattttycaaaattaacaagagttactttatcwtttgacatgtacttaagctgtgggtcttctttccacaaaacattgattctgaaatttcaaacatttttaaaaagcaatctgataagttaagcaatgggattaaggattctatagaaagggtaaattcagggcttcagcgcacaagtgcaagattgcagtgggaaggccctgggaacagtttttctattaaatctcctggattttgctttgagtaactgctccatatgagtccaaatatgtgattttttttattatttttttattttttttttttttgtgagcttgtaagacagattgatt

SEQ ID NO: 25992 - DNA, 599 bp, Chicken  19866894241823_1
  misc_feature (1)..(224): n is any nucleotide
nnnnnnnnnnnnnnnnnnnnnnnnnnnnnnnnnnnnnnnnnnnnnnnnnnnnnnnnnnnnnnnnnnnnnnnnnnnnnnnnnnnnnnnnnnnnnnnnnnnnnnnnnnnnnnnnnnnnnnnnnnnnnnnnnnnnnnnnnnnnnnnnnnnnnnnnnnnnnnnnnnnnnnnnnnnnnnnnnnnnnnnnnnnnnnnnnnnnnnnnnnnnnnnnnnnnnnnnnnnnnnnncacagacctccgtagcattatcagccttctggctgaagagaaataagtgcttttggagtttatagcaaggaaaagytgcaaaatatttggttgacttgttcgcacgcacttygagggggccctgggcaggtggaaggctaaggcaaaatgtgggcaaagctggtcctgccaaaggttggagagaaatcgctttccaagcactgcatttactcattagatccaactttcttcttttcaaaagggttctgatttagtgcatgctctagacactcaactctgggccagtctaataattcaaagccttctggatgtccttagtgttctccatttactggaaagacctggctggctccaggtcccagcggacacaaaaaa

SEQ ID NO: 25993 - DNA, 599 bp, Chicken  19866894241823_2
  misc_feature (1)..(188): n is any nucleotide
nnnnnnnnnnnnnnnnnnnnnnnnnnnnnnnnnnnnnnnnnnnnnnnnnnnnnnnnnnnnnnnnnnnnnnnnnnnnnnnnnnnnnnnnnnnnnnnnnnnnnnnnnnnnnnnnnnnnnnnnnnnnnnnnnnnnnnnnnnnnnnnnnnnnnnnnnnnnnnnnnnnnnnnnnnnnnnnnnnnnnnnnnnnncacagacctccgtagcattatcagccttctggctgaagagaaataagtgcttttggagtttatagcaaggaaaagytgcaaaatatttggttgacttgttcgcacgcacttygagggggccctgggcaggtggaaggctaaggcaaaatgtgggcaaagctggtcctgccaaaggttggagagaaatcgctttccaagcactgcatttactcattagatccaactttcttcttttcaaaagggttctgatttagtgcatgctctagacactcaactctgggccagtctaataattcaaagccttctggatgtccttagtgttctccatttactggaaagacctggctggctccaggtcccagcggacacaaaaaatgaaatagctaagggagacccaaaggctcagtgcaa

SEQ ID NO: 25994 - DNA, 600 bp, Chicken  19866894241832_1
aggaactcatgcactattagacagggatctagtctttcctggcacctatttgtgctttgatctttggacaaagatatttgcactgcaggctaaaagtaagcaaatcttcccacgattactgtgtttgcagtgtgctacagaggataacaaggctcccggtgctgtttgcccccaccttactatgattctggaaagcatcctggttattgcagtgcaaacgatacactcaggaatgtcaaaatgtgtgaaaaatagaaaataaatggacttaaaaaataaaacaaacaaaacccaagacayaggttattaactcttgattctagctgactgttagcgcctyggccatcattcagctgaccagactttgcaaggtcttttgcattgtccatctagcatttgacatcctgcccccagcctggctgcagggcacctgagaacagagcagctggcacaccactgttatttcagggcctgacttgttcctgacacattaaatgaagatcatgatgtaactgaaaagagttttaaaaacacatctccaactatccttgacactgcacttcacacgtaaattgaagctgctggcaacaaataagaggg

SEQ ID NO: 25995 - DNA, 600 bp, Chicken  19866894241832_2
ggcacctatttgtgctttgatctttggacaaagatatttgcactgcaggctaaaagtaagcaaatcttcccacgattactgtgtttgcagtgtgctacagaggataacaaggctcccggtgctgtttgcccccaccttactatgattctggaaagcatcctggttattgcagtgcaaacgatacactcaggaatgtcaaaatgtgtgaaaaatagaaaataaatggacttaaaaaataaaacaaacaaaacccaagacayaggttattaactcttgattctagctgactgttagcgcctyggccatcattcagctgaccagactttgcaaggtcttttgcattgtccatctagcatttgacatcctgcccccagcctggctgcagggcacctgagaacagagcagctggcacaccactgttatttcagggcctgacttgttcctgacacattaaatgaagatcatgatgtaactgaaaagagttttaaaaacacatctccaactatccttgacactgcacttcacacgtaaattgaagctgctggcaacaaataagagggtattttgtggacctcagtctgtggaaggtacaaacttgta

SEQ ID NO: 25996 - DNA, 600 bp, Chicken  19866894241833_1
taaagtaacattcacagggagctgagatatgggaacagttgattttttggggttatttatttatttttttttttgtgaacgccctgggaaatgacttgcagcagggagtgcttataaaaatactgccaaaaagtgcctggcgacaacaaaaccaagcagagttcagtggcagccggcaaggaaggaagcaaagggcactgcaagcagaaaagggaacctcactctgagataaggagggagactatgaaggcaacgtccaaaaggaaggattggggaaaaacattgcaccactgcaaataygtgtcttgctactgaaagcacagtgcagagcagtggaatcgtgtacagagtgttctcagctattgaggaggtcatagtccacctccagcatgaatcttagggtgatctcactataatcctattttaagttcctccatgacaaaaagaccctccaaacatccttggagacacccaaggtcaggctggagcaggctctgagcaacatgattgaggtgttcctgttggttgcagggaggatgggtgagatgtctgctctgctacacatcaggcagtgctgctcagccaaactgatgactttgc

SEQ ID NO: 25997 - DNA, 600 bp, Chicken  19866894241835_1
tcctatctattttcatggaaactacaacagatacaaagagcacaataacactatttgatagacaaaattaaaattctcagctacaaaacactatttttcaacatcaccattagctctgcattttttgccagcaatgaacaagaatctgcatgccatgttcataaaaatctgcaccagcagaggtggcccactgttgctgtcatcactactgaagtgcaccactcatcacctcactgtgctcacatccactgtttggtctccataaacgttcagcaagaattgatgaatgtcaatgggtgmaatttttttcacacagaggaaatgaattacacacctttgcttcgtatgcactttcacatatgttaaggcagaaacagacctcatgaggtgaaaaaccacaggctgaccaggtgaaaaagctccatggatctgagtgtcaatcaggaaaaaagaaaaaagattgaaaattatcttacataaaataaattgagtacaaagcttacccactcagagtcataaagctggatgagctacataacccattgttagaagaacatgcacacaagtgagcacacaacagacaacaatgttgtccatgtc

SEQ ID NO: 25998 - DNA, 599 bp, Chicken  19866894241837_1
  misc_feature (1)..(71): n is any nucleotide
nnnnnnnnnnnnnnnnnnnnnnnnnnnnnnnnnnnnnnnnnnnnnnnnnnnnnnnnnnnnnnnnnnnnnnnaaaaaaaagaaaaaaaaaaaagagaaaaaaaaaagaagttaacagctggagttactgctgcttcagtctctttgcttccgctttattttgcaatgcgaggaatacaaaactgcaaggcacatttgaagctgttgaacttttagcaggtgccccttgaaaccagctacagttctgtcctttccaaccgtaatgattctgtgttaatttgtgtccaaattatcttgttgcraaggcacttgctctgtaaaattgtaacttgtagcctatttaagtgggaggatactatatcagcttacttttccaccagaggacttggcatacgaaatgttccaggtttgttgacacactaaacagtaagaaagctctcccagacggatccctaagtggtcttccttaaagcagtccctactgctgtacagtttcattctctctggcactggttgtctgtgctgttacttacatggtcatcagcccaccaggacagacatgcagaaaactgcagctgctygagtgctgaaaaacaattgg

SEQ ID NO: 25999 - DNA, 543 bp, Chicken  19866894241837_2
tgtccaaattatcttgttgcraaggcacttgctctgtaaaattgtaacttgtagcctatttaagtgggaggatactatatcagcttacttttccaccagaggacttggcatacgaaatgttccaggtttgttgacacactaaacagtaagaaagctctcccagacggatccctaagtggtcttccttaaagcagtccctactgctgtacagtttcattctctctggcactggttgtctgtgctgttacttacatggtcatcagcccaccaggacagacatgcagaaaactgcagctgctygagtgctgaaaaacaattggagcagctgttggaacgtacycagattcagcctcagggagtgctgatttcacaagtccttgagtgcataaaagggaagtgtgtgtgtcttatttgttaattattagacttgtttcttaaaagttacggagagcagaggcaacagcatagaacttagcagaataatctgcctcacaaactgcccatcgccacactcatgctcaaataacttaccagatactcaga

SEQ ID NO: 26000 - DNA, 503 bp, Chicken  19866894241837_3
attgtaacttgtagcctatttaagtgggaggatactatatcagcttacttttccaccagaggacttggcatacgaaatgttccaggtttgttgacacactaaacagtaagaaagctctcccagacggatccctaagtggtcttccttaaagcagtccctactgctgtacagtttcattctctctggcactggttgtctgtgctgttacttacatggtcatcagcccaccaggacagacatgcagaaaactgcagctgctygagtgctgaaaaacaattggagcagctgttggaacgtacycagattcagcctcagggagtgctgatttcacaagtccttgagtgcataaaagggaagtgtgtgtgtcttatttgttaattattagacttgtttcttaaaagttacggagagcagaggcaacagcatagaacttagcagaataatctgcctcacaaactgcccatcgccacactcatgctcaaataacttaccagatactcaga

SEQ ID NO: 26001 - DNA, 600 bp, Chicken  19866894241841_1
ggctataaggggggcttggggctgggagtaaacactatgaatgtttagcatttttcttttcatttaaaaaaaaaaaagaagaagaagaagaagaaaggataaccaagtagcacccagaagccccccctttcccacggcggggttggtctgagctgcacgtgtgcacacttttggggcagaggaggcatttgcagcggtgcagtcacagagtcatagaagcacatccgtgagtgcgtgctgccatctcttggctatgcaaatcagagggcagcggaggagcacaaaataggcttcagaaamgaatttgagaagcttgaatatagaatcacagaacggcttgggttggaagggacctcacagaccgtttagttccaacctgtgctgtgggcaaggctgccaascrtatctgtgccttccctggtgatcaccggtcccactggcttcacttctctccaagactgggggtgctgctccccactgctgctgctggagccttgcagggacacggcctgcgctccctgggcactgctgtgaccatcgccctctggtcaaagtcctcctcccattgatttttttgttcttagacttggctggttggtc

SEQ ID NO: 26002 - DNA, 600 bp, Chicken  19866894241841_2
accaagtagcacccagaagccccccctttcccacggcggggttggtctgagctgcacgtgtgcacacttttggggcagaggaggcatttgcagcggtgcagtcacagagtcatagaagcacatccgtgagtgcgtgctgccatctcttggctatgcaaatcagagggcagcggaggagcacaaaataggcttcagaaamgaatttgagaagcttgaatatagaatcacagaacggcttgggttggaagggacctcacagaccgtttagttccaacctgtgctgtgggcaaggctgccaascrtatctgtgccttccctggtgatcaccggtcccactggcttcacttctctccaagactgggggtgctgctccccactgctgctgctggagccttgcagggacacggcctgcgctccctgggcactgctgtgaccatcgccctctggtcaaagtcctcctcccattgatttttttgttcttagacttggctggttggtctgaacctgtgagcacttagtgctggcagacttgcatgggtcccttcccatgggggagctgctcgtgctcacgctgaggctgagcgctgtaaatatgacctg

SEQ ID NO: 26003 - DNA, 600 bp, Chicken  19866894241841_3
caagtagcacccagaagccccccctttcccacggcggggttggtctgagctgcacgtgtgcacacttttggggcagaggaggcatttgcagcggtgcagtcacagagtcatagaagcacatccgtgagtgcgtgctgccatctcttggctatgcaaatcagagggcagcggaggagcacaaaataggcttcagaaamgaatttgagaagcttgaatatagaatcacagaacggcttgggttggaagggacctcacagaccgtttagttccaacctgtgctgtgggcaaggctgccaascrtatctgtgccttccctggtgatcaccggtcccactggcttcacttctctccaagactgggggtgctgctccccactgctgctgctggagccttgcagggacacggcctgcgctccctgggcactgctgtgaccatcgccctctggtcaaagtcctcctcccattgatttttttgttcttagacttggctggttggtctgaacctgtgagcacttagtgctggcagacttgcatgggtcccttcccatgggggagctgctcgtgctcacgctgaggctgagcgctgtaaatatgacctgat

SEQ ID NO: 26004 - DNA, 600 bp, Chicken  19866894241841_4
cttccctggtgatcaccggtcccactggcttcacttctctccaagactgggggtgctgctccccactgctgctgctggagccttgcagggacacggcctgcgctccctgggcactgctgtgaccatcgccctctggtcaaagtcctcctcccattgatttttttgttcttagacttggctggttggtctgaacctgtgagcacttagtgctggcagacttgcatgggtcccttcccatgggggagctgctcgtgctcacgctgaggctgagcgctgtaaatatgacctgatggctggggrygagctgccacctgcactgcagtgtgtggttgtgtctgaggtcgttctgtgctgtctgaccccattgacaggcactggtgctcggtcgcctctgcggctgccgggggccaccagccctgagaaatagccctgaatggctccgtcagtcactccgtggtgacaaagccaactcttgagaagtcctggggaaaagaaaaagtgagagagacaaattgcctgggaagatgaggtggtcaaatggcgccaggtattttgttgatgcagatggggtccatttgtatgtgacatctctggcagtga

SEQ ID NO: 26005 - DNA, 600 bp, Chicken  19866894241841_5
ttccctggtgatcaccggtcccactggcttcacttctctccaagactgggggtgctgctccccactgctgctgctggagccttgcagggacacggcctgcgctccctgggcactgctgtgaccatcgccctctggtcaaagtcctcctcccattgatttttttgttcttagacttggctggttggtctgaacctgtgagcacttagtgctggcagacttgcatgggtcccttcccatgggggagctgctcgtgctcacgctgaggctgagcgctgtaaatatgacctgatggctggggrygagctgccacctgcactgcagtgtgtggttgtgtctgaggtcgttctgtgctgtctgaccccattgacaggcactggtgctcggtcgcctctgcggctgccgggggccaccagccctgagaaatagccctgaatggctccgtcagtcactccgtggtgacaaagccaactcttgagaagtcctggggaaaagaaaaagtgagagagacaaattgcctgggaagatgaggtggtcaaatggcgccaggtattttgttgatgcagatggggtccatttgtatgtgacatctctggcagtgac

SEQ ID NO: 26006 - DNA, 600 bp, Chicken  19866894241842_1
ccaggaagggtcttcactcacttccaggactggagtggggacctgtatggtgaggaacatcaacggcggagcctcagcacctactactgccactccttctttgatgccataactgctggtgtgtggccacaggccttctccccaaactatcccaacctctccagcagcctctctccactctataagtttcccagaatgctgggaaggatggggtgggctgggctggaatggaatggaatggaatgttctcagccccatatgggcaacccacgagagtgggaggggtaagaggtgatggcrcaatgagacggtgctgggtttgggatgtggtaccaagtttctcaccctcatcatctcttctgccctgcagacacagaacacaacctgtatgtcttcaagggcagccacttctgggtagtgtcagccagtggcaacgccagccagcctcaacccctgcacatgcgctggccagggctgcctgctggtattgatgcctgtgcctactccccattcagccacagcttctacttcttcaaaggtcagtgagatgcaggttgtgttgatcaatctgtccaggtctgcgacctacatcccagcctg

SEQ ID NO: 26007 - DNA, 600 bp, Chicken  19866894241854_1
gaacttcacccgcaatccaaaaaccttgttgaattacgttttcacacaaaaagacagaaaataatgcccctcatcatctataccctcagttctttttcctcccaagtaattgagcctgtttgttgttggcagccatcatagttgcctgcacaaggctaagatttcccaaggttattagacaaacagaagaaataactttcattagcaaagtggttaccagccttccatctatttcccacctcatctccaggttgctgcccttaccagattcctgtgcaagattaccctcatgctgacccyatagcaagaacctcattctctctggagaatgactgctccctctgactctacagagatataatgatgactgcaacmcacagagtgcagcaattacctatgcaagtatcagaagtaatgtccaaaggtttattcactctctgcttttaattttgtccttgttctgcatcctgtaaacgtctctgtcatgctgccaagcctttggtggctgttatttattttatttactgttgagagatgcaaagatgcgtaaatccatgaattgctaatgcaagaaatattgcttttgagactttccacctc

SEQ ID NO: 26008 - DNA, 600 bp, Chicken  19866894241854_2
atctataccctcagttctttttcctcccaagtaattgagcctgtttgttgttggcagccatcatagttgcctgcacaaggctaagatttcccaaggttattagacaaacagaagaaataactttcattagcaaagtggttaccagccttccatctatttcccacctcatctccaggttgctgcccttaccagattcctgtgcaagattaccctcatgctgacccyatagcaagaacctcattctctctggagaatgactgctccctctgactctacagagatataatgatgactgcaacmcacagagtgcagcaattacctatgcaagtatcagaagtaatgtccaaaggtttattcactctctgcttttaattttgtccttgttctgcatcctgtaaacgtctctgtcatgctgccaagcctttggtggctgttatttattttatttactgttgagagatgcaaagatgcgtaaatccatgaattgctaatgcaagaaatattgcttttgagactttccacctcttgcgtcaaatgaatagtcaaacggaccaggcagctccatccaagtcccccaggacccaatgacatttaaataaa

SEQ ID NO: 26009 - DNA, 599 bp, Chicken  19866894241859_1
  misc_feature (1)..(47): n is any nucleotide
nnnnnnnnnnnnnnnnnnnnnnnnnnnnnnnnnnnnnnnnnnnnnnngatgatagcctccagtaggaactcaggtgatttgtgccacatagctggacagtgggtcactgaataaccaactgtaggttgaggctgaccagagtcacctggcaacttggtcaggtgttttgaaagctaacatcattcctttgccatctaatacaactgagagttgctctgtaagagaggagaaagagcaggcatgatttgtagcaaaagtgtcctttgtaattgcaggaaaaggtgaagaaatggtaagctsgtggcaactagcaaataggagctagaaggtctccttgctgtagagagattacaggcagaattactgtgtcagaggaaccgagcaatggtaaccstgccaaakatacagagaagctgttcagtaaacgtaaggatttttttctctgcttccttttatgtacagtgtctggaaataggagatatctcaaggatatctgtaaggattcccactttgtgatttacacctggtccatgctcgtcattcctctggtatgactgcagtgatgacagccctaatgtagtgttgttgctcttaaaagt

SEQ ID NO: 26010 - DNA, 600 bp, Chicken  19866894241859_2
gacagtgggtcactgaataaccaactgtaggttgaggctgaccagagtcacctggcaacttggtcaggtgttttgaaagctaacatcattcctttgccatctaatacaactgagagttgctctgtaagagaggagaaagagcaggcatgatttgtagcaaaagtgtcctttgtaattgcaggaaaaggtgaagaaatggtaagctsgtggcaactagcaaataggagctagaaggtctccttgctgtagagagattacaggcagaattactgtgtcagaggaaccgagcaatggtaaccstgccaaakatacagagaagctgttcagtaaacgtaaggatttttttctctgcttccttttatgtacagtgtctggaaataggagatatctcaaggatatctgtaaggattcccactttgtgatttacacctggtccatgctcgtcattcctctggtatgactgcagtgatgacagccctaatgtagtgttgttgctcttaaaagtgcattaattatgcctttaagtttggatgataaaataggaattccttgaacttctttacatttattgtaggtattatgtttaaaagatatgaatat

SEQ ID NO: 26011 - DNA, 600 bp, Chicken  19866894241859_3
gtcactgaataaccaactgtaggttgaggctgaccagagtcacctggcaacttggtcaggtgttttgaaagctaacatcattcctttgccatctaatacaactgagagttgctctgtaagagaggagaaagagcaggcatgatttgtagcaaaagtgtcctttgtaattgcaggaaaaggtgaagaaatggtaagctsgtggcaactagcaaataggagctagaaggtctccttgctgtagagagattacaggcagaattactgtgtcagaggaaccgagcaatggtaaccstgccaaakatacagagaagctgttcagtaaacgtaaggatttttttctctgcttccttttatgtacagtgtctggaaataggagatatctcaaggatatctgtaaggattcccactttgtgatttacacctggtccatgctcgtcattcctctggtatgactgcagtgatgacagccctaatgtagtgttgttgctcttaaaagtgcattaattatgcctttaagtttggatgataaaataggaattccttgaacttctttacatttattgtaggtattatgtttaaaagatatgaatatgtcataga

SEQ ID NO: 26012 - DNA, 599 bp, Chicken  19866894241861_1
  misc_feature (1)..(21): n is any nucleotide
nnnnnnnnnnnnnnnnnnnnntctggatttttcgccaggtttgtaatgagggacacacattacagatagtgcatctttgtaaacatatttcagtaattatatgatttcacatctcctttcaacagaaattgtgtcctattgatgatgctgatttaaggtattttaagggtcacgtttgtattttgtcagtttattgagacagacagactcctctagctgctgtacttcccttgtatctgttctagtgataggagctgtgtgccattcccagctgatgatcagcttgatttctttcagttyttcctttgtacgtatgggagtagactacaggacagttagagaatctttgggaatcacacctaaaattgtgatgatgtttggcagtagtatgtacaggtgtactgttcctactatcaaagggagttctgcaaactgtttggaattgatggtcaagctgttttgagtgtaatggtcatttgtctgttctctctgagttttatctttagaattagaaaaaatctgcaaaagaaataacagtgaaagaattgaacttcagcatgttttcaggtggaccatgttggtaccaggggatgatagcc

SEQ ID NO: 26013 - DNA, 600 bp, Chicken  19866894241864_1
tcactttcttccaagttgaaatccctttttttaaggtattccctgatcacctcctcttttactcagggcacatatgcattgaaccgacatttccctcctgtctctggcacctaggattccaagaagcccaggccaactgattaacagcaagggcaggaaggaaaggagtatcagagtcttttccatgtcctgtctcaccaggttccctgtcccattctactctgggcccacattctccctagccttccttttgtagcttacatatttctacaagccattcttgtcagtgatatgcctggrcacattcaattgcagttgaactccaacattcctaagctcatctcatcaggtacgctggacaaagtctctgcattgctgccaggtgacctcttctagtccgctccctctttgtttgtgcttgaccaggtctaccgttcccatctgtctgtggagaatatcttccacatgctcttcctgatcaggaagccaggaacgggcactgttggtctcctctgttggccatttccattaactctgaactggctgctctgccatccccaggcagagctcagtgcactttcacagagggcagtcgccctt

SEQ ID NO: 26014 - DNA, 600 bp, Chicken  19866894241866_1
cagttaaaatctcaatttaaaatacattccaactttggacaaaaaaaacctgattatactaaagaagcctacaatcttatctattcttcctaagtcattggtcagaattgcttaaatgcattaattctatgctgtagaaaataaatgatataccatccaaaaggagcatttcttcactctcctttgaaaatccttctaaatatcggaggaattttgttcccatatactgaccaacctttgctcttctggaattcagtcaactctgtcagagccagttcttcatcactcgacatgccttcrtggtgaccagctttttgtgaacgctctctcagctgctgcctgcaagtcctgcattttgtaatgaactcaggtgagttatttaccatgtacatagtaaaagaaagctcagtgatatactaagaacacttggtgagagcaatagcctaaggaaacacagtgaggaagcagaagtaattatgcaaccctagagacacagactgtaacagtaaggtactttgtgagctgccaaaggagattaaaagcatctctaacgaccttcacttcaccacattcatactagtaactccccccacctgaaac

SEQ ID NO: 26015 - DNA, 600 bp, Chicken  19866894241870_1
cgatgaactgcccaatttgtgtagttatagtgtaaaataatggcaagagaaggtacaggagaggaggtgcttttctcctctgcgtacagttgagcagttctgctttggaagatctcaataatgatttcacaaggaaaatctcaagttaacaattcagttttatcaacagctgcctttaagtagtttcattcaacactgttgatcgagcagtgatgaaaaacttatgcaagcatcactcaattgagagatcatcatgtgacttatcactaagctacaaaatgctcaaaatcatggtaaatrtcttcaagtcatttactgcaacagcaaactccctttttctcttcccaggaaagcaaggaaataacacattttctcccttttgtttgctctctgagcttgtttccatcagtataarctggattgacactgcccatgcgctttttcctcaggttgtccaaggcctggtgattggaaaactcacaagccattgcacggagcagaccctgctcaggctyggcgtcctcgtctttgccggtgtggggctgggcatggtaagactcactkagaagtcatccacggggccttccaccatcatrgttt

SEQ ID NO: 26016 - DNA, 600 bp, Chicken  19866894241870_2
caataatgatttcacaaggaaaatctcaagttaacaattcagttttatcaacagctgcctttaagtagtttcattcaacactgttgatcgagcagtgatgaaaaacttatgcaagcatcactcaattgagagatcatcatgtgacttatcactaagctacaaaatgctcaaaatcatggtaaatrtcttcaagtcatttactgcaacagcaaactccctttttctcttcccaggaaagcaaggaaataacacattttctcccttttgtttgctctctgagcttgtttccatcagtataarctggattgacactgcccatgcgctttttcctcaggttgtccaaggcctggtgattggaaaactcacaagccattgcacggagcagaccctgctcaggctyggcgtcctcgtctttgccggtgtggggctgggcatggtaagactcactkagaagtcatccacggggccttccaccatcatrgtttgcaggtgggcaaagggcctacttgtcactggcagwgccgccatggccttgacaagctgtgcttagggggagccggccaacttgggccactgcaaacacacagcgttcaacaacga

SEQ ID NO: 26017 - DNA, 587 bp, Chicken  19866894241870_3
aaaaacttatgcaagcatcactcaattgagagatcatcatgtgacttatcactaagctacaaaatgctcaaaatcatggtaaatrtcttcaagtcatttactgcaacagcaaactccctttttctcttcccaggaaagcaaggaaataacacattttctcccttttgtttgctctctgagcttgtttccatcagtataarctggattgacactgcccatgcgctttttcctcaggttgtccaaggcctggtgattggaaaactcacaagccattgcacggagcagaccctgctcaggctyggcgtcctcgtctttgccggtgtggggctgggcatggtaagactcactkagaagtcatccacggggccttccaccatcatrgtttgcaggtgggcaaagggcctacttgtcactggcagwgccgccatggccttgacaagctgtgcttagggggagccggccaacttgggccactgcaaacacacagcgttcaacaacgataagaagctgtgtgagtaatagctgcagggattacagagtaataatcctgcacagaaacccatgcatccgtcctgagtcactggatt

SEQ ID NO: 26018 - DNA, 538 bp, Chicken  19866894241870_4
cactaagctacaaaatgctcaaaatcatggtaaatrtcttcaagtcatttactgcaacagcaaactccctttttctcttcccaggaaagcaaggaaataacacattttctcccttttgtttgctctctgagcttgtttccatcagtataarctggattgacactgcccatgcgctttttcctcaggttgtccaaggcctggtgattggaaaactcacaagccattgcacggagcagaccctgctcaggctyggcgtcctcgtctttgccggtgtggggctgggcatggtaagactcactkagaagtcatccacggggccttccaccatcatrgtttgcaggtgggcaaagggcctacttgtcactggcagwgccgccatggccttgacaagctgtgcttagggggagccggccaacttgggccactgcaaacacacagcgttcaacaacgataagaagctgtgtgagtaatagctgcagggattacagagtaataatcctgcacagaaacccatgcatccgtcctgagtcactggatt

SEQ ID NO: 26019 - DNA, 506 bp, Chicken  19866894241870_5
aatrtcttcaagtcatttactgcaacagcaaactccctttttctcttcccaggaaagcaaggaaataacacattttctcccttttgtttgctctctgagcttgtttccatcagtataarctggattgacactgcccatgcgctttttcctcaggttgtccaaggcctggtgattggaaaactcacaagccattgcacggagcagaccctgctcaggctyggcgtcctcgtctttgccggtgtggggctgggcatggtaagactcactkagaagtcatccacggggccttccaccatcatrgtttgcaggtgggcaaagggcctacttgtcactggcagwgccgccatggccttgacaagctgtgcttagggggagccggccaacttgggccactgcaaacacacagcgttcaacaacgataagaagctgtgtgagtaatagctgcagggattacagagtaataatcctgcacagaaacccatgcatccgtcctgagtcactggatt

SEQ ID NO: 26020 - DNA, 467 bp, Chicken  19866894241870_6
tttctcttcccaggaaagcaaggaaataacacattttctcccttttgtttgctctctgagcttgtttccatcagtataarctggattgacactgcccatgcgctttttcctcaggttgtccaaggcctggtgattggaaaactcacaagccattgcacggagcagaccctgctcaggctyggcgtcctcgtctttgccggtgtggggctgggcatggtaagactcactkagaagtcatccacggggccttccaccatcatrgtttgcaggtgggcaaagggcctacttgtcactggcagwgccgccatggccttgacaagctgtgcttagggggagccggccaacttgggccactgcaaacacacagcgttcaacaacgataagaagctgtgtgagtaatagctgcagggattacagagtaataatcctgcacagaaacccatgcatccgtcctgagtcactggatt

SEQ ID NO: 26021 - DNA, 600 bp, Chicken  19866894241875_1
ttcttctgcaaattgaaatgacagcatctatgcatacatttttaacagcaaaaattctggcagtaatcaatctgtgattcctgctttactgctcacatatgcaaaagcgtttttctgttctgtaacatgagcaaacacaaatttcatcatacaacaacatggctaccttttgaaaatacgcccattgcttatataagcaaggaaccacgaggcccagtgtacagatgctcaggttctgtacaagtcctttgtaaacaggaaaaagaaacagaaatctgtcccgtggctttcctgacaccytcctagcaycaatggaaagtttcatccttctcaatgatcacttgaaaagtcagaagtatttctcccatttttacgtaacttcagccaacagaagacagaaggccaaatgaaaacaaagcacgtgccagagacatgctgaatgctacagtgactaaaaagttctcgaaaacatgacctagaactttaatatactctgaaaaaaaaaaaaaagatatttatgctattaatacatgaatcaacaaagcagcctgctacagtggtatacaggagcccataaggagtttctcttagctcatggca

SEQ ID NO: 26022 - DNA, 600 bp, Chicken  19866894241875_2
aaattgaaatgacagcatctatgcatacatttttaacagcaaaaattctggcagtaatcaatctgtgattcctgctttactgctcacatatgcaaaagcgtttttctgttctgtaacatgagcaaacacaaatttcatcatacaacaacatggctaccttttgaaaatacgcccattgcttatataagcaaggaaccacgaggcccagtgtacagatgctcaggttctgtacaagtcctttgtaaacaggaaaaagaaacagaaatctgtcccgtggctttcctgacaccytcctagcaycaatggaaagtttcatccttctcaatgatcacttgaaaagtcagaagtatttctcccatttttacgtaacttcagccaacagaagacagaaggccaaatgaaaacaaagcacgtgccagagacatgctgaatgctacagtgactaaaaagttctcgaaaacatgacctagaactttaatatactctgaaaaaaaaaaaaaagatatttatgctattaatacatgaatcaacaaagcagcctgctacagtggtatacaggagcccataaggagtttctcttagctcatggcagtggccata

SEQ ID NO: 26023 - DNA, 599 bp, Chicken  19866894241878_1
  misc_feature (1)..(34): n is any nucleotide
nnnnnnnnnnnnnnnnnnnnnnnnnnnnnnnnnntggatataaaaatcttttaaaaagaaaataattgttgcaaagaaaagctaaatcaaatatggtgatttttaattttctgttgccaaatgtaagaaaaacaattgaaaaaataacctaaatattcctgtggaatacaatgttagtcaaaataaatcacacagacaagcaagaactgattcccaaagcagttttgaaactactctattcaagcatttggtcatgtcagtttcaatctatttgctacgtgaaggtcctaataccatttrgcttgcatgatcttgatattaccccaaataaacaactgctcaaatatatcagttattaatctgatttttagttctctacagtaattccaatctggggaggggaggtatccagcttcctttgtaaagtgaaccttcaaaagcacacagacttgctctttggtggacaaattactacttactcattagtaaaagaatatatttactatagaatgcctcattgaaatattttttcagaaagtgttttttttatgaaaataaataattttgcctgaaattccttcatctagtgtgggggaaaa

SEQ ID NO: 26024 - DNA, 600 bp, Chicken  19866894241880_1
tgttcataaccctgtttcagatgctcttccagttgtatagttgtgaccatttcagcaagcaaattagctattaattttggtgtagtaactgactattcctatgtacgtaaaggtgttacgtgctttgtcattatagcaatttgtttatcaagaatcgcttgccataatgacaaaacacataacaccttaggtacatacttcagacagtcccattagatgagcagattgtgatttgtagcctcaaagactttgctactatacaaaacaagataaaatataactgttagtccaattttgttyttgtgatctggtttgataatatgctaaatatttcacatttatgttaagcatttcacttgcagacgtggtattaaattctttctgcatattttctcttcttctaatattcttagttctgtgtttgtgctgctttctgaagtacttgtaaatagagggtgtagtaccgaatatactattattaggccttttattcatggttttataaatccacagtgcatttttttgtctaggaacattgattcagatgtcagagtacgttcatctttactaatgcagtcatgtaacatacatcattcctct

SEQ ID NO: 26025 - DNA, 600 bp, Chicken  19866894241886_1
gagtgtttagagcttttctcactggagagcctgaattgcagctagagaatttcttctgcaaatgactacatactgagcataagtcctttactcctactttggtatctttatgctacttagacaatttttagcactttgttactttctgcgcataaacaaaaaggaaaaagaaaacagcagcaagtacggcttttgcaatcagaaagaaaaatagaatgacattcacagtgatggaaacaacatgttgtccctaacacattaagagatttggctttacttaatattttaatcctccagacyagcgatgtattttatcactgatcctggctttcagcacagaggaccctggatagtgaagtcagtggggcaggacttcgctcttacagtgtgtttgtgcaaagtctggaacagagaaatgtagacctgtgattatggctccctgctgcaagcagaatgtaaacaacccagcataatagggaaaactttcagtgagattactcttctgacagatacttactrtagtttataaaacataccatacacctctagcatactattcattttgaaagtatgaaaaaaattaagccctcttattacttt

SEQ ID NO: 26026 - DNA, 600 bp, Chicken  19866894241886_2
cattcacagtgatggaaacaacatgttgtccctaacacattaagagatttggctttacttaatattttaatcctccagacyagcgatgtattttatcactgatcctggctttcagcacagaggaccctggatagtgaagtcagtggggcaggacttcgctcttacagtgtgtttgtgcaaagtctggaacagagaaatgtagacctgtgattatggctccctgctgcaagcagaatgtaaacaacccagcataatagggaaaactttcagtgagattactcttctgacagatacttactrtagtttataaaacataccatacacctctagcatactattcattttgaaagtatgaaaaaaattaagccctcttattactttagcacaggataaataggccacttttcatctttcattttatttaatatgcttaatgaaaacatatgagatcactgagattatagaaatagatttggcagcattttcttatttagttggttggagacatgtcacttggatatagagctctctgcacctccaataataagttgtttgctctgtgaagaggtattaccagctcaaggccgtgtaaagtttgca

SEQ ID NO: 26027 - DNA, 600 bp, Chicken  19866894241889_1
cttagtcactaacatctgagatgagtgcttaggagcagcattacagcatcacctgtcttctcaggaagaaagccctgagacctgaggcgtgtagttctggtagcaagttaggaaggaggataaaatcttatttctggatccagtgcaggctgttgtttactctgtctcacctgtgacaatgtgaaatgtcataatttgcacagttgtataattagatcccaccaaacttcgtatccatgtacgcaaaacatagtatgtatatattcataacagaagaccatgcatcttgtgcaatgatargtgactcaccagcagtgaagtcttctaaatttagtcctgtgccctattgaggagttactctgacaatttaccatggtgatgccaccctacgagcttattatcactatgttcatatatgactgatggaaaatagtcacaaatacaccaccatgttctctttgtcagttatttttccttcagattttaacttctcaattgaacaaaaagaatggaggagcagaagctgaacaaagatcacttaatcttattatatgtggcagcaaatcacatttttgtcagagtggtgcaatgaaaaaaaat

SEQ ID NO: 26028 - DNA, 600 bp, Chicken  19866894241893_1
tcaaaaaaagtgtgggggttcttttttctcactgccaagtgaattctcaagtaatctttggtttgggaaccatctgctttcaaagagaagaaaccttaattaccctatcacttttcaaatgtgtgttaaggtcaatggtctcatagtcttatacatcctgtaccattaccctaagaacaccaaatgagccatcactttatatttagccctgcaattttatatggcaaagctggtaaatgtaagagtaaattttcagtagaaaatgtcagaactcgaggcaggagtggatgagtttcaccmgctcaagatgtaatgccttttttccctatggtgtttgcctcttaacattgaacaccaggaatactggtgctatggaggagaactgaacatacagttttggagctctaatgtttgctttgtcagtattttcttagttagctgttaaacaacagcataaagataaattttttttctgttttgttttgttttcctaaatggaagaagggaaactttcagttggaaacaaattctaaactgaactgtagaacctgctctgtgcccttggaatggggacagaagggaaatcaacgctcatccata

SEQ ID NO: 26029 - DNA, 576 bp, Chicken  19866894241894_1
gatcagcgcgaggacagtacatggggcaaatgctgaggtaatggcaggcatcggggcttacataatatttttcagaatgctctttaatcaactcttcttgtgggacttctccagctttggttctgatgcactaattcttccccagggcttgcggccgtgtctgtgctgttatctctcattctgttggaacactcctggaacgataatttgctcataactagagccacactttatgggaaaatgaaaggcagcagaactagaagaaattttctatgtcccctgacaggtaagatttgagtyaacrctttcctgctggacrcaggccatcctctgatcactcatactcttatatttaagctctactgatatttaatcttcccattactggtcctgtggcaggtaatgccttcctcgggaacatgccttcctctctctgaaggcacacacactgctgtggaggtgaccacgctgtgagatgagcaccctgagggacaggttctgcccaggggtccatctggaagcattgctgctatttcggtgttaacatccacagcttgtatggtgtagtgagcaacg

SEQ ID NO: 26030 - DNA, 572 bp, Chicken  19866894241894_2
agcgcgaggacagtacatggggcaaatgctgaggtaatggcaggcatcggggcttacataatatttttcagaatgctctttaatcaactcttcttgtgggacttctccagctttggttctgatgcactaattcttccccagggcttgcggccgtgtctgtgctgttatctctcattctgttggaacactcctggaacgataatttgctcataactagagccacactttatgggaaaatgaaaggcagcagaactagaagaaattttctatgtcccctgacaggtaagatttgagtyaacrctttcctgctggacrcaggccatcctctgatcactcatactcttatatttaagctctactgatatttaatcttcccattactggtcctgtggcaggtaatgccttcctcgggaacatgccttcctctctctgaaggcacacacactgctgtggaggtgaccacgctgtgagatgagcaccctgagggacaggttctgcccaggggtccatctggaagcattgctgctatttcggtgttaacatccacagcttgtatggtgtagtgagcaacg

SEQ ID NO: 26031 - DNA, 557 bp, Chicken  19866894241894_3
catggggcaaatgctgaggtaatggcaggcatcggggcttacataatatttttcagaatgctctttaatcaactcttcttgtgggacttctccagctttggttctgatgcactaattcttccccagggcttgcggccgtgtctgtgctgttatctctcattctgttggaacactcctggaacgataatttgctcataactagagccacactttatgggaaaatgaaaggcagcagaactagaagaaattttctatgtcccctgacaggtaagatttgagtyaacrctttcctgctggacrcaggccatcctctgatcactcatactcttatatttaagctctactgatatttaatcttcccattactggtcctgtggcaggtaatgccttcctcgggaacatgccttcctctctctgaaggcacacacactgctgtggaggtgaccacgctgtgagatgagcaccctgagggacaggttctgcccaggggtccatctggaagcattgctgctatttcggtgttaacatccacagcttgtatggtgtagtgagcaacg

SEQ ID NO: 26032 - DNA, 599 bp, Chicken  19866894241902_1
  misc_feature (1)..(105): n is any nucleotide
nnnnnnnnnnnnnnnnnnnnnnnnnnnnnnnnnnnnnnnnnnnnnnnnnnnnnnnnnnnnnnnnnnnnnnnnnnnnnnnnnnnnnnnnnnnnnnnnnnnnnnnnnaaaatgtgaaggggaaacaagggaatacccataagatagacactaacacaccaaaatcccacatctaagatgtctgcaagatgtccagtccacagtcagaggagacataggcagtcacagaatcacagaatggcctgggttgaaaaggaccacaatgatcatctagtttcaacccccctgctatgtgcagggttrccaaccaccagaccaggctgcccagagccacattcagcctggccttgaatgyctgcagggatggggcatccacaacctccttgggcaacctgttccagtgtgtcaccaccctctgtgtgaaaaacttcctcctaaaatcaaacaacagaaatagtataacaaaacagaataaattctgaatgtgctaggcaccatcctacctttcctggagccccacagatttcattctgaaaggagatggactggcacacggggggaggtttgagctcaggaacacattggccttgagggtccactac

SEQ ID NO: 26033 - DNA, 599 bp, Chicken  19866894241902_2
  misc_feature (1)..(53): n is any nucleotide
nnnnnnnnnnnnnnnnnnnnnnnnnnnnnnnnnnnnnnnnnnnnnnnnnnnnnaaaatgtgaaggggaaacaagggaatacccataagatagacactaacacaccaaaatcccacatctaagatgtctgcaagatgtccagtccacagtcagaggagacataggcagtcacagaatcacagaatggcctgggttgaaaaggaccacaatgatcatctagtttcaacccccctgctatgtgcagggttrccaaccaccagaccaggctgcccagagccacattcagcctggccttgaatgyctgcagggatggggcatccacaacctccttgggcaacctgttccagtgtgtcaccaccctctgtgtgaaaaacttcctcctaaaatcaaacaacagaaatagtataacaaaacagaataaattctgaatgtgctaggcaccatcctacctttcctggagccccacagatttcattctgaaaggagatggactggcacacggggggaggtttgagctcaggaacacattggccttgagggtccactaccacgttgacaacttttggagcctgttcaggctggaccatgctgttggtggtc

SEQ ID NO: 26034 - DNA, 600 bp, Chicken  19866894241902_3
taccagcagttgtattattacagggacaaataatgtagcatggaaagatttttgtagtcacaaaaatctgcgtgaagaaggaaacatgatttataaagtaactgtagaaaaatgtataaggattttagcacaagggagacagtggcattaaaatagatgcttatagttgggcagagtaattttaccaggccgcttttataagggtaggatgctacttccccaaaatactcctcagtatccttgggatgttcctcagtatcctcatggaaacattacctattctgtaataaatctggacaracacatagtttatgaagctctgtagggatatgtgactgttcagaaacatgttttataattaccaagacattgacatctcacaatgtatatgtgcagcagaagcttttcaaaaagttgtactgatcttcttccattgagctccatgctgatattctcatataggggcttgacaagggctggcagatagcaagtgctcagttctgttactccaaaggagcctatgttacactggtgtaacagacatcatctcttgaggggaacatcaaaaatacagcctgagctatggctgttccacttgca

SEQ ID NO: 26035 - DNA, 600 bp, Chicken  19866894241902_4
atagtttatgaagctctgtagggatatgtgactgttcagaaacatgttttataattaccaagacattgacatctcacaatgtatatgtgcagcagaagcttttcaaaaagttgtactgatcttcttccattgagctccatgctgatattctcatataggggcttgacaagggctggcagatagcaagtgctcagttctgttactccaaaggagcctatgttacactggtgtaacagacatcatctcttgaggggaacatcaaaaatacagcctgagctatggctgttccacttgcaaaaygctcctaagagccatgaaacttcaaacaattaccagtgcatcttctgtgacagtcacactaccataagtattgtgtgtggaaatgggtgaaaggtgctcacacagccttttgaaggtgcctgcacatacccatataatttctactctgcttgcaaagccataaaaactgaaagcaatttttctgctgcatttttgatgcctatttccctgctagcactgcacagagatctatcactccaaatcttttcagtgaagactggatatatctgacgagtttgttttttcaaggattagcagtag

SEQ ID NO: 26036 - DNA, 599 bp, Chicken  19866894241908_1
  misc_feature (1)..(118): n is any nucleotide
nnnnnnnnnnnnnnnnnnnnnnnnnnnnnnnnnnnnnnnnnnnnnnnnnnnnnnnnnnnnnnnnnnnnnnnnnnnnnnnnnnnnnnnnnnnnnnnnnnnnnnnnnnnnnnnnnnnnnnagtgttcttttgtaagccaagaagtttcttcttgcttgttaactgtttctcctctattagcgtcttttgcaaattcaattacagtagtatcgttatcttctaggtccaaactgattccacataacttcgggtctgaagtaggagacactggagacaatccggaagcaactggcatgaaagtrgactctgaagataacaggctgctatttagtttgtcttcatcagtctgtatgtcttcaagrtacagctccttgtgacaatttctttcatgaagaaaagtgttctttactgcataggaatgatcatcattcacacttggtccaacccaggaattcttctggaygacacgttctrrayaggcagaaagacattttcagaagtctcacagtgtttcaataaaatacttcaattcacagaaattgatactttgtgttaaaaaaataaataaatctgtattttattcccacaggtaagagatcac

SEQ ID NO: 26037 - DNA, 599 bp, Chicken  19866894241908_2
  misc_feature (1)..(58): n is any nucleotide
nnnnnnnnnnnnnnnnnnnnnnnnnnnnnnnnnnnnnnnnnnnnnnnnnnnnnnnnnnagtgttcttttgtaagccaagaagtttcttcttgcttgttaactgtttctcctctattagcgtcttttgcaaattcaattacagtagtatcgttatcttctaggtccaaactgattccacataacttcgggtctgaagtaggagacactggagacaatccggaagcaactggcatgaaagtrgactctgaagataacaggctgctatttagtttgtcttcatcagtctgtatgtcttcaagrtacagctccttgtgacaatttctttcatgaagaaaagtgttctttactgcataggaatgatcatcattcacacttggtccaacccaggaattcttctggaygacacgttctrrayaggcagaaagacattttcagaagtctcacagtgtttcaataaaatacttcaattcacagaaattgatactttgtgttaaaaaaataaataaatctgtattttattcccacaggtaagagatcacaggtgcaaatttacatcttaccactttcaagaactatctgtggtggatgggctggactgc

SEQ ID NO: 26038 - DNA, 600 bp, Chicken  19866894241908_3
tgtttctcctctattagcgtcttttgcaaattcaattacagtagtatcgttatcttctaggtccaaactgattccacataacttcgggtctgaagtaggagacactggagacaatccggaagcaactggcatgaaagtrgactctgaagataacaggctgctatttagtttgtcttcatcagtctgtatgtcttcaagrtacagctccttgtgacaatttctttcatgaagaaaagtgttctttactgcataggaatgatcatcattcacacttggtccaacccaggaattcttctggaygacacgttctrrayaggcagaaagacattttcagaagtctcacagtgtttcaataaaatacttcaattcacagaaattgatactttgtgttaaaaaaataaataaatctgtattttattcccacaggtaagagatcacaggtgcaaatttacatcttaccactttcaagaactatctgtggtggatgggctggactgctgtgttcagaagtaactggcaaagttctgttagaagcagaagatgcagttggcccttcattttggttttcatacatgagctgcctctggtggagcctaagca

SEQ ID NO: 26039 - DNA, 600 bp, Chicken  19866894241908_4
tattagcgtcttttgcaaattcaattacagtagtatcgttatcttctaggtccaaactgattccacataacttcgggtctgaagtaggagacactggagacaatccggaagcaactggcatgaaagtrgactctgaagataacaggctgctatttagtttgtcttcatcagtctgtatgtcttcaagrtacagctccttgtgacaatttctttcatgaagaaaagtgttctttactgcataggaatgatcatcattcacacttggtccaacccaggaattcttctggaygacacgttctrrayaggcagaaagacattttcagaagtctcacagtgtttcaataaaatacttcaattcacagaaattgatactttgtgttaaaaaaataaataaatctgtattttattcccacaggtaagagatcacaggtgcaaatttacatcttaccactttcaagaactatctgtggtggatgggctggactgctgtgttcagaagtaactggcaaagttctgttagaagcagaagatgcagttggcccttcattttggttttcatacatgagctgcctctggtggagcctaagcacaaagttttag

SEQ ID NO: 26040 - DNA, 600 bp, Chicken  19866894241908_5
attagcgtcttttgcaaattcaattacagtagtatcgttatcttctaggtccaaactgattccacataacttcgggtctgaagtaggagacactggagacaatccggaagcaactggcatgaaagtrgactctgaagataacaggctgctatttagtttgtcttcatcagtctgtatgtcttcaagrtacagctccttgtgacaatttctttcatgaagaaaagtgttctttactgcataggaatgatcatcattcacacttggtccaacccaggaattcttctggaygacacgttctrrayaggcagaaagacattttcagaagtctcacagtgtttcaataaaatacttcaattcacagaaattgatactttgtgttaaaaaaataaataaatctgtattttattcccacaggtaagagatcacaggtgcaaatttacatcttaccactttcaagaactatctgtggtggatgggctggactgctgtgttcagaagtaactggcaaagttctgttagaagcagaagatgcagttggcccttcattttggttttcatacatgagctgcctctggtggagcctaagcacaaagttttagc

SEQ ID NO: 26041 - DNA, 600 bp, Chicken  19866894241908_6
tagcgtcttttgcaaattcaattacagtagtatcgttatcttctaggtccaaactgattccacataacttcgggtctgaagtaggagacactggagacaatccggaagcaactggcatgaaagtrgactctgaagataacaggctgctatttagtttgtcttcatcagtctgtatgtcttcaagrtacagctccttgtgacaatttctttcatgaagaaaagtgttctttactgcataggaatgatcatcattcacacttggtccaacccaggaattcttctggaygacacgttctrrayaggcagaaagacattttcagaagtctcacagtgtttcaataaaatacttcaattcacagaaattgatactttgtgttaaaaaaataaataaatctgtattttattcccacaggtaagagatcacaggtgcaaatttacatcttaccactttcaagaactatctgtggtggatgggctggactgctgtgttcagaagtaactggcaaagttctgttagaagcagaagatgcagttggcccttcattttggttttcatacatgagctgcctctggtggagcctaagcacaaagttttagcag

SEQ ID NO: 26042 - DNA, 600 bp, Chicken  19866894241923_1
gtttgagagattttgtgggttatggaggaaaaaggagaagaaagggcctacacaggcaacctatgcagaaggaagtgaaataagaagttattgctgtccacacctgcctgcttccattcactacctatttcccagctgcacagccacatgggaccaggcagccccctgggtgtcttcaagggaggctgccaaaaagcacaaagcatcaaagcaagccaggacaccacagcccctccctgagactccagccctgtgccctgcccaggtggccacgcaggagaaaagcaggagcacagcaaragcgcatatacaggagaagcccccacacgcagaactgtatcactcaattaagaaaggtgtttcttaacagttgcttcaccataaggggaattacgaactgatagtaaaaataaaacaacgacccgatgtcattttgacaaacaggttcttccaatgcattaagaaacttatttcttccagcactttgcttatacaaaagcattcgggttcttagtggagtgtccaaggatctaagagcacaccactatcactacacccacagaccaggcctaaagtctaggtccaaattcaaactagata

SEQ ID NO: 26043 - DNA, 600 bp, Chicken  19866894241925_1
tcccattactgtacaccactgagcagagttggccccatcctcctgaccccgtccttcagacactgatcagcactgatcagatccttctcaccacccccccaaaggtgcacagccctgggctctcagcccccaccaggagatgctccatgccccactgaccacacagagacacgctggtgcacagatgcttcctgggtcggttggctggttgtgaggttggacctcatctcagtagcagcgtgcatcctcctgctcctcctttcagggccagattcctgggagataaacagtggtttctcytgaaaagccttccctcaccaaacatcaccagagcagcccctgcctggcacaacacgctctaacacgagcaaggtttctctggtgaagtgccaagtatcaagattcctaatacaaaaaggcatctgtccaaagggtctggaagcctttgatgaatatgagacaaaatccaacataaaccagcaagtcagcaacttctccaggcaagaagatggagaaagatcatttctaaatcatggtccaattactcacaaggcagaattgtgcttccccttccagtttctggtaagacaagagatactg

SEQ ID NO: 26044 - DNA, 599 bp, Chicken  19866894241927_1
  misc_feature (1)..(29): n is any nucleotide
nnnnnnnnnnnnnnnnnnnnnnnnnnnnnttttcactctcaaaaaatttaaatcaccccatttcatgagctgcagggaatggttcactagagatttaggcatgataaaacaagacactgcttttttcagggtcactcctatgagcatgtaaaacttataatgaaggaaaagtcatgattaagactgaaagtcagaagtgaaagtacagctacaccaacagctacagacatccactgtattaaaatgtcctgccttattaaaattgcagttggcctcatggagtgagtcctggtttgtgasttgacatggagcagctctcagcatttttcagtgaaaacagggatcaaggattgacttggagtagtgcatggctcttacctcctgtttgggggccagatggtgaatgcattaggtaagcagcataaataatactactatagaatattagttgaaattgcatttattacacggctggaattagcagacttgatttcatcaacaaagtactgacacttctaaaggttacaacttttgctggtatgttaactatttactatatgcctatataaatcacagttctatgctttttagaatatgtg

SEQ ID NO: 26045 - DNA, 600 bp, Chicken  19866894241930_1
gcgaagcgtgttctctgctttaatgccattctgctgctttccccaaatactcctgggctggtgtgctgcgtgctttctcctggctgtgcggcaacctgataccacccgtcccatgcccgttctcctgcatactgcgggacagtcccacggtggaggggttgagcagaaataaccccgactgggagcggtgtggatgggggcacctttgggctgctccacgagctccgaggtgccacagccagagctggaggagctggaggagaggcgctgaggagcgcagtgtgcggcggtggggataarggcatgcccccaacagggctggggccgctccttagagggggggggggagggggaaaaggcaagaataaaaataataagccccgcagcaaccaggtagagcggcgccttttggtttatgcatctcggactgccttgtgtattttcagcgcatctgtagcgaaaacataattactgcgtggttattattttctctcccgaggaactttcccttgccctcctccaggcctctcatcagaacaggcctaatcagatttgggtggcttgagagctgtgactgtgtgctgagaagggggcatctgc

SEQ ID NO: 26046 - DNA, 600 bp, Chicken  19866894241930_2
aggctgttcggatttctttttcccagatgaacgtcccaaagatgctgggcgtttaacacacacaattaaaaaagccctgcacggctgaggtgtggcggtgtgggacgtggctgtctgacagctcagctcgggctgggcgctgcctgcaggtccgggcactgaggctgtgctggggagggcagctttgtgtggtgtgtgctgctgcggcgtgaacaatggctgtcccaaagtgcccaaggctgccgttccctcgctgcgtggcgagctgaggtgcagtgcaccccgttatctgcctgcccygtgctcggtgggggctcctctcgtcccagctttgctgagaactgggagaatttgctcatgacaaggtgctaagatgcagttccttataatctcttgtccgtcctgtccgaagcatttagcatcactcaggcagcgcgatgaggggcaggcagcccttcagcggcactagagctcagtgtgcagcagggcagggccggccccagaccccagcctggctgcaggaggggtcgtgccctctytccatcagtgctgcccttcccgtgccgtgtgagcatggggagctctgtgctggcatggcag

SEQ ID NO: 26047 - DNA, 527 bp, Chicken  19866894241930_3
ctgccgttccctcgctgcgtggcgagctgaggtgcagtgcaccccgttatctgcctgcccygtgctcggtgggggctcctctcgtcccagctttgctgagaactgggagaatttgctcatgacaaggtgctaagatgcagttccttataatctcttgtccgtcctgtccgaagcatttagcatcactcaggcagcgcgatgaggggcaggcagcccttcagcggcactagagctcagtgtgcagcagggcagggccggccccagaccccagcctggctgcaggaggggtcgtgccctctytccatcagtgctgcccttcccgtgccgtgtgagcatggggagctctgtgctggcatggcagcccgtggtgcaggttgggggtgagcggggctgtggggaggggcgcagagaagcctcacatcaggctgacccatggggtactgtgcagagctcggggattgggtaggctctgcagcactgcctacaatttgatgctgctttcctgctcgctctctgtcccctgcaga

SEQ ID NO: 26048 - DNA, 600 bp, Chicken  19866894241932_1
aaggatcagtggaagaatgaactgaccatctcctgcaaatagagcacttttctttgacctttctgtctgcaaaatacagaacctttacggatcattttctttttgttgctggctgcatctgcagatgattggaaacatacctacaagtcccaggatgttcagacccaaagtcttggaagttcagttctgcaccaaaccctttgaagttcattctcctctctgcaaatgactgatgggaatgactgagcatctgaaacttgttaagaacgtaatccaaggactcccatttaacttagtggygtttggatcgggccctcaccgtgaactctcctgaaataagggacattcatttcccatctcagttttggactcgattggtaggaatctgaagtggtgagacaaaatctgctgagatttttctttatgcctacattcatttcagtagtttttaaatggcagcctggcataaagtgatatttaaaacaaagcaagactaacaggtttcaaaatactaaagaaaatggacatccctgaaatttgggctggactgcagcacagatgtactcaytggtttyctgggttctsagcttcatcctggtc

SEQ ID NO: 26049 - DNA, 600 bp, Chicken  19866894241932_2
gtaatccaaggactcccatttaacttagtggygtttggatcgggccctcaccgtgaactctcctgaaataagggacattcatttcccatctcagttttggactcgattggtaggaatctgaagtggtgagacaaaatctgctgagatttttctttatgcctacattcatttcagtagtttttaaatggcagcctggcataaagtgatatttaaaacaaagcaagactaacaggtttcaaaatactaaagaaaatggacatccctgaaatttgggctggactgcagcacagatgtactcaytggtttyctgggttctsagcttcatcctggtcaattcattctgttctcgaatatggtagtaagttcatatggatgagaaacagagggaatgtggaatgcattgctttctggcccaggctccccttattctgaggggatttcagctcatgctgttggtgcatagcacaggtagatatggggaaagtctccttaccacagggaattccagctctctggaagccaccagcccaaggagctctccttgccctgtgctggctgctgaagcacgtggcagctgtaaggcattgctgcagctctcag

SEQ ID NO: 26050 - DNA, 600 bp, Chicken  19866894241932_3
aaggactcccatttaacttagtggygtttggatcgggccctcaccgtgaactctcctgaaataagggacattcatttcccatctcagttttggactcgattggtaggaatctgaagtggtgagacaaaatctgctgagatttttctttatgcctacattcatttcagtagtttttaaatggcagcctggcataaagtgatatttaaaacaaagcaagactaacaggtttcaaaatactaaagaaaatggacatccctgaaatttgggctggactgcagcacagatgtactcaytggtttyctgggttctsagcttcatcctggtcaattcattctgttctcgaatatggtagtaagttcatatggatgagaaacagagggaatgtggaatgcattgctttctggcccaggctccccttattctgaggggatttcagctcatgctgttggtgcatagcacaggtagatatggggaaagtctccttaccacagggaattccagctctctggaagccaccagcccaaggagctctccttgccctgtgctggctgctgaagcacgtggcagctgtaaggcattgctgcagctctcaggttgctc

SEQ ID NO: 26051 - DNA, 600 bp, Chicken  19866894241932_4
atttaacttagtggygtttggatcgggccctcaccgtgaactctcctgaaataagggacattcatttcccatctcagttttggactcgattggtaggaatctgaagtggtgagacaaaatctgctgagatttttctttatgcctacattcatttcagtagtttttaaatggcagcctggcataaagtgatatttaaaacaaagcaagactaacaggtttcaaaatactaaagaaaatggacatccctgaaatttgggctggactgcagcacagatgtactcaytggtttyctgggttctsagcttcatcctggtcaattcattctgttctcgaatatggtagtaagttcatatggatgagaaacagagggaatgtggaatgcattgctttctggcccaggctccccttattctgaggggatttcagctcatgctgttggtgcatagcacaggtagatatggggaaagtctccttaccacagggaattccagctctctggaagccaccagcccaaggagctctccttgccctgtgctggctgctgaagcacgtggcagctgtaaggcattgctgcagctctcaggttgctccagttagcac

SEQ ID NO: 26052 - DNA, 600 bp, Chicken  19866894241935_1
tattgcaacacctgtgctgctgagatgccaggcaaacctcgggggacatactgaactcccagcacgccaacggctccgctttcttaaagaggatgcaaataaccaaggattgattacatgacatataactgtgctgggcaatgttccctgaagcaatctatcccccatacccagatgggagctgctgtaaaaactgccagaggttgcagctagcaagttatagcatagatctaggagactgtagagaatattcctaaagctttcagctccacgtgcagctgtagcacagaaggcaaacargatgtcagttgcactgatagaggaatgtaatgtaattgaaaagattttgtggctactgtgtgaggaaattataagatcctgtgcagagtatgatttggtcaagaaataatatgggagataaattatatcagttctctgggtttgagaaaaatctattctcagaaggagtgttgaggcattggcacgggctgcctggagagctggtgaagttactgtcccagaggtagagtagatgtcacactgagtgacatggtttagtgggtatggtggggatgggttgatggttgggcttggtgatat

SEQ ID NO: 26053 - DNA, 600 bp, Chicken  19866894241936_1
cttcaggagggacacagttcatctgtgctcagctaatgcttatccaaaccagtgcaggaggagacaactctctccagagatgactgcaggtattgtgctgtcaaacatatctgtctatacatgccatggaagatgcaaggcaagtagcacagactacactcaagttatgcctaaaaagatgcaagaatagccctcctctgctgttcctccacgtcccagttaaattttgaaatcagtacagcagtgttgaaaacaaactgtgtcaaaactacaaacagtccttaattccagtttccaaakaaatcttcaggcaagtttgaagcagtaagtatgaaaagtctccttggctcttcatcctaggcaagatcataccaaaagcaatcccaacatgtctagactgagattgatatctgtggcatgctgtacattttataactttctcagaaagcaccttactcaacagcacactaagtcttccatcccagtaccaacatgacyagtactgagtaagacaactgccaagccacaataaattagactcccaagctcacttttagtgtctttttattctcataaccacattcttgggtcttcctcatg

SEQ ID NO: 26054 - DNA, 600 bp, Chicken  19866894241936_2
tgctgttcctccacgtcccagttaaattttgaaatcagtacagcagtgttgaaaacaaactgtgtcaaaactacaaacagtccttaattccagtttccaaakaaatcttcaggcaagtttgaagcagtaagtatgaaaagtctccttggctcttcatcctaggcaagatcataccaaaagcaatcccaacatgtctagactgagattgatatctgtggcatgctgtacattttataactttctcagaaagcaccttactcaacagcacactaagtcttccatcccagtaccaacatgacyagtactgagtaagacaactgccaagccacaataaattagactcccaagctcacttttagtgtctttttattctcataaccacattcttgggtcttcctcatgcagagaaatatgaatacataaccataaaacaatggtatcagcactatccctccagcattctaagggaagtctcaagagtatctacttaattctgcataccaagataagtgctacaatagaaaaataatttttatcctcttagtttctagaagtcagacagattctcatgacgtccattcattgtgctgctacgctcag

SEQ ID NO: 26055 - DNA, 600 bp, Chicken  19866894241937_1
tgcgaggggagtgggagggggcgggggggaaacttactggggttcttcatctggtagtggttgaggaagccgagggtctccagagcgtcgctcttggactcccactccagcagccccgaggagctgcgctcacctgcagaggagtgacccttcctcagcccgggggctgcgggcggccgtgccgccccgtcctgcccaccccgcggggcagggagctcccgcgctccgctccctgcccacacacacttactcttgccagagaacaccttgacggaggacggccgcttcacccccagctcrtcrcagatctgcgggagagaaagcgagaggaattggacaaaacccggggacaacccgaccccaaatcggttaaaggcgcacaggaaggaagcgaaaaatggggtgtacagccccgaatccaaggaggatacagaaaacggccccgaatccagacatgggatggcttacctcgtagaagttctcctccgtcacctcgaggggcgcgttgaagaagtgcagcacgttgctggggtgctggatgcggttcttggccgcctgctccggggtggagaagcggttgttgcgcgacccgctgaagtc

SEQ ID NO: 26056 - DNA, 600 bp, Chicken  19866894241937_2
gaggggagtgggagggggcgggggggaaacttactggggttcttcatctggtagtggttgaggaagccgagggtctccagagcgtcgctcttggactcccactccagcagccccgaggagctgcgctcacctgcagaggagtgacccttcctcagcccgggggctgcgggcggccgtgccgccccgtcctgcccaccccgcggggcagggagctcccgcgctccgctccctgcccacacacacttactcttgccagagaacaccttgacggaggacggccgcttcacccccagctcrtcrcagatctgcgggagagaaagcgagaggaattggacaaaacccggggacaacccgaccccaaatcggttaaaggcgcacaggaaggaagcgaaaaatggggtgtacagccccgaatccaaggaggatacagaaaacggccccgaatccagacatgggatggcttacctcgtagaagttctcctccgtcacctcgaggggcgcgttgaagaagtgcagcacgttgctggggtgctggatgcggttcttggccgcctgctccggggtggagaagcggttgttgcgcgacccgctgaagtcttt

SEQ ID NO: 26057 - DNA, 599 bp, Chicken  19866894241945_1
  misc_feature (1)..(19): n is any nucleotide
nnnnnnnnnnnnnnnnnnnatccttgaagatcaaaaagggagtaatttctgttttacaggagattactcgcactacaagtctaactcttgttcactttgaggtacttaaataaatctggagccctggctgtaggacagacagacagttccagtgggaaaatcagctctgaatttcataatgggaatttcattcattttctgaatgtgttcatccttatccattagcccagaggacccaggactagcagacgcctttgaaattcagcccactgcctcaggttagattaaatgaatccatasttctgatcagcagagttaaaaaaaaaaatacaaaacccaaaccaaccaaaaagcaccaacaaccacataaccatataataatatggaaggaaataaaggacaagggatatttttatttgtgcagctgaccagatatttccatctttggattgctccctctgctgcctgcaaggtagctggaggggagctagcaaagctacccaggtggactctgcatccctcttcctcgcccaactcccagcattagagatgccgacagttactagataaagttaaagactcatgtagtgatcttcaca

SEQ ID NO: 26058 - DNA, 600 bp, Chicken  19866894241955_1
tacacattattttatatatatcgtggtaaagctgctgatattcaatattatactttccaagtaaacatcttgacaaacctgtaactatgacaaggtcttgtagtgtcttgttgatcttacctagtaaagatgatacggaaaaatactacttctgtagcatgcgggccatgtataggaactttaacagcaattgtgagagttagttgtgagtactatttattctgtgtgcccaaaatgtcaaaatactgtaatacgatatcatagaatcatagaatggcctgggttgaaaaggaccacaaygataattgagtttcaacccccctgctatgtgcagggtcaccaaccaccagaccaggctgcccacagccacatccagcctggccttgaatgcctccagggatggggcatccacaaatttcttgggcaacctgttccagtgcgtcaccaccctctgagtgaaaaacttctcctcctaacctaaacctctcctgtctcagtttaaaaccattcacccttatcctatcactgtccaccctcataaacagccattccccctcctgcttatatgttcccttcaagtactggaaggccacaatgagg

SEQ ID NO: 26059 - DNA, 600 bp, Chicken  19866894241956_1
ttatataaagcaagttaaaatttaatgatttgttcccattttgaaagataaatcctgcccagaaagtttctatgtagttatgattgtgataacctaagaagtggaagacgaccagaaggggagaactgaatagacaagctagagaattgagaactgctgacaaagatgtaacacatgcatttaccactggaaaaaaaaaaggggggtagggtctgctgcagttctggagtagctgtttgagaggtctgctgcagatccaaacatggagtagctgtttgaaactgccaagtccttaatgtscagtttctatgcaagagactgatggctgctgagggactgttaccctgacttcctacaatagcagaatctgtagaacagacctttgcaagtttgctgtcattcaatgctcttctgtccctggctttggtttggcaaaaacagtgaggcagaaaaatccatgtttcagcccctcaagagggggaagaaagaaaacactaatgccttttattccagagttggctgcatttatttcatttcagaggaattattattcatttcaaatagctacaaataatttggaaagaaatcagcaggaggttc

SEQ ID NO: 26060 - DNA, 600 bp, Chicken  19866894241956_2
aagagactgatggctgctgagggactgttaccctgacttcctacaatagcagaatctgtagaacagacctttgcaagtttgctgtcattcaatgctcttctgtccctggctttggtttggcaaaaacagtgaggcagaaaaatccatgtttcagcccctcaagagggggaagaaagaaaacactaatgccttttattccagagttggctgcatttatttcatttcagaggaattattattcatttcaaatagctacaaataatttggaaagaaatcagcaggaggttcctataaggaggstcaagtctattactttgtctccctacagctacaacagtttccagggatatcttcaggagcttcagatatgtagatggaacagactgtcaaagctaaattctcatgtgtggatttaagacaattttgcattccaaatcttaggcaataaggcaactaaagggaacaggaggtggagagggaacatcaattctgccataaatgattttgccagggataatttcggtcctgtgtttgtacagacggcactccttgtaagaacagtaacccactaactttagctgttaaagagaggtcaaataa

SEQ ID NO: 26061 - DNA, 600 bp, Chicken  19866894241957_1
tcaaaagtttgagttgaatatatgactccaattctatacatccaatttgaaaagtcacatgtaatgtatgattttttttgcaatcttgaaacctaatctcaaattcttttatcaaaacagaaagcatagctgcatatttttcactgttcctgggactgtttgactgatgtatcaaaatgcatacagtgatttgccataacttgagttagcgctgcgctgtgccctccccttctcctgctttcagcccaatgcaatcacacaccattgtgtggtcgttgctgagtgatgggctgcatacgrcccgtggcccaagkgttggtcatgcctgacttagaacaatgttttgcattttttaatacttatacagtgtccctctccatttttcccccactgtgttatctttttcaaagctccaagcaactccattgtcagtgaattttcttctctaaatggttagtagttctctttgtgtctcacctgattagataggtatatcctatcaattgatgcataatgcctggccatgaatacttcagcttcrcaatctgaaaattyggttcagtgacagcagagagatctttgttctctaaactgaatgca

SEQ ID NO: 26062 - DNA, 600 bp, Chicken  19866894241957_2
tgaatatatgactccaattctatacatccaatttgaaaagtcacatgtaatgtatgattttttttgcaatcttgaaacctaatctcaaattcttttatcaaaacagaaagcatagctgcatatttttcactgttcctgggactgtttgactgatgtatcaaaatgcatacagtgatttgccataacttgagttagcgctgcgctgtgccctccccttctcctgctttcagcccaatgcaatcacacaccattgtgtggtcgttgctgagtgatgggctgcatacgrcccgtggcccaagkgttggtcatgcctgacttagaacaatgttttgcattttttaatacttatacagtgtccctctccatttttcccccactgtgttatctttttcaaagctccaagcaactccattgtcagtgaattttcttctctaaatggttagtagttctctttgtgtctcacctgattagataggtatatcctatcaattgatgcataatgcctggccatgaatacttcagcttcrcaatctgaaaattyggttcagtgacagcagagagatctttgttctctaaactgaatgcattatagggttttgt

SEQ ID NO: 26063 - DNA, 557 bp, Chicken  19866894241957_3
cagcccaatgcaatcacacaccattgtgtggtcgttgctgagtgatgggctgcatacgrcccgtggcccaagkgttggtcatgcctgacttagaacaatgttttgcattttttaatacttatacagtgtccctctccatttttcccccactgtgttatctttttcaaagctccaagcaactccattgtcagtgaattttcttctctaaatggttagtagttctctttgtgtctcacctgattagataggtatatcctatcaattgatgcataatgcctggccatgaatacttcagcttcrcaatctgaaaattyggttcagtgacagcagagagatctttgttctctaaactgaatgcattatagggttttgtgtctgatttcagagttctgatggggctaactactgcttttcacaggataggatgtttacatacatgtatatttttatagacatgaaggcagcagaagttctaaggtgagtgatagagactccaacaaaacatttaaggacatctgaatgtattctggagtgcaactgggctttctgtacctcag

SEQ ID NO: 26064 - DNA, 543 bp, Chicken  19866894241957_4
cacacaccattgtgtggtcgttgctgagtgatgggctgcatacgrcccgtggcccaagkgttggtcatgcctgacttagaacaatgttttgcattttttaatacttatacagtgtccctctccatttttcccccactgtgttatctttttcaaagctccaagcaactccattgtcagtgaattttcttctctaaatggttagtagttctctttgtgtctcacctgattagataggtatatcctatcaattgatgcataatgcctggccatgaatacttcagcttcrcaatctgaaaattyggttcagtgacagcagagagatctttgttctctaaactgaatgcattatagggttttgtgtctgatttcagagttctgatggggctaactactgcttttcacaggataggatgtttacatacatgtatatttttatagacatgaaggcagcagaagttctaaggtgagtgatagagactccaacaaaacatttaaggacatctgaatgtattctggagtgcaactgggctttctgtacctcag

SEQ ID NO: 26065 - DNA, 600 bp, Chicken  19866894241959_1
cctgtcaagccaaaacaacgccttgcctcacagcactagctgtattcttccttggtgagttggcagaaaactgtaacttgttttaatgtagtcacatctgtatttgctttttgttccatgtccagaaggaggggcacccttgtgccttgtatattctgttgcacccattttaactattctcccatcacaactctcactgtttcaggacccctccccaaaaggtttgatactgttttaaagagatgctgagaacccctatgatgatggacatacattgccagaatgcagatcttccaggawtttgtcaccttgttatccttaacccagtcccctcaactatttgtatatttttatcttattatttttagcatcaatttttcttttcatttttcttaggctccagtgggatcactaaaccacaatttacagtttctatgaacccaaggcacttggttccactctcacttagytgctttgggatttgcaacttattgcctcttttttattattttcttacaagaagcaatgtgtccctaagatgatgttctacataaaagatttttatagacctaaggtcagcgtacagctttttagaaggca

SEQ ID NO: 26066 - DNA, 600 bp, Chicken  19866894241959_2
taactattctcccatcacaactctcactgtttcaggacccctccccaaaaggtttgatactgttttaaagagatgctgagaacccctatgatgatggacatacattgccagaatgcagatcttccaggawtttgtcaccttgttatccttaacccagtcccctcaactatttgtatatttttatcttattatttttagcatcaatttttcttttcatttttcttaggctccagtgggatcactaaaccacaatttacagtttctatgaacccaaggcacttggttccactctcacttagytgctttgggatttgcaacttattgcctcttttttattattttcttacaagaagcaatgtgtccctaagatgatgttctacataaaagatttttatagacctaaggtcagcgtacagctttttagaaggcatgaaaatttggcatggaaactgaaatatttatggcatatacttgattttttagaaagagaaaaataaatagccctcattttcaaaagaaagttggttcaaaacaacaaagcacagtcttggaggttcagacaacctatctcaccatcatttttatcaagacttgcactta

SEQ ID NO: 26067 - DNA, 600 bp, Chicken  19866894241959_3
agcctcatgacatttcctctagtcagtgcagaagagctaagcactagcgcataccttagcctgggaaaaaacatacctggacatgctttcttatgatcaaatgagcttgcttccagattctatttcactataccaagccacattgtaacgtattttatgttgacaatggaaagtatgggaaataagtgggaatgaatgggataactgaacaaagctatagctctgacttggatgcaagtgggcattacaaattatgccaaaactttcaaatgtcctctccatccagatcatgttcaaaasagagatatgcsaaagaggaataactacagtttagcatactatagcaaatcccactgcttcctaaatatgcaattgggattcagayaataatcattaacaagaacatccaggaaaaaaaattatagatgccttgatgccttatattctcaagacactctgtgactgatacatatggagcaaagaggtacagaaaatgtgtcccacttcattcagtgcagaactttgaccttttaaaaatgatagatttggcaaaggagtctagacactgctggtgcactagctatcaatatattcctaata

SEQ ID NO: 26068 - DNA, 600 bp, Chicken  19866894241959_4
atttcctctagtcagtgcagaagagctaagcactagcgcataccttagcctgggaaaaaacatacctggacatgctttcttatgatcaaatgagcttgcttccagattctatttcactataccaagccacattgtaacgtattttatgttgacaatggaaagtatgggaaataagtgggaatgaatgggataactgaacaaagctatagctctgacttggatgcaagtgggcattacaaattatgccaaaactttcaaatgtcctctccatccagatcatgttcaaaasagagatatgcsaaagaggaataactacagtttagcatactatagcaaatcccactgcttcctaaatatgcaattgggattcagayaataatcattaacaagaacatccaggaaaaaaaattatagatgccttgatgccttatattctcaagacactctgtgactgatacatatggagcaaagaggtacagaaaatgtgtcccacttcattcagtgcagaactttgaccttttaaaaatgatagatttggcaaaggagtctagacactgctggtgcactagctatcaatatattcctaatagaaataactga

SEQ ID NO: 26069 - DNA, 600 bp, Chicken  19866894241959_5
ctttcttatgatcaaatgagcttgcttccagattctatttcactataccaagccacattgtaacgtattttatgttgacaatggaaagtatgggaaataagtgggaatgaatgggataactgaacaaagctatagctctgacttggatgcaagtgggcattacaaattatgccaaaactttcaaatgtcctctccatccagatcatgttcaaaasagagatatgcsaaagaggaataactacagtttagcatactatagcaaatcccactgcttcctaaatatgcaattgggattcagayaataatcattaacaagaacatccaggaaaaaaaattatagatgccttgatgccttatattctcaagacactctgtgactgatacatatggagcaaagaggtacagaaaatgtgtcccacttcattcagtgcagaactttgaccttttaaaaatgatagatttggcaaaggagtctagacactgctggtgcactagctatcaatatattcctaatagaaataactgaaatggcagctgagcccatccctactaccacagagaactacacatcgcagtagcaagaaaaagctgctgcaaaat

SEQ ID NO: 26070 - DNA, 600 bp, Chicken  19866894241959_6
aatggcaattttaaaacaatttatcaatatagagttacaaacaaattggctgtttccaaaactgcacagaagagattttattccatgatacacgtgtgttccccagcatgatttttcttttaatgatacctcatagcaaaatagtccactcaacttactgatcatattaagctgttgccatggaaattttaagaccctactgtactcagatgttaactcttcaagcacagcttcacccttctttattagaaagtttatacaaattttagtttaaaaggggagctcttggcaaagcagaaktcagatactccttcagctgtctagcacagtaaggatgacaatggtaagggcttacttcagggctggtcagtcagccacatacaccatttccctaagaataaaaaaattgacaaactgctccacagacaatgcaaatagtagttaatgagtcgagttcgctraaatgagagtaaagtgagaaacccctaaatactgcttcaatgttgtctagcatataattcttacagggaaaaaaaaattaaaacatctcttcctttctcctctaattctgaaccttcattttagaaagaaagatcaaag

SEQ ID NO: 26071 - DNA, 600 bp, Chicken  19866894241959_7
tcatattaagctgttgccatggaaattttaagaccctactgtactcagatgttaactcttcaagcacagcttcacccttctttattagaaagtttatacaaattttagtttaaaaggggagctcttggcaaagcagaaktcagatactccttcagctgtctagcacagtaaggatgacaatggtaagggcttacttcagggctggtcagtcagccacatacaccatttccctaagaataaaaaaattgacaaactgctccacagacaatgcaaatagtagttaatgagtcgagttcgctraaatgagagtaaagtgagaaacccctaaatactgcttcaatgttgtctagcatataattcttacagggaaaaaaaaattaaaacatctcttcctttctcctctaattctgaaccttcattttagaaagaaagatcaaagacaatgaaaagcaaccataagcaacatctttcttccttctttctcttttaaaagaggattatgatcatccaggcatccgagtattgaaaccagggcagtgaagtcaagaaacagctccagatcagctgtaaataactgtcttaacattatggaaatcaaag

SEQ ID NO: 26072 - DNA, 600 bp, Chicken  19866894241961_1
ctgaccagcagagaataaaatggtcacaatgaatagcacaagccttaacgtgcctaaagtgattacaagcattatcagaagtcccatctgaaatgagggattctcctgagtggtggcacatttacctcagctggctgatttctcccctatccaattaatgaatgtgaaaatctgatcaaagttctgattcggggagcgtgtgaccaacacagacacagccaaactgcagcagtagatgacctaacatcagactccgggcataaaatgcagtctcagctccctcatggacatgcaggcagygagatggaagctcaccatgctgggaggcagcaccagagctgcacatctctgatttgcagtgcatgaggattaacaagccaagcaggccacaggttggccagctcgagcaggagctcttcacgggcagcataaaacacgtatgttaaagctcctatctccacaagttatttaagcatagaatatcatccctacaagacgtgtccaaagacaatctctgtcttcacccacagctgagcctaatcagaactattcagaacagatcctaaacctcatcacaacaaaacactctggagattaaat

SEQ ID NO: 26073 - DNA, 600 bp, Chicken  19866894241972_1
tgggggcacaatgggctcaggggtggactggggatgggcgcaggcagtgtgtgggcattccgtggtgcatggctcctcccaggctgtatgccccactccggtggcccagtcagcaccgggcccacattgtcccactgtgcctgctctggtcccacagctgccactgctctggggctcgtggtgcagcctcagcagcagacctggaggtgcatggcatgggttgcagcagaagacctagaatgcagcagacccagacacgtgtggcccagggtgcaagattcttctccttcctgcaatccwgggcagagctggctgggcacgcactgagctggctgcctggggacgtgatggctgcagcatgtgccctggccatgcactagtccaggcagcctgcaaatgcttctgtctgcaggcagcctgcaaatgcttctccccagaactgtggggaggaaggagaacaggagctgagagctgatctccatgcaccaggggctccagcaaagctgttctaaggcgttgtggctcgagctgctctgcggcacrgcacggctgtaccaggctacagtgcttgagaaagagctgcatttcacaagtgctcaa

SEQ ID NO: 26074 - DNA, 600 bp, Chicken  19866894241972_2
agcagacccagacacgtgtggcccagggtgcaagattcttctccttcctgcaatccwgggcagagctggctgggcacgcactgagctggctgcctggggacgtgatggctgcagcatgtgccctggccatgcactagtccaggcagcctgcaaatgcttctgtctgcaggcagcctgcaaatgcttctccccagaactgtggggaggaaggagaacaggagctgagagctgatctccatgcaccaggggctccagcaaagctgttctaaggcgttgtggctcgagctgctctgcggcacrgcacggctgtaccaggctacagtgcttgagaaagagctgcatttcacaagtgctcaatgcagggatgttgcctctggcaaccagagcacttctctggatccagcacaagatctgcccgcatcagcccctgtggacttcctgtgccatgtcctgctgcttccagaaagggaaatgaaagcagcctaaagcttcttccatcactctcattagtggtggtgggggagtggcaggggctgtggggctctgcaggcagctgaaggtgggggacccttgggcagcccccaggagtggggcagctca

SEQ ID NO: 26075 - DNA, 600 bp, Chicken  19866894241979_1
tatactgtatcaaagtcagtcattttttagacattttaattgttcctttgttacacagttcactgaatgcttattttagcccagtttcttacactgttgtcattttgactttcctcacctttaaaaagatttttttagagctctttcaaagaacaagagttgcagaatgccacttaggaatgtaaacatcagtttattattatcactgttcagtattgtcactctgttctcccctcctccccccattctagcacgtcttaatgcctttgtctttttctgcattggagcagctgtgaaaawttgtccaaattagcattacaggtggattagtcaaatcactctaaatctcagtgtagatatctttatttgtgcttaaaatatagcaaatttggctaagcttatatcaattccaaagtgaaccatagtaaactgaatcagaagcattttagtgctgaataagaataaaaataaaagaacaagaatataagaatacccacacagtggtttaatgtgattgaacaaatcttctttaaactcacccatataactgataaggattaaatttccagttttttctcccttggtagcctcagagaagct

SEQ ID NO: 26076 - DNA, 600 bp, Chicken  19866894241986_1
tgcagctgaggtagagttcaatgagcaaaaagtgcatggctcacttgccatccattgagaaaagcaatgccagcaggcacagactgaggtgcaacctaaggtgttgcttgggacaagcctgtgcatctcacaaggtgtccagaaaaataaattcccagtaaagccctacagcctcaggctttcaagatataagtatgtgcaatatcggccaatgtacaccaaaaatcacaacgttttatttaaaaaatcatttagaatgcattagtcattctgtgctaagctgttacatcgtttaaggtwggtcttctatratgaatggagtgacactgcgaaactgaatgctcagagcattctttttaccaaawtacaatataaacctgtctcactcatcagcaatagttttgtgagataaaacctatgatacawtagcagaaaggtgggttcttatgcatagcagggctttaaacagcaaccacttgtatacacgcaaagcrtgatgcttgtatgttggcttctttaactccacaccgaatcaaagcttcaccagaaatgaaactgcacgctctcacctttggattaacggagctctcattagcagta

SEQ ID NO: 26077 - DNA, 600 bp, Chicken  19866894241986_2
tagagttcaatgagcaaaaagtgcatggctcacttgccatccattgagaaaagcaatgccagcaggcacagactgaggtgcaacctaaggtgttgcttgggacaagcctgtgcatctcacaaggtgtccagaaaaataaattcccagtaaagccctacagcctcaggctttcaagatataagtatgtgcaatatcggccaatgtacaccaaaaatcacaacgttttatttaaaaaatcatttagaatgcattagtcattctgtgctaagctgttacatcgtttaaggtwggtcttctatratgaatggagtgacactgcgaaactgaatgctcagagcattctttttaccaaawtacaatataaacctgtctcactcatcagcaatagttttgtgagataaaacctatgatacawtagcagaaaggtgggttcttatgcatagcagggctttaaacagcaaccacttgtatacacgcaaagcrtgatgcttgtatgttggcttctttaactccacaccgaatcaaagcttcaccagaaatgaaactgcacgctctcacctttggattaacggagctctcattagcagtaacctcagctac

SEQ ID NO: 26078 - DNA, 600 bp, Chicken  19866894241986_3
aatgccagcaggcacagactgaggtgcaacctaaggtgttgcttgggacaagcctgtgcatctcacaaggtgtccagaaaaataaattcccagtaaagccctacagcctcaggctttcaagatataagtatgtgcaatatcggccaatgtacaccaaaaatcacaacgttttatttaaaaaatcatttagaatgcattagtcattctgtgctaagctgttacatcgtttaaggtwggtcttctatratgaatggagtgacactgcgaaactgaatgctcagagcattctttttaccaaawtacaatataaacctgtctcactcatcagcaatagttttgtgagataaaacctatgatacawtagcagaaaggtgggttcttatgcatagcagggctttaaacagcaaccacttgtatacacgcaaagcrtgatgcttgtatgttggcttctttaactccacaccgaatcaaagcttcaccagaaatgaaactgcacgctctcacctttggattaacggagctctcattagcagtaacctcagctacttctctctgtggtctttcctgcatgtctttcttcactggttcctaaaaatgaac

SEQ ID NO: 26079 - DNA, 600 bp, Chicken  19866894241986_4
ctcacaaggtgtccagaaaaataaattcccagtaaagccctacagcctcaggctttcaagatataagtatgtgcaatatcggccaatgtacaccaaaaatcacaacgttttatttaaaaaatcatttagaatgcattagtcattctgtgctaagctgttacatcgtttaaggtwggtcttctatratgaatggagtgacactgcgaaactgaatgctcagagcattctttttaccaaawtacaatataaacctgtctcactcatcagcaatagttttgtgagataaaacctatgatacawtagcagaaaggtgggttcttatgcatagcagggctttaaacagcaaccacttgtatacacgcaaagcrtgatgcttgtatgttggcttctttaactccacaccgaatcaaagcttcaccagaaatgaaactgcacgctctcacctttggattaacggagctctcattagcagtaacctcagctacttctctctgtggtctttcctgcatgtctttcttcactggttcctaaaaatgaacaaaaacgtgtagccttatttacaatgctagttagacatagagaagcagatcatcatttaaa

SEQ ID NO: 26080 - DNA, 600 bp, Chicken  19866894241986_5
atgtgcaatatcggccaatgtacaccaaaaatcacaacgttttatttaaaaaatcatttagaatgcattagtcattctgtgctaagctgttacatcgtttaaggtwggtcttctatratgaatggagtgacactgcgaaactgaatgctcagagcattctttttaccaaawtacaatataaacctgtctcactcatcagcaatagttttgtgagataaaacctatgatacawtagcagaaaggtgggttcttatgcatagcagggctttaaacagcaaccacttgtatacacgcaaagcrtgatgcttgtatgttggcttctttaactccacaccgaatcaaagcttcaccagaaatgaaactgcacgctctcacctttggattaacggagctctcattagcagtaacctcagctacttctctctgtggtctttcctgcatgtctttcttcactggttcctaaaaatgaacaaaaacgtgtagccttatttacaatgctagttagacatagagaagcagatcatcatttaaaaaaaaacaagtggtgcaagcaacttttcctacagagatgcaaactaaatcaaaaattaaggcaagttt

SEQ ID NO: 26081 - DNA, 600 bp, Chicken  19866894241990_1
cttagtgatgggttcctccatacagcgggaatgagttatgatgggctgtaaattgtcaggattaactactgtggtttagagtacctattttttgtggagagctacataaaccagtattatggaaggcactttaacatattttatgaacttttgttctctttcatgcacagtgctattaaggattcatcctgcgtttcctgattgcataataatcctggatcaaattgctcaggtcaataaggagggaatgaaaatgtcacaccattatctgtctgaacttgtaggtgtttttcctgtaaytctgtcacccccaaaacgctttgcaggcatgcacagctctgcgagtgtgtcgggcgtttgatttattcacccgtgggtgtttgatttattcacctgtatgggcgtgctgtcttgatgcttcaggtttggtgcaatgtactggggttccacaaaacatcaggcctgtgatggtgcacacaatatcccattaatgttggatactcaacagcacgtgcagcattcgcttttgctgttacagacattcaggtactggaaagctcagcattaccccagctgctttcaaagatgtggtgatttcca

SEQ ID NO: 26082 - DNA, 600 bp, Chicken  19866894241990_2
aaaattttaatgtactgcatttgtctgtggtggcagtttctatggtatataataacgttgataaattttactgtagcaagtgacattttataacattaatcctggtggtaaaatctgatgaatactgcagctgtactggtgggtgagagaagaccgagagcttttgacaccagtcgaattgatttggatggtgttttagggctgcacaccgtgagctgtgaggacggtgcggagatggcagatgctgctccgggattgaggaggactcaggcgggcgctggagagctcgagtggatggtrgagataattcagttttaacaaaatcgttattgattggtacatccttttgttttgagaaggaaaaggaaatcgagtggtacaataaaagccctttaaatcctcgctggctatttaaactctgtgcacgtgagcccgtgacaagcaccccgcgatcgctgcggatgcgacacctggggctcatcccgctcctggtgccgggcatccgggctgctccgtgccttgctgtccccgtgggggtcggggagtgccggggcagccctgagcgtggcacaggaaaagcagctgggaaatcagcctgct

SEQ ID NO: 26083 - DNA, 571 bp, Chicken  19866894241991_1
catcttctcccatgcatgtgaaagttaataaaggcaatataatggcatttaggagacagttacattttctgcactcatcatgacttctcggttgcacacaacagtcttaaaagtctggcaaagagccagaagtagcgtgcagtacgttgataatgtcagatatgggtccgtctcttctgtggcacgggtaggaaaaaaggaaagtggaagaccttagccagagagaaaattgtcatccatctccaaagtggaatcttaattttcttatttgtctgtggatgcactgctcccagtaattgstgtgcaattccgatgcatcattttatttgttagtttgttgttacattaatttgcctttgttttgttagttagatgaaactgaatttaaaagtcagtaaagcagttatttacgagattgtaatacaaatgttccaaaatacacttgtaagtaacaatgtggatttccttaaatgagttgtttaggtaaagacatctaaataaacccagacagtccattgaagtaagtgataggcacccgaagacaggtaatgaacaagaagccgggagaagt

SEQ ID NO: 26084 - DNA, 600 bp, Chicken  19866894241993_1
gcactttcttcagtggtactgcaggaagccagagcactgggggttgttaaattggcaagttaaaagtaacacacactacagtaaataaaagaagccagacttctttttcttctaatttattcttctcatttcccgtgctactcagtgtaactttttacctctgcagagaaaattctgtagtgttgtgatttttttaaaactttgacaagatttgagtcccaaagtcacccgataatcactactattgaagagttgaatagaagcataaaatctaagtgaagataggaatattctttaaayagagaaaagtcactttcagtactgactgcacccacattggtggactcactgcttggtgaatgcctgcaggcagccccagccaaggcttggtaggatttggcattgctggggagcacgtgggggcacccccataccccataccttcctgtgcctcttccttcacttcccctatcatcaatgacaggtcagatttgtcccttaactatgggcaaagctttcttggagygtatatgagagaaagtgctaaaggagtttgacagcatggttacctacttgcacctttatcacactgggactaat

SEQ ID NO: 26085 - DNA, 600 bp, Chicken  19866894241993_2
acccgataatcactactattgaagagttgaatagaagcataaaatctaagtgaagataggaatattctttaaayagagaaaagtcactttcagtactgactgcacccacattggtggactcactgcttggtgaatgcctgcaggcagccccagccaaggcttggtaggatttggcattgctggggagcacgtgggggcacccccataccccataccttcctgtgcctcttccttcacttcccctatcatcaatgacaggtcagatttgtcccttaactatgggcaaagctttcttggagygtatatgagagaaagtgctaaaggagtttgacagcatggttacctacttgcacctttatcacactgggactaatctcagatatttggagacctggctatccaaastgttggctgggggcctgtgtaagagaaacttttcatctagctgctttgtggacgtattgttctaccttagctttgcaatcaacagacctggacagatctggatatctaatagaccaggaatcctgtgcggaaggaaaacgtggagtgtaacagaaggggagaagttgaaaaggctttgcaggtttcatggattat

SEQ ID NO: 26086 - DNA, 600 bp, Chicken  19866894241993_3
ccacattggtggactcactgcttggtgaatgcctgcaggcagccccagccaaggcttggtaggatttggcattgctggggagcacgtgggggcacccccataccccataccttcctgtgcctcttccttcacttcccctatcatcaatgacaggtcagatttgtcccttaactatgggcaaagctttcttggagygtatatgagagaaagtgctaaaggagtttgacagcatggttacctacttgcacctttatcacactgggactaatctcagatatttggagacctggctatccaaastgttggctgggggcctgtgtaagagaaacttttcatctagctgctttgtggacgtattgttctaccttagctttgcaatcaacagacctggacagatctggatatctaatagaccaggaatcctgtgcggaaggaaaacgtggagtgtaacagaaggggagaagttgaaaaggctttgcaggtttcatggattatagaatcacagaatggcttagatttggaagagaccttaaagagttctcttccccctgccatgggcaaggctgccccccaccagctcaggctgcccagggcccatcc

SEQ ID NO: 26087 - DNA, 600 bp, Chicken  19866894241997_1
ttttatttcataatcacaaccagagcagccctggcaggtcggagggtgggacttatccacctcactaatctgttcacaaggagatctcagcatacataactcaagccagatttcgctctgccatcagtccctccatacccagcaggttctggggtttcattttcctcgatattttatgccctgttattgatgggagaataaaaatacacacttcagcttttgcagatgccagcttgtgaagaggcataaaaaacagaaagcgaaagattaagcacgttaatttatatcatattattttgygtctgtgggtttatttaccaaaataataactcttcaaaacgatcaccctaaaagatgcacagacggttatttaatcacacagctaaacttccagatgttttgctgatgcatgcttgaagtatccaccagtaaaccgtgctgtattttactcctaagcaaagacgacgggatttcaagtccttagtggtatcagcagggctattatttagggcaatttattatttaatgccgctttaaaattgctcttgttcctgcaaaaatacacagaatgacacattccaaaatgcaacataaaaggcc

SEQ ID NO: 26088 - DNA, 600 bp, Chicken  19866894241999_1
gttcttcctggaactataatatagctttttataattaaataaaaaccacaaaccagatctttcaaacaggattgtactttatattaacaaaatgcacccttataagtgagtcagtctgtgatgcccattaatggctagcagctctgttaaaaaggctgagcaaaaaagccccagaatgttttattgtttaatgtgaaagcatccagaacaatggatgggcatttttttctatgaatcaaaataatcacatttaattaattaaatacatgaggcatctgattctgtagctgttctatgcayggaaatcaactgggtttaataagatgcaacacaatggagtaaattagtacttttgcctctaatctacagaatgaggacagttggtttgcttgcacataagcttacttttgggtgagtatcagcctccagtgacagattacacaattgttgtatttaatttttttttttaagaagtggctactagttttgagtatctctgtctttaaataccagcctaggaacaccctgagtcacaaagcaggaacatctaaaatatcacccaactgcaacagaatatctgataaaaaagaaaaaatatca

SEQ ID NO: 26089 - DNA, 600 bp, Chicken  19866894242006_1
ttgcaaggagtgacacccatttgtttcagcagtgctgttgcttttttgtccactttgcacaaccaccgcatagtttcttgcctctgcctgagaaggcaatggaaaaaagtttcaacattcactttagcaatccacttcacatcagtttgtttgcaaaaattgtccttgttccttacctacctgtacttgtcacatgaatgaaacaggctgtaatcttggaattgcttaattcttaagtagctcttggttcatgcaggcttcttttttcaggataaacaaggaatcccttggtggcttggmataagttataaagggataggccagtacgacttacaagacaaagttaagcccagaaaagtaaggtttttttttgcatctgatttttttatttggggagggggtggggggtgttgcatgctgggatatacttgtttaagctaatgtttattaaactagtgagcaaaatacaaagaactggaggcagaagaattctattagcaccacagcagtaaaattctgccctctcgcaaagtactggaagtcaatgtgccacggtgagcaactgcctttgggtgctttgtcttgagtttggtggtcttg

SEQ ID NO: 26090 - DNA, 600 bp, Chicken  19866894242008_1
tttactggttagaaacgtgcccaggaaaggtgcccgttggcccctcaaactttcactcgtggtgctcaaactttgttcaagcccaacagctgctggaatgactcatgattgctgggatgctgagagctgtcccacatgttttgttttctcgatgcgtagtgggtggaagagaagctaaattgcatcttctcagatattaaatgtaactgctcacattaaacacagagttatctgtgcatctctttaataccagtgcagctacttctgagtattaacagtcagcgttgccataataagacrcgtattgtcttggagttaataggctgtttttatcacagctttgtcrtatcattaatcattttctgtttggacattgctaattatcccctttggtaactcagccgaggtactatgaagtcatctgagctataaagtgaagtcgtggttccacgatgttctcttaattagttccctccaagatgaaacaaaagggatgcttttgctaatgagatgccttcggagtgcaagggaaggggctcgaataaccaagaaaggatctccctttcttaaatttgcttttagcttcaaagttttaaatta

SEQ ID NO: 26091 - DNA, 600 bp, Chicken  19866894242008_2
aaactttcactcgtggtgctcaaactttgttcaagcccaacagctgctggaatgactcatgattgctgggatgctgagagctgtcccacatgttttgttttctcgatgcgtagtgggtggaagagaagctaaattgcatcttctcagatattaaatgtaactgctcacattaaacacagagttatctgtgcatctctttaataccagtgcagctacttctgagtattaacagtcagcgttgccataataagacrcgtattgtcttggagttaataggctgtttttatcacagctttgtcrtatcattaatcattttctgtttggacattgctaattatcccctttggtaactcagccgaggtactatgaagtcatctgagctataaagtgaagtcgtggttccacgatgttctcttaattagttccctccaagatgaaacaaaagggatgcttttgctaatgagatgccttcggagtgcaagggaaggggctcgaataaccaagaaaggatctccctttcttaaatttgcttttagcttcaaagttttaaattactctgctgtcctttcattctgccctgggctgtctcatcctttgttt

SEQ ID NO: 26092 - DNA, 600 bp, Chicken  19866894242013_1
agattaagtcagggcaactttgaatccaatcctgaagcaataaatgagtcataaggaagctgatgagtctcttgaactttataaaaagaacattcatacacagctggcagtcagaagtgatattatcttgagaagcagagcttgagaaagctaaaaaaaacttcaaccagtgagaacacaaagggcgtaagagagccattttagaataagcagagagaaagcaagttaaagcaacgttgttaagtaaggtgagaagaaaacagggattcatgagacaggagtggaattatcatagctgcrctagcagaactctttggcgctgtgtatactgctacataagtgagtacaagaagctgaccccaaagcctagcagcatgaaattcctcacatctgtgttgcaaagggcttgctctgaagacatctgctcttgaggggctgatgggagcaggccctctagaataggctgttaataataaacagagtggacaagcaacagtcctgtgctgtagcactctctacctccctcatctccccagcctttacattcacccctcagcaagatggcttaggtcagcacaactcaaatattgagagtctgaa

SEQ ID NO: 26093 - DNA, 600 bp, Chicken  19866894242015_1
ctactgtcacctactcagcaggctctgcttaacaacaagaggcaaaacattgtctttcatttgcttttactttttcttagctagattttctttttactcaatcagctgggcaaaactagctttacaagctaggaaactgaaaggaaggcagaaatgtttttaggataacagatacataatactcccaacaaactgtttcattcttagttcaggaaaacactgcaatagctttaagtggccagaactgtaagatagcatataccatcatacatttgaaagtgatggaggtatttgaatatmaaaaccaggatatgacaaaaytattttcccccactcctttcaatgacactaatttgagtttttaactgttaacaatactttcagtagacattaatttgatgaagtgattttacattctattaattacataaaagtttcagttatattcttactccaacttttattgtaggctcattaaacacactgacgttaaagttgtagacgtcatacctgtcaaacagacacagaaatcagttttgtgaacgaattaatgattatttttcaaagttgaataagggtaaagggaaaatttgttagaaa

SEQ ID NO: 26094 - DNA, 600 bp, Chicken  19866894242015_2
gctctgcttaacaacaagaggcaaaacattgtctttcatttgcttttactttttcttagctagattttctttttactcaatcagctgggcaaaactagctttacaagctaggaaactgaaaggaaggcagaaatgtttttaggataacagatacataatactcccaacaaactgtttcattcttagttcaggaaaacactgcaatagctttaagtggccagaactgtaagatagcatataccatcatacatttgaaagtgatggaggtatttgaatatmaaaaccaggatatgacaaaaytattttcccccactcctttcaatgacactaatttgagtttttaactgttaacaatactttcagtagacattaatttgatgaagtgattttacattctattaattacataaaagtttcagttatattcttactccaacttttattgtaggctcattaaacacactgacgttaaagttgtagacgtcatacctgtcaaacagacacagaaatcagttttgtgaacgaattaatgattatttttcaaagttgaataagggtaaagggaaaatttgttagaaartgttataactacttacacac

SEQ ID NO: 26095 - DNA, 600 bp, Chicken  19866894242015_3
aaaccaggatatgacaaaaytattttcccccactcctttcaatgacactaatttgagtttttaactgttaacaatactttcagtagacattaatttgatgaagtgattttacattctattaattacataaaagtttcagttatattcttactccaacttttattgtaggctcattaaacacactgacgttaaagttgtagacgtcatacctgtcaaacagacacagaaatcagttttgtgaacgaattaatgattatttttcaaagttgaataagggtaaagggaaaatttgttagaaartgttataactacttacacactatgatcagcagttgtatcatgacaagtagtagttttcaattttctattctgaacactttcctagacataaattgcaagttactcatctatctaatttggactatgcatccatatatactgtcacctcaaaaacaaaaagcttttcagcatgaatttatggaaaaagaacctagaagtttctcagatttgcacttgattagcaataatagaatatgtcaaaactggaaaaaaagctagttaaagataaatcctttaagaacttactctataaggatgcta

SEQ ID NO: 26096 - DNA, 600 bp, Chicken  19866894242022_1
tgatttcagaagacagtcagactcccaagatctatttttctgagctataaattccaaaaaagttttcagggactccagtttagtgcatgcatttttttaaaaacaggtggtgtttgaattgaattaaaaaatgctagttattactcggaacttgaggacaccaacagatgagctcctacttcagatcaatgaaacagaatggtacagcgaaacaaaaaaggctgtttctcagaatgcaattgtatttttgctaaattctgattttccaaggcagagagatgggaaaaacaagcaaacaarcatagccctccttcccccccccaaaaaaaaccacaaggagatcagcagagaagcaataaatttgtttttccaactgtagaaaaccactagaaagtcagtcactatgatacagtgaccattgccatttttttctcaggtagtttcataacctgcattaggtagaactgaaaactatttctcttgttcattcccttcctataatgaaatcattgtgagatcctgtctgtataaccacaagatctcctcagatctcatttttctgtgatctgttaggaaaaattgggccaagtaagaagagac

SEQ ID NO: 26097 - DNA, 600 bp, Chicken  19866894242039_1
agggcactgcttgatgcagcacttctgttgcttattctctggctgcttgtgtgctaaggttgtgtttttacagaaacacagctaagggaagttgatgtagttgccatgccgtgatttaactggagagcgtggtgttcaggtggcggaagagggcgagcgggattgacatgggatacccaaaaggaaatacagttaacttccccttcattctgagaggcacttttttcccattctctcatcaggaagtttgtagaaacttcagtgctacactaaattgctcagatggtgacctgtgcctcycctcatctctggtttcactgccagcatcgtggtgctgagtgacattttatcttttgtcacaaatttgcaccagttgttttaccagacccatcctgtgcttcagctctyggactctcttgtgattgtcgtttgctcttaataaccataagctggttgctatgaaaattgtgttgatttagaagaattttctttattcttgtggtggaaagtacagataatgctttctcagatagggaggaaggtgcaatgtaaaaggaatagaatggaatgtagcagaagaaagctgcttaacagggttgg

SEQ ID NO: 26098 - DNA, 600 bp, Chicken  19866894242039_2
ccgtgatttaactggagagcgtggtgttcaggtggcggaagagggcgagcgggattgacatgggatacccaaaaggaaatacagttaacttccccttcattctgagaggcacttttttcccattctctcatcaggaagtttgtagaaacttcagtgctacactaaattgctcagatggtgacctgtgcctcycctcatctctggtttcactgccagcatcgtggtgctgagtgacattttatcttttgtcacaaatttgcaccagttgttttaccagacccatcctgtgcttcagctctyggactctcttgtgattgtcgtttgctcttaataaccataagctggttgctatgaaaattgtgttgatttagaagaattttctttattcttgtggtggaaagtacagataatgctttctcagatagggaggaaggtgcaatgtaaaaggaatagaatggaatgtagcagaagaaagctgcttaacagggttggcagagcttggtgtaaccaaagggaggagcagcacattcccttttttatatctcagtgaaggattcctgtgcatctactgagatgtgctgtagaaaagattgcattaag

SEQ ID NO: 26099 - DNA, 599 bp, Chicken  19866894242045_1
  misc_feature (1)..(112): n is any nucleotide
nnnnnnnnnnnnnnnnnnnnnnnnnnnnnnnnnnnnnnnnnnnnnnnnnnnnnnnnnnnnnnnnnnnnnnnnnnnnnnnnnnnnnnnnnnnnnnnnnnnnnnnnnnnnnnnntattaacagaagctatcctaaccctacaacagaagtcaacaaaaactaaacacgtgaaataaacagagaagcagcgagaaactatttcagtttttcaaaaagaagaaacattgaagaatccccttcagaaagaaaacactaagcctggtttagttacaaatcactcccttctaaacatcaacgtacawgcacaggaacactactcttgctgtagcaaccagaaactgacacccattaggcaaatgtacaatacagacctcatcagaaatttacctgtaaagaaactttcagattttctctaccctaacagaaaggctgctcaggactgatgcatctttttagcaaataccacaacctttttctttaaaaaacaaacaacacattccatacacttatctctgaataacactagcaaacaacaggatatcactttgataatttttacctcctcagactaggaaagtagtacaatcctaggaatctagga

SEQ ID NO: 26100 - DNA, 599 bp, Chicken  19866894242048_1
  misc_feature (1)..(20): n is any nucleotide
nnnnnnnnnnnnnnnnnnnnccccttttggtaaagaacccccccacctcaagccagctgtaagctgacagagcacaaaatgccactagctcccagcaatgcagctgggaatactgatgctctcactaggtgctctgctttgcaatcaagtaattccaaatgacagggctactgccaccaaaaacccaagcagatttgtgatcacacagtctatgcaaaagaaacacctatgttaacactctatatacagctatttatttacatatttatgtagaatgctgctcatttatgggacaattgyaacttgcttcgttgtactgaatgatgaaagtgtcatttgtacatacctgatttactttctttctctgtgggagctcccaactgattctacaatttatagtgactttcaggctcaccaaaaacctgraggctttccacttgccaaagaacacgaaaggaagagcagatgtaactgatatactyraggagaaaggtaagtacctgctactgaactacatcaaaatacagatgtctgatccttgctattctggagcaagttgactggtcatagaatagtgactactttgtcatctgaaaggg

SEQ ID NO: 26101 - DNA, 600 bp, Chicken  19866894242048_2
aggtgctctgctttgcaatcaagtaattccaaatgacagggctactgccaccaaaaacccaagcagatttgtgatcacacagtctatgcaaaagaaacacctatgttaacactctatatacagctatttatttacatatttatgtagaatgctgctcatttatgggacaattgyaacttgcttcgttgtactgaatgatgaaagtgtcatttgtacatacctgatttactttctttctctgtgggagctcccaactgattctacaatttatagtgactttcaggctcaccaaaaacctgraggctttccacttgccaaagaacacgaaaggaagagcagatgtaactgatatactyraggagaaaggtaagtacctgctactgaactacatcaaaatacagatgtctgatccttgctattctggagcaagttgactggtcatagaatagtgactactttgtcatctgaaagggtgtaaaaatacatatcttccccaacattattcttctcctaagctgctgaagataagaaatttttgctgaaataaacagtaatttatgttaccagctgttcagctgactcagttatccacacacaaga

SEQ ID NO: 26102 - DNA, 600 bp, Chicken  19866894242048_3
acccaagcagatttgtgatcacacagtctatgcaaaagaaacacctatgttaacactctatatacagctatttatttacatatttatgtagaatgctgctcatttatgggacaattgyaacttgcttcgttgtactgaatgatgaaagtgtcatttgtacatacctgatttactttctttctctgtgggagctcccaactgattctacaatttatagtgactttcaggctcaccaaaaacctgraggctttccacttgccaaagaacacgaaaggaagagcagatgtaactgatatactyraggagaaaggtaagtacctgctactgaactacatcaaaatacagatgtctgatccttgctattctggagcaagttgactggtcatagaatagtgactactttgtcatctgaaagggtgtaaaaatacatatcttccccaacattattcttctcctaagctgctgaagataagaaatttttgctgaaataaacagtaatttatgttaccagctgttcagctgactcagttatccacacacaagactaaattcaggtttaaagagaagaaacaaaaaaagaaccatgcattagaatccttt

SEQ ID NO: 26103 - DNA, 600 bp, Chicken  19866894242048_4
cccaagcagatttgtgatcacacagtctatgcaaaagaaacacctatgttaacactctatatacagctatttatttacatatttatgtagaatgctgctcatttatgggacaattgyaacttgcttcgttgtactgaatgatgaaagtgtcatttgtacatacctgatttactttctttctctgtgggagctcccaactgattctacaatttatagtgactttcaggctcaccaaaaacctgraggctttccacttgccaaagaacacgaaaggaagagcagatgtaactgatatactyraggagaaaggtaagtacctgctactgaactacatcaaaatacagatgtctgatccttgctattctggagcaagttgactggtcatagaatagtgactactttgtcatctgaaagggtgtaaaaatacatatcttccccaacattattcttctcctaagctgctgaagataagaaatttttgctgaaataaacagtaatttatgttaccagctgttcagctgactcagttatccacacacaagactaaattcaggtttaaagagaagaaacaaaaaaagaaccatgcattagaatcctttt

SEQ ID NO: 26104 - DNA, 600 bp, Chicken  19866894242060_1
tccattccttttgtaggtctgtgtctgcacaaatacatgagtatgccagtgactccattagcacagcaatctgatagcatttcattataaatctgatttttgacagatttataaccagactgtagaaattaactgctggaggaaatgtgccatttagtctcaacatgaacacattttatttttctacatgttttattttttcataccagacttttttagtgagtagaaaaataacattatgcttgttttaacgtacttcttttaaagtgaaaaaaaaacaacaacaacattttcataaamatttcaaaactgtctgacacaatcacatgtttattgcatagtcctctgacattttttgagaacaggtaccaattaaatgacagtcagtgtatcagcacattaacatatagcttcagtgaagaaatagaagatgaataaaataaggttatcaggtaaattaaaaaaaaaaagtgccagataaaccagtgctgttgatagatggtaggcagccctccctactgcaacaaatatactgctgtttatttttataagactgagctgatagcagatcttaagggcagcacccaatgattctacagt

SEQ ID NO: 26105 - DNA, 599 bp, Chicken  19866894242066_1
  misc_feature (1)..(74): n is any nucleotide
nnnnnnnnnnnnnnnnnnnnnnnnnnnnnnnnnnnnnnnnnnnnnnnnnnnnnnnnnnnnnnnnnnnnnnnnnncacctgagctcccctaggcgggccctgccttcctaccaggagctcaatcactgtttcaagccatgacttagcatttgcactacagcacttaaaagaaccagagctgttgcaggtttgggaagcctcttgtggctgctcgtgacttccgtggtatcatctagcaaacacaccaccaggtagcagtgacaaatcctcacttgctgcagcctgggatctagttgctctrctgycattgtttcctttttcattgcattacagattgcattatgtcatgatgccactgcatgagactacaataaatcaggggagtatggttcatttggggtcacatcattgctgatatgattaggtatgacagaatgatcgacctttttagacatactggaattagcaagctcagttctgcctcaagtcagtgcagccctggatgtatccatatgggataactgcaatttctctcattgtcctagtgcttctgtctatttgttttatattatacrcaaaaaaataaaaaacaccctatcg

SEQ ID NO: 26106 - DNA, 599 bp, Chicken  19866894242066_2
  misc_feature (1)..(70): n is any nucleotide
nnnnnnnnnnnnnnnnnnnnnnnnnnnnnnnnnnnnnnnnnnnnnnnnnnnnnnnnnnnnnnnnnnnnnncacctgagctcccctaggcgggccctgccttcctaccaggagctcaatcactgtttcaagccatgacttagcatttgcactacagcacttaaaagaaccagagctgttgcaggtttgggaagcctcttgtggctgctcgtgacttccgtggtatcatctagcaaacacaccaccaggtagcagtgacaaatcctcacttgctgcagcctgggatctagttgctctrctgycattgtttcctttttcattgcattacagattgcattatgtcatgatgccactgcatgagactacaataaatcaggggagtatggttcatttggggtcacatcattgctgatatgattaggtatgacagaatgatcgacctttttagacatactggaattagcaagctcagttctgcctcaagtcagtgcagccctggatgtatccatatgggataactgcaatttctctcattgtcctagtgcttctgtctatttgttttatattatacrcaaaaaaataaaaaacaccctatcgtact

SEQ ID NO: 26107 - DNA, 564 bp, Chicken  19866894242066_3
ctgcagcctgggatctagttgctctrctgycattgtttcctttttcattgcattacagattgcattatgtcatgatgccactgcatgagactacaataaatcaggggagtatggttcatttggggtcacatcattgctgatatgattaggtatgacagaatgatcgacctttttagacatactggaattagcaagctcagttctgcctcaagtcagtgcagccctggatgtatccatatgggataactgcaatttctctcattgtcctagtgcttctgtctatttgttttatattatacrcaaaaaaataaaaaacaccctatcgtactrtctratagcttgatgaaccccccctgcaattagttttgccatcaaggttgtcacacaaaactgcaacatactaatacttctatttattacatcattaattctttataacaaaaggtgagcacaaatatgtctgaataataattcacttaaactatatatataatatctcacaagattcgtttttgtttgttttcttttgattagtagaagcatcctcatgaaataaattgcata

SEQ ID NO: 26108 - DNA, 534 bp, Chicken  19866894242066_4
cattgtttcctttttcattgcattacagattgcattatgtcatgatgccactgcatgagactacaataaatcaggggagtatggttcatttggggtcacatcattgctgatatgattaggtatgacagaatgatcgacctttttagacatactggaattagcaagctcagttctgcctcaagtcagtgcagccctggatgtatccatatgggataactgcaatttctctcattgtcctagtgcttctgtctatttgttttatattatacrcaaaaaaataaaaaacaccctatcgtactrtctratagcttgatgaaccccccctgcaattagttttgccatcaaggttgtcacacaaaactgcaacatactaatacttctatttattacatcattaattctttataacaaaaggtgagcacaaatatgtctgaataataattcacttaaactatatatataatatctcacaagattcgtttttgtttgttttcttttgattagtagaagcatcctcatgaaataaattgcata

SEQ ID NO: 26109 - DNA, 530 bp, Chicken  19866894242066_5
gtttcctttttcattgcattacagattgcattatgtcatgatgccactgcatgagactacaataaatcaggggagtatggttcatttggggtcacatcattgctgatatgattaggtatgacagaatgatcgacctttttagacatactggaattagcaagctcagttctgcctcaagtcagtgcagccctggatgtatccatatgggataactgcaatttctctcattgtcctagtgcttctgtctatttgttttatattatacrcaaaaaaataaaaaacaccctatcgtactrtctratagcttgatgaaccccccctgcaattagttttgccatcaaggttgtcacacaaaactgcaacatactaatacttctatttattacatcattaattctttataacaaaaggtgagcacaaatatgtctgaataataattcacttaaactatatatataatatctcacaagattcgtttttgtttgttttcttttgattagtagaagcatcctcatgaaataaattgcata

SEQ ID NO: 26110 - DNA, 600 bp, Chicken  19866894242069_1
tagggaaatctctgtgggtctgtgggcactgtgcccagagcagccctgcagcagctgctgggtgcacagagtgctggagggcatggaaagggcacacggatgcactgccccagggcaggtggtgctgcatgaagaattaacaaagggctggaaggttctggtaggatccaattgcgagggctggaaggttctagtagggcccaggtgtgaggagtgctcattaggcccaggtgctggcactcagctaacgaggctccaggcagctcctcactgctgaagagctttggagtggggcagtgytgttgtgctgcagrgatgaggctggarctcragatctgtgtgatggagtcacagtggagagtaagtactgtgtgatttcttctttatggaggtttttgagacattgagttatttcagagcaccttcactgtggagtttgcttgcaagcaaccagagtagagcttgattcctcttcacccggagctcctcttgctgcttcaagagcagctctgattttcctgagttggtggagagctttgctgaggagtctgtgttttgcagggctgcttgatgcattttgcaataagaaactggggtctt

SEQ ID NO: 26111 - DNA, 600 bp, Chicken  19866894242069_2
tgggtctgtgggcactgtgcccagagcagccctgcagcagctgctgggtgcacagagtgctggagggcatggaaagggcacacggatgcactgccccagggcaggtggtgctgcatgaagaattaacaaagggctggaaggttctggtaggatccaattgcgagggctggaaggttctagtagggcccaggtgtgaggagtgctcattaggcccaggtgctggcactcagctaacgaggctccaggcagctcctcactgctgaagagctttggagtggggcagtgytgttgtgctgcagrgatgaggctggarctcragatctgtgtgatggagtcacagtggagagtaagtactgtgtgatttcttctttatggaggtttttgagacattgagttatttcagagcaccttcactgtggagtttgcttgcaagcaaccagagtagagcttgattcctcttcacccggagctcctcttgctgcttcaagagcagctctgattttcctgagttggtggagagctttgctgaggagtctgtgttttgcagggctgcttgatgcattttgcaataagaaactggggtcttgctgggttctgctg

SEQ ID NO: 26112 - DNA, 600 bp, Chicken  19866894242069_3
actgtgcccagagcagccctgcagcagctgctgggtgcacagagtgctggagggcatggaaagggcacacggatgcactgccccagggcaggtggtgctgcatgaagaattaacaaagggctggaaggttctggtaggatccaattgcgagggctggaaggttctagtagggcccaggtgtgaggagtgctcattaggcccaggtgctggcactcagctaacgaggctccaggcagctcctcactgctgaagagctttggagtggggcagtgytgttgtgctgcagrgatgaggctggarctcragatctgtgtgatggagtcacagtggagagtaagtactgtgtgatttcttctttatggaggtttttgagacattgagttatttcagagcaccttcactgtggagtttgcttgcaagcaaccagagtagagcttgattcctcttcacccggagctcctcttgctgcttcaagagcagctctgattttcctgagttggtggagagctttgctgaggagtctgtgttttgcagggctgcttgatgcattttgcaataagaaactggggtcttgctgggttctgctggagctgctttggt

SEQ ID NO: 26113 - DNA, 600 bp, Chicken  19866894242069_4
tgcccagagcagccctgcagcagctgctgggtgcacagagtgctggagggcatggaaagggcacacggatgcactgccccagggcaggtggtgctgcatgaagaattaacaaagggctggaaggttctggtaggatccaattgcgagggctggaaggttctagtagggcccaggtgtgaggagtgctcattaggcccaggtgctggcactcagctaacgaggctccaggcagctcctcactgctgaagagctttggagtggggcagtgytgttgtgctgcagrgatgaggctggarctcragatctgtgtgatggagtcacagtggagagtaagtactgtgtgatttcttctttatggaggtttttgagacattgagttatttcagagcaccttcactgtggagtttgcttgcaagcaaccagagtagagcttgattcctcttcacccggagctcctcttgctgcttcaagagcagctctgattttcctgagttggtggagagctttgctgaggagtctgtgttttgcagggctgcttgatgcattttgcaataagaaactggggtcttgctgggttctgctggagctgctttggttggt

SEQ ID NO: 26114 - DNA, 600 bp, Chicken  19866894242069_5
ggagtcacagtggagagtaagtactgtgtgatttcttctttatggaggtttttgagacattgagttatttcagagcaccttcactgtggagtttgcttgcaagcaaccagagtagagcttgattcctcttcacccggagctcctcttgctgcttcaagagcagctctgattttcctgagttggtggagagctttgctgaggagtctgtgttttgcagggctgcttgatgcattttgcaataagaaactggggtcttgctgggttctgctggagctgctttggttggtgctgggttggggwgtttcaggctctgtggtcactgtgattcagccccacaggagcaggtctgagtgctgtagratgtgtgttgggagcagggagggcagcaggctgatggatggggactgtgtagctcccccagtatctcccatgtgcaggtggatgatggatggggtgagtgggagctgacaccccttgttgcttctctttcttccttcctacagcttcctacttgtggccctgcctttggttttctaggctaggacatttgcaacttgtgagctgttgtagagaagtaattacactctccatcactttccc

SEQ ID NO: 26115 - DNA, 600 bp, Chicken  19866894242069_6
tgagttatttcagagcaccttcactgtggagtttgcttgcaagcaaccagagtagagcttgattcctcttcacccggagctcctcttgctgcttcaagagcagctctgattttcctgagttggtggagagctttgctgaggagtctgtgttttgcagggctgcttgatgcattttgcaataagaaactggggtcttgctgggttctgctggagctgctttggttggtgctgggttggggwgtttcaggctctgtggtcactgtgattcagccccacaggagcaggtctgagtgctgtagratgtgtgttgggagcagggagggcagcaggctgatggatggggactgtgtagctcccccagtatctcccatgtgcaggtggatgatggatggggtgagtgggagctgacaccccttgttgcttctctttcttccttcctacagcttcctacttgtggccctgcctttggttttctaggctaggacatttgcaacttgtgagctgttgtagagaagtaattacactctccatcactttcccatcaagaaataaatggaagaaaatcacaccccaagtaccagcactgaccttcatttcaga

SEQ ID NO: 26116 - DNA, 600 bp, Chicken  19866894242075_1
aaaaaataacaaaataaaatcttaatgaggactcttgctctggacaggacagtactggctgatttagtaacccctcaatgacctccttccttctgctgtgctgcttaatggtgatatggtttattttagtggtcatttggaagaacacaattatctttccttcttctcttgttttccttctttctttccttccttcctaaaattcctttctcttgttaaatgaaatagcataaaatctgtgtaaatcccattgctaatgatatgctgagttgcctcaaagaatctccagtaagagacaawttttttccttccttattccttcagctgcatgttttgaatgcagttatgcagcttatataaccacacttgataatttgtttatatataattgctatgttatcatagaccaccctgctatctcagcacaagttaattctaataaaaccaataaatttcatgtaatacagtaaaataaaaaataacttaccaatttcttacctgtatgaagctcacctgttctacttcaggtataagtcaaggtatacaggtataactcaaatgaaatataacttttaactgattaaggatttcacaacctta

SEQ ID NO: 26117 - DNA, 600 bp, Chicken  19866894242077_1
tccactgcagcacaagggcaagacttcagttctggctgcctgcaaggttgtttcagctctaacacagctgtcccagagcgtctccacattcacatcggtgactccgaagggccacgaatttcctgagggtcagcagctggaggattagttgaactatttagcctgcctgtatgttttgtagagtgaaacacagctaagttttcctggggctttatccacagcagaatgtaaactgtgtattctacagcttctctttctttacgtttcttttttctctctctccctctctctctctctctyttttttatactgtgacatgcagtaggtggaacaaaaatattaggcacaataagcttcccctttcataagacaaggtcttacaaatcctttgagtttcctgctgaattttctttctctgtatgcccttccctgcatttctgcctggttttttgtcacctgttactcttggaataattagcagtctggaaggtggatccagtttaaaccagcacaccagttgtgggtgcatgaaaacaaagggaaaatcagtttcttgaaagtgttatcaaaaactaccagcaaattatagcatacaattaa

SEQ ID NO: 26118 - DNA, 600 bp, Chicken  19866894242079_1
tctcttcttggcaccagatccgtcctctaccttggggagatcaggaacatgcctgatgctttctatgagaaagatggcacaaagtgaggagagagtttattcattgggaagtgctgactgtgctatcaatcaactctcatacaagctttgagttattaataaaaagcctggtaatctaacacctgctctcaatcttcctttctaagggcataaaaagccacaagatcagcctcagcagttttgtgcatctccagaacttgttaaatctctctcacttcctttaacccacttcctgaaatsttaagcatcgatgctttatgctctggtttgtaaatgaagcctgttattatcattgagatagtgtttttatggcataaataatgagctgaaacaggagaagaggtgtcgtgtggaattactgcctgaactgagatggaaataatcaatatgtcctcacttacaaatctcatctgcatgtcgactccatctccctggctgtctcgctaccaattcattgcagaggaggcctaataaaacatgcttgtgtcattgatctgttttattcatagctgaagatagaaatgcatcattcaaaattaa

SEQ ID NO: 26119 - DNA, 386 bp, Chicken  19866894242079_2
atgagctgaaacaggagaagaggtgtcgtgtggaattactgcctgaactgagatggaaataatcaatatgtcctcacttacaaatctcatctgcatgtcgactccatctccctggctgtctcgctaccaattcattgcagaggaggcctaataaaacatgcttgtgtcattgatctgttttattcatagctgaagatagaaatgcatcattcaaaattaatggaagggcttctacttactgcccattccagcctgaagtagcctgcaaaagtgtgggtgggagaaagaggtgagattccrgcaagcagcagtgtgctcagatctgtcacaagatgaatggtcttcaaggttaacctctggtgtccggaacttgtgttgtgttaccg

SEQ ID NO: 26120 - DNA, 599 bp, Chicken  19866894242084_1
  misc_feature (1)..(100): n is any nucleotide
nnnnnnnnnnnnnnnnnnnnnnnnnnnnnnnnnnnnnnnnnnnnnnnnnnnnnnnnnnnnnnnnnnnnnnnnnnnnnnnnnnnnnnnnnnnnnnnnnnnngcaagagtttcagcgatgctccttcaacaggattctgtgttttaatttatgtaatgcatgtccagtgtgatctggaatgcaatatccaaaagacctgagtttatacatgatctagcaaggatggtctcccactgaagcagtcaggaggaggaggccacacacattaataggccatctaaatttggatgagatataaccgygtctcctgagacagtattatctctgtgcagtttctatggttgctagttagggtcattctactcctcctcacaaagtctgcctatgtgaaaaataattttctttttttttttaatgagatattagtgacacattcataaaagtattcgacatgaggactgacactgctcaagccatgggactaaattaactggatgcatccraactgtgagaattcataaartgatgaagaaatgctgttcattccccttcctggggatatacttctgtatcggggtgagtccatgccctacagcaagcc

SEQ ID NO: 26121 - DNA, 600 bp, Chicken  19866894242084_2
tatacatgatctagcaaggatggtctcccactgaagcagtcaggaggaggaggccacacacattaataggccatctaaatttggatgagatataaccgygtctcctgagacagtattatctctgtgcagtttctatggttgctagttagggtcattctactcctcctcacaaagtctgcctatgtgaaaaataattttctttttttttttaatgagatattagtgacacattcataaaagtattcgacatgaggactgacactgctcaagccatgggactaaattaactggatgcatccraactgtgagaattcataaartgatgaagaaatgctgttcattccccttcctggggatatacttctgtatcggggtgagtccatgccctacagcaagccaaagccccactcctctaaatgaggagattgactgccaacctcaacagcagacagcrttgaccactgttctgtttgtccctactgctgcatcctctctgctggggcatataggttaagaaaagaggttttgttactgtaactcaaagtaatttataagaaatgtcgatgaatacaggtctgggcttgtaggaatacagctggc

SEQ ID NO: 26122 - DNA, 600 bp, Chicken  19866894242084_3
tggtctcccactgaagcagtcaggaggaggaggccacacacattaataggccatctaaatttggatgagatataaccgygtctcctgagacagtattatctctgtgcagtttctatggttgctagttagggtcattctactcctcctcacaaagtctgcctatgtgaaaaataattttctttttttttttaatgagatattagtgacacattcataaaagtattcgacatgaggactgacactgctcaagccatgggactaaattaactggatgcatccraactgtgagaattcataaartgatgaagaaatgctgttcattccccttcctggggatatacttctgtatcggggtgagtccatgccctacagcaagccaaagccccactcctctaaatgaggagattgactgccaacctcaacagcagacagcrttgaccactgttctgtttgtccctactgctgcatcctctctgctggggcatataggttaagaaaagaggttttgttactgtaactcaaagtaatttataagaaatgtcgatgaatacaggtctgggcttgtaggaatacagctggcctaaaatcacgtagagtgta

SEQ ID NO: 26123 - DNA, 600 bp, Chicken  19866894242084_4
ttctactcctcctcacaaagtctgcctatgtgaaaaataattttctttttttttttaatgagatattagtgacacattcataaaagtattcgacatgaggactgacactgctcaagccatgggactaaattaactggatgcatccraactgtgagaattcataaartgatgaagaaatgctgttcattccccttcctggggatatacttctgtatcggggtgagtccatgccctacagcaagccaaagccccactcctctaaatgaggagattgactgccaacctcaacagcagacagcrttgaccactgttctgtttgtccctactgctgcatcctctctgctggggcatataggttaagaaaagaggttttgttactgtaactcaaagtaatttataagaaatgtcgatgaatacaggtctgggcttgtaggaatacagctggcctaaaatcacgtagagtgtacagaactccttactgaggctgcgttcacatgaggctcttttgttgaagaatcattttacaaaatgtactctgtgtaggaagttgttttttacccagatgtatatcatattgtctagcagtaggggacaccggac

SEQ ID NO: 26124 - DNA, 600 bp, Chicken  19866894242093_1
gagccattcctgtagggagtacaccaactggagtcttctccagccattagtgttcctaaagcatctaatataggcaggctgacaaaaggagctggagaaaaaaaccaaaacattttcctagctaattgaagtggaggtgaaggaaagaggtgcaaatccaagttgaaagagcagcctttgtctctgatagtcagctgggaaaaataatttactggagcattcaagaatatgaaacacaagcaaataaatgatgctgacagtctgatcaaagggttgctgtatgagagaaagcctctgtcrgtgctggctaggcctctgtgtgcttaggaaccttgcctaataaatctgatgaacggccgcatgtgatgtaggaggaactcactgaattttgctcttgggatctgttcgtgtcataaagtgctttcagactccatagtccattaaaatcacgtttatcaaaggatacagaagagagttacagggtgattttatctccagctcctgattcacatgagagtgaaggatctgaatgcatgagtgatggaagagctgatacgtcacttggatctgacctacacaggggcagttactggcaagatt

SEQ ID NO: 26125 - DNA, 428 bp, Chicken  19866894242103_1
tcagcttttaacatctggctcatgccagcagaagcaggagcaggaacaattggtcagcagctaggagatgagccccatagcttccagcacagaagccaaatgatttgtgaagggttttttaaaagtgctagagcagtgcatgcttcattacagaaatttgcaagaatgcgtttttcacactaaacagaaacttgataattctgcagtatttcaaggtattacaatttgttttgcttttcctgagctctttcataagccattgtggtattggtgataatgtttttcttgaaagtgatatawttctttttcatttcaaaggtattgcacttgctgaagtcttttcaaagttcttctctcctacgcttctgagaattattcgtttggcacgaattggccgcattctgagattagttaaaagagctaaagga

SEQ ID NO: 26126 - DNA, 599 bp, Chicken  19866894242114_1
  misc_feature (1)..(15): n is any nucleotide
nnnnnnnnnnnnnnntgtgtgatttatatgtttaaaattgcttttcaagtgtgtatattttgcattcacttgctgtgtctctgaagagcatggtgcttcatgcataacaggatgggtaggcaatgcagcacttgtactggcagcatactacaaattgttcagagtgtctagcatggttactactgttgattttgggtaagtgccatgtgtttcaaacatgaaaaaatagcatatgttgcaggaggaaactttgaaattcttggaactctgattgtttttgtggtatgtaacttggatttsttttggtttctgtgtagatattgcatctgcatttgtggctcctgtggaccttcaagcttacccaatgtattgcactgttgtggcatatcccacagacctgagtaccattaaacaaagactggaaagcagattttacaggttagatccaagtctcagttactgttgtgaaatactgccaactgtggttttggtagctgttagtcttgttatgccctacttggaaatttgcacaggtgtgcttttctatttgcctaatcttctaaactaaagagattgaacatctcttgaccaaaatgcat

SEQ ID NO: 26127 - DNA, 600 bp, Chicken  19866894242115_1
gatttctttctggttagatgtggaaagaatttctggctgttcacgacatgaattcccttacttttcacccctccacataaaacactttacagattattgcgtttgctttgacctcttgctgcttaaaacgtacaggatgaaactttctttttttttctgtttcaggtttgatgtttgcagaagaaaatgtctctgttggtactgactggacagtatccttaactttcaaaatctctcctaaactgttatcctaaaagcagtttaaatgtctaccaaaaacaggtctgactgaggcatagrcagatgttcacctgtgaagcagcagcagtgttgacagaccttccaygtctacctttkttttattgattcctttactaagacataactgctcaagcagttgtctcatcrctggatttttcaagttttgrtgtgtttgtttttcctttactttcagttatcttaaagcagtamtggaggtgatttatattaagcaaaagttcagaaaactgtcatatttggaaattatctgtttactcagcctaagctgaatccagtgactttataaacaattacagatgttttacagatgaatatctcatt

SEQ ID NO: 26128 - DNA, 600 bp, Chicken  19866894242115_2
catgaattcccttacttttcacccctccacataaaacactttacagattattgcgtttgctttgacctcttgctgcttaaaacgtacaggatgaaactttctttttttttctgtttcaggtttgatgtttgcagaagaaaatgtctctgttggtactgactggacagtatccttaactttcaaaatctctcctaaactgttatcctaaaagcagtttaaatgtctaccaaaaacaggtctgactgaggcatagrcagatgttcacctgtgaagcagcagcagtgttgacagaccttccaygtctacctttkttttattgattcctttactaagacataactgctcaagcagttgtctcatcrctggatttttcaagttttgrtgtgtttgtttttcctttactttcagttatcttaaagcagtamtggaggtgatttatattaagcaaaagttcagaaaactgtcatatttggaaattatctgtttactcagcctaagctgaatccagtgactttataaacaattacagatgttttacagatgaatatctcattaggttatgagttaatctctcaaatataaacttgtgtgctttttcca

SEQ ID NO: 26129 - DNA, 600 bp, Chicken  19866894242115_3
ttacttttcacccctccacataaaacactttacagattattgcgtttgctttgacctcttgctgcttaaaacgtacaggatgaaactttctttttttttctgtttcaggtttgatgtttgcagaagaaaatgtctctgttggtactgactggacagtatccttaactttcaaaatctctcctaaactgttatcctaaaagcagtttaaatgtctaccaaaaacaggtctgactgaggcatagrcagatgttcacctgtgaagcagcagcagtgttgacagaccttccaygtctacctttkttttattgattcctttactaagacataactgctcaagcagttgtctcatcrctggatttttcaagttttgrtgtgtttgtttttcctttactttcagttatcttaaagcagtamtggaggtgatttatattaagcaaaagttcagaaaactgtcatatttggaaattatctgtttactcagcctaagctgaatccagtgactttataaacaattacagatgttttacagatgaatatctcattaggttatgagttaatctctcaaatataaacttgtgtgctttttccagggctccttgg

SEQ ID NO: 26130 - DNA, 600 bp, Chicken  19866894242115_4
tgacctcttgctgcttaaaacgtacaggatgaaactttctttttttttctgtttcaggtttgatgtttgcagaagaaaatgtctctgttggtactgactggacagtatccttaactttcaaaatctctcctaaactgttatcctaaaagcagtttaaatgtctaccaaaaacaggtctgactgaggcatagrcagatgttcacctgtgaagcagcagcagtgttgacagaccttccaygtctacctttkttttattgattcctttactaagacataactgctcaagcagttgtctcatcrctggatttttcaagttttgrtgtgtttgtttttcctttactttcagttatcttaaagcagtamtggaggtgatttatattaagcaaaagttcagaaaactgtcatatttggaaattatctgtttactcagcctaagctgaatccagtgactttataaacaattacagatgttttacagatgaatatctcattaggttatgagttaatctctcaaatataaacttgtgtgctttttccagggctccttgggagcctctttcaaactgtctccctggatgaatcctgacattcaggaagtat

SEQ ID NO: 26131 - DNA, 600 bp, Chicken  19866894242115_5
cgtacaggatgaaactttctttttttttctgtttcaggtttgatgtttgcagaagaaaatgtctctgttggtactgactggacagtatccttaactttcaaaatctctcctaaactgttatcctaaaagcagtttaaatgtctaccaaaaacaggtctgactgaggcatagrcagatgttcacctgtgaagcagcagcagtgttgacagaccttccaygtctacctttkttttattgattcctttactaagacataactgctcaagcagttgtctcatcrctggatttttcaagttttgrtgtgtttgtttttcctttactttcagttatcttaaagcagtamtggaggtgatttatattaagcaaaagttcagaaaactgtcatatttggaaattatctgtttactcagcctaagctgaatccagtgactttataaacaattacagatgttttacagatgaatatctcattaggttatgagttaatctctcaaatataaacttgtgtgctttttccagggctccttgggagcctctttcaaactgtctccctggatgaatcctgacattcaggaagtatgagctacaagtcctagcagt

SEQ ID NO: 26132 - DNA, 600 bp, Chicken  19866894242115_6
tgtttgcagaagaaaatgtctctgttggtactgactggacagtatccttaactttcaaaatctctcctaaactgttatcctaaaagcagtttaaatgtctaccaaaaacaggtctgactgaggcatagrcagatgttcacctgtgaagcagcagcagtgttgacagaccttccaygtctacctttkttttattgattcctttactaagacataactgctcaagcagttgtctcatcrctggatttttcaagttttgrtgtgtttgtttttcctttactttcagttatcttaaagcagtamtggaggtgatttatattaagcaaaagttcagaaaactgtcatatttggaaattatctgtttactcagcctaagctgaatccagtgactttataaacaattacagatgttttacagatgaatatctcattaggttatgagttaatctctcaaatataaacttgtgtgctttttccagggctccttgggagcctctttcaaactgtctccctggatgaatcctgacattcaggaagtatgagctacaagtcctagcagtgtaagtgattatgggcctgacattaagtacttaggcagaagtg

SEQ ID NO: 26133 - DNA, 522 bp, Chicken  19866894242116_1
agaagtggataggaaggacacaagtactcttttttttttttttttaaggacaaactatagctttaacaaaaccaaaatggaaccaaaaattaaggctggtaacagtgatgtcacaggctggtagaaaccttgtttgaacagattggctaatcagccttgagtagcagcaggttttatttattctccttttcaattgtcagtgttgactagattgtgagaaagattacaactaatccttacaccttcgctgaggagcaagaactttcaaaaggatggcagtatgttccataacagcactgytttgttacttatctctggattaagaccatacctgtgtaacatactgagctggaaggactgcatagccaacatttcccgtgccaggtgctggtgccagtacagtgcctgggggcaggttagtgaggttgggctgtatttgtggcagtggagtggctggcataattagtctttgttggggttgacttgttgtaactatctgggaagttgggttgaggggtttgg

SEQ ID NO: 26134 - DNA, 600 bp, Chicken  19866894242117_1
atatgtcagcttagtccaaagattatagatgcagctgcatctggcacagccccctgcatgtgggacagctgaactaacaccactgccagctacaggagcccatgcccagaactaaaaaacaaaagaaaaagtcccactccaggacccaacacatagaatactgtcttagtctcaagcttgcatctccatctctacaaaatgacgataagatgacctaggtgtatacgctgcaagagtagcagtggtgggttcagcattgaatgtgaataagaataaaataacacaatcagctttaaaggrtttagtgacatacaaaatccacgagcaaggtgctttctggatgtcctaggaacatgccactgaatgatagagcatggagggtgctgttcttgctattgtcttcccaacctgcaatatattggatcagcaggaatgtgtgcccagtgtcaagagatgcgcagtacctgactaattatagatagctctatgaaatgtcacaggggctacacaaggatccaactgataaaagcagaggtagattctgaaatcggctacagaaggaacagccaaaagagtcccagcaaagcaacattaacaagt

SEQ ID NO: 26135 - DNA, 599 bp, Chicken  19866894242118_1
  misc_feature (1)..(47): n is any nucleotide
nnnnnnnnnnnnnnnnnnnnnnnnnnnnnnnnnnnnnnnnnnnnnnngctctaaataatttctaaaaggaaaatgacagtaagcatgatggctgactatgtctactcaggaccaccctcctctataacatagtgcttactgtggaaataggcacaagtgtaacaacattcaagtggaaatacctggagcttcatcaaaaccctgagaaggagatgaaaacctctaatctcattagacaactatttcctccatttctgaagttattacgaatatcactgaggtgactatgagatgtatagrttttctttctgaaacttctgtatttcaaaccacatatagcagaatctaatgaaaaggcagaagatacgtctgaaaacaagtaagcaggcagaataagtgttttctgatgaaagatgggactaaaagtcactaatgattactgaggaatctatcacctccacctgctctaaaagctgctcaagatctgtgtcttgctgtgagtagatatcctatatttccttgatgctggaggtatggttagcaatctgcatatatttagcttgcacatcaggctctctatagctttcaccggagagtaa

SEQ ID NO: 26136 - DNA, 600 bp, Chicken  19866894242118_2
ttctccagaagagatcctttaaaatataacaggcctatttgtcttctcttgtgtgtgtttaggttctttaattttcccagacagttttactaagtgacaaatatacttaagtttaaacaagtaatttcccctggctggtattccttttctctcatctacttgaacctgcaatgaatttaaaatgctgaatctgtgcctggattttcaatgtcaaacacaagattatgttttctgaggcacagcagaaggagaacttgaaggataaagctagtattcaaggaaacatctgcattctaatcmgggtgaagcaaaataaaacaagttgcttttttggggtttatatgctctaacatgtagttagaactttcctcatgaggatcaccagagttaattgtagagagataccatatacacaactgaatacactgctgtgacaaaaatgaagagattaacttgcaccattttagccctttgatggtatctgctttgtggaaatgtagatcatcttacccctaaatgctactttgcactacactaaaggaacaaaatgttaacatctggtgttagtaccataaaaaatacgtttgttgtaaccactct

SEQ ID NO: 26137 - DNA, 600 bp, Chicken  19866894242120_1
aaacagaaagttactgaattaggtttccatgtagacattgagctaaaggcattatgacgacaacattgcattcatcagctgtcttaaatgtttgcagctgatgttgtgtgttttcaacaattaatgttatattgcatttgaaagatggagtagagagattcaggaacagagagcatgagatccacaggaacacctagccacagaagctacagaaaaagaagctaaaactgaagtcaggacaaatgtgattatggcaatgcagtcttaactggtggcagtggctggaagcagctgtgggaygtgctgggaagctgagattgctacctgcccagagtgtgggaacagcaggggtgtatttgcataatgatgcaagctaatgttaggagctactgggctcccagacrggatgttaccaagagctcctttgctgtggggggaagacttgaatcttggattaaaataaaaaataaaaattggaggtgggaaagaratgagtgcttgcttgcccatgcacaagctctttggaagagcagctcatagtaaatttgtgctttggatgaatgtgccaagtcctcttttccaatcatataccttctgtga

SEQ ID NO: 26138 - DNA, 583 bp, Chicken  19866894242120_2
tgtgtgttttcaacaattaatgttatattgcatttgaaagatggagtagagagattcaggaacagagagcatgagatccacaggaacacctagccacagaagctacagaaaaagaagctaaaactgaagtcaggacaaatgtgattatggcaatgcagtcttaactggtggcagtggctggaagcagctgtgggaygtgctgggaagctgagattgctacctgcccagagtgtgggaacagcaggggtgtatttgcataatgatgcaagctaatgttaggagctactgggctcccagacrggatgttaccaagagctcctttgctgtggggggaagacttgaatcttggattaaaataaaaaataaaaattggaggtgggaaagaratgagtgcttgcttgcccatgcacaagctctttggaagagcagctcatagtaaatttgtgctttggatgaatgtgccaagtcctcttttccaatcatataccttctgtgaaagacctgcatggcatggtgagaaaatagttatattttaatttccaaggttgacagaaaaaaaaaaatgggactgtgtatggtgttt

SEQ ID NO: 26139 - DNA, 497 bp, Chicken  19866894242120_3
cacctagccacagaagctacagaaaaagaagctaaaactgaagtcaggacaaatgtgattatggcaatgcagtcttaactggtggcagtggctggaagcagctgtgggaygtgctgggaagctgagattgctacctgcccagagtgtgggaacagcaggggtgtatttgcataatgatgcaagctaatgttaggagctactgggctcccagacrggatgttaccaagagctcctttgctgtggggggaagacttgaatcttggattaaaataaaaaataaaaattggaggtgggaaagaratgagtgcttgcttgcccatgcacaagctctttggaagagcagctcatagtaaatttgtgctttggatgaatgtgccaagtcctcttttccaatcatataccttctgtgaaagacctgcatggcatggtgagaaaatagttatattttaatttccaaggttgacagaaaaaaaaaaatgggactgtgtatggtgttt

SEQ ID NO: 26140 - DNA, 600 bp, Chicken  19866894242130_1
tgctgttctactcatcaaggacagatggaataacagcccaagagccactgccttgggttgtgggacaacacatggggaggatgcggtgacggcggcacaacttggacaccagctagctacaaggcctgtactcattctccacagcttttctcaggcattggatattcacattaaaccagtaacacccccaaaccatttaaaccattttcctgggcactaaggagaccgtggccgagccttctgctttcagttccagaccagagcaaacatacagcatcagtgtcatggagcaagagcccrttgtcccagccatgctgccctaaccacagggatcctcttcaaccacaacaaataatttatcttggaaaacagggaaatgtagatgccttcagcttataccgctgtcctaatgtgcaacgagttagcacaatctgaatcaggctttaagagcatccaacctatatgcactgaaatcaagagcacagcaaccattgacctcaatcagcagaggagcagatcttgtctggggacaactgctcttcagaacaggcacaagggaatgagcatccgggagatgtcagtgccacttcccaagatcaa

SEQ ID NO: 26141 - DNA, 600 bp, Chicken  19866894242133_1
gattgatgtccctacgaggagcctgccctagttaccgggcctgatgctggggatgagcaccagggagggatgccatgctgttgctctcatccccaggaagcagcctgctcttgccactctctgacacccaggtgtaggactctgttggatgtcccagctggtacctccagcctgcctaggtcccttgggatggcagccctgtccctgaacatgccaactggtcccagtgtttggtgtcatctacagactcactgacagagcatgccatcatcccatccccatccccagccaggcccctgytggattgytcgttaccagcccccagscagagatgacccatcaaccacagtctcgtagcccaaacaagcatctggacaaatttttaaccatccagaccgtaacatcctagcttggatacaagaccattatgttggccagtaaagtctttgctaagctgaggacctcgagttgcaccagggaaggttcaggttggatatgaggaaaaatttctcctcagaaagagtggtgaggcagtggcacaggctgcccagggaggtggtggagtcgaggtgttcaagaaatgtggagatgaggcagagg

SEQ ID NO: 26142 - DNA, 600 bp, Chicken  19866894242133_2
tccctacgaggagcctgccctagttaccgggcctgatgctggggatgagcaccagggagggatgccatgctgttgctctcatccccaggaagcagcctgctcttgccactctctgacacccaggtgtaggactctgttggatgtcccagctggtacctccagcctgcctaggtcccttgggatggcagccctgtccctgaacatgccaactggtcccagtgtttggtgtcatctacagactcactgacagagcatgccatcatcccatccccatccccagccaggcccctgytggattgytcgttaccagcccccagscagagatgacccatcaaccacagtctcgtagcccaaacaagcatctggacaaatttttaaccatccagaccgtaacatcctagcttggatacaagaccattatgttggccagtaaagtctttgctaagctgaggacctcgagttgcaccagggaaggttcaggttggatatgaggaaaaatttctcctcagaaagagtggtgaggcagtggcacaggctgcccagggaggtggtggagtcgaggtgttcaagaaatgtggagatgaggcagagggacatggt

SEQ ID NO: 26143 - DNA, 600 bp, Chicken  19866894242133_3
cctagttaccgggcctgatgctggggatgagcaccagggagggatgccatgctgttgctctcatccccaggaagcagcctgctcttgccactctctgacacccaggtgtaggactctgttggatgtcccagctggtacctccagcctgcctaggtcccttgggatggcagccctgtccctgaacatgccaactggtcccagtgtttggtgtcatctacagactcactgacagagcatgccatcatcccatccccatccccagccaggcccctgytggattgytcgttaccagcccccagscagagatgacccatcaaccacagtctcgtagcccaaacaagcatctggacaaatttttaaccatccagaccgtaacatcctagcttggatacaagaccattatgttggccagtaaagtctttgctaagctgaggacctcgagttgcaccagggaaggttcaggttggatatgaggaaaaatttctcctcagaaagagtggtgaggcagtggcacaggctgcccagggaggtggtggagtcgaggtgttcaagaaatgtggagatgaggcagagggacatggttagcgggcgtggagggya

SEQ ID NO: 26144 - DNA, 516 bp, Chicken  19866894242133_4
scagagatgacccatcaaccacagtctcgtagcccaaacaagcatctggacaaatttttaaccatccagaccgtaacatcctagcttggatacaagaccattatgttggccagtaaagtctttgctaagctgaggacctcgagttgcaccagggaaggttcaggttggatatgaggaaaaatttctcctcagaaagagtggtgaggcagtggcacaggctgcccagggaggtggtggagtcgaggtgttcaagaaatgtggagatgaggcagagggacatggttagcgggcgtggagggyatgggttgatggttggacagatgatcktaatggtgtttccaactttaatgattctatgaaattcaaggtgaatagcatgtgctgctctgtcctcaccctcagccccagccattccattgcagagatggttgggtcaggcaggcatggttggctcttgatcagtacacactgactgcttccagccaccacctctgcccagaaatgtggtggagaggg

SEQ ID NO: 26145 - DNA, 489 bp, Chicken  19866894242133_5
cgtagcccaaacaagcatctggacaaatttttaaccatccagaccgtaacatcctagcttggatacaagaccattatgttggccagtaaagtctttgctaagctgaggacctcgagttgcaccagggaaggttcaggttggatatgaggaaaaatttctcctcagaaagagtggtgaggcagtggcacaggctgcccagggaggtggtggagtcgaggtgttcaagaaatgtggagatgaggcagagggacatggttagcgggcgtggagggyatgggttgatggttggacagatgatcktaatggtgtttccaactttaatgattctatgaaattcaaggtgaatagcatgtgctgctctgtcctcaccctcagccccagccattccattgcagagatggttgggtcaggcaggcatggttggctcttgatcagtacacactgactgcttccagccaccacctctgcccagaaatgtggtggagaggg

SEQ ID NO: 26146 - DNA, 600 bp, Chicken  19866894242138_1
ctgacatctataatgacttaggtcagtctgtttaccttctagaactgccttattactcttccagtttcatggaataaatacttaaataagaatgaatacaaattacatcatatggacctatgctgatctccagaatcacagaatggtttagtatgaaagggacctctggagcaaatctggtccctgctcaacggggactggaccctataaaaatagggcattaatcttaaaattcacagtacctgacactagcagacggagactgcactaacaaaatcactgttcataatggtgaattgyaacataggttagagggtagaggtaaggaatatgcattttgctactggatttcaagtatattttatgagagcaaaaatacactgagactcaggtgtaattccccctccactatttcccctcttagtaataggaagacgtttcaaggcataaggagaaaggtcttaccagcatagtctctgctgccatagcactccagaataacaatgcctagacaaatctcgattcatgctggagtctgctcagagtgcttttggaaatacattgttcttactccatttagggaagagatccatacagggg

SEQ ID NO: 26147 - DNA, 600 bp, Chicken  19866894242139_1
cttgttgctgtggggaagtgaacccagttaaattccccagtaagtaggtagtgagcatgtaacatttttacattagcttaaaactctaaatttaaataggaagttgattttctaatgtcctcaagggcagttctaaggatgttcaaatagagatttgtatgtatgatgtagtttaataagcctgtttcctttctaaggagttgttttaacataattgtatgtcttcgttttttacagaccaaatcacttgattggcttatattctggaatgactttgatctttgccattaactggtcccrttcagctgaatctcaggagaaaaaaraaggagggttatctaatattctggggaaaaaatggggccttttttgaaatttgacttaaaaaaatttcaaatttgttgaaaaatactgagcaatttttcttggttaattgtgaccaacttgaagatgtagagcttccagatctgtgcaaaaggcaatctggatcccagyctgccaaagctctcgcttacagagaaacacttcagggagaaagcagaattatttatatactgaaaattgtattcttaaataatttgctgtattggtgcrgtagtg

SEQ ID NO: 26148 - DNA, 600 bp, Chicken  19866894242139_2
gttaaattccccagtaagtaggtagtgagcatgtaacatttttacattagcttaaaactctaaatttaaataggaagttgattttctaatgtcctcaagggcagttctaaggatgttcaaatagagatttgtatgtatgatgtagtttaataagcctgtttcctttctaaggagttgttttaacataattgtatgtcttcgttttttacagaccaaatcacttgattggcttatattctggaatgactttgatctttgccattaactggtcccrttcagctgaatctcaggagaaaaaaraaggagggttatctaatattctggggaaaaaatggggccttttttgaaatttgacttaaaaaaatttcaaatttgttgaaaaatactgagcaatttttcttggttaattgtgaccaacttgaagatgtagagcttccagatctgtgcaaaaggcaatctggatcccagyctgccaaagctctcgcttacagagaaacacttcagggagaaagcagaattatttatatactgaaaattgtattcttaaataatttgctgtattggtgcrgtagtgaattctctgtcattttttttacaaat

SEQ ID NO: 26149 - DNA, 600 bp, Chicken  19866894242139_3
ttaaataggaagttgattttctaatgtcctcaagggcagttctaaggatgttcaaatagagatttgtatgtatgatgtagtttaataagcctgtttcctttctaaggagttgttttaacataattgtatgtcttcgttttttacagaccaaatcacttgattggcttatattctggaatgactttgatctttgccattaactggtcccrttcagctgaatctcaggagaaaaaaraaggagggttatctaatattctggggaaaaaatggggccttttttgaaatttgacttaaaaaaarttcaaatttgttgaaaaatactgagcaatttttcttggttaattgtgaccaacttgaagatgtagagcttccagatctgtgcaaaaggcaatctggatcccagyctgccaaagctctcgcttacagagaaacacttcagggagaaagcagaattatttatatactgaaaattgtattcttaaataatttgctgtattggtgcrgtagtgaattctctgtcattttttttacaaattttaaaaaatcatttcatcaatataaaaacccagacatttatttccattcactttttattttgta

SEQ ID NO: 26150 - DNA, 600 bp, Chicken  19866894242139_4
aggagttgttttaacataattgtatgtcttcgttttttacagaccaaatcacttgattggcttatattctggaatgactttgatctttgccattaactggtcccrttcagctgaatctcaggagaaaaaaraaggagggttatctaatattctggggaaaaaatggggccttttttgaaatttgacttaaaaaaatttcaaatttgttgaaaaatactgagcaatttttcttggttaattgtgaccaacttgaagatgtagagcttccagatctgtgcaaaaggcaatctggatcccagyctgccaaagctctcgcttacagagaaacacttcagggagaaagcagaattatttatatactgaaaattgtattcttaaataatttgctgtattggtgcrgtagtgaattctctgtcattttttttacaaattttaaaaaatcatttcatcaatataaaaacccagacatttatttccattcactttttattttgtaatgtgttttttcttactgtgcgctgtgataggttaatggcctgtatagatccttgtgataaatctttcccaaatttttcctgaaaatattatgtgaaggtgcac

SEQ ID NO: 26151 - DNA, 600 bp, Chicken  19866894242139_5
gtcccrttcagctgaatctcaggagaaaaaaraaggagggttatctaatattctggggaaaaaatggggccttttttgaaatttgacttaaaaaaatttcaaatttgttgaaaaatactgagcaatttttcttggttaattgtgaccaacttgaagatgtagagcttccagatctgtgcaaaaggcaatctggatcccagyctgccaaagctctcgcttacagagaaacacttcagggagaaagcagaattatttatatactgaaaattgtattcttaaataatttgctgtattggtgcrgtagtgaattctctgtcattttttttacaaattttaaaaaatcatttcatcaatataaaaacccagacatttatttccattcactttttattttgtaatgtgttttttcttactgtgcgctgtgataggttaatggcctgtatagatccttgtgataaatctttcccaaatttttcctgaaaatattatgtgaaggtgcaccaaagatttcttagatctgaaactaatttttggtaggacacaaagatttccttagaacctgkgcaggactttttttagatgggtttcctgttccaacca

SEQ ID NO: 26152 - DNA, 495 bp, Chicken  19866894242139_6
aaaattgtattcttaaataatttgctgtattggtgcrgtagtgaattctctgtcattttttttacaaattttaaaaaatcatttcatcaatataaaaacccagacatttatttccattcactttttattttgtaatgtgttttttcttactgtgcgctgtgataggttaatggcctgtatagatccttgtgataaatctttcccaaatttttcctgaaaatattatgtgaaggtgcaccaaagatttcttagatctgaaactaatttttggtaggacacaaagatttccttagaacctgkgcaggactttttttagatgggtttcctgttccaaccatgttcgctgcttttcacaaatgtcttctaatctgaactcttctgcctcctcacttcactcttgtctgtcctgtgcwgtatgtttggaagaaatttctcatctgaccacgtgcacccactgtcagcacaaacagtctgtcatgttttatatccctagtt

SEQ ID NO: 26153 - DNA, 382 bp, Chicken  19866894242139_7
ccattcactttttattttgtaatgtgttttttcttactgtgcgctgtgataggttaatggcctgtatagatccttgtgataaatctttcccaaatttttcctgaaaatattatgtgaaggtgcaccaaagatttcttagatctgaaactaatttttggtaggacacaaagatttccttagaacctgkgcaggactttttttagatgggtttcctgttccaaccatgttcgctgcttttcacaaatgtcttctaatctgaactcttctgcctcctcacttcactcttgtctgtcctgtgcwgtatgtttggaagaaatttctcatctgaccacgtgcacccactgtcagcacaaacagtctgtcatgttttatatccctagtt

SEQ ID NO: 26154 - DNA, 600 bp, Chicken  19866894242141_1
actgctttgaggtttctgtcagtgatgcaggagatctcccagctgctagaagcagcttttgctgatgtttttggaagatgacataagctaataatcttgtgtagcacatgaaaaatagggtaagtttacaaagtgcatgagagccgataatctcttctgtgctttgctgtcttaggtgtagacctagacctggcaaggaaagaagaggagcagcagatgctgcaggatgcccggcagtggctgaacagtgggagaatcgaagatgtgaagcagcctcagacgggtgccacagctcttcaygttgcttcagcaaagggctattctgaagtcatgaggtaggaactccttcccgtggctgatgtgttgaactgagcatggttttcctgaggaacatgcatagctttttagttgagagaaatgttttgtaccaacacctttgggctgctgtctctctaaatgctcagcagaattatgtgcccagccgtggtcaytcacctagaaatacagaggctggaagattgcctttcatacctttaggtcttcagagaaatgaaagcttttctgagaccagggcacaaattagaaggtcaagtttcacta

SEQ ID NO: 26155 - DNA, 600 bp, Chicken  19866894242141_2
ggcaaggaaagaagaggagcagcagatgctgcaggatgcccggcagtggctgaacagtgggagaatcgaagatgtgaagcagcctcagacgggtgccacagctcttcaygttgcttcagcaaagggctattctgaagtcatgaggtaggaactccttcccgtggctgatgtgttgaactgagcatggttttcctgaggaacatgcatagctttttagttgagagaaatgttttgtaccaacacctttgggctgctgtctctctaaatgctcagcagaattatgtgcccagccgtggtcaytcacctagaaatacagaggctggaagattgcctttcatacctttaggtcttcagagaaatgaaagcttttctgagaccagggcacaaattagaaggtcaagtttcactattagagtacaggctttagggctagcaagtcagatgtgctggggatgaaagtatgatttcagcctacaggggaacagtacgtactgcatggcaatcacaaacaccctcatggttgacacaaccagaatgtcaractagtagaaaaatgcagtgtccacttctgcctcagtgtccccaccacttaatgcctct

SEQ ID NO: 26156 - DNA, 600 bp, Chicken  19866894242141_3
acctttgggctgctgtctctctaaatgctcagcagaattatgtgcccagccgtggtcaytcacctagaaatacagaggctggaagattgcctttcatacctttaggtcttcagagaaatgaaagcttttctgagaccagggcacaaattagaaggtcaagtttcactattagagtacaggctttagggctagcaagtcagatgtgctggggatgaaagtatgatttcagcctacaggggaacagtacgtactgcatggcaatcacaaacaccctcatggttgacacaaccagaatgtcaractagtagaaaaatgcagtgtccacttctgcctcagtgtccccaccacttaatgcctctgctcctgtagccatcaamagtgacagagatcccaacatgtaacagttctgcttctgctgctccagcactaataagctcattatgaacataagcttgatcagtgtagtgctcctggcaatgaagcattagtatttttacaggtagtaaggatgtcccaacagtaaagcttcctaaatgatgtatggatggagcagtcatatgcaggttgaaatgctttctggaaacgttcacccacctcaat

SEQ ID NO: 26157 - DNA, 600 bp, Chicken  19866894242141_4
gctggaagattgcctttcatacctttaggtcttcagagaaatgaaagcttttctgagaccagggcacaaattagaaggtcaagtttcactattagagtacaggctttagggctagcaagtcagatgtgctggggatgaaagtatgatttcagcctacaggggaacagtacgtactgcatggcaatcacaaacaccctcatggttgacacaaccagaatgtcaractagtagaaaaatgcagtgtccacttctgcctcagtgtccccaccacttaatgcctctgctcctgtagccatcaamagtgacagagatcccaacatgtaacagttctgcttctgctgctccagcactaataagctcattatgaacataagcttgatcagtgtagtgctcctggcaatgaagcattagtatttttacaggtagtaaggatgtcccaacagtaaagcttcctaaatgatgtatggatggagcagtcatatgcaggttgaaatgctttctggaaacgttcacccacctcaattccttattttatagtcttaagtgacatgagttgatgtgtaagagcagcttcttatcaagctcaagtaattttgttaa

SEQ ID NO: 26158 - DNA, 600 bp, Chicken  19866894242142_1
tctctgggtaacctgcacctcatcactccgtcagtaaaagacttcccttgacactcaatctaaatctcccttcttttagtttaaaaccattctatcactatctaactctgtaaaattgattttcctcatgtttataaactttttaaaatactggaatgccacagtgaggtctcagccttcttttttccaggctgaacaagcccagttccttcaccctatcttcatagaactgctccagctctcagatcaacttcatggccctcctctggacactcttcaaaagcttcacatctttcctgygctgagggcccccgacttggatgcagcaagcyggctgggacctcacaagggcagaatacargggragaatcatttctcttgccctgctggccacccctcttctgagggaatcctctgatctctctgtatgaactatacatataacctagctagtaatatacattgtatgtgcaacctcaattaattgtgcactttgtaacaatttggagtatcagggaaaaataatatctctcagctgtggtgctggttgtggttttagtttgttttgcttttccattagcaatctggtatttgtggctg

SEQ ID NO: 26159 - DNA, 600 bp, Chicken  19866894242142_2
agtaaaagacttcccttgacactcaatctaaatctcccttcttttagtttaaaaccattctatcactatctaactctgtaaaattgattttcctcatgtttataaactttttaaaatactggaatgccacagtgaggtctcagccttcttttttccaggctgaacaagcccagttccttcaccctatcttcatagaactgctccagctctcagatcaacttcatggccctcctctggacactcttcaaaagcttcacatctttcctgygctgagggcccccgacttggatgcagcaagcyggctgggacctcacaagggcagaatacargggragaatcatttctcttgccctgctggccacccctcttctgagggaatcctctgatctctctgtatgaactatacatataacctagctagtaatatacattgtatgtgcaacctcaattaattgtgcactttgtaacaatttggagtatcagggaaaaataatatctctcagctgtggtgctggttgtggttttagtttgttttgcttttccattagcaatctggtatttgtggctgacatttttattgcattaatggcaggaaacaat

SEQ ID NO: 26160 - DNA, 600 bp, Chicken  19866894242142_3
aaatctcccttcttttagtttaaaaccattctatcactatctaactctgtaaaattgattttcctcatgtttataaactttttaaaatactggaatgccacagtgaggtctcagccttcttttttccaggctgaacaagcccagttccttcaccctatcttcatagaactgctccagctctcagatcaacttcatggccctcctctggacactcttcaaaagcttcacatctttcctgygctgagggcccccgacttggatgcagcaagcyggctgggacctcacaagggcagaatacargggragaatcatttctcttgccctgctggccacccctcttctgagggaatcctctgatctctctgtatgaactatacatataacctagctagtaatatacattgtatgtgcaacctcaattaattgtgcactttgtaacaatttggagtatcagggaaaaataatatctctcagctgtggtgctggttgtggttttagtttgttttgcttttccattagcaatctggtatttgtggctgacatttttattgcattaatggcaggaaacaatatgaaaagaatgcagacagaagtggaaag

SEQ ID NO: 26161 - DNA, 600 bp, Chicken  19866894242142_4
ctcccttcttttagtttaaaaccattctatcactatctaactctgtaaaattgattttcctcatgtttataaactttttaaaatactggaatgccacagtgaggtctcagccttcttttttccaggctgaacaagcccagttccttcaccctatcttcatagaactgctccagctctcagatcaacttcatggccctcctctggacactcttcaaaagcttcacatctttcctgygctgagggcccccgacttggatgcagcaagcyggctgggacctcacaagggcagaatacargggragaatcatttctcttgccctgctggccacccctcttctgagggaatcctctgatctctctgtatgaactatacatataacctagctagtaatatacattgtatgtgcaacctcaattaattgtgcactttgtaacaatttggagtatcagggaaaaataatatctctcagctgtggtgctggttgtggttttagtttgttttgcttttccattagcaatctggtatttgtggctgacatttttattgcattaatggcaggaaacaatatgaaaagaatgcagacagaagtggaaagcatt

SEQ ID NO: 26162 - DNA, 600 bp, Chicken  19866894242145_1
gtggtgatggaatgaaggtttattatacaaagtagagtcagctgagaaaaaacatccaacacattttactcatgaggaggttagggaggcctaatggtcatttaaatctaagtgtttttttcagaacttgccattgcccccaatgcactgaatcatattaacacacatatatatagttcattgactgctatgtatatattcttctgacctagcattgctggagagatgtgagtgcatgcatgtgtgtgcagtcagtagccccagtatcttcttagatggcttctaggaacctagactccrtagcagaccatgactcggaggaaggaacataaagtaactgtgcttttctttgtacttgcaatggcttccacatacacatcagtggtgaaggccactgtgctgggtaggcaggactcaggcktttcaacttctgcctgttcccaagtgtaggagggctgttgtagccccagggtcrtcgctacccattgagtcaaaaraagaaactgcaaaggaggaaggagaacttctatgtcctgaactcccctggtggcagcccagggtggcttctcactgactctctgcccaattttgctatctgta

SEQ ID NO: 26163 - DNA, 600 bp, Chicken  19866894242145_2
cagaacttgccattgcccccaatgcactgaatcatattaacacacatatatatagttcattgactgctatgtatatattcttctgacctagcattgctggagagatgtgagtgcatgcatgtgtgtgcagtcagtagccccagtatcttcttagatggcttctaggaacctagactccrtagcagaccatgactcggaggaaggaacataaagtaactgtgcttttctttgtacttgcaatggcttccacatacacatcagtggtgaaggccactgtgctgggtaggcaggactcaggcktttcaacttctgcctgttcccaagtgtaggagggctgttgtagccccagggtcrtcgctacccattgagtcaaaaraagaaactgcaaaggaggaaggagaacttctatgtcctgaactcccctggtggcagcccagggtggcttctcactgactctctgcccaattttgctatctgtaaagtagggaaataatgcctacctcatcaggatgttgcaagaattagataagtcacttggaaaattctttacagatgaaaaatactggcattctgccagaggaagtaatttcttctgctttt

SEQ ID NO: 26164 - DNA, 600 bp, Chicken  19866894242145_3
gttcattgactgctatgtatatattcttctgacctagcattgctggagagatgtgagtgcatgcatgtgtgtgcagtcagtagccccagtatcttcttagatggcttctaggaacctagactccrtagcagaccatgactcggaggaaggaacataaagtaactgtgcttttctttgtacttgcaatggcttccacatacacatcagtggtgaaggccactgtgctgggtaggcaggactcaggcktttcaacttctgcctgttcccaagtgtaggagggctgttgtagccccagggtcrtcgctacccattgagtcaaaaraagaaactgcaaaggaggaaggagaacttctatgtcctgaactcccctggtggcagcccagggtggcttctcactgactctctgcccaattttgctatctgtaaagtagggaaataatgcctacctcatcaggatgttgcaagaattagataagtcacttggaaaattctttacagatgaaaaatactggcattctgccagaggaagtaatttcttctgctttttttgcatttttttttcttcccccttcagattcaagccctgaatgcacaaataag

SEQ ID NO: 26165 - DNA, 600 bp, Chicken  19866894242145_4
attcttctgacctagcattgctggagagatgtgagtgcatgcatgtgtgtgcagtcagtagccccagtatcttcttagatggcttctaggaacctagactccrtagcagaccatgactcggaggaaggaacataaagtaactgtgcttttctttgtacttgcaatggcttccacatacacatcagtggtgaaggccactgtgctgggtaggcaggactcaggcktttcaacttctgcctgttcccaagtgtaggagggctgttgtagccccagggtcrtcgctacccattgagtcaaaaraagaaactgcaaaggaggaaggagaacttctatgtcctgaactcccctggtggcagcccagggtggcttctcactgactctctgcccaattttgctatctgtaaagtagggaaataatgcctacctcatcaggatgttgcaagaattagataagtcacttggaaaattctttacagatgaaaaatactggcattctgccagaggaagtaatttcttctgctttttttgcatttttttttcttcccccttcagattcaagccctgaatgcacaaataagcaaaaatcaattgtcattctag

SEQ ID NO: 26166 - DNA, 600 bp, Chicken  19866894242147_1
tatgaaatcaaataacctaggctctaagtacatagatatatgccaacttgttaagtaaggaatgaagcctgaaaggcaaatcagaagatattcccacaatcagtagcagcagggtatttatgtgaagaagtcagataaccattccagttcatgaagagtcagttagtcaagccaaacaattcactccaccaggaacattaagcacaacgtgcaaaaaaaaaaccctaaagtcttcattaatcaaaactactttattggaggtatgagccacagcaaatgtactcctgtcatgccacacarttcccacaccgtggacataycacagctgttgtaactcattatttctatttatttcactcacaagcagtgaaaataattcacaagaatttgtaactcccagagaggtgtcacagcccattaagcctagcattcagaggaagggttatagaaatgtacagcgagtgtaatggggtttcacttagatttcacaggtttaacaaaaagatcccacaagcagaaacagaacacaggaaaacagttatgcacaagacattaaaatgtcaaatgaaaaaaaagcgtgattgctatggaaggataact

SEQ ID NO: 26167 - DNA, 600 bp, Chicken  19866894242147_2
gctctaagtacatagatatatgccaacttgttaagtaaggaatgaagcctgaaaggcaaatcagaagatattcccacaatcagtagcagcagggtatttatgtgaagaagtcagataaccattccagttcatgaagagtcagttagtcaagccaaacaattcactccaccaggaacattaagcacaacgtgcaaaaaaaaaaccctaaagtcttcattaatcaaaactactttattggaggtatgagccacagcaaatgtactcctgtcatgccacacarttcccacaccgtggacataycacagctgttgtaactcattatttctatttatttcactcacaagcagtgaaaataattcacaagaatttgtaactcccagagaggtgtcacagcccattaagcctagcattcagaggaagggttatagaaatgtacagcgagtgtaatggggtttcacttagatttcacaggtttaacaaaaagatcccacaagcagaaacagaacacaggaaaacagttatgcacaagacattaaaatgtcaaatgaaaaaaaagcgtgattgctatggaaggataacttaggatttacagatcagcta

SEQ ID NO: 26168 - DNA, 600 bp, Chicken  19866894242147_3
acctatctaataacctgttatgtccaaactttttggaatccaataatcagaggctcagtgggtgaaaatattctgtgaaagaatatactgcagcatctctgcaatttctgtccccgaaacacctaaatgcactacaaacatcacttgtgaccttctgtctcttagaactgggacggtggagaagcgacggctttcagttccattttctagcgtgaaacagaaaagacctatgatagggatcctgtttctcttcaaaaaaaaaaaccaaaaagcaccacgaaccatctcagtcatatttawacccaatttttgaatgattttgcagccactgtgaataaagaaactgcagcatccctatccgaagtcttccatgaagatttaatttatgctaggagggggagctaactagagacatctgtgtgaggcacagtagtttcactgactttatgtgggctccatttctcttcatttttaaaggttttcattttactgtagaagcaaaatgaaaacagtaatatctttgaatatttaacaataccaatatttgaatgggataatgatataaagcttactacactttattttgattttctgatgaca

SEQ ID NO: 26169 - DNA, 600 bp, Chicken  19866894242152_1
actcctgtataagcttcatcttcccactcaatactcccacaaaagtattccctttaagcttgcagcaagctaaaaagagaaaaaccacgcaccctgtacagaaaagcatccccacaacaagcatcctcagtttgtttaatactttaatactacaaagcaagatttgcataaaactagcacagggcaaaaaagcaaaactaaagagaacaggtttccctccatgaattgcccaaagagctctcctcagacccagctcatctcagataactgaactagaactctaagcccagcccagcccarcctcccattcatttctccagtttagactgcacacttcactcatcacttaattctccctcagttttcaaaggaaatggtaatcgattaatgaacagaagccactccttgctctgactccccaggaaaaaagggaggctacagcacagtctccacacaccctcctgatctcgggtttgagactaaataaaatccttcacagcctatgtgacttaaaattacacactgtattatatttagttattatttaatatagtactacacaacttggagctgcagcctcttcacaacactgggacctac

SEQ ID NO: 26170 - DNA, 600 bp, Chicken  19866894242153_1
gatcttcactgttacacatctgcccactcagaagtatccccctgtgcccagaaaaccagagagcatacgagaaaagcagcaccccagaggttgttctcctcctctgcaacagtactgaagagctgtatgatccatcaaagctagcaaggcattatagtattttacctgaaggacaacaacagtggaaatgcacagttttgcagtaagcaggataaatatcatccagtgtgtaaggcgtccttaccgcaaagggctgcaaactcatctggcctggcgtaagtgagcacagcagccaaagcytctctccaattctgcagatcacaagacagcacaatctccttccagttcttcgttacgactgcagtgatgagctggagccgaagaagagaccacagttaagattttggtaggatttcttttgatgcagtataattgaatattcaaatgtaatgcaagcatgctcatcaagcatgccactgcatccagggctgtggcaggtatggtactgcaattccaaagctccacaagagtcaactttactatcaaaggggctcactgaaaaaaatcacagaacaagctcaggtaaaacagaccaattac

SEQ ID NO: 26171 - DNA, 600 bp, Chicken  19866894242154_1
gttgcgttggaagaaccttaaaaaaaccatccaattccagcccagtgccatgagttggttgccaaccatgggtttggttctacccagaggtgaagctttgggatgctctctgcggtgatgcccagggcgtaacccattgcttgccatatggggatccatctgcaggcagtgggatgcttgcatgggtttcaggggtgagttttcagactgcagtaaaagcagtgcaagaaaagggtctactgaagtaaagccagtgatgttgggatgagttcccagtgcctccaagatttttgagtctgktggattgggttatgggaatgcatcagggctcagcagctgggaggaggatacaggagggagccaagaatgccctccatccatccgtcctccatccattgcagcctgggatttccagccacttttcacccgaattgcagtgtcaggataacaagaaatggtgtgttttacaagaaatggactgtgctttatgcacgatctcgccactaaagaggggtcagagtgtaaggcagtcgagtgccgcgttgccctggtatgtttgccacgggataatggaaaattcctgcgaggagcatgcttgat

SEQ ID NO: 26172 - DNA, 599 bp, Chicken  19866894242155_1
  misc_feature (1)..(108): n is any nucleotide
nnnnnnnnnnnnnnnnnnnnnnnnnnnnnnnnnnnnnnnnnnnnnnnnnnnnnnnnnnnnnnnnnnnnnnnnnnnnnnnnnnnnnnnnnnnnnnnnnnnnnnnnnnnntcctgctgcctccccctgagtcccttcatcccacctctacagtgaagcagtgtgagacagtgcctgctgtctgcatccccatcacattttcttctatttctatttttcagaccttttcattacattatcagcaccaccttgaatttaaaccccctcctcctgtgcacccacagttccttactattgcacaayaaaccacgtggtttgcaagaataatctccactctgtcccctggaatatgagcagaaatgctcagcagtactatctgccagaccagctcttgcaaaacctcatgtttaggctctctgaaccacttcttagatggaagagaatgacttcttttattcctgagtgcctgacttgcagagggacttggtagggtacccatccatctaacctcagccatcttcagggtggtcacacagcttttagggctgyttccgggacagccagaccccctgacttggtgcaagcctatcagaggtggcttc

SEQ ID NO: 26173 - DNA, 600 bp, Chicken  19866894242155_2
ttgaatttaaaccccctcctcctgtgcacccacagttccttactattgcacaayaaaccacgtggtttgcaagaataatctccactctgtcccctggaatatgagcagaaatgctcagcagtactatctgccagaccagctcttgcaaaacctcatgtttaggctctctgaaccacttcttagatggaagagaatgacttcttttattcctgagtgcctgacttgcagagggacttggtagggtacccatccatctaacctcagccatcttcagggtggtcacacagcttttagggctgyttccgggacagccagaccccctgacttggtgcaagcctatcagaggtggcttcagtaagtgggaaaagctgagtgctgagagatctgacagccttttgatgtgtcccaaactggtggtagtctggaggaagaggaggatgctgtactggagctcagagcagcccggtatgcaaagaccacatggcagctcagagcaacttattttgctcttcaaccacctttaataagatttataaaaaaaaaaaaaagtataaactcaacaaacatcaatctgaaattcataaaatttataggagaaaa

SEQ ID NO: 26174 - DNA, 600 bp, Chicken  19866894242161_1
tttctactattctttctactatttcccatttagttccttttcatgtcagttctaggcagccctaagtttccactgcatggaattcatatgtgtaagaatattcccgtgtgaatattcttttattcaaaacaaccttttcacctctgaggactccgtgtcctgaaggtgccaaggaaatcctgacccttcagtttcctgcaggaataactgcaaggccgaaacattaaagtctgttaaagagcagaagtttgatctctgttgccctttgaatggagttgcagtcctgattttttttttttytctctttcggtgtaccatctatcctgttttatagcaggaatgtaatttacttagcctgcttcttctgcagagcaccacctgttcttgcatgccaggagagagtaatctttacgtgaattactttggaggttttcaagctgtggttcacggaaccccatcgatctaaggattaagttttacaagtctgtagaaaataactttgaaaatacaaaagcttcccatctgtaggatgaaatgtgcaactccaggaggtctcgtttccatctgagcattcttaggagtttgcagctctaaagaagt

SEQ ID NO: 26175 - DNA, 600 bp, Chicken  19866894242169_1
ccactgttgggatttgatttagtggttgtactgaatcatggagaagctgaggtgggaagggccctccaaaggccaacttgttcagccctcctgatcaagtccaggtggcttttgaagatctccaaggagactccacaatctctctgggcaacctgtgccactgttccatcactcacaatcacttcaaaaagtagtttgcaatgtgcttaaggctttagctaaggaaagtttctacaagcagtattctggcactaacacctcagaaatttttctttttctgttggctttacagtgatctcrttacctcttttgctcacgacctcccatttcagtgtggttgatctatgcatgggcctattggcagtgcagggccataatgtggattctactcccagattagcagcaacctgcagcctgactgcaattagctggcaggatgatgtttcttgactgcctggtgtttaaatgaactgaaaatcaaaaccctgtttttcctggttctcttccaaatcacacactaaggtacagtttgcatcatcaaatattaaaacagatgttggtaaaagcagataagtctgagtgaaatttgacatccaaata

SEQ ID NO: 26176 - DNA, 512 bp, Chicken  19866894242169_2
agctggcaggatgatgtttcttgactgcctggtgtttaaatgaactgaaaatcaaaaccctgtttttcctggttctcttccaaatcacacactaaggtacagtttgcatcatcaaatattaaaacagatgttggtaaaagcagataagtctgagtgaaatttgacatccaaatagtcctaaacttgtagtttgggctcttctcttcagaaacagaggaggaagcactgaacactttgtgtgcatgagattagggtaagaggtgctacagtggctttgcaagatccttcccttattttagyagccctgtgaaccctttctgtctatgatcagatacagatgagctggtcactgtaaattagcagatgcccagtagggcatggagaaataaggtcctgcagaaacacccttatgccaagaggttgcagtttaatgtacccagtatgatggggcagctgcaaagttgggtaggggatctccaaaaatatccattggggtgcaggaataaaatata

SEQ ID NO: 26177 - DNA, 600 bp, Chicken  19866894242174_1
aagatttaatatggggaaatgttagttttcaatgacttttaaacttcatagtaatgtctgattgccaaaatgaagcactgctgtgctgaaatgcagagtattgagttgtagtctgtacacgtggtccgtatacatggtgatggttggaatttaggatagctggagtgatgtagtacagtggctttgctgccttttattcacgttctgcttgtggagagtgcgggtgtaaaggcatgtcgtttgtaacactcacttggcacgtgtgcacttgtgtcactgcttgtgccctggcagggggtrgtaagggaraagaggctgagcagtgctgaagactgcaagaaacatgaggttgatagtatccgagaaacgttggtttggatgaacttacaggaataataagatgtgctttcttcctttttacagtccttccccaccccaaatatcctcactcttccagtgaaaatttatgagaaataattaatcttgtgatagcagtctgcctgcctgctgaccttctgccaggtgtcaggactgaccgcagctgggacaggcagctgatgattagttcatgaatattttgtgcaagtgttggtatcacct

SEQ ID NO: 26178 - DNA, 600 bp, Chicken  19866894242174_2
tatggggaaatgttagttttcaatgacttttaaacttcatagtaatgtctgattgccaaaatgaagcactgctgtgctgaaatgcagagtattgagttgtagtctgtacacgtggtccgtatacatggtgatggttggaatttaggatagctggagtgatgtagtacagtggctttgctgccttttattcacgttctgcttgtggagagtgcgggtgtaaaggcatgtcgtttgtaacactcacttggcacgtgtgcacttgtgtcactgcttgtgccctggcagggggtrgtaagggaraagaggctgagcagtgctgaagactgcaagaaacatgaggttgatagtatccgagaaacgttggtttggatgaacttacaggaataataagatgtgctttcttcctttttacagtccttccccaccccaaatatcctcactcttccagtgaaaatttatgagaaataattaatcttgtgatagcagtctgcctgcctgctgaccttctgccaggtgtcaggactgaccgcagctgggacaggcagctgatgattagttcatgaatattttgtgcaagtgttggtatcacctgtccttttc

SEQ ID NO: 26179 - DNA, 600 bp, Chicken  19866894242183_1
tggtatgaagcagtaatcacagccattctctctcacagcccaatattgaaacgagggaagagcaaatgtttgctttttctgagaagggcgatgttccaacagatgagaggtgtaagaactaaatattgacagaatgggaggacatgcaatcaaagcagcatagggcctccatccccactgggactcaagcaaagcaccttcccgtcctggaaccactcactctgtcagctgaactgctgtaataatcccatctgagggctgcaaatagagatatcaggctcacaagagaagaccacaggraaaaaaaaagatgacttaaagattgccaggactcatctgcttctacaacaccgagtaaggctggagctgacccaccaccattcaaatcaacagattttccamgtatctcgatgggcctttggagcaaacccttggacacagctgctgagttaacacacaagcctttaaataaacccagataatgtcttcatatctcctctgtgtgactgaagctgaggctgcaccttgaacactgtgttcagcgttgggttcctcactacaagacatcgaggccctggagagcacccagagacaggcagc

SEQ ID NO: 26180 - DNA, 600 bp, Chicken  19866894242183_2
atgagaggtgtaagaactaaatattgacagaatgggaggacatgcaatcaaagcagcatagggcctccatccccactgggactcaagcaaagcaccttcccgtcctggaaccactcactctgtcagctgaactgctgtaataatcccatctgagggctgcaaatagagatatcaggctcacaagagaagaccacaggaaaaaaaaaagatgacttaaagattgccaggactcatctgcttctacaacaccgagtaaggctggagctgacccaccaccattcaaatcaacagattttccamgtatctcgatgggcctttggagcaaacccttggacacagctgctgagttaacacacaagcctttaaataaacccagataatgtcttcatatctcctctgtgtgactgaagctgaggctgcaccttgaacactgtgttcagcgttgggttcctcactacaagacatcgaggccctggagagcacccagagacaggcagcaaagctgtgaggggtctggagcacaagtcttatgagaagcagctgagggaactgggatggttcagtgtggagaagaggaggctcaggggagacctcatcact

SEQ ID NO: 26181 - DNA, 600 bp, Chicken  19866894242186_1
tggattccctcagcttggactgaatcagtatcatgttattacgaatgttgaggatatattcacatcctttaattgtttattttttctattttatttcattttgtttaatttgtagttgattttctttggactacacaccttttctgggggaagggattacactttttcattgttttccgtaagtatctcatgaccatcacatttataacttttcactggctgaaaattaatttctttcattaaactgtgctgggaaaaaaaatactataaaagaaagttgaagaatcaaaaataaggcartttggaaaccgattagcaggattttgtcattaaatgtttgcgaattgtagaggaacacctaatagacagatatttttgagtccattgtaattgcttccaccgacacatgaccagtcaaatgttggggcasaattatctccctgctaatgcttaagctaatgcttaaaatacttaagacttgcatatctgagcagatggccacacactgagacctgtgcacttgtattggtgttctcattggtgctcatagtcatgctactctgttcattgataatgcaagacatatgacccctttataag

SEQ ID NO: 26182 - DNA, 600 bp, Chicken  19866894242186_2
ctacacaccttttctgggggaagggattacactttttcattgttttccgtaagtatctcatgaccatcacatttataacttttcactggctgaaaattaatttctttcattaaactgtgctgggaaaaaaaatactataaaagaaagttgaagaatcaaaaataaggcartttggaaaccgattagcaggattttgtcattaaatgtttgcgaattgtagaggaacacctaatagacagatatttttgagtccattgtaattgcttccaccgacacatgaccagtcaaatgttggggcasaattatctccctgctaatgcttaagctaatgcttaaaatacttaagacttgcatatctgagcagatggccacacactgagacctgtgcacttgtattggtgttctcattggtgctcatagtcatgctactctgttcattgataatgcaagacatatgacccctttataagatgagagcattacacttgaaaataatacagtgtatttgtttgaattttaggagtggaggattatttggtttggatttttattgctgttgtttgaatgagtacctatctcaagaaacaagcactgcttttt

SEQ ID NO: 26183 - DNA, 542 bp, Chicken  19866894242194_1
tctcctctcggtctgtgctggggctgcagctgcccctggatgcagcaccgccaatgggaccccaatgggatgggagtgctgggagcagccgggacccctcatgtccccatgagtgtcacctttccactgagctccctttccccgtatgcccccggctcttcctaattagcgctcaggcttcccctcgcggcctccctaattaattcgctgttgctgctcattaagatcagccaacagaagggcggtgacggcggtgggactccggtgtccccatccccaggggacagctcgggcagcatygatcgctcccggaccccatcccctctgcgggagctgctcccactgctgtaatttgttgcacaaacagcgccgggcggttcaggattgcattgatcctccggcataaagggcccataaatccgtcgtggagcccggctgatggatcggcgccctttggagggagctggcccagcctgcaaatttaaaaactatctggataaatgacgcaggaaggaacatctcccaccgcccgcgtgccagcg

SEQ ID NO: 26184 - DNA, 600 bp, Chicken  19866894242197_1
tatgtatatgaggtttctcaaatgaaagatctacagctctttaattaacatgtctgggatttttattatctgttgatgcaagaatctatccagcagccataaacatcccttatgtactcatattttaagcaaatacttactgtaattcaacagtgcacccacagtacaagaaaaactcttctcaaacctactacagtacatctgttaatccaacaacggcagggagtgcccctctgaaggaagacaaggccaagggcaggctcagctcccccagacacagagcagcagttcgcaccctcrgtgtggcacagctgatgctgcagcagtagctgagaacacctccaacatgcccgtcccccacgcaaggcactgcaccaaagcgtagtttcactgacctttaatacccaccagcagctctcagtaatacagcgctgccgaagtaagccaggatctagctcaaccaaggggaaaacagtgaaaatctgataagcagttttacgcagtgtagaagatggatttattaactcccaaattgagcttgaagcaatcactataaattagctagaaaatgtgttttcccacaataactcctctgccaaa

SEQ ID NO: 26185 - DNA, 600 bp, Chicken  19866894242198_1
tacaccccatttgctcctcataacaaggtgatgcaaagctagaatttatgcccataaaacactgagcttaagagccggaggcccaagcagtgaacttaacacatcgaacagtctcctttctacagaccttacatgcatccactgaacagaaacagtttcatgtgaagtgttaggtgcctttcagatttcatgctgtcatttcttgttgtaccgggtcagtaacggctgcatcccattgcagcccacagcaagaaagatttgggaactgtaacagagaaggctcagtgcagatccgcattrctccttcagtgaccctcactataatactgacagggagarcccagctaggagaaggcagggggataagatgtgcacctaactgacctggccaggtaagacatgtctgttcatgatgctgcaggaagcaattaagttcatcttaccttcctgaaatctcgcttctcaaaatccacttctgctattttttcatactccagcactgtactggcattctttagctaaacaaaggaggacacagtgagtgtttcttacagtcctaggagcaaaaactgctgcagaccacagaacagcaatgtgaat

SEQ ID NO: 26186 - DNA, 600 bp, Chicken  19866894242198_2
tagaatttatgcccataaaacactgagcttaagagccggaggcccaagcagtgaacttaacacatcgaacagtctcctttctacagaccttacatgcatccactgaacagaaacagtttcatgtgaagtgttaggtgcctttcagatttcatgctgtcatttcttgttgtaccgggtcagtaacggctgcatcccattgcagcccacagcaagaaagatttgggaactgtaacagagaaggctcagtgcagatccgcattrctccttcagtgaccctcactataatactgacagggagarcccagctaggagaaggcagggggataagatgtgcacctaactgacctggccaggtaagacatgtctgttcatgatgctgcaggaagcaattaagttcatcttaccttcctgaaatctcgcttctcaaaatccacttctgctattttttcatactccagcactgtactggcattctttagctaaacaaaggaggacacagtgagtgtttcttacagtcctaggagcaaaaactgctgcagaccacagaacagcaatgtgaattaggtcaaactgattttgatgctggcaaatgtattgaag

SEQ ID NO: 26187 - DNA, 600 bp, Chicken  19866894242199_1
actgggcctgcagtgaaaaggggtggaaatacagggtctcctatccttttcttatcctttcccccatcttcagcacctaaaaagtctgagatccccccagtctcttagctgaagtatctcctaagcttttacagaagaaaaaagctgaatggggctaaagaaaaaggtgtatgaagagaacggtgcagggaaactgcaaggttaaaatttcctttttctttttttggagatgtgataacaagatgtatttttgtttttgttgtttacagatatatttttaccccatttactcatatttcytattaatcttcacaaagacaattttggggcaagaacgtttcattaacatagtgatcttccagcagttattttagtacagasaaattctcgttgaatgcacatacaaatgtggctcagaattcaatggttttcagattttgtagttcccatcacacmttctcatataactaattagaggtgacttgatgaatagyatacagtttagaagatgatctgtgaatgtttcatccaaatctggtttcacctgaagagtctttgtcatattcaacactggttactaaaagctgtcttgtacagttt

SEQ ID NO: 26188 - DNA, 600 bp, Chicken  19866894242199_2
aagtctgagatccccccagtctcttagctgaagtatctcctaagcttttacagaagaaaaaagctgaatggggctaaagaaaaaggtgtatgaagagaacggtgcagggaaactgcaaggttaaaatttcctttttctttttttggagatgtgataacaagatgtatttttgtttttgttgtttacagatatatttttaccccatttactcatatttcytattaatcttcacaaagacaattttggggcaagaacgtttcattaacatagtgatcttccagcagttattttagtacagasaaattctcgttgaatgcacatacaaatgtggctcagaattcaatggttttcagattttgtagttcccatcacacmttctcatataactaattagaggtgacttgatgaatagyatacagtttagaagatgatctgtgaatgtttcatccaaatctggtttcacctgaagagtctttgtcatattcaacactggttactaaaagctgtcttgtacagttttcatattggatcatgtttaggattgccactgagagcacttctgattcttaagaaatgtcttatttcaattcagtgctctca

SEQ ID NO: 26189 - DNA, 600 bp, Chicken  19866894242199_3
aaagaaaaaggtgtatgaagagaacggtgcagggaaactgcaaggttaaaatttcctttttctttttttggagatgtgataacaagatgtatttttgtttttgttgtttacagatatatttttaccccatttactcatatttcytattaatcttcacaaagacaattttggggcaagaacgtttcattaacatagtgatcttccagcagttattttagtacagasaaattctcgttgaatgcacatacaaatgtggctcagaattcaatggttttcagattttgtagttcccatcacacmttctcatataactaattagaggtgacttgatgaatagyatacagtttagaagatgatctgtgaatgtttcatccaaatctggtttcacctgaagagtctttgtcatattcaacactggttactaaaagctgtcttgtacagttttcatattggatcatgtttaggattgccactgagagcacttctgattcttaagaaatgtcttatttcaattcagtgctctcaactctttactactgagcattaatttaaatttctgatgtgactcagtattgaaaaaaattctcactcagcaggtca

SEQ ID NO: 26190 - DNA, 600 bp, Chicken  19866894242199_4
tgcaaggttaaaatttcctttttctttttttggagatgtgataacaagatgtatttttgtttttgttgtttacagatatatttttaccccatttactcatatttcytattaatcttcacaaagacaattttggggcaagaacgtttcattaacatagtgatcttccagcagttattttagtacagasaaattctcgttgaatgcacatacaaatgtggctcagaattcaatggttttcagattttgtagttcccatcacacmttctcatataactaattagaggtgacttgatgaatagyatacagtttagaagatgatctgtgaatgtttcatccaaatctggtttcacctgaagagtctttgtcatattcaacactggttactaaaagctgtcttgtacagttttcatattggatcatgtttaggattgccactgagagcacttctgattcttaagaaatgtcttatttcaattcagtgctctcaactctttactactgagcattaatttaaatttctgatgtgactcagtattgaaaaaaattctcactcagcaggtcagagaatggttgttattattcaggctagagatatatgca

SEQ ID NO: 26191 - DNA, 600 bp, Chicken  19866894242207_1
agagcacaaacaagtgatcaaaacaggtccaagccaggtttggcaggcaattatgcactgctcgtgttgtgttggaacgcagcagtgtgtttgcatgcagttttgttttagagaccaagcacaaggaaggagcaagcggagctcgaggcagagggctacaagccgtggtttatttgatgcacggttgtttctattaggatggaggtgggagggtttgggggttaccccatgtttcatgtgtgcagcgtggttcccgcggtgccccgcagcgctcccttccatcagcacctcatgctaacragtgttgctggtgaagaatgaagagtgcatcatcaagcagtgaactcagctttatttcaggcaggartgtgtggcacagtgcctccacacactccaaagtgctccacttgcccttttggaggtgagttttcagatgctcccatcgggttcatccacccgtggcggtgtgcctgcatcctgcccgtgtctggctttgtatgatgcagtgtaagcaaaccaacagggcgttaatctcattactcaaacaaacgaagtaaacctttaaggcacttaaaacaygcctgtgtgtgtcggccggtg

SEQ ID NO: 26192 - DNA, 600 bp, Chicken  19866894242207_2
tgtgttggaacgcagcagtgtgtttgcatgcagttttgttttagagaccaagcacaaggaaggagcaagcggagctcgaggcagagggctacaagccgtggtttatttgatgcacggttgtttctattaggatggaggtgggagggtttgggggttaccccatgtttcatgtgtgcagcgtggttcccgcggtgccccgcagcgctcccttccatcagcacctcatgctaacragtgttgctggtgaagaatgaagagtgcatcatcaagcagtgaactcagctttatttcaggcaggartgtgtggcacagtgcctccacacactccaaagtgctccacttgcccttttggaggtgagttttcagatgctcccatcgggttcatccacccgtggcggtgtgcctgcatcctgcccgtgtctggctttgtatgatgcagtgtaagcaaaccaacagggcgttaatctcattactcaaacaaacgaagtaaacctttaaggcacttaaaacaygcctgtgtgtgtcggccggtgagagccgrggcagagctgtggggcagcagcacggaggtggaggcagtggagcagccagagagctttc

SEQ ID NO: 26193 - DNA, 600 bp, Chicken  19866894242207_3
catcagcacctcatgctaacragtgttgctggtgaagaatgaagagtgcatcatcaagcagtgaactcagctttatttcaggcaggartgtgtggcacagtgcctccacacactccaaagtgctccacttgcccttttggaggtgagttttcagatgctcccatcgggttcatccacccgtggcggtgtgcctgcatcctgcccgtgtctggctttgtatgatgcagtgtaagcaaaccaacagggcgttaatctcattactcaaacaaacgaagtaaacctttaaggcacttaaaacaygcctgtgtgtgtcggccggtgagagccgrggcagagctgtggggcagcagcacggaggtggaggcagtggagcagccagagagctttctgttggcttcccattgcttttggctcttggttaggagcagaaaggaccaaacaacgtctgtaacagcgagagcacctggctattttcacacagatctcttaatggagattaaacacaaaataaagcaggatgcatcaacggcgatattcccataagcaatattgtaacttgcaggcagtgtaattatattttgtacacttgccaattaagca

SEQ ID NO: 26194 - DNA, 600 bp, Chicken  19866894242207_4
tggtgaagaatgaagagtgcatcatcaagcagtgaactcagctttatttcaggcaggartgtgtggcacagtgcctccacacactccaaagtgctccacttgcccttttggaggtgagttttcagatgctcccatcgggttcatccacccgtggcggtgtgcctgcatcctgcccgtgtctggctttgtatgatgcagtgtaagcaaaccaacagggcgttaatctcattactcaaacaaacgaagtaaacctttaaggcacttaaaacaygcctgtgtgtgtcggccggtgagagccgrggcagagctgtggggcagcagcacggaggtggaggcagtggagcagccagagagctttctgttggcttcccattgcttttggctcttggttaggagcagaaaggaccaaacaacgtctgtaacagcgagagcacctggctattttcacacagatctcttaatggagattaaacacaaaataaagcaggatgcatcaacggcgatattcccataagcaatattgtaacttgcaggcagtgtaattatattttgtacacttgccaattaagcagtgatgctttagagaaaaattactttcaa

SEQ ID NO: 26195 - DNA, 600 bp, Chicken  19866894242209_1
aattacatgcattttcagtagcctcatctggttgctagctattggttagtaagcagaaggaggttgtttggtaattcagtacttagagaaatttgggtttttaaaagagtagctcggggtgtcacaaaatcatgtggtttcatcctcctgggtattttttttaactgtgtggtattaaaaaatggaaacaaatgctttcttccagataatcattgttcgtaatgcagctaccatttgaagatttgtaccaagagctgaacgtttgggaattaagtatgtaattctctgaaagaaacgttyagtggaaggaggaactgtagtctttgatgtcaaagttgtggctttgcaaaggctggctttcactatccttacttaattctagatcattttaagagtttcatgtgcatgaatgtgtgtgcacattyatgtacttgtatccaccttgctgtaggtctttgttctttcatgtgaaaggctaaaatttgaattcctaggttaccaaaaaaaaaaagttttgggcaagacttgtttgtgaaatgtggttagataagtggcagcagtttttgtaaggaaactagttttgtgcactggactaccatg

SEQ ID NO: 26196 - DNA, 600 bp, Chicken  19866894242209_2
aaaatcatgtggtttcatcctcctgggtattttttttaactgtgtggtattaaaaaatggaaacaaatgctttcttccagataatcattgttcgtaatgcagctaccatttgaagatttgtaccaagagctgaacgtttgggaattaagtatgtaattctctgaaagaaacgttyagtggaaggaggaactgtagtctttgatgtcaaagttgtggctttgcaaaggctggctttcactatccttacttaattctagatcattttaagagtttcatgtgcatgaatgtgtgtgcacattyatgtacttgtatccaccttgctgtaggtctttgttctttcatgtgaaaggctaaaatttgaattcctaggttaccaaaaaaaaaaagttttgggcaagacttgtttgtgaaatgtggttagataagtggcagcagtttttgtaaggaaactagttttgtgcactggactaccatgcttgattgtaaatgcgggtgtgtaggaggcacatgagttggaactggtgaatctgaagagcagaaattcaactgataggttgttttttttatgtttatttagttgatggtctctctagctgatgt

SEQ ID NO: 26197 - DNA, 599 bp, Chicken  19866894242211_1
  misc_feature (1)..(136): n is any nucleotide
nnnnnnnnnnnnnnnnnnnnnnnnnnnnnnnnnnnnnnnnnnnnnnnnnnnnnnnnnnnnnnnnnnnnnnnnnnnnnnnnnnnnnnnnnnnnnnnnnnnnnnnnnnnnnnnnnnnnnnnnnnnnnnnnnnnnnnnntgaaagcaatggctcaagcacacattaagctcactctgccatgcagggcactctggcaagccgggctgctcgcaccagcagtcttaccattcccaccacagggcacccaggagatgcagtctctgtctctcccaggcgtgttccaactttctgcatatgctgcwccctccaggactgctctgcagtgcccttttctttggcacataagattaggcagaattaagcaggtgcatggctagcagcacaagttcgttggtagacgggagctgttccttatcagtagacctcatgaaaacaatgctgcccgttttgaagagagcattggccagagccagtgttttgggctggtttgtgttgtttgccaagtggacaggaaatcttccagctgtgaccaatgggctgtgcctgaagggcagagccaatgcttcaggaagaggtgatgttttctacccatgctctcttt

SEQ ID NO: 26198 - DNA, 600 bp, Chicken  19866894242211_2
gacaggaaatcttccagctgtgaccaatgggctgtgcctgaagggcagagccaatgcttcaggaagaggtgatgttttctacccatgctctcttttttgggattcagaaactcaccttgcttagggcaaggtctttgaccagaagccgtaagcatctatgctgtggctgggacagttgaactcaacagtcaggattgaactgatttcgttaaattgtggaggaagacggatctgtactgaacagaattgaaactacagtccaggtcaggtgacttacagttaaactgtacccaaatttamacaaagaaatccagtattaccatttcttctctccagagtaaagccaggctgagcacaggctgtgctttttcctctagggtttgctttcctgaattttggcgttccagtggaaattgcttgcagccagatgtcacagtgggaaagtcaaatgtgctaacccaggagcatggcatgtacagagttcagtgttaaaaagtaactcatacgcacagtaaaatgaaatcgtgagatgattcaaaagtaatggagaggcacggatcctgatcagctgccttaagtctcacagcagtaggtgttagg

SEQ ID NO: 26199 - DNA, 600 bp, Chicken  19866894242218_1
gcatctacagctttcttaatctcgcatgcaaatttagctttcaggcctggttctcctcttgtttcaaccaagagcagttcaatcagttttgttgctgtcacagagggcaaacactgggataatcctgctgtaaggatgccgctagtctctgcttgttgccctaacacttgcctggaagggtgagccaggatccttccatgcccctgagccaagaggggtttgtgcctctgcttccaggctgcaggtggaggtgagggatgggacgggaatggctccgcagtgggaatgggaatgggagcrgctggtgatgggaatggctccacagtagccatggtggtgcactgctctacctgaggatgctgacggcctcttaggttgagatggaactcgtgcacctcgtatttcaatccttagcagcctctgaatgaaaggatggaaaaagtgacttgaaatgtatcatccaaatgtacgaaagaaagagctggggatcagggcctccatatactatacagctggttctagttttcagacaagatttactaaacacatgtaaaccgtgcatatctgtttgaatacttttttgtgcaaataacttcctct

SEQ ID NO: 26200 - DNA, 599 bp, Chicken  19866894242219_1
  misc_feature (1)..(82): n is any nucleotide
nnnnnnnnnnnnnnnnnnnnnnnnnnnnnnnnnnnnnnnnnnnnnnnnnnnnnnnnnnnnnnnnnnnnnnnnnnnnnnnnnnttgggattgctccttcacaacatctgaattaccttcaaagcagcagcagtgggaaacacctctgggagctgttcgtggccagacaccttcctactttgagagcaaaatttggggcctaaagccttgcggaaagctgactatggggaagcaagaactgggattttttctcactcactgaccccaagcaatggggtctgcacccaaacccagccaggatrctgagcacatgcttgagtyttgctcygtgccagcgtgcaaagccaggcacagtagaaatccacatttttcagtgcgaataactcaaaataaggaacaggagaggggcagcttgtggaaagcagggaccagcatgtatgtgcttccccctgggagcagagcacagcagggatcactgtcccgagctgaccccagcgcatcactatgtcagcaggaatccaagcagagcgtttggccaaagccttagtgcactcactgcttgcaactcagcctccttgtaaaggccaggaggctgtttggc

SEQ ID NO: 26201 - DNA, 599 bp, Chicken  19866894242219_2
  misc_feature (1)..(63): n is any nucleotide
nnnnnnnnnnnnnnnnnnnnnnnnnnnnnnnnnnnnnnnnnnnnnnnnnnnnnnnnnnnnnnnttgggattgctccttcacaacatctgaattaccttcaaagcagcagcagtgggaaacacctctgggagctgttcgtggccagacaccttcctactttgagagcaaaatttggggcctaaagccttgcggaaagctgactatggggaagcaagaactgggattttttctcactcactgaccccaagcaatggggtctgcacccaaacccagccaggatrctgagcacatgcttgagtyttgctcygtgccagcgtgcaaagccaggcacagtagaaatccacatttttcagtgcgaataactcaaaataaggaacaggagaggggcagcttgtggaaagcagggaccagcatgtatgtgcttccccctgggagcagagcacagcagggatcactgtcccgagctgaccccagcgcatcactatgtcagcaggaatccaagcagagcgtttggccaaagccttagtgcactcactgcttgcaactcagcctccttgtaaaggccaggaggctgtttggcctgctataattagcaagaa

SEQ ID NO: 26202 - DNA, 599 bp, Chicken  19866894242219_3
  misc_feature (1)..(56): n is any nucleotide
nnnnnnnnnnnnnnnnnnnnnnnnnnnnnnnnnnnnnnnnnnnnnnnnnnnnnnnnttgggattgctccttcacaacatctgaattaccttcaaagcagcagcagtgggaaacacctctgggagctgttcgtggccagacaccttcctactttgagagcaaaatttggggcctaaagccttgcggaaagctgactatggggaagcaagaactgggattttttctcactcactgaccccaagcaatggggtctgcacccaaacccagccaggatrctgagcacatgcttgagtyttgctcygtgccagcgtgcaaagccaggcacagtagaaatccacatttttcagtgcgaataactcaaaataaggaacaggagaggggcagcttgtggaaagcagggaccagcatgtatgtgcttccccctgggagcagagcacagcagggatcactgtcccgagctgaccccagcgcatcactatgtcagcaggaatccaagcagagcgtttggccaaagccttagtgcactcactgcttgcaactcagcctccttgtaaaggccaggaggctgtttggcctgctataattagcaagaagccttgt

SEQ ID NO: 26203 - DNA, 600 bp, Chicken  19866894242220_1
gcaagttaccaggctcaccttggtggggagcagcttcaaggtccctgggaactcccagtttgtcatggaaagggaatctaggtgcagaaaaatctccctcaaggctttgcttctgatgtgggagtgcaccctgaaccagtggcaatgttctgtgttacgagctgggtctcactttttgcataatgatgacctgaaggttgcaaagagagccaaagtcaccgctttgttcccatgttctgaccacatgaaggggcagatccctgctgctaacctgagctgatggggatctgtgtgggagtygggaacttyggcagcaccttcgacccgtttcctcttgatggagtgcatggtgtccatcccagatgctgccctgacaggcagagatgtctgttctgtctgaacaagaaggtgctgataggtgatgggaagtcaagctgatgaggcacctcacaaaccgtgctctgagtttaattattcaaccgacccctgtcttagaacccaagcagaacaacacaatgctttacgagatgcgttrtgtgtgtatataacagcagcagggtaaggtagcatctgcagaaggccaaagagaggcggccgtat

SEQ ID NO: 26204 - DNA, 600 bp, Chicken  19866894242220_2
caggctcaccttggtggggagcagcttcaaggtccctgggaactcccagtttgtcatggaaagggaatctaggtgcagaaaaatctccctcaaggctttgcttctgatgtgggagtgcaccctgaaccagtggcaatgttctgtgttacgagctgggtctcactttttgcataatgatgacctgaaggttgcaaagagagccaaagtcaccgctttgttcccatgttctgaccacatgaaggggcagatccctgctgctaacctgagctgatggggatctgtgtgggagtygggaacttyggcagcaccttcgacccgtttcctcttgatggagtgcatggtgtccatcccagatgctgccctgacaggcagagatgtctgttctgtctgaacaagaaggtgctgataggtgatgggaagtcaagctgatgaggcacctcacaaaccgtgctctgagtttaattattcaaccgacccctgtcttagaacccaagcagaacaacacaatgctttacgagatgcgttrtgtgtgtatataacagcagcagggtaaggtagcatctgcagaaggccaaagagaggcggccgtatttcggtgct

SEQ ID NO: 26205 - DNA, 600 bp, Chicken  19866894242220_3
tctgaccacatgaaggggcagatccctgctgctaacctgagctgatggggatctgtgtgggagtygggaacttyggcagcaccttcgacccgtttcctcttgatggagtgcatggtgtccatcccagatgctgccctgacaggcagagatgtctgttctgtctgaacaagaaggtgctgataggtgatgggaagtcaagctgatgaggcacctcacaaaccgtgctctgagtttaattattcaaccgacccctgtcttagaacccaagcagaacaacacaatgctttacgagatgcgttrtgtgtgtatataacagcagcagggtaaggtagcatctgcagaaggccaaagagaggcggccgtatttcggtgctgcagctcaaaaagaagcttcagtgcatctccattcctgaggtttagtaattctgtgagcagaatttgttgtgctacttctgaacgtggcgtgagaagccaaagtaaacttcagaccctcttttatattcatgagaagcgttacagaatgacagcatttttcctttggaaagacaatctcctctacagcaaaggcaaagaacaagtgaacaaacagtgtgagcttac

SEQ ID NO: 26206 - DNA, 600 bp, Chicken  19866894242221_1
acccttggcgattacaaacatcagcagaattctttacagaatgtaaaggtttcttttaattaatgcaattgagagtacttacccagtcaaaaatatcttgtgagttaatttactgcatatgttttgataaggacaaccagaaaatgactgaggctattaaaagattatctagtagggggagatgagatggccagttaaagaagattcccaagctcaaaggagaggaaatgagttattaagaaaagaggtatttataactgctggggatctatccacaaggattatttagactggtaaaaytgtcaatcccagtgttctgagaggaattattttttaagacatttcttatgactttgggcatatmtgcctgatgaacaagagcaaatactctcaaaaatatgattgcaattctagaaattgaagtccaatatttatccttcattgacattttcaaaactcccatgtaggtgatgtgtaaccataggtattatctttctgttagacagtctttgaagctgtaatgcctatatttgcatcctagctgatgcctaagtttaccttgcttgcaaaattcagcgtgactttcagggaatgtgtcaa

SEQ ID NO: 26207 - DNA, 600 bp, Chicken  19866894242221_2
gcaattgagagtacttacccagtcaaaaatatcttgtgagttaatttactgcatatgttttgataaggacaaccagaaaatgactgaggctattaaaagattatctagtagggggagatgagatggccagttaaagaagattcccaagctcaaaggagaggaaatgagttattaagaaaagaggtatttataactgctggggatctatccacaaggattatttagactggtaaaaytgtcaatcccagtgttctgagaggaattattttttaagacatttcttatgactttgggcatatmtgcctgatgaacaagagcaaatactctcaaaaatatgattgcaattctagaaattgaagtccaatatttatccttcattgacattttcaaaactcccatgtaggtgatgtgtaaccataggtattatctttctgttagacagtctttgaagctgtaatgcctatatttgcatcctagctgatgcctaagtttaccttgcttgcaaaattcagcgtgactttcagggaatgtgtcaaactggacatccagaataaaactttctggcatgatctgttgtacatctctctgtttaccatcccc

SEQ ID NO: 26208 - DNA, 600 bp, Chicken  19866894242222_1
gatggcttcaggacagatcaaagcatgagggtagcattgttttaaaccaccagtttcctgtagaatgttatctatccacttacagatggcttttatggtctccaaagcctcctgtggattagcccatggctgactgtataaacactgtttctatcccacatcctgcttccacagcatgcttcatgcttctctgtcctttctttcagttcaaacatcctgcagaatcctccagcatttctcaacagccttccctgctctcttcccccctgccaggttgtgagtacaactccaacagccccyggatccttggagagctgcccacagaaggcagaggttcgtgtgcctttcttcccgaattaaccaccaacacgtgtgtcactgctttgctgttgaccccacgcctttgctgttgcataaaggtaggtctgccttcagccagctctcttcctgcacattccaagtgctctcctttctcccctcagctgtcatctcaagcagcctggctgctgaaggcagtgggtgggcgagcacacaccacaggagatggctgatctcccgtagcacttctgctcagggatgtgctctgccatgccagcattc

SEQ ID NO: 26209 - DNA, 600 bp, Chicken  19866894242235_1
cactacggctttcccatcccatcccctcccatctggttgccaaaccaaactcttatgttaatgagaaatgaatgcttgtgtcacagtttcctgtgttcatagatcacatatatggtcaaatgggtatatgtgtaaatcagtaacacaaggcattcagttacctgaaactagatacaaatccagaattctcccagtgacttcagtagcagctgagcttttgcaagtttcctttgtcaattttcacatcagagatttgttgttgttgctggaaagataaaggagcgtttgctttgtgcaaaygtggtggtctgtaagtacaaarccatttctgcattcattaactgggtctgttcttgtttctgtaccacaatgaaaaaatgttggtgccttaggtagtgaaatagtgcaggtaatgtgaagtgccaggtatctcacttacagattctggactacttttgctgcaaatgctgttcacatcatgcaggtacttatttttcttttgtttaggtaatttcacaagccaaagtgtgtggcatcaccaatgaatcagagacagtcaagagactacgtttggccatcacaaataaagattttactttt

SEQ ID NO: 26210 - DNA, 588 bp, Chicken  19866894242235_2
cccctcccatctggttgccaaaccaaactcttatgttaatgagaaatgaatgcttgtgtcacagtttcctgtgttcatagatcacatatatggtcaaatgggtatatgtgtaaatcagtaacacaaggcattcagttacctgaaactagatacaaatccagaattctcccagtgacttcagtagcagctgagcttttgcaagtttcctttgtcaattttcacatcagagatttgttgttgttgctggaaagataaaggagcgtttgctttgtgcaaaygtggtggtctgtaagtacaaarccatttctgcattcattaactgggtctgttcttgtttctgtaccacaatgaaaaaatgttggtgccttaggtagtgaaatagtgcaggtaatgtgaagtgccaggtatctcacttacagattctggactacttttgctgcaaatgctgttcacatcatgcaggtacttatttttcttttgtttaggtaatttcacaagccaaagtgtgtggcatcaccaatgaatcagagacagtcaagagactacgtttggccatcacaaataaagattttacttttcaaagcggga

SEQ ID NO: 26211 - DNA, 600 bp, Chicken  19866894242238_1
gtgggcgtacacgaagggttaaaagatatataagtgcttgttagaacttaataaacgccattttaccgttcatcatattggtgtcacctcggtatttggccaagccacaggcttcccaaagcaacgaacatcacggttgcctgcgaaaggcaacaatgaacaagagaccgcatgccacacttgtaaaaatctgcatggctagctggaatgtgtcttgtcttccacattgttattgccactgctaaaatgtctccctgtgctcatatccactgttttgtctccagaaacattcaggaagcrtcaatgaatatcaaggggtgctactttttctgcatggaaaaatttgatgtcacaactttgcttcattcacatttccatgtcagatgccattctgtctgctgccaactgtcatgcagcaacaaaatgtaatggaatattggtgggaaggttcagtctctactgccatatcatcaccatccgcctctgacaccatgggccaacataataaaacaggaggctttactttcagaacaaccctcatacatacacatatccagtgctgaaacagagcaagagaagtgccactttcaggtgccacta

SEQ ID NO: 26212 - DNA, 600 bp, Chicken  19866894242238_2
aatgagcaagaagaattagaggatgccatgacagaattaaatcataactgtaaaatatcaatatacacatttatctatgttaccagcagtggacaggcttttcaagaagagaaaatgtctgagaaaccagaagagacacatttcagagtgaaagcaaaccaaatgaaatgtctcatcaaatcttaatgaaataagatcactaaatatatttgtggttactaaatatattcggtaaatgcccacaattgacccaataatcatacttactattgtatttgtataggatctctgtaaagggcrctataaacaaatatttttcataatagttagaactaggatttgttcatctgtgagaaccagatgcatttggcctagtacaaagtgcctttgcatatattttcctgaaaaggatgtgactccaaaataaaatctgttttctggctattttaatatatagctgatggtagcacatgctacttagtatgccttgctcgattttatggttgaaaaccaaacataaaactaggctatagacttttcaatagggtatgcaaaatgaagttaaaaagagaaagatcttggggaggaggatcacagtac

SEQ ID NO: 26213 - DNA, 600 bp, Chicken  19866894242240_1
gtaggaatgtcctgtgctttggaaaaacatgcaagtatgtaagatgaggtgatcatcactctgtgtaggagactcaatggcagcctctttacatcctttgttattaaaaggaacttaggtattaacatagtggaaccttgtttgttgtctcaggttaagaagacctgatcagctgagactactgaggactcttgaaaagggacattaaaaaattaaacttagttccccaggaaaaaatacagaagccacatttcctgcatgctttgtatataccagaaatgcagctgtatatggaaagarccaaagattcacatgtcttagagcagaatgtgtctgagctgtctgagattggtacacagcagtcaataaaatgagaaggtacctgctgaaaatggcatgaaagcatccttcttcacgaactttcccttggaatcaaggaagtgttcaggatagaacacgtctggtttctcccactgggatttgtctcgcaggacagaggtcagcaaggggatgatgtaggttccctgcagaatgagacagtggaggtattctgtggtcagatatttccgtggaggtaatggcaataaaaaaattattctg

SEQ ID NO: 26214 - DNA, 600 bp, Chicken  19866894242242_1
tcttcggcacttcttgtagtggcagagaaaggagagctttaccaaagctactgagggaatgtgtgagtttgtatggtttggtggcagtttttcctcctctgagcctttagggtgactgtctcttgctgggttgtagatggagttgggagagttgacattcctagacctaaaagtcagcctgttaaaactgaacccattttctatttttgctgatgaacacatttggtgaaagttcctatgagaatgtctccccactgattaattaactgtaccaaaagcagtctgttaaactttgcctayataggcagtggccactgaatgcacttctttcttgcaccttgctcaggagtctggtgcatgtttggtgacaccgctgaaggagagagaaaacttgagattcaattggcttttttttttaatttacatattcatattatatatatttggtgacagctgttttctttggtgagccaacaaatgagataagtacaagtgtcttatcaatgcaactacaaataaacttcacagcttgtaccatgtgtggacctcttcctctcccacccagtggcagcagaagccaggctgatctgaccccactct

SEQ ID NO: 26215 - DNA, 600 bp, Chicken  19866894242254_1
gcctgttaaaagaaaggaagtgtagtgggtcccaagcagaccctttattccatgctgtcatgacgctccattctgaaatgatactctggtttcttcattctccttctctgccccaaactatgctggcaatattgcttgctctagtgctattacctccctctcttccactttacctcagagcctgagagcagaattccatgtaaagaacataatgtcttaatctggtaattttgatatatatcagctactctttcaacagccttgcaattatattatattctcataaaataaactataatyacagycaatttcctgatttagctactacccagtccaattgcattatatttgtctttaaacatattgtatacatttgcatttctgatatgttgttttccaaacttcttaaatgtgtactaaaactaaattgcactcagttctctacttgtaaggaaaatgtcttcttgctgtatttccatttccttcctttgttcatgcaatgctttctatgaacatttaaaactactttagaaacatgtcaagatacaccaaaatgttttaaaataactctcagatggcagtttcgtccctgctatcctg

SEQ ID NO: 26216 - DNA, 600 bp, Chicken  19866894242254_2
ttaaaagaaaggaagtgtagtgggtcccaagcagaccctttattccatgctgtcatgacgctccattctgaaatgatactctggtttcttcattctccttctctgccccaaactatgctggcaatattgcttgctctagtgctattacctccctctcttccactttacctcagagcctgagagcagaattccatgtaaagaacataatgtcttaatctggtaattttgatatatatcagctactctttcaacagccttgcaattatattatattctcataaaataaactataatyacagycaatttcctgatttagctactacccagtccaattgcattatatttgtctttaaacatattgtatacatttgcatttctgatatgttgttttccaaacttcttaaatgtgtactaaaactaaattgcactcagttctctacttgtaaggaaaatgtcttcttgctgtatttccatttccttcctttgttcatgcaatgctttctatgaacatttaaaactactttagaaacatgtcaagatacaccaaaatgttttaaaataactctcagatggcagtttcgtccctgctatcctgaggtg

SEQ ID NO: 26217 - DNA, 562 bp, Chicken  19866894242254_3
tgttttccaaacttcttaaatgtgtactaaaactaaattgcactcagttctctacttgtaaggaaaatgtcttcttgctgtatttccatttccttcctttgttcatgcaatgctttctatgaacatttaaaactactttagaaacatgtcaagatacaccaaaatgttttaaaataactctcagatggcagtttcgtccctgctatcctgaggtgatttccttatgggaaatagaagtgtttttgacttctttcagacacaagaatcagaaaatttagaaatattgtgggtttcttaatytattgaatggaaatatgaagagtgtgtccatatgctagccatctttagaccagaatgtactggtataaggtgctggctatagtggactggagatctctatttgaaacaacagtttatttgtacagtgaaaagcactaacagactcaaaagttaatatttcttattgctaatcaacttttaaaccaagaagaaaatttagttttagtgtgagttaattttgccatgaaaaaatataatttgttaacttgttaagatagaccaa

SEQ ID NO: 26218 - DNA, 599 bp, Chicken  19866894242257_1
  misc_feature (1)..(125): n is any nucleotide
nnnnnnnnnnnnnnnnnnnnnnnnnnnnnnnnnnnnnnnnnnnnnnnnnnnnnnnnnnnnnnnnnnnnnnnnnnnnnnnnnnnnnnnnnnnnnnnnnnnnnnnnnnnnnnnnnnnnnnnnnnnnntgccgtgaaaggagagaagaaataaatattgtgatgaatgaagagaacatcttacagttcatggagatgccagcataaagtattctctgattctggtgttgataatgaaagataagaagattgctgcaatatcacaccactactctgagcacgctgtatttaacatataaattaraattctgtcaataatcccaggtacagagtggcatgcacatggagatgtacattgctgaaattcaagactgcagtggtaaatgtttcataactgtatcaacatctctttctctaacgttttacgtaatgtactaccacccatgtgctgctgtttacctatggcagtatccaaatgccttgacttggggtcccatggtgcaagaagctgcagttttagctgccccaactggagctgctgccaccagactccaagaagtgggtggrggacatggaagagcaagcagtacttagacagtaagt

SEQ ID NO: 26219 - DNA, 551 bp, Chicken  19866894242257_2
actactctgagcacgctgtatttaacatataaattaraattctgtcaataatcccaggtacagagtggcatgcacatggagatgtacattgctgaaattcaagactgcagtggtaaatgtttcataactgtatcaacatctctttctctaacgttttacgtaatgtactaccacccatgtgctgctgtttacctatggcagtatccaaatgccttgacttggggtcccatggtgcaagaagctgcagttttagctgccccaactggagctgctgccaccagactccaagaagtgggtggrggacatggaagagcaagcagtacttagacagtaagtgggtcctgaaaatggagatccttcttccttcatttgagtgcatctaaaaatgcctgacacaaacaagcatgactttcccagcagctccatccctggaggagctcaaggccaggttgggtgcgccctgggcaaccagctcctggcaggggttggggtgggtgggctgtgaggtcccttccaacccaatcatcctgtcatccaatgattattccacc

SEQ ID NO: 26220 - DNA, 599 bp, Chicken  19866894242266_1
  misc_feature (1)..(36): n is any nucleotide
nnnnnnnnnnnnnnnnnnnnnnnnnnnnnnnnnnnnattcagtaggatattcaagatttccccatgtgatgcatttgtgttactaagatgattctgaagaaatcttacatgaggcttgtagcctagcacaataaaccaatacctgtaagaactggtgatggctaaacaataaacatgacacgtttaggaatgcttgtttatttatgacgttgtgcagtagtgctattatagcacaaatgagaacattacaaataattccagagttctacagtccaatgtcttttttttcctaacttcatrgaaaaaaatataagaaacagcgaggtcaaaacagtgtatatttcagctaaacttattttacatgtgtaatttttattcattttaaatttacaagattgtttacttaaatgtactgaagttttgtcttcaatggcaaagttgtgagcattgagggagaataaaatctgttacttttccacaaacacatatctcatagatgtcttataggtacctcattttgctcctgatgctggacttcccctaacagctggataccagcactctcagctggatgcctgatgctggacagctacagtact

SEQ ID NO: 26221 - DNA, 600 bp, Chicken  19866894242272_1
tagtagtgtaaagctttgtttgcatctctccaaaaagcctcagatccccccccaaaaaagtccaagtggtctctgttagcccggcgtactgcagtacatcccagccagggtgccctgcccaaattctgcctccagccacacgcaggattagcatcctcatgtgtgggagtgccacactttgacttctgaggggccgttaagtgaaatcagcctataatgactggagtactaaagtgtaatgttgatagttatgatctcggtggtggagaggggattagtgggcatgttgctgcagccccrctgcgtaaccrtgagtaacgcggggtgatgaaatgggttgggcagtgcayggtgcacagcgttcagtcccgtgccagaggtggtgagcaggcagcacgccttccatttggagctcccatcaagcagggatgggcgtcaaagggctgagagcacaaaagaacaagcggtgctggcacaaaggaaggcgagcccggcgtgcctccgttggaatggcttggcgctgccatggggtgggtgttctctccacttccttgcaggtgtggtgcagcagaraacgcagcttaggtgatacatttcttc

SEQ ID NO: 26222 - DNA, 600 bp, Chicken  19866894242272_2
agctttgtttgcatctctccaaaaagcctcagatccccccccaaaaaagtccaagtggtctctgttagcccggcgtactgcagtacatcccagccagggtgccctgcccaaattctgcctccagccacacgcaggattagcatcctcatgtgtgggagtgccacactttgacttctgaggggccgttaagtgaaatcagcctataatgactggagtactaaagtgtaatgttgatagttatgatctcggtggtggagaggggattagtgggcatgttgctgcagccccrctgcgtaaccrtgagtaacgcggggtgatgaaatgggttgggcagtgcayggtgcacagcgttcagtcccgtgccagaggtggtgagcaggcagcacgccttccatttggagctcccatcaagcagggatgggcgtcaaagggctgagagcacaaaagaacaagcggtgctggcacaaaggaaggcgagcccggcgtgcctccgttggaatggcttggcgctgccatggggtgggtgttctctccacttccttgcaggtgtggtgcagcagaraacgcagcttaggtgatacatttcttccaggtgagcaa

SEQ ID NO: 26223 - DNA, 600 bp, Chicken  19866894242272_3
cccaaaaaagtccaagtggtctctgttagcccggcgtactgcagtacatcccagccagggtgccctgcccaaattctgcctccagccacacgcaggattagcatcctcatgtgtgggagtgccacactttgacttctgaggggccgttaagtgaaatcagcctataatgactggagtactaaagtgtaatgttgatagttatgatctcggtggtggagaggggattagtgggcatgttgctgcagccccrctgcgtaaccrtgagtaacgcggggtgatgaaatgggttgggcagtgcayggtgcacagcgttcagtcccgtgccagaggtggtgagcaggcagcacgccttccatttggagctcccatcaagcagggatgggcgtcaaagggctgagagcacaaaagaacaagcggtgctggcacaaaggaaggcgagcccggcgtgcctccgttggaatggcttggcgctgccatggggtgggtgttctctccacttccttgcaggtgtggtgcagcagaraacgcagcttaggtgatacatttcttccaggtgagcaaggctgggtgcatctcatgcccaaaaatggtacggcggtg

SEQ ID NO: 26224 - DNA, 600 bp, Chicken  19866894242272_4
attagtgggcatgttgctgcagccccrctgcgtaaccrtgagtaacgcggggtgatgaaatgggttgggcagtgcayggtgcacagcgttcagtcccgtgccagaggtggtgagcaggcagcacgccttccatttggagctcccatcaagcagggatgggcgtcaaagggctgagagcacaaaagaacaagcggtgctggcacaaaggaaggcgagcccggcgtgcctccgttggaatggcttggcgctgccatggggtgggtgttctctccacttccttgcaggtgtggtgcagcagaraacgcagcttaggtgatacatttcttccaggtgagcaaggctgggtgcatctcatgcccaaaaatggtacggcggtgccttggcgtgcaaggaaaagcaactgcagtcatgtacgtccatgagcatttttcagccattgttcaaatacacgctgcttcttcctgttgtagacttcagcacttgagctctttgcttttgcttcgtctccctacgaactgatgggaaggcagggctgaaagattcyaagcccatacmtatcccatcgttaaatgttatctgaggaaggtttgctcccttgag

SEQ ID NO: 26225 - DNA, 600 bp, Chicken  19866894242272_5
gcgctgccatggggtgggtgttctctccacttccttgcaggtgtggtgcagcagaraacgcagcttaggtgatacatttcttccaggtgagcaaggctgggtgcatctcatgcccaaaaatggtacggcggtgccttggcgtgcaaggaaaagcaactgcagtcatgtacgtccatgagcatttttcagccattgttcaaatacacgctgcttcttcctgttgtagacttcagcacttgagctctttgcttttgcttcgtctccctacgaactgatgggaaggcagggctgaaagattcyaagcccatacmtatcccatcgttaaatgttatctgaggaaggtttgctcccttgaggaagggtgttcttaatgaaagaaagagtgcagtggatgccatcaggcatcaytaaygatcagctgccctatttgcctttctgccttgggcaaaagcatatttaaggccgtatgtttatatctagcttattttgcaagcatcttgtctgttgtctaaataatactgtactgcattcattaacgaaactcaccgagcaatttctgcaaagccagatgtctctaaaactttctttcctgaacagctt

SEQ ID NO: 26226 - DNA, 600 bp, Chicken  19866894242272_6
gggtgggtgttctctccacttccttgcaggtgtggtgcagcagaraacgcagcttaggtgatacatttcttccaggtgagcaaggctgggtgcatctcatgcccaaaaatggtacggcggtgccttggcgtgcaaggaaaagcaactgcagtcatgtacgtccatgagcatttttcagccattgttcaaatacacgctgcttcttcctgttgtagacttcagcacttgagctctttgcttttgcttcgtctccctacgaactgatgggaaggcagggctgaaagattcyaagcccatacmtatcccatcgttaaatgttatctgaggaaggtttgctcccttgaggaagggtgttcttaatgaaagaaagagtgcagtggatgccatcaggcatcaytaaygatcagctgccctatttgcctttctgccttgggcaaaagcatatttaaggccgtatgtttatatctagcttattttgcaagcatcttgtctgttgtctaaataatactgtactgcattcattaacgaaactcaccgagcaatttctgcaaagccagatgtctctaaaactttctttcctgaacagcttttgtgaacctg

SEQ ID NO: 26227 - DNA, 600 bp, Chicken  19866894242272_7
catgcccaaaaatggtacggcggtgccttggcgtgcaaggaaaagcaactgcagtcatgtacgtccatgagcatttttcagccattgttcaaatacacgctgcttcttcctgttgtagacttcagcacttgagctctttgcttttgcttcgtctccctacgaactgatgggaaggcagggctgaaagattcyaagcccatacmtatcccatcgttaaatgttatctgaggaaggtttgctcccttgaggaagggtgttcttaatgaaagaaagagtgcagtggatgccatcaggcatcaytaaygatcagctgccctatttgcctttctgccttgggcaaaagcatatttaaggccgtatgtttatatctagcttattttgcaagcatcttgtctgttgtctaaataatactgtactgcattcattaacgaaactcaccgagcaatttctgcaaagccagatgtctctaaaactttctttcctgaacagcttttgtgaacctgatgggcacttctctccttctgacattcactttgacgatgctgagggaggagaatgaggctcaggttggctggtgtaggtatgcaggagtaagtttgg

SEQ ID NO: 26228 - DNA, 600 bp, Chicken  19866894242272_8
cccaaaaatggtacggcggtgccttggcgtgcaaggaaaagcaactgcagtcatgtacgtccatgagcatttttcagccattgttcaaatacacgctgcttcttcctgttgtagacttcagcacttgagctctttgcttttgcttcgtctccctacgaactgatgggaaggcagggctgaaagattcyaagcccatacmtatcccatcgttaaatgttatctgaggaaggtttgctcccttgaggaagggtgttcttaatgaaagaaagagtgcagtggatgccatcaggcatcaytaaygatcagctgccctatttgcctttctgccttgggcaaaagcatatttaaggccgtatgtttatatctagcttattttgcaagcatcttgtctgttgtctaaataatactgtactgcattcattaacgaaactcaccgagcaatttctgcaaagccagatgtctctaaaactttctttcctgaacagcttttgtgaacctgatgggcacttctctccttctgacattcactttgacgatgctgagggaggagaatgaggctcaggttggctggtgtaggtatgcaggagtaagtttggaagc

SEQ ID NO: 26229 - DNA, 600 bp, Chicken  19866894242288_1
actctgtgctgtgatcactatagcaggctgttcacaatagcctcctgtctgctgagaactagatggagatgctaaatctacttcacatagcctagacatggacagtaaatgcactgctaaagctcagcccaagctcaccttagctacctaggaataaaaagttttccctagcaaccagcaagaatccagtgccatcttttgctgtccacaagcaagcagtagtggagaggtgaggtgggacttttgtcagccattgtgtgtataagagcacgatgcatgcagcaaacttggccttcagtractcaggctttaaactgcaaaaaatattaaatacaaacacaccacacagtctgctctatatcagtcagaaaaacagattgtaatgaagatgaaatcttcgttttgactgtcaaagatgcagaagctgtactgaaacagatttggtggcaaaaggcacaccagattcccaacagaggacaccaattagcatacagtcacacagccatcactgtgaaaagcattgtggcacattagaaaaatcttgctcatcgctttagggagcttagtgtgagcatggccaaggagagctacagatgagtc

SEQ ID NO: 26230 - DNA, 600 bp, Chicken  19866894242292_1
cccccaaggctgcaaacaaactgctgtgccaaaactgaacatcacagcacgccccgcatggcaccggcagagcgaaatcgggcacagccccagagatgagcaactcaaagcaggaggagagagggaagggctgggtgtgaagcacccactgcagcaccgagcccctgagcctttgggatgccatgagtttgcaaggggagcgtggccccatcagtgggtttatggtggtacacaccatcctgggggggttatcctggttggggataggagttgcgcagccagagttccccatcctagtgstggtccctgcactgggagtgaggcagcaccaacacggccctcgctgtgtgcccactggagcaatccttcctaacaagcacgcggctcttctgcaaacaccgatttcacctctcgacaaatacgaatttatttgcacaagtgacttcgagcctggattggcaactctgacacgaatgtctgcacagtgcaatggatcctctccttgctggttgctatggcactgggccgctttagcctctgtctataaacattcgccgtggaggggatgtggaaacttatctaaaaataaaatactatgcc

SEQ ID NO: 26231 - DNA, 600 bp, Chicken  19866894242296_1
tatggtttggtgacacagtctaaatgaggaaactgaaggtcagagaacaattaatcaccttctcactcgtaacttcacacgaagatattaggtatatttgggatactttgacatctgaggatgaagacaacgctttgctgaatttaaaaggtgcctcagagggtagcggctttgttttcattgaaatcagctgcagcctcagggtcccgcgtggtgtaatgaaactgtcctctcccagcgagcagctgtcagtgcctggagctgctgaagactattggtgacatgctgaagactattgcrtggcaccgctctgtgaaggcttacatgaatgcagaatagcctcagttcagctaactggagacacagcatcagaggggtggccttaggctgagcagttggcaattcttyccccgctttttccataaaacagagcgaacattatcatagaatcatagagtggctcaggttggaagggaccttacagatcatccagccctaaccccccccaccggtgggggttatatatattatacccttacagatcaatcatccagccccccaccagcttgggctgcccaggccccatccaacctggccttg

SEQ ID NO: 26232 - DNA, 600 bp, Chicken  19866894242296_2
tgacatctgaggatgaagacaacgctttgctgaatttaaaaggtgcctcagagggtagcggctttgttttcattgaaatcagctgcagcctcagggtcccgcgtggtgtaatgaaactgtcctctcccagcgagcagctgtcagtgcctggagctgctgaagactattggtgacatgctgaagactattgcrtggcaccgctctgtgaaggcttacatgaatgcagaatagcctcagttcagctaactggagacacagcatcagaggggtggccttaggctgagcagttggcaattcttyccccgctttttccataaaacagagcgaacattatcatagaatcatagagtggctcaggttggaagggaccttacagatcatccagccctaaccccccccaccggtgggggttatatatattatacccttacagatcaatcatccagccccccaccagcttgggctgcccaggccccatccaacctggccttgagcacccatagcttctctgggcagctgtgccagggcctcaccccctctgagtaaagaatttcttcctaacatctaatctaaatatctcctctattagtttaaagacat

SEQ ID NO: 26233 - DNA, 599 bp, Chicken  19866894242297_1
  misc_feature (1)..(156): n is any nucleotide
nnnnnnnnnnnnnnnnnnnnnnnnnnnnnnnnnnnnnnnnnnnnnnnnnnnnnnnnnnnnnnnnnnnnnnnnnnnnnnnnnnnnnnnnnnnnnnnnnnnnnnnnnnnnnnnnnnnnnnnnnnnnnnnnnnnnnnnnnnnnnnnnnnnnnnnnnnnncattttacctgtgtgttcatttcttttgtatgggctccttatcttagaaaccctgaaggagtaaattcatatttaaaagcaaaagttaagaatttgcaaaagaaaaaaaaaacaagtactttttaaaatgcctttggtattttsgcaattaactggttccaagtagaatagggtagttattttattcttattacttactggcttcagcagttagtataagttgatggggagagaagacactcatttagaaagagtgggtgaagaggaatatcctgtcacttccctcagaagaaactggagcaggtggcattgttggacttgctgcttgctacagatgacttctcataggacacttgatttcctccttctgatgaattatcattaacgttttggatgggctgttagtttacaactgttagtcgtctactgcacatgaaaatgct

SEQ ID NO: 26234 - DNA, 600 bp, Chicken  19866894242298_1
ctgctccatgaaatgtatgaccactggatataaatatttcatttttaaaaacatgactggatacatccaggtccaattcccaacactgctaagaactgagcaactacgtctgaagagattaaaagccatgtgcaaggaatctggataaaatatcagaatgtaagtatgggatttatccatgtaggtatccatgtttgtaccatgccatgttttgatagtaacatctcagtaattccttcctaaaactgcatatttaatcttctttgctttaaagagaatgtagatgctcatcttaggaakggatgcctacattgagggcatttaagtttagatgagacccaatcccttggtgtttgttggtcaccaatattgcggaatgcaagatctgagtcatcacaccgaacactgaaaacaaaatgtgttttctgagcactgtctattttattcactaaaacatgtaggagatcctttaaaaaagtgttgtgtcatatgtttctgtattattaaccatattattattaaccatattatggtgaatctgtgcaaagtggtgctgtctgcaaaaccttaattctaccttttttttttttttaactttta

SEQ ID NO: 26235 - DNA, 600 bp, Chicken  19866894242298_2
gcagagaggggaaagcttcccgtcttgttttcaattcagacacagaaaaccttaaacagtgctagaccaccccaaaggagccattcctgaaagctttgctttaaatgtttcttatgctgtgctgtaaaaagcaactgccaaccccttggcaggcttggtgttcagcagtgaacttgagctggggaggggcagatcatttaatagtgacaccccataatttgttgtcactgaagtccatatttatcctattaataaaagcgtggcattaatgttttgtgtaaatgaggataatttattaastgaaagaaaaagaaatcaaggaaaacagattgttccagagagcaaagaaatatatcactgcaaacayatataatgaatgcaatttataaagcacttttaattaaaagtttctaacttgaattatttcatttgcaaaacatggccatgttttagtaagccaaacttctcaattgatctttagacccctttcaagagaaaatgattattatgcttatatctgactatttatcattaagaaattgtttgtttatttataatttacaaaagtgctgtaagttcagagcttggaggctgtgtttt

SEQ ID NO: 26236 - DNA, 600 bp, Chicken  19866894242298_3
caccccaaaggagccattcctgaaagctttgctttaaatgtttcttatgctgtgctgtaaaaagcaactgccaaccccttggcaggcttggtgttcagcagtgaacttgagctggggaggggcagatcatttaatagtgacaccccataatttgttgtcactgaagtccatatttatcctattaataaaagcgtggcattaatgttttgtgtaaatgaggataatttattaastgaaagaaaaagaaatcaaggaaaacagattgttccagagagcaaagaaatatatcactgcaaacayatataatgaatgcaatttataaagcacttttaattaaaagtttctaacttgaattatttcatttgcaaaacatggccatgttttagtaagccaaacttctcaattgatctttagacccctttcaagagaaaatgattattatgcttatatctgactatttatcattaagaaattgtttgtttatttataatttacaaaagtgctgtaagttcagagcttggaggctgtgtttttgttaatcagtgtttctcctgaattcatttccagctacctagcctttttaataacaatatttttgct

SEQ ID NO: 26237 - DNA, 600 bp, Chicken  19866894242299_1
tcttaaaggatggatgcaggcagacaggcttttacctcagctaagctcctcttaacgtcccccagtgccatgagaacatcttttgtagggatgacacctgtaaagaaggagaaagagatcagtgctgctttttcagctcaagttaaccgagttagatgtactcattgtgtgtacactgtgaaatgcccaacaggatggaagcaggggaacacatgtttttgttcattggtactttaggttgagactgaaaattcaaggactataacaccaagagtacttccaaatgttcttcaaagaggyaaaaaaatccaggcatgaactgatactataggcayctaggtaccctcccagtagccacagaagctctcaggatctgtacctgctctgtgagcagcaacaccctaagtcatgaaggcaggtgcttatcttgcccagtcaagccccccacccttgccagctcaacctgatcctgaactgcagtacttaagatgtttccacagaaatccatgctcacytattacatcctttagtaagtgtgctctgttctgcagggctctttggaaaggtagtgtccctgacaaaacagcagattctgcaaga

SEQ ID NO: 26238 - DNA, 600 bp, Chicken  19866894242299_2
ctcagctaagctcctcttaacgtcccccagtgccatgagaacatcttttgtagggatgacacctgtaaagaaggagaaagagatcagtgctgctttttcagctcaagttaaccgagttagatgtactcattgtgtgtacactgtgaaatgcccaacaggatggaagcaggggaacacatgtttttgttcattggtactttaggttgagactgaaaattcaaggactataacaccaagagtacttccaaatgttcttcaaagaggaaaaaaaatccaggcatgaactgatactataggcayctaggtaccctcccagtagccacagaagctctcaggatctgtacctgctctgtgagcagcaacaccctaagtcatgaaggcaggtgcttatcttgcccagtcaagccccccacccttgccagctcaacctgatcctgaactgcagtacttaagatgtttccacagaaatccatgctcacytattacatcctttagtaagtgtgctctgttctgcagggctctttggaaaggtagtgtccctgacaaaacagcagattctgcaagagatgtgctgtaatagctccactccgagcaggagct

SEQ ID NO: 26239 - DNA, 600 bp, Chicken  19866894242299_3
tttttgttcattggtactttaggttgagactgaaaattcaaggactataacaccaagagtacttccaaatgttcttcaaagaggaaaaaaaatccaggcatgaactgatactataggcayctaggtaccctcccagtagccacagaagctctcaggatctgtacctgctctgtgagcagcaacaccctaagtcatgaaggcaggtgcttatcttgcccagtcaagccccccacccttgccagctcaacctgatcctgaactgcagtacttaagatgtttccacagaaatccatgctcacytattacatcctttagtaagtgtgctctgttctgcagggctctttggaaaggtagtgtccctgacaaaacagcagattctgcaagagatgtgctgtaatagctccactccgagcaggagctttagccagggagtcaccagcccacaccaagtgagcctctcctgaaccctccttccataacagttcctgggatgttctccaaactggatgagcatgaacagacacagaggatttagagatggaggcccaattcaacttatatttgttcagcagtaaaaagaggaacctaacaaaagcactt

SEQ ID NO: 26240 - DNA, 600 bp, Chicken  19866894242299_4
tctccttatcccttggcttttccctggtactctgtactgaaccaggcatcaaacaagaaacgttttaagaatctccatgctaatttaagctacagcacttgcaatgcagattctgcctcacagtcccaaaaatccaaactatacaggcttcagatacagaaaccagaaaacaaaagggacaggcagagggtaggtgagctgaacaaactaaatgaagggtaggaaacaaactgtgtcaacaatggtggaaaggagaagagcttgattccagtttcagccatgcaaagtggtaatgggagwaagggaakgaagcaatctttgtgttaaatatgtatgtcgacaagtgtcccttagaacaacaaggaaaaaagcacaaattactcattgggaaatatgttttgaaacatgaaatcaagtagaagaacagttcaggcctgcctatcccaggacrctatcttctttcagcttggcagaactgaggattcaacagtaaaggcawaattttatcaagagacatcagcacatcagcttttaagctcttacccttccagtggtttaaacaacacaagaccaaaagaagaaagctaccatgtactgcaa

SEQ ID NO: 26241 - DNA, 600 bp, Chicken  19866894242299_5
tcccttggcttttccctggtactctgtactgaaccaggcatcaaacaagaaacgttttaagaatctccatgctaatttaagctacagcacttgcaatgcagattctgcctcacagtcccaaaaatccaaactatacaggcttcagatacagaaaccagaaaacaaaagggacaggcagagggtaggtgagctgaacaaactaaatgaagggtaggaaacaaactgtgtcaacaatggtggaaaggagaagagcttgattccagtttcagccatgcaaagtggtaatgggagwaagggaakgaagcaatctttgtgttaaatatgtatgtcgacaagtgtcccttagaacaacaaggaaaaaagcacaaattactcattgggaaatatgttttgaaacatgaaatcaagtagaagaacagttcaggcctgcctatcccaggacrctatcttctttcagcttggcagaactgaggattcaacagtaaaggcawaattttatcaagagacatcagcacatcagcttttaagctcttacccttccagtggtttaaacaacacaagaccaaaagaagaaagctaccatgtactgcaaaattaata

SEQ ID NO: 26242 - DNA, 600 bp, Chicken  19866894242299_6
agatacagaaaccagaaaacaaaagggacaggcagagggtaggtgagctgaacaaactaaatgaagggtaggaaacaaactgtgtcaacaatggtggaaaggagaagagcttgattccagtttcagccatgcaaagtggtaatgggagwaagggaakgaagcaatctttgtgttaaatatgtatgtcgacaagtgtcccttagaacaacaaggaaaaaagcacaaattactcattgggaaatatgttttgaaacatgaaatcaagtagaagaacagttcaggcctgcctatcccaggacrctatcttctttcagcttggcagaactgaggattcaacagtaaaggcawaattttatcaagagacatcagcacatcagcttttaagctcttacccttccagtggtttaaacaacacaagaccaaaagaagaaagctaccatgtactgcaaaattaataagcatttaaactccacagagatgctagaaagagtaattgtggatgcaaaagaaacagagcagcaggaatatggttttcaaggactggtcttctgagttgcaattgtgtactgcaacagagatgcttcaaactctccaaagggc

SEQ ID NO: 26243 - DNA, 600 bp, Chicken  19866894242299_7
tgaacaaactaaatgaagggtaggaaacaaactgtgtcaacaatggtggaaaggagaagagcttgattccagtttcagccatgcaaagtggtaatgggagwaagggaakgaagcaatctttgtgttaaatatgtatgtcgacaagtgtcccttagaacaacaaggaaaaaagcacaaattactcattgggaaatatgttttgaaacatgaaatcaagtagaagaacagttcaggcctgcctatcccaggacrctatcttctttcagcttggcagaactgaggattcaacagtaaaggcawaattttatcaagagacatcagcacatcagcttttaagctcttacccttccagtggtttaaacaacacaagaccaaaagaagaaagctaccatgtactgcaaaattaataagcatttaaactccacagagatgctagaaagagtaattgtggatgcaaaagaaacagagcagcaggaatatggttttcaaggactggtcttctgagttgcaattgtgtactgcaacagagatgcttcaaactctccaaagggcaaaccagtcaaaaggaaagaggccagcttttaatctacctttaaagca

SEQ ID NO: 26244 - DNA, 600 bp, Chicken  19866894242299_8
aaaattttacattcgcatttttgctagtggaaataggtcagtggcagagtcaccctgcagtaacaaaatcagctgctctgcccatggctggagctgcagcaagcagaaacgcagacatgcaaggacagaatatggttccctgatgaaatattttggtctcgggctgtcaggcttataatcattttcgagaattatgaaaggtaccttgacctcatgcctttcacaactggtttcaaagcgcctgataaaaggcctaccagaggtgaatgagccagagatacacaaggggctctggactcrtgaagtaactgtggctttatggggatggatggacaggcattggattagcaragcatgactggttaacagacgcagataacgcataagataaggggttgggaaaaagaggcacttaaggaagatttagtgacagcttcttgatactgaaccattcacatggcaaatagggagtcctttttcccctgagccatcagagaaatgattctatatcctgaaaggaaaggaagtaaaataaaaaagaatagagggaaggaggatcagatctcaattctatcacattgcctgcaaataagaggtgca

SEQ ID NO: 26245 - DNA, 600 bp, Chicken  19866894242299_9
accctgcagtaacaaaatcagctgctctgcccatggctggagctgcagcaagcagaaacgcagacatgcaaggacagaatatggttccctgatgaaatattttggtctcgggctgtcaggcttataatcattttcgagaattatgaaaggtaccttgacctcatgcctttcacaactggtttcaaagcgcctgataaaaggcctaccagaggtgaatgagccagagatacacaaggggctctggactcrtgaagtaactgtggctttatggggatggatggacaggcattggattagcaragcatgactggttaacagacgcagataacgcataagataaggggttgggaaaaagaggcacttaaggaagatttagtgacagcttcttgatactgaaccattcacatggcaaatagggagtcctttttcccctgagccatcagagaaatgattctatatcctgaaaggaaaggaagtaaaataaaaaagaatagagggaaggaggatcagatctcaattctatcacattgcctgcaaataagaggtgcaatgctaaaggctctaacgtctcctgataaaccaggtgagcactggcacaaa

SEQ ID NO: 26246 - DNA, 583 bp, Chicken  19866894242300_1
aaaaacaaacaaaaacaacaaaaaactcactctgaacttgtcatgaaagatgttcttctggtcgtttaatgagagaacagcacttcacagagggggtctcacaaagatctccatcagatcctttgtttttctgctaaaaaacaagcaaacaaatctttattcctccataggatggcattattttcaattgctgaagtggtagctgtgatgtccagagggcagaaatggagcccccaaggctctgcatgtacttctgtgttaatctgagaacacagaaattccaaacaaaagggaagtttyctgggatctaaacgttccaatctcattattgaaaaataaattgtattggcttttttactgtgtcttattacgtgatcataatctcttatttttgtcactctgcttctgttttgcttggtggaaagcagacctctgagaatttcctcccaaggagcagggataccttctgactgaacaccctctgtaaaaacaccaagtcatttaaatgaacaggatttgaatctcctttcagcttaactgtttcctatttcccacaagaggctgtgtcattgagctacttaag

SEQ ID NO: 26247 - DNA, 600 bp, Chicken  19866894242305_1
ttgcttctgtagcaggagaaaacatgaatttgattaaaacagcaaaaatgcagcaggaaaatcttcctcctccgcagccagtttgggaatggaaacatacctagttctcatggtccatttgtttttctgttattgctctggtcagttctagcaaaattctgtcctttaaaggaaaaagatctcacagcttcggtgggccactgaagaatgcctcttctcaaggagtagtgatctacatcgagaacaagtggaaagacaataagggaggctttatggggtcgtgaaggactgactttgccyttaaaatctgccttttgactcatattgacatgggctatgatactgagtttacaatgactgtttgtcttctttcgtttattactcacagaaacaagtctgaatagctgtcataaaccacaaggaacgcttccyggctttgtcacagttgcagagtttctgaaacctgaagataattatttgtgccctgtaaaatttcatttcagatactcaaggtcccataaaaggcacaagtaaatggaaattgagccctcacagagattgtcataaatatcataaaatcatagaatcagagaaatgctt

SEQ ID NO: 26248 - DNA, 600 bp, Chicken  19866894242305_2
ttgctctggtcagttctagcaaaattctgtcctttaaaggaaaaagatctcacagcttcggtgggccactgaagaatgcctcttctcaaggagtagtgatctacatcgagaacaagtggaaagacaataagggaggctttatggggtcgtgaaggactgactttgccyttaaaatctgccttttgactcatattgacatgggctatgatactgagtttacaatgactgtttgtcttctttcgtttattactcacagaaacaagtctgaatagctgtcataaaccacaaggaacgcttccyggctttgtcacagttgcagagtttctgaaacctgaagataattatttgtgccctgtaaaatttcatttcagatactcaaggtcccataaaaggcacaagtaaatggaaattgagccctcacagagattgtcataaatatcataaaatcatagaatcagagaaatgcttgagttggaagggacattaaagcccacccaattcccactccctgccatgggaaaggcatgcccccagatcagcctgcccagggccccatcatctatcctggccatgaacacttctggggatgggatatccaca

SEQ ID NO: 26249 - DNA, 600 bp, Chicken  19866894242310_1
gcagaagtgataggacaggctatggagcacatcacaaaacctgagggcactggggaacagcaacaagaatttttcagactgactgtatgagaatcctgggattagcctaaatacctagcatggagaatttcacatcaatctaactttaacattccccccataatagcagcatatttctaattgcggggcagaaaattcactgggaagcttgaactcataaatgaacgtgtaaagatgagttcttggcttttatctctcctccaagcctggataagaactggtgctatggatagagctcamgtgcacaccttgagagccgcacatccagctgctctcttgcacatggagttaaactcagctgcccggacagcaacaacccacctcacaccaaagttttcagcttccacaggaaaatgtatgcccatggatttgaccagctccacctgggtttgagagtattgccactttaaaaggagtatagaggactactcattcctgtgtgtgtggtagatagaacatgcagaactgctctgtctaccattagtgcagcccaaggtggctttcaaactccctgtgacatgacgaggaggcacagaagtg

SEQ ID NO: 26250 - DNA, 600 bp, Chicken  19866894242319_1
ttcctgtagccattttaatgccatcatttactatttttacagagatccttttcacgcctcacttcgggcgctatttttgcttctgtctcgcttccatgagaaatctgcagtgagactatttaaatctgatgcagctttgaaatgctctttttaacgtacgctcctctcttgccagagcagaagcacaactagaaagagaatcttttattagtgcagtgagtctaccacattatgcgagtcgcacagcctctgattatattataaatataagagctgaatatccctcttgcttaaattatmagctgtttggttttcatagactcctcaacccgtcaggaaaatatttgccttttgtttgcctttagaatcaaggttgctggtggtaattaggattacaatgttagcggggggccatggcggggaggttgccacagtcctgccccactcagcatctggtgtgagggyggaaaggagtgagagcgcacggggtgagtgagccccatgtaagagcatctyggtgctctgaaggggatggcagaggggggagacatctgctcctaaacaccaaagcacatctcctcacggtcctgctgcctgcag

SEQ ID NO: 26251 - DNA, 600 bp, Chicken  19866894242319_2
ctcttgccagagcagaagcacaactagaaagagaatcttttattagtgcagtgagtctaccacattatgcgagtcgcacagcctctgattatattataaatataagagctgaatatccctcttgcttaaattatmagctgtttggttttcatagactcctcaacccgtcaggaaaatatttgccttttgtttgcctttagaatcaaggttgctggtggtaattaggattacaatgttagcggggggccatggcggggaggttgccacagtcctgccccactcagcatctggtgtgagggyggaaaggagtgagagcgcacggggtgagtgagccccatgtaagagcatctyggtgctctgaaggggatggcagaggggggagacatctgctcctaaacaccaaagcacatctcctcacggtcctgctgcctgcaggctaagttagcacattcatacaatgtcttacagcaagggtgcggtgcgtctgaaacagccctcgattaggatgaaaattgttatgcccactttgatcagatgcgacttcaaagaaggcagaacaaccacaggacgtgccccttgtacttacctatctcacagttc

SEQ ID NO: 26252 - DNA, 600 bp, Chicken  19866894242319_3
tgagtctaccacattatgcgagtcgcacagcctctgattatattataaatataagagctgaatatccctcttgcttaaattatmagctgtttggttttcatagactcctcaacccgtcaggaaaatatttgccttttgtttgcctttagaatcaaggttgctggtggtaattaggattacaatgttagcggggggccatggcggggaggttgccacagtcctgccccactcagcatctggtgtgagggyggaaaggagtgagagcgcacggggtgagtgagccccatgtaagagcatctyggtgctctgaaggggatggcagaggggggagacatctgctcctaaacaccaaagcacatctcctcacggtcctgctgcctgcaggctaagttagcacattcatacaatgtcttacagcaagggtgcggtgcgtctgaaacagccctcgattaggatgaaaattgttatgcccactttgatcagatgcgacttcaaagaaggcagaacaaccacaggacgtgccccttgtacttacctatctcacagttcctgcctccataaccaggtgggcacatgcactcataggagcttactccgtcc

SEQ ID NO: 26253 - DNA, 600 bp, Chicken  19866894242321_1
tttatccactcagattttcatcattgcagcttagatttgttttatgccttgatttaacttactctttcagtaaatttatcctgacaatgttcatactgtagttagtgtgtgtaccaatgataacagctgcttcgaatactatactgacaggtaatataaaaagaagggaagctaactgcaatgctttctcaaggaatgagaaataatttttatgtattataaatacaaagggagaggtggaattaaataagctgcagcaataaagaggagaattaattccaagcttttacagatggctgsagctgtattacttaacatgcatgtcagctgtaggagaatgtttaaaaagggacggagattcagctagacataagaaatctcaaagctttccaaattgaccaaattcagcactggagtaaaacaccaaagactgtgaggttataagaagagtaaatttagcacattatgctttaggtctttttaatatttttcctaaaacaaaattgaaaaggaaatgcttgttctctactatgcttctgttacagagaggttaccaataacgtgctaacatgaataatagaacaacgccaacaacaattt

SEQ ID NO: 26254 - DNA, 600 bp, Chicken  19866894242323_1
agtagagaagcccttaaagctgctgttaataacaagattagttttatttgaatgtttgtggtttggaacttctaatattttcatctgtgtagggaaggcagaacttagtttggaaaaaaaatagtataaaataaattttgaagaaatcagtgaatgttggtttgcagtgagtagccaaataaagggaggagaggacagaagaaagattaaaaaatggctttgccttctaagttcaaatgtttcactttagccttctgtcacatttctgtcacctgattttttgttttacttctttctgaygatgaataaaaattatggctggtaacacatggccactttggctttgctttgatacwtgatcagttttgtcagagatgtgtacaacacacccatttcggccttcattatcagttcartagagagggctctagattacagaagaaataaacaggggaaatatcataataccttcaaatatgttaatgttttttgacttggctgtgggaataatcctctatcaatgatgaagattacaggaagtaacaggctgcaaacaccacgaggaagatttggttaaaataaattataccagtagggaaa

SEQ ID NO: 26255 - DNA, 600 bp, Chicken  19866894242323_2
tgtggtttggaacttctaatattttcatctgtgtagggaaggcagaacttagtttggaaaaaaaatagtataaaataaattttgaagaaatcagtgaatgttggtttgcagtgagtagccaaataaagggaggagaggacagaagaaagattaaaaaatggctttgccttctaagttcaaatgtttcactttagccttctgtcacatttctgtcacctgattttttgttttacttctttctgaygatgaataaaaattatggctggtaacacatggccactttggctttgctttgatacwtgatcagttttgtcagagatgtgtacaacacacccatttcggccttcattatcagttcartagagagggctctagattacagaagaaataaacaggggaaatatcataataccttcaaatatgttaatgttttttgacttggctgtgggaataatcctctatcaatgatgaagattacaggaagtaacaggctgcaaacaccacgaggaagatttggttaaaataaattataccagtagggaaagtgaataattgaagttgaatatttaggtaccttatagatttctcagtagcagagaa

SEQ ID NO: 26256 - DNA, 600 bp, Chicken  19866894242323_3
aaaaatagtataaaataaattttgaagaaatcagtgaatgttggtttgcagtgagtagccaaataaagggaggagaggacagaagaaagattaaaaaatggctttgccttctaagttcaaatgtttcactttagccttctgtcacatttctgtcacctgattttttgttttacttctttctgaygatgaataaaaattatggctggtaacacatggccactttggctttgctttgatacwtgatcagttttgtcagagatgtgtacaacacacccatttcggccttcattatcagttcartagagagggctctagattacagaagaaataaacaggggaaatatcataataccttcaaatatgttaatgttttttgacttggctgtgggaataatcctctatcaatgatgaagattacaggaagtaacaggctgcaaacaccacgaggaagatttggttaaaataaattataccagtagggaaagtgaataattgaagttgaatatttaggtaccttatagatttctcagtagcagagaaaggtattaaaaaatacaccaggcacactgttttttgacgttgagggaaaaaagtaacata

SEQ ID NO: 26257 - DNA, 600 bp, Chicken  19866894242326_1
agtgcctttttaggcaccgatccccttattgtttgtagattaatgctgcgagctggtccagttttaatcagtggtatgtttgacctagctggctctgggactgatctggaaatgaagaattccattcctttttgaccatgctaattgatgaaataaaaattctccagactggctcttaggatacccagagtttacaggtttcttaggcttgtgcaagctggtcttgcaaaagccattggattggccaatagatttttggaggcagtctaactgtttatgtatttaacgcacacattgtgycagtgaaagaatctacaaaaacaaggctcattcctgtgcatgtatgttgatagaagtcaaagagttgctgtgggctggctcgtttcataagcattgcccatcaaacgcaataacctatttccatgagcaaatgtttcttttgataagtaaatcacagctatgcttccttcaatagtgcrtttttgggggatgtatttctaaatatrttttcgtatcagaactgctgttagatcatgtatgatgtaccattartaatcatacataacatgcctgttctccttattgctgagcttccatgta

SEQ ID NO: 26258 - DNA, 600 bp, Chicken  19866894242326_2
gatacccagagtttacaggtttcttaggcttgtgcaagctggtcttgcaaaagccattggattggccaatagatttttggaggcagtctaactgtttatgtatttaacgcacacattgtgycagtgaaagaatctacaaaaacaaggctcattcctgtgcatgtatgttgatagaagtcaaagagttgctgtgggctggctcgtttcataagcattgcccatcaaacgcaataacctatttccatgagcaaatgtttcttttgataagtaaatcacagctatgcttccttcaatagtgcrtttttgggggatgtatttctaaatatrttttcgtatcagaactgctgttagatcatgtatgatgtaccattartaatcatacataacatgcctgttctccttattgctgagcttccatgtacatactcgtgtggttcattgctgctttgggactgtcatagcagatgctgctgctttttctattgccgtaaacaagctgttgtgactgatacttcttttcaccatatgtcctgaacactcccagttcatagttatatgtcatttccaggatgctttgtagggtgtgtatgcctccacccc

SEQ ID NO: 26259 - DNA, 600 bp, Chicken  19866894242326_3
gcttgtgcaagctggtcttgcaaaagccattggattggccaatagatttttggaggcagtctaactgtttatgtatttaacgcacacattgtgycagtgaaagaatctacaaaaacaaggctcattcctgtgcatgtatgttgatagaagtcaaagagttgctgtgggctggctcgtttcataagcattgcccatcaaacgcaataacctatttccatgagcaaatgtttcttttgataagtaaatcacagctatgcttccttcaatagtgcrtttttgggggatgtatttctaaatatrttttcgtatcagaactgctgttagatcatgtatgatgtaccattartaatcatacataacatgcctgttctccttattgctgagcttccatgtacatactcgtgtggttcattgctgctttgggactgtcatagcagatgctgctgctttttctattgccgtaaacaagctgttgtgactgatacttcttttcaccatatgtcctgaacactcccagttcatagttatatgtcatttccaggatgctttgtagggtgtgtatgcctccaccccatttcaaaatcaatgtaactctcaatg

SEQ ID NO: 26260 - DNA, 600 bp, Chicken  19866894242326_4
tttttggaggcagtctaactgtttatgtatttaacgcacacattgtgycagtgaaagaatctacaaaaacaaggctcattcctgtgcatgtatgttgatagaagtcaaagagttgctgtgggctggctcgtttcataagcattgcccatcaaacgcaataacctatttccatgagcaaatgtttcttttgataagtaaatcacagctatgcttccttcaatagtgcrtttttgggggatgtatttctaaatatrttttcgtatcagaactgctgttagatcatgtatgatgtaccattartaatcatacataacatgcctgttctccttattgctgagcttccatgtacatactcgtgtggttcattgctgctttgggactgtcatagcagatgctgctgctttttctattgccgtaaacaagctgttgtgactgatacttcttttcaccatatgtcctgaacactcccagttcatagttatatgtcatttccaggatgctttgtagggtgtgtatgcctccaccccatttcaaaatcaatgtaactctcaatggattgactaatgactgcaaggtgttgcttacgcatgctggttttgg

SEQ ID NO: 26261 - DNA, 600 bp, Chicken  19866894242328_1
gccagctggggacggtctgtgatgatctctgggacctcgctgatgcccaggttgtgtgcaggcagctgggatgtggccaggccattgcagctccgggcagtgcttactttggccacggctcaggcagcatcctgctggatgacgtgcggtgccagggaaatgagctggccttgcagcagtgcagtcacattggatgggggagacacaactgccgccaccatgaagatgctggtgttgtctgttcaggtactggaacatcttactttcccgaagtgttttctataaattgcacccactttrtgcattcaaatgatttgagagtagggttattcagacatccttccaccaagacagcaatatgacttaccatgatatctctactgctgtatggattcagacttcagagctgtacctaattacatgtttttcttacctggcagctgtagatccaccgaatacgacggactggcccccttcaataggtgagtcatgccttccttgccttgcagcacacgcaaccccaagcagcacacagctgctgccaagaaggagctgagctgctgcaggagtgctccagtggtggtgatggggacaagccct

SEQ ID NO: 26262 - DNA, 600 bp, Chicken  19866894242329_1
ccagtcttgttcagatgaccaaatctcacctctgtctgttttctttcttgcctttgggtatgggcagggaacgactgggttagcccttccagcagcagcatgctgctatctgcccattttcattatgcttttttcattacactaggagctggcaggaagggctttggagcactcagaagcagtgatttttctggcaatattaaagggcttagtcagccttgaaaaattaatccataacacctcttctcctcagttcaattgctttcagctattgttgagctacttgattggtatcaggamctgtaaaacctgatagctagcaggaacagctcaaaagattgtgctggaaaactcagaatagctcttggctgctctggcacatgcagtgtaatccgtgcatggtgccactgattcatacgcttgcrgcaagcacttctaggatgttctggcatttctgcttctggattgatgtgttttagtgcttacattacattaagtaatgtttccatgcacagcttctgcctaagttgtgtgacccccctgcagacttaaaaactctactacagcatagctgagaagcaataacaagataggaaaaga

SEQ ID NO: 26263 - DNA, 600 bp, Chicken  19866894242329_2
tgcttttttcattacactaggagctggcaggaagggctttggagcactcagaagcagtgatttttctggcaatattaaagggcttagtcagccttgaaaaattaatccataacacctcttctcctcagttcaattgctttcagctattgttgagctacttgattggtatcaggamctgtaaaacctgatagctagcaggaacagctcaaaagattgtgctggaaaactcagaatagctcttggctgctctggcacatgcagtgtaatccgtgcatggtgccactgattcatacgcttgcrgcaagcacttctaggatgttctggcatttctgcttctggattgatgtgttttagtgcttacattacattaagtaatgtttccatgcacagcttctgcctaagttgtgtgacccccctgcagacttaaaaactctactacagcatagctgagaagcaataacaagataggaaaagaagtgtgttacrccccatgctgatgaggtagtgaggtgttggtcctcaggctgttgatgaaactggtgagtacttstagtcttctgggagttactccacagggacaaaagaagggaatgtgtgtca

SEQ ID NO: 26264 - DNA, 600 bp, Chicken  19866894242329_3
gatagctagcaggaacagctcaaaagattgtgctggaaaactcagaatagctcttggctgctctggcacatgcagtgtaatccgtgcatggtgccactgattcatacgcttgcrgcaagcacttctaggatgttctggcatttctgcttctggattgatgtgttttagtgcttacattacattaagtaatgtttccatgcacagcttctgcctaagttgtgtgacccccctgcagacttaaaaactctactacagcatagctgagaagcaataacaagataggaaaagaagtgtgttacrccccatgctgatgaggtagtgaggtgttggtcctcaggctgttgatgaaactggtgagtacttstagtcttctgggagttactccacagggacaaaagaagggaatgtgtgtcacagagatgagcaccagacagcaaaatgagtccttccatagaaaaactccccttaaagctgaagggctccgaagaactttgtcttatttgcattctcactttccacaataaagcattttaaagtgacactttttccccaaatctgagtctgtctatgtcattctgtgagctgctaagtagaccttag

SEQ ID NO: 26265 - DNA, 600 bp, Chicken  19866894242329_4
ggcacatgcagtgtaatccgtgcatggtgccactgattcatacgcttgcrgcaagcacttctaggatgttctggcatttctgcttctggattgatgtgttttagtgcttacattacattaagtaatgtttccatgcacagcttctgcctaagttgtgtgacccccctgcagacttaaaaactctactacagcatagctgagaagcaataacaagataggaaaagaagtgtgttacrccccatgctgatgaggtagtgaggtgttggtcctcaggctgttgatgaaactggtgagtacttstagtcttctgggagttactccacagggacaaaagaagggaatgtgtgtcacagagatgagcaccagacagcaaaatgagtccttccatagaaaaactccccttaaagctgaagggctccgaagaactttgtcttatttgcattctcactttccacaataaagcattttaaagtgacactttttccccaaatctgagtctgtctatgtcattctgtgagctgctaagtagaccttagagattcattgaatttcttacctgtgagtcattaatgacactatttaatcacaaaatctatttta

SEQ ID NO: 26266 - DNA, 600 bp, Chicken  19866894242330_1
agccaagtttaagattgaaaacaatgacttacaggcattatgtttctattatttctcagagatcatataaaactatgtttttcttcctgcttcacagtttccacttcccacattttgtctcgaaaggtgcttattgaacaagtgaacaagaataaagttcaaccatgcttgtcaaagagaacgtggcttagtttatataaagtcagttgaaggttaatgaaactaaattattctggagacctatatattgcaacgatcagcaatatggaaatgtctatacaaataattagagagcattayacataattcaggaacatagatgacatttgttttagaggggactgcagtattctaaggatagatatgatcaagaaatctaaaaagacaaatagctattttgatgaatgaccagactgtccaaccctcttatgtggttacccactgtgaagcatggtactatttattgtaaagagctttttattcttggaattcattctcttgcttcagtgaaatatgttaacctccaggaattgttgcaaagacaaaatttatgtcctcagtctactgaaaaagattatcaaagtcctgaacacctactgt

SEQ ID NO: 26267 - DNA, 600 bp, Chicken  19866894242333_1
agcttgaactctttgcaagatagtccttctctataccactttactttgttttccttgtctctgagaaactggttttccagcatcctgatttttattaaaaaccttattgctcaagatttaagaagggatgcatgcacaaacgtggaggctgaagtacccctcagaattctgctgatttactgagtgtatgcaatgacatggcctttaccttatcctttacctccttccttctcttttacatccaacattattttcttcacagaactgagtctttttgttaattagattttaaaagaaagrttatctaagatgatatcagtgggttgtaaactcatctttcactgaagctgtgtccacctgcatttacaaaacattgactcaaattggtggtactaatgtcctttctgttcgtgatgaacattagccagtctacaaaacacattcagtacatttcttttcccagatgtctgacttatatagcttctgtacattaccgtgctgaaaactgtctggtcccatattgtcagtgtaagcttagttcagctttatgttgctgccttgcacttytcttcatctaggcacagtctctgactataactg

SEQ ID NO: 26268 - DNA, 600 bp, Chicken  19866894242333_2
agtctttttgttaattagattttaaaagaaagrttatctaagatgatatcagtgggttgtaaactcatctttcactgaagctgtgtccacctgcatttacaaaacattgactcaaattggtggtactaatgtcctttctgttcgtgatgaacattagccagtctacaaaacacattcagtacatttcttttcccagatgtctgacttatatagcttctgtacattaccgtgctgaaaactgtctggtcccatattgtcagtgtaagcttagttcagctttatgttgctgccttgcacttytcttcatctaggcacagtctctgactataactgttcttgacaatttgttcaaaatgtctctaacatatcgctcttcttccttacccagagtgcagtattacaacatgctcacacttcattttatctgcccgagttaagaaaaatattaaacagacgaaaattctataaaataacattaccttaaatattttccttctgcagagaatttattgtttgaccacatggaatcaaacattcattgaacttgcctctcttgtcctatagattaccagaaagtttcagctaaaattcagctctatt

SEQ ID NO: 26269 - DNA, 600 bp, Chicken  19866894242337_1
tttctgtagctttgtttttgtcattttttgtcccttcggttacagggtaatgtctatgaaaaacgataattagcagctttgttttagactttcatcacagtctaatggttttagatgcatgtttcacagtaaaattaatagtctgcattaaaaatgcaaccacagaacttcacttggggtaatggagtaatgtttgtggggaaatgcaatcagcttgtggtagaaaccacatgttcctgggagcctgcagaacatggctgtggtgggagcctctctgccggggttgggaactgaggaggraacatttctctcccgtgttctgcggaatggttcaataaggctaattttgggccgttggacaggacctctccatcagggcaaactgatgtccctggaggctcggagccctctttaaataatgcacaggagcactgcatgctctgtaactgtgcaaccttcccggagaaattgatgtctttcataagtctggttcacagagtctcatttttttgtgtctgtgcaggcttgcttcacctaataaactagcggtgtgttgggttataatttaagtcctggagatcaatgtatttttttctgttt

SEQ ID NO: 26270 - DNA, 600 bp, Chicken  19866894242339_1
aattaagctttgtgtaaatgcagttcttttcattgggtgaataattgccaggtcccactacgtatatcttgctacagattgatcttcagctttttagtaattatacagtttatgaatgctaaacactctgtctgggtgctctggtaaataaacagtgataatctcatcttacttgctgctgaagacaacaaattccgttagcctgtatctgttaatcaagttaccactgcctaaaatgaagtgattggtgtctctgtaacagatgtttgttgagaagcttgtaatggtcgtaataattargacgaatatttaaatagccagtggctaaaattaaaacattcaagggaagatttttggggaaagggaagagagaagagttcttgttctagactcagattggtaatgtgaatttttgcaaatttttagaggggagaaatgcattttaaatttccagttacccagctgctctattaacacagctcagtcatttcctctgaagtattaattcagttgatacttatgagtctaacacttgggtttcctctttgctttaggaacggctggtgctctctgtcttgccacggtttgtagttctggaaa

SEQ ID NO: 26271 - DNA, 600 bp, Chicken  19866894242339_2
agatcagttactaattgactttcaagtgctaatgatacttatacaagttagttccagtctatatcagcatgatacttttttttttttttttaattcctatgtttttaaagtagtctataccatgcttattcttttcttcagtttagtactaagttaatacatgccttggtctgagtgatacctcacataccacagacattttgcaagtatatgtttcttttgtatttacaagatctcattgtagaaattgttaacagccaaagctgcacctctagaaaattcaatgtctgctgaagtacrtctgttcagaactagtttgttgactaaaatcctgccataactttaagaatcaattttgttgtacctgtattcaacgtatggtcacactcaaggaatctctcaaattactatttatatcttcaacagagtatattgcacttctgagacacttcaatcaggtccctacaattagatacaataaagctaactttagtctgaagagtgtgaagtctgctataaatctgtcttttgtcataggatttgagtcctgtatggcttatagctgagcaaaacctgaagatcacactaggagaaagaaat

SEQ ID NO: 26272 - DNA, 600 bp, Chicken  19866894242344_1
gtagggagcaaaaccacctgtgtttggaggttaacaaaccctggaggagaaccagcactaaaatggaaaacctgcagttaggctgggcaagtacctcctcggaagaccatagaatcattaaggttggaaagatcaataagatcatctagttcagccatcaactcatgtcacttaatgcgacatctacccttttcttgtacacccccagcaatgctgactccaccatctccccgggcagccttttctaacacctcaccactccttctgagatgttttttttcctaatatccaacctgatgyttgagcctgagtctcagcgaagccccacaacctcaaaagttgctgctggggttggcatggacaccctgcatccccaggaaacatctcaagaaacagtaatgagatgggarmccacctcctgtccctgcatggattgctgtggtgggcatggaggattgctgctgaggttggatggacctgcttcatttctccagcaaggtttttactctttgttactgttactcatgtgctaccttctcatggccatgctgggcccgaagctggccaatcatagaatcattaagaccactaagctcatct

SEQ ID NO: 26273 - DNA, 600 bp, Chicken  19866894242344_2
agaatcattaaggttggaaagatcaataagatcatctagttcagccatcaactcatgtcacttaatgcgacatctacccttttcttgtacacccccagcaatgctgactccaccatctccccgggcagccttttctaacacctcaccactccttctgagatgttttttttcctaatatccaacctgatgyttgagcctgagtctcagcgaagccccacaacctcaaaagttgctgctggggttggcatggacaccctgcatccccaggaaacatctcaagaaacagtaatgagatgggarmccacctcctgtccctgcatggattgctgtggtgggcatggaggattgctgctgaggttggatggacctgcttcatttctccagcaaggtttttactctttgttactgttactcatgtgctaccttctcatggccatgctgggcccgaagctggccaatcatagaatcattaagaccactaagctcatctagtccaacttgtcaacccatcctcatcatgcccactaaaccacgtccctcagtgccacatctccatgctttctgaacacctccagggacggtgactccgccacttctagc

SEQ ID NO: 26274 - DNA, 600 bp, Chicken  19866894242344_3
gaatcattaaggttggaaagatcaataagatcatctagttcagccatcaactcatgtcacttaatgcgacatctacccttttcttgtacacccccagcaatgctgactccaccatctccccgggcagccttttctaacacctcaccactccttctgagatgttttttttcctaatatccaacctgatgyttgagcctgagtctcagcgaagccccacaacctcaaaagttgctgctggggttggcatggacaccctgcatccccaggaaacatctcaagaaacagtaatgagatgggarmccacctcctgtccctgcatggattgctgtggtgggcatggaggattgctgctgaggttggatggacctgcttcatttctccagcaaggtttttactctttgttactgttactcatgtgctaccttctcatggccatgctgggcccgaagctggccaatcatagaatcattaagaccactaagctcatctagtccaacttgtcaacccatcctcatcatgcccactaaaccacgtccctcagtgccacatctccatgctttctgaacacctccagggacggtgactccgccacttctagca

SEQ ID NO: 26275 - DNA, 599 bp, Chicken  19866894242351_1
  misc_feature (1)..(10): n is any nucleotide
nnnnnnnnnntgaagtgccctgtaattgaagatatcgatggaggaacgccagccatgtctgacaccactcaccaggagccaggtgacaacactaggttctgcatactggaaggttaatggataacattctctccctgcactgagctttcgtggagagaaaggagattggctcagctaaaaacagagctaacatccctagtcactgcagctctgctctgagctgtctccaatgagggtgcctgcatcctttttctcattcagcttaggcagcacctgaccctgcagggatctgtagggtgrgtgtgtgagtcatcctgaaagctcttaggtgaaggagcactggatatgttaattacaggtattgttaggatgtttccatagcccatctggcactctcagaataacttttcttcaccctagccccagggaaaaattatctgtcaggattaggctggctgtcccaggctctgtcctcacccacactagatttggatgaaaatgtgtctggaatgtgtatttgtgctgttacagcagctctgggaatggctgatggaacacagtccatgaagaaatccatcacyagggatcagtgtatacaa

SEQ ID NO: 26276 - DNA, 542 bp, Chicken  19866894242351_2
gcagggatctgtagggtgrgtgtgtgagtcatcctgaaagctcttaggtgaaggagcactggatatgttaattacaggtattgttaggatgtttccatagcccatctggcactctcagaataacttttcttcaccctagccccagggaaaaattatctgtcaggattaggctggctgtcccaggctctgtcctcacccacactagatttggatgaaaatgtgtctggaatgtgtatttgtgctgttacagcagctctgggaatggctgatggaacacagtccatgaagaaatccatcacyagggatcagtgtatacaaatacagacatttacaggagaaacagaaccaagactacatcaggaaaggatacccccaggaccaatgactgctggtgagccagcatctctggatgtggggatcacatttccaacaaacccaggaatcacagcactattaatagccagaaccaattaaaatggcatcactaaactcagaaagttttgtgctaagagtatggaactcttcttaaaaattacttttat

SEQ ID NO: 26277 - DNA, 600 bp, Chicken  19866894242357_1
tcctgatctgttcagatgacaacctcaccagttactatgtcacagaagggagtatagtttggtagtgcctagaaggcagagttgaatctaaagaagtatggggagggaggtgatggggacttgcataacagtgaaaacaaatgcaattggagtgacatttcattaaattatgaactggaccaataggaaattgcagataaagaatggaaggaaaagtacacaaaacctggtaacgtgggaatcacttcttgtaatcttccccttttgacagactgtaaagggctggatctctggtgtcartcatctcagtacctgggtcaaaagagctgccacagttaccagcttatggcctgacacagctcagctgtattggatataaacatgtgcatggcagaaataagaatgtgcctctatttcttttctgcaagaataaaggatggcacaaaaaaactcaaggcaacctgcaamgcaaacaaaatccttgaattttacttgctatttgttagtatttaaccatgcaatcttctacttacaagaatatttctgggaagagaagactgaaatctgtacactgtgtttgcatgactacttgcacattac

SEQ ID NO: 26278 - DNA, 481 bp, Chicken  19866894242357_2
tatgaactggaccaataggaaattgcagataaagaatggaaggaaaagtacacaaaacctggtaacgtgggaatcacttcttgtaatcttccccttttgacagactgtaaagggctggatctctggtgtcartcatctcagtacctgggtcaaaagagctgccacagttaccagcttatggcctgacacagctcagctgtattggatataaacatgtgcatggcagaaataagaatgtgcctctatttcttttctgcaagaataaaggatggcacaaaaaaactcaaggcaacctgcaamgcaaacaaaatccttgaattttacttgctatttgttagtatttaaccatgcaatcttctacttacaagaatatttctgggaagagaagactgaaatctgtacactgtgtttgcatgactacttgcacattacttttgtgttctcagtgtgggtcaagtcatgcagtgagccacaagtggat

SEQ ID NO: 26279 - DNA, 600 bp, Chicken  19866894242360_1
tgaatggtattgaaagttggttttgtttttttttagtgagaagggaaacttcagtagtattcaaaaaatgggggctgaagtgagggtgaaatccaatttttcagtggtctgtgaagcttaaggccctttattactgcaagctataaggatgcatgaccatgaaaagcaccaagcagatggcgtactgcaggattcacttcatgggtgtcctgtaacgtcacatagctaggtacccctctttgcagactgattctcctgtactgagaactgcacgatcaaagcctttccttttaaaagagsttaacattttagatgtgtttaacaatcactaaattgataaaaagatacggcttttttagaagtgtgatagcagctcaaaaattcacaaggattcaatagctgaacttgataattacatcagaaaatgttaagatgagttacaaattgtacagaaatggtgttttggttctaaatccctacatgaatttttagagaataaggttgtctyggagtggtgttactgtagaattaatgtagagggagagctaggtctcgatgttgttattcaagttgtaaatgtagaagcagagaaatttctaa

SEQ ID NO: 26280 - DNA, 600 bp, Chicken  19866894242360_2
cctgtaacgtcacatagctaggtacccctctttgcagactgattctcctgtactgagaactgcacgatcaaagcctttccttttaaaagagsttaacattttagatgtgtttaacaatcactaaattgataaaaagatacggcttttttagaagtgtgatagcagctcaaaaattcacaaggattcaatagctgaacttgataattacatcagaaaatgttaagatgagttacaaattgtacagaaatggtgttttggttctaaatccctacatgaatttttagagaataaggttgtctyggagtggtgttactgtagaattaatgtagagggagagctaggtctcgatgttgttattcaagttgtaaatgtagaagcagagaaatttctaaggagaaaacctgaacaggactatgaaagctgcctaggacttaagtatgatcatcatgagttcgttccaactcagaatagtctatgcttctgttctgctctgtgcattatactacttcgagttctttgaagtattgcgtgcatatttgcaaggcctaatgacacttctttctgttcagaaggtctctgtatgatatgaaatgctgactt

SEQ ID NO: 26281 - DNA, 600 bp, Chicken  19866894242362_1
tctcttatctgatttcaccatgaagtaaataatcaaaaaaatatttggataaactttctggggggggagaaagaaaaagtcgttaattaattttaagcatggtgaggtgttttcctgtttttcaagaaataaggatagtagcaaaaataagtgatagactatagaaagtatgctaaggattatacgaatttacaacactatatcttgcgtaaatgtattggtagatctcagaaaacagaagaaatactgttttaaaatatgccatattaaaacaaacaaacaaacaaacaaaaaacctgygtacacacatacaaacacaaaacaaaacaaaatcaacaacaaaccactcaacagagctaaatgtatacaacttagtgacctgcaatagatgaaggtcactaattaattgcaattaggtgcaatacatggaaacagaaaagaaatagtgtgtgaaaggggtaaaagttgcaaaaacggtctgagtgatagtgagagcgtggtgtagcatcagtctaaaaattacttattccagatatttttgcagtttatagtaagataacttgtctttgtgctatgataggagctggattgggtcattta

SEQ ID NO: 26282 - DNA, 599 bp, Chicken  19866894242365_1
  misc_feature (1)..(151): n is any nucleotide
nnnnnnnnnnnnnnnnnnnnnnnnnnnnnnnnnnnnnnnnnnnnnnnnnnnnnnnnnnnnnnnnnnnnnnnnnnnnnnnnnnnnnnnnnnnnnnnnnnnnnnnnnnnnnnnnnnnnnnnnnnnnnnnnnnnnnnnnnnnnnnnnnnnnnnncactgagcagagctgctttccccacgttgctcagagcttctcctccccaggtgatagcagtcactgcctctgctgcaacagtggctgattttcatttagtcagagaacacatttcaattaaaaagaagcaatatacctttctaaagtgytttttttgggtgtttttgttagtgagagtcatgtcctctgtgcccgctctcttctctccatgggtttcagcaaagggctgttgcacctctctggcaggattctgtccaatgttaacccataaaacgaagtaatccttgcctgtcctcctttgggtttttcaatgaacattcgagaaatctctccactaattaccatgattctaattttattwaaaaaaaaaaaaaaaagggaggggtggaaagatagtttaatagtcaggaaattgctctggaatttttttgttgcctggtgggacatt

SEQ ID NO: 26283 - DNA, 599 bp, Chicken  19866894242365_2
  misc_feature (1)..(143): n is any nucleotide
nnnnnnnnnnnnnnnnnnnnnnnnnnnnnnnnnnnnnnnnnnnnnnnnnnnnnnnnnnnnnnnnnnnnnnnnnnnnnnnnnnnnnnnnnnnnnnnnnnnnnnnnnnnnnnnnnnnnnnnnnnnnnnnnnnnnnnnnnnnnnnncactgagcagagctgctttccccacgttgctcagagcttctcctccccaggtgatagcagtcactgcctctgctgcaacagtggctgattttcatttagtcagagaacacatttcaattaaaaagaagcaatatacctttctaaagtgttttttttyggtgtttttgttagtgagagtcatgtcctctgtgcccgctctcttctctccatgggtttcagcaaagggctgttgcacctctctggcaggattctgtccaatgttaacccataaaacgaagtaatccttgcctgtcctcctttgggtttttcaatgaacattcgagaaatctctccactaattaccatgattctaattttattwaaaaaaaaaaaaaaaagggaggggtggaaagatagtttaatagtcaggaaattgctctggaatttttttgttgcctggtgggacatttaatggaa

SEQ ID NO: 26284 - DNA, 600 bp, Chicken  19866894242365_3
cactgcctctgctgcaacagtggctgattttcatttagtcagagaacacatttcaattaaaaagaagcaatatacctttctaaagtgttttttttgggtgtttttgttagtgagagtcatgtcctctgtgcccgctctcttctctccatgggtttcagcaaagggctgttgcacctctctggcaggattctgtccaatgttaacccataaaacgaagtaatccttgcctgtcctcctttgggtttttcaatgaacattcgagaaatctctccactaattaccatgattctaattttattwaaaaaaaaaaaaaaaagggaggggtggaaagatagtttaatagtcaggaaattgctctggaatttttttgttgcctggtgggacatttaatggaacacttattttttcagggcaatatcaccagtgcatctaactttgatctatctacaagaaaaatttaggcagtaagaagtttgcagatgcttttcctggctattagatctgactactagattttactttgtcagcaaacacaagggcagtttttccaagggcctttcttctacaaacgaagaatctgaaagaaaaatgctctttcac

SEQ ID NO: 26285 - DNA, 600 bp, Chicken  19866894242365_4
actgcctctgctgcaacagtggctgattttcatttagtcagagaacacatttcaattaaaaagaagcaatatacctttctaaagtgttttttttgggtgtttttgttagtgagagtcatgtcctctgtgcccgctctcttctctccatgggtttcagcaaagggctgttgcacctctctggcaggattctgtccaatgttaacccataaaacgaagtaatccttgcctgtcctcctttgggtttttcaatgaacattcgagaaatctctccactaattaccatgattctaattttattwwaaaaaaaaaaaaaaagggaggggtggaaagatagtttaatagtcaggaaattgctctggaatttttttgttgcctggtgggacatttaatggaacacttattttttcagggcaatatcaccagtgcatctaactttgatctatctacaagaaaaatttaggcagtaagaagtttgcagatgcttttcctggctattagatctgactactagattttactttgtcagcaaacacaagggcagtttttccaagggcctttcttctacaaacgaagaatctgaaagaaaaatgctctttcaca

SEQ ID NO: 26286 - DNA, 600 bp, Chicken  19866894242365_5
ctgcctctgctgcaacagtggctgattttcatttagtcagagaacacatttcaattaaaaagaagcaatatacctttctaaagtgttttttttgggtgtttttgttagtgagagtcatgtcctctgtgcccgctctcttctctccatgggtttcagcaaagggctgttgcacctctctggcaggattctgtccaatgttaacccataaaacgaagtaatccttgcctgtcctcctttgggtttttcaatgaacattcgagaaatctctccactaattaccatgattctaattttattwawaaaaaaaaaaaaaagggaggggtggaaagatagtttaatagtcaggaaattgctctggaatttttttgttgcctggtgggacatttaatggaacacttattttttcagggcaatatcaccagtgcatctaactttgatctatctacaagaaaaatttaggcagtaagaagtttgcagatgcttttcctggctattagatctgactactagattttactttgtcagcaaacacaagggcagtttttccaagggcctttcttctacaaacgaagaatctgaaagaaaaatgctctttcacaa

SEQ ID NO: 26287 - DNA, 600 bp, Chicken  19866894242365_6
tgcctctgctgcaacagtggctgattttcatttagtcagagaacacatttcaattaaaaagaagcaatatacctttctaaagtgttttttttgggtgtttttgttagtgagagtcatgtcctctgtgcccgctctcttctctccatgggtttcagcaaagggctgttgcacctctctggcaggattctgtccaatgttaacccataaaacgaagtaatccttgcctgtcctcctttgggtttttcaatgaacattcgagaaatctctccactaattaccatgattctaattttattwaawaaaaaaaaaaaaagggaggggtggaaagatagtttaatagtcaggaaattgctctggaatttttttgttgcctggtgggacatttaatggaacacttattttttcagggcaatatcaccagtgcatctaactttgatctatctacaagaaaaatttaggcagtaagaagtttgcagatgcttttcctggctattagatctgactactagattttactttgtcagcaaacacaagggcagtttttccaagggcctttcttctacaaacgaagaatctgaaagaaaaatgctctttcacaaa

SEQ ID NO: 26288 - DNA, 600 bp, Chicken  19866894242377_1
atgcatcactgtaaagataatcttggtatccttagaacacagtcaagctttgccaagaaataccattttagatgctctataggcgtgtcaaacaataactttattttcttttgctgatggaatgccattctggaagtttctgtgaaggtttgagcttgctttcaaaacaaaggtttgtctggatggaaagtagttctgaaagtcagaatgctttccaaataaagatcggctgaaaggtgtggggaacattctctttttcttttgtactgtttccttcctctgtggagataggaagctaaygtaacagagctagtgaactgccagtaaactcaagttgtattgtaagtaatagggtttatcctatttctgaattctgtaagtgaaaaagccagttataatccagtagttagataaaacacatcgtcagtgagattactagtgaagttatggccccatccctggaagtattgaaggccaggccggatggggctttgagtagcccagtctggtgggaagtgtccctgcctataggaggggggttggaactgcctgatcttttaggtccctcccaacccaaaccattctgtgcttctatgaaaa

SEQ ID NO: 26289 - DNA, 600 bp, Chicken  19866894242388_1
cacatgtgagagagttggccttcaaagatctgcagccaaatctaggtactggagaaggatcaaaatgttaatcaaatatattaaaaaataaaaataatcccatatgttttatgtattttagcttctacacaagctagaagtgttaaataaatgtttttctaaacagtgtctagaaaaaaaatagctaaaaaagaatttttttggtgagtattttgagtgaagtaatcattcatttatttttatagaaatctgagagcaaaaaaatagataattataaacacagcctttgcccaatatcarttgagatgattgtagaatcatagaatcatggatatgtttgtttgtttgtttgtttgtttgtttgtttgttttaaggtttaccttttactctccatctactcttggctttatttcagctgtaaatgctttgagatttcagatccttttcaagattggatgaaaagaattagatgcatgagtgcatctgactggtttattagcagttggagtatcagttttagcccacaaccaaggttactgtgtaatgctactgtgtctttcctcaatagggcagttagcacttttctactcatggggtct

SEQ ID NO: 26290 - DNA, 600 bp, Chicken  19866894242393_1
atcagcccttgtttccccgagtggagctaacagaaaagcaatggtagttctctgaaaatgcaaggtgaggtctgaaaatgcaaggtgaggtcagcagaagcagttcaatggcagcttattaattatggaacagctttgctaacgagcgagggctgggcgtgctgcttgggctcagcctggggacgcggctcccacacgcacgtggaagcatccaatgcttcctatataacatacattccccaacacctcgagctctgctgtgtgctctcagcacttcacttctctattttataggtgtcrgaggccgcagccaggccaggtcctgttgtaccaccagcactgtgcagtcatttggctgctgatgacgccgtatcccgggtctgtagcacagctctcagaggcgttttccatatcactgtgacatgtgccagaagtccgagcagtgctgtaactgagcgcacagcactcagcccttcctggctaatgaaatcctgcaggcaatttgtctcgagccgcrcggaatatttctgcattacagataataaaagtaaaaactaataaacacttgcccatgcaaatgaggggaagtgcgttacttat

SEQ ID NO: 26291 - DNA, 600 bp, Chicken  19866894242393_2
cttcctatataacatacattccccaacacctcgagctctgctgtgtgctctcagcacttcacttctctattttataggtgtcrgaggccgcagccaggccaggtcctgttgtaccaccagcactgtgcagtcatttggctgctgatgacgccgtatcccgggtctgtagcacagctctcagaggcgttttccatatcactgtgacatgtgccagaagtccgagcagtgctgtaactgagcgcacagcactcagcccttcctggctaatgaaatcctgcaggcaatttgtctcgagccgcrcggaatatttctgcattacagataataaaagtaaaaactaataaacacttgcccatgcaaatgaggggaagtgcgttacttatgctaagtagattatgtacattacttacaagtagattacttccataagtgttagtggacgtggaaatcaaagcacgggatgtcctggtgcaggggcttctttskgcgaggggccgggtgatggatggcagctgggggctgttctgccttcagtttttgtttaaaattccacttatcccagctaatttgagcggaataccactcgctcccaggttgcag

SEQ ID NO: 26292 - DNA, 600 bp, Chicken  19866894242393_3
gttttccatatcactgtgacatgtgccagaagtccgagcagtgctgtaactgagcgcacagcactcagcccttcctggctaatgaaatcctgcaggcaatttgtctcgagccgcrcggaatatttctgcattacagataataaaagtaaaaactaataaacacttgcccatgcaaatgaggggaagtgcgttacttatgctaagtagattatgtacattacttacaagtagattacttccataagtgttagtggacgtggaaatcaaagcacgggatgtcctggtgcaggggcttctttskgcgaggggccgggtgatggatggcagctgggggctgttctgccttcagtttttgtttaaaattccacttatcccagctaatttgagcggaataccactcgctcccaggttgcaggtccagctcggtggcaatgccttacccatgagctcagctccttggtcctgaaggaagagatgaaggatctggttaacgtaagcctgcagagatgatgttttaatttcagcaaacrggaaagctgtcacactgtaatgtaagcaatggacaaatcattaggagcattattacagacacatccatcc

SEQ ID NO: 26293 - DNA, 600 bp, Chicken  19866894242393_4
ttttccatatcactgtgacatgtgccagaagtccgagcagtgctgtaactgagcgcacagcactcagcccttcctggctaatgaaatcctgcaggcaatttgtctcgagccgcrcggaatatttctgcattacagataataaaagtaaaaactaataaacacttgcccatgcaaatgaggggaagtgcgttacttatgctaagtagattatgtacattacttacaagtagattacttccataagtgttagtggacgtggaaatcaaagcacgggatgtcctggtgcaggggcttctttskgcgaggggccgggtgatggatggcagctgggggctgttctgccttcagtttttgtttaaaattccacttatcccagctaatttgagcggaataccactcgctcccaggttgcaggtccagctcggtggcaatgccttacccatgagctcagctccttggtcctgaaggaagagatgaaggatctggttaacgtaagcctgcagagatgatgttttaatttcagcaaacrggaaagctgtcacactgtaatgtaagcaatggacaaatcattaggagcattattacagacacatccatccc

SEQ ID NO: 26294 - DNA, 600 bp, Chicken  19866894242393_5
gattacttccataagtgttagtggacgtggaaatcaaagcacgggatgtcctggtgcaggggcttctttskgcgaggggccgggtgatggatggcagctgggggctgttctgccttcagtttttgtttaaaattccacttatcccagctaatttgagcggaataccactcgctcccaggttgcaggtccagctcggtggcaatgccttacccatgagctcagctccttggtcctgaaggaagagatgaaggatctggttaacgtaagcctgcagagatgatgttttaatttcagcaaacrggaaagctgtcacactgtaatgtaagcaatggacaaatcattaggagcattattacagacacatccatcccattaacataaataggaacagataggcacggcttctgatgtctcactgatcattactggggaacaggattccacatcagtcactaaatgtattaccattattttattgatcgttattagcacaracatgatgagcagagcagagcggggcagcctcgacttctttgtcagaagacattggtttggggtagggggaggaagcagccctatcccatctttaaatagctatca

SEQ ID NO: 26295 - DNA, 600 bp, Chicken  19866894242393_6
ggtggcaatgccttacccatgagctcagctccttggtcctgaaggaagagatgaaggatctggttaacgtaagcctgcagagatgatgttttaatttcagcaaacrggaaagctgtcacactgtaatgtaagcaatggacaaatcattaggagcattattacagacacatccatcccattaacataaataggaacagataggcacggcttctgatgtctcactgatcattactggggaacaggattccacatcagtcactaaatgtattaccattattttattgatcgttattagcacaracatgatgagcagagcagagcggggcagcctcgacttctttgtcagaagacattggtttggggtagggggaggaagcagccctatcccatctttaaatagctatcagaaaccagttgagagtttcatcgtattattcattctggaaagctaaaagaagaacactgccacggtaagcctaggtgttttaaaatgccagtgatgtgctttattcccagcaatggagctgctaggttcttagattcgcacaccgtgctcagttcgctgcagtgcggacgccgtagccctgcagctcagggatg

SEQ ID NO: 26296 - DNA, 600 bp, Chicken  19866894242395_1
tgtgctactcccttatctcttattttattttttttttaaggagcagggtacacatcttaatcacagtagttgattttttataagaagccagatgtgtttttcagaaaactggaagaatggtgaatataacaaaaacaattagcatgcacaaagatcacaatacaaagatgatgccagatttcctttcaactttatgtaatatattcttttggcgtcaattataaaacacatggaattttttacttgtgatttggacttactgaaaattgagagccagcttttcaggtgatgaggaacaaygtatttttgttggttttagtttaactattttcatttatttcttctaaagcttatagattgcaaatacatttcagacactgcatcattccactagccttgggaagagaatgtgcctaagaaagaataaggattcttgtgcagaagctcagccaaattattttataagttccatccaatcatatctgcagaaatctctgaaatgcagtggaaaatctcatagcttaatcaaaatcaacttgattgtattcagggggcttattggagctctgaagccctcattaatgttgatagggtacaaat

SEQ ID NO: 26297 - DNA, 600 bp, Chicken  19866894242397_1
attcatcttttaaggcagatgtttggttttggtgatagcgtgaagactgcagtcagcaggatagaggataaattctagttatgttctactctgtagaagtaatccttgtgctgaggagttgctgtagctgaggccagctctttgctactttgtcatctgtagggtctcaaagacagctttcctacacatcctctcatttggagattctttatgatcgtaattttctcattagtacattatcaagttgttcttttcaagaaacaagatcaatctctgcccaaggaagacttctttttatakgcttgcaattttttttttttggtagctcaacacctaygtgagagactaaactgatacaaacctttctagattgtattttagatcatttgtttttcagcttactcaattctgtaattattcaattttcatgtttgactctgaagagcagcattaacattaaaccatctgttttaattaattaaattgcattcccaatataaaaataggcaaagtctataccttaagtacgtttgaaatattggcatttgaaagagtggatgttcccaaaataggtaaggaaaaggatttccctgcatttat

SEQ ID NO: 26298 - DNA, 600 bp, Chicken  19866894242397_2
gcgtgaagactgcagtcagcaggatagaggataaattctagttatgttctactctgtagaagtaatccttgtgctgaggagttgctgtagctgaggccagctctttgctactttgtcatctgtagggtctcaaagacagctttcctacacatcctctcatttggagattctttatgatcgtaattttctcattagtacattatcaagttgttcttttcaagaaacaagatcaatctctgcccaaggaagacttctttttatakgcttgcaattttttttttttggtagctcaacacctaygtgagagactaaactgatacaaacctttctagattgtattttagatcatttgtttttcagcttactcaattctgtaattattcaattttcatgtttgactctgaagagcagcattaacattaaaccatctgttttaattaattaaattgcattcccaatataaaaataggcaaagtctataccttaagtacgtttgaaatattggcatttgaaagagtggatgttcccaaaataggtaaggaaaaggatttccctgcatttatagttactgggagtctttaagtccctttacatccttgg

SEQ ID NO: 26299 - DNA, 600 bp, Chicken  19866894242399_1
ccgcaggcacaaacccacagcacgcagggaaccgattccaggaagcctaacatccgagccccgatattagagaatatgatctcagtgctccaacaacccgcacggagccggacctcgggtcccaaacaccacagccccccaaacacctggactaaccaccaccattaacctcctcgccaccaccaagcacgaggcacgcgtcgcctccgggccaaaatcctcttttctcctgcgatctgagccaggcttggcacgacccacggatgccgtggttacaccactcccatgtgcatggagaaragccccgacccgctgtgctcagctcacagcacccctccagcatcccagctccagcgctgcgacgttccctgcacagattcaaaaacctgctgcagttccaaggcgggctttggtttcactgtgaccagcagctcagagactcacagttactatacagccgaataaaatattttttcataaatttaacgccagcatgtctgtgtttggaaactttgaaaatccatgttgtatggtttactgcactggaaaaggtgccaacagagtttcaaaggaagggaagtgtataactgtttcctttca

SEQ ID NO: 26300 - DNA, 600 bp, Chicken  19866894242408_1
tcaggcagcaattctagaatgaattatataacctatgtaatgcaggaagctgagtgaggtgattatcacaatctctattaggttaaaaacaaaaataattagccaagacagcctgccttactatcaagaagagtaaacactgacctgagtcaaattaaagcatgttttaatataattatatttttcctacttagtcgggaaaagaaaataccccaaatcctaatcttacaaatagtcctgttaagcaagcaagttaatgatgcagttgtgataaagtaatagtagcattattcaatgtgmaaacctgcttttctacagaatcattcattataaattgtttattcttgtgttgtgaaagaaaattgtatctacttagaaatttcatttacgcagctgaaccatagcaaagaataaggttatagcaggtgcatgaactcctggataacaatcatttttttagaattatattataaaagtgagattgcttgttacggtatgaagtaatgtagcaagtatcgtagaatcatagaaccacagaatgagttctgaattggaagggaattaaagatcatctcattccagtcccctcctatgggcagg

SEQ ID NO: 26301 - DNA, 600 bp, Chicken  19866894242413_1
cactgcgttcaggtctggcacagaggacgggcagagcaaagcttacgcacctttcatggtgtccagaacaaagcaggattcgtcctggaagttctgaatcatctgaaagaagccacaacacagctgagtctgaggctgcacccgaacatggggccgcgctgcacagacagggctgggagcaggaagggcacccacagtaatatttatcccttcctccatcgctccagaaccacaggttggaagcagaaagccaagggaaagtgctctgaccctgcagtgtggtctgaaagcaaagccctstcccagcagctccctcctgatcccagcaaagcagagcagggatagctgtgcccttacagcccccccctccagctctacgtgagtgctgccagcatccccagtactgtctgacatcctcagytctgcagcttcatcaattmaccctttgcaagcagcagcaaacgggaggggcccaccttgaggtcgtgctttgggggtgggacacgaaaggcagaaggaagragcagcgagggatctttacctcgtcgctgatcagcacatgtatccccgtcggaccctgcttgtaaatctggctgatct

SEQ ID NO: 26302 - DNA, 519 bp, Chicken  19866894242413_2
agctgagtctgaggctgcacccgaacatggggccgcgctgcacagacagggctgggagcaggaagggcacccacagtaatatttatcccttcctccatcgctccagaaccacaggttggaagcagaaagccaagggaaagtgctctgaccctgcagtgtggtctgaaagcaaagccctstcccagcagctccctcctgatcccagcaaagcagagcagggatagctgtgcccttacagcccccccctccagctctacgtgagtgctgccagcatccccagtactgtctgacatcctcagytctgcagcttcatcaattmaccctttgcaagcagcagcaaacgggaggggcccaccttgaggtcgtgctttgggggtgggacacgaaaggcagaaggaagragcagcgagggatctttacctcgtcgctgatcagcacatgtatccccgtcggaccctgcttgtaaatctggctgatctgctgtgaggagatgctgaaaagctgagccagcttctccgt

SEQ ID NO: 26303 - DNA, 500 bp, Chicken  19866894242413_3
cccgaacatggggccgcgctgcacagacagggctgggagcaggaagggcacccacagtaatatttatcccttcctccatcgctccagaaccacaggttggaagcagaaagccaagggaaagtgctctgaccctgcagtgtggtctgaaagcaaagccctstcccagcagctccctcctgatcccagcaaagcagagcagggatagctgtgcccttacagcccccccctccagctctacgtgagtgctgccagcatccccagtactgtctgacatcctcagytctgcagcttcatcaattmaccctttgcaagcagcagcaaacgggaggggcccaccttgaggtcgtgctttgggggtgggacacgaaaggcagaaggaagragcagcgagggatctttacctcgtcgctgatcagcacatgtatccccgtcggaccctgcttgtaaatctggctgatctgctgtgaggagatgctgaaaagctgagccagcttctccgt

SEQ ID NO: 26304 - DNA, 418 bp, Chicken  19866894242413_4
tccagaaccacaggttggaagcagaaagccaagggaaagtgctctgaccctgcagtgtggtctgaaagcaaagccctstcccagcagctccctcctgatcccagcaaagcagagcagggatagctgtgcccttacagcccccccctccagctctacgtgagtgctgccagcatccccagtactgtctgacatcctcagytctgcagcttcatcaattmaccctttgcaagcagcagcaaacgggaggggcccaccttgaggtcgtgctttgggggtgggacacgaaaggcagaaggaagragcagcgagggatctttacctcgtcgctgatcagcacatgtatccccgtcggaccctgcttgtaaatctggctgatctgctgtgaggagatgctgaaaagctgagccagcttctccgt

SEQ ID NO: 26305 - DNA, 600 bp, Chicken  19866894242416_1
ctggctctatcagtcaatcattgtagaggttttggttctgaatgaataggtggccaagatatcagaggcttaattatttttaaagccactcagtgattaatgccaagtagctctgcccataaatatttggagacaattgttggaatgcagtcataatgatacgatgttacaatcagccataaataatatataataaatcataaaaacagctgtccctagccagtgtcccaggactgcgaggaaggcagctgctcagcagtcccctcctctgctgcctgccggctgcttctgttcgctgckcygcacagcatgaggtgggtctgggaatcagatgtatgtgctgtggagaggcagctgacgaggagtggtggatggagcagctcagcagctgggagaggcttccacattttccaagggggtagcacagggcatgctgtagggtgatctggtcctcggagataagtggtacctcggggtgagggaaagggcagagtcctcattggaaggaggaggaagctctgcccttgaaagggggcactgtgtcttcatggctgtctttctttcccctgcctcccgtaaaataggtgtgaaatgttgtac

SEQ ID NO: 26306 - DNA, 600 bp, Chicken  19866894242416_2
ggctctatcagtcaatcattgtagaggttttggttctgaatgaataggtggccaagatatcagaggcttaattatttttaaagccactcagtgattaatgccaagtagctctgcccataaatatttggagacaattgttggaatgcagtcataatgatacgatgttacaatcagccataaataatatataataaatcataaaaacagctgtccctagccagtgtcccaggactgcgaggaaggcagctgctcagcagtcccctcctctgctgcctgccggctgcttctgttcgctgckcygcacagcatgaggtgggtctgggaatcagatgtatgtgctgtggagaggcagctgacgaggagtggtggatggagcagctcagcagctgggagaggcttccacattttccaagggggtagcacagggcatgctgtagggtgatctggtcctcggagataagtggtacctcggggtgagggaaagggcagagtcctcattggaaggaggaggaagctctgcccttgaaagggggcactgtgtcttcatggctgtctttctttcccctgcctcccgtaaaataggtgtgaaatgttgtacat

SEQ ID NO: 26307 - DNA, 600 bp, Chicken  19866894242417_1
gctccgactgatcaacgtgaattcctctgcgctcagatttcaggctcattttcttcctgtttaaagagaaaagggttaaagacagaatcagcaacaacctgctccaaccagctccttttgaaggcttgtctcttagaaagatgtcgccccttttaattattgaacagttagttccatagtaacaaaacacattctaaagaaggaaaggcgaggttatataagcacgcagtgccgaaagccaactgcagtattagcatacgtttgcatagctgtgacctgtaaacagtgctctgcagctgrgtgacaagcaggctggcactgccagccctgcagcgatgggcccgtgtgtgtgtgtgtgtgtgcaaaggcacgctgctctgagctcagcagcacagccttctgacaaccagaggcacaaagcaacagagggaaacagaatgacagctgccatcaccaaagagaactgagccagcacgactctgttgggtttatacatggagactgcaacagaacggcttgttttgcagctctgcagccctcctctttctttttctttttgctagacaaaaaccttcccacgtgccagctcagtcccagggg

SEQ ID NO: 26308 - DNA, 600 bp, Chicken  19866894242418_1
ggagagtggcttgagagcagccctgaggagaaggatttgagagtgtcagttgatgaaagactcagcatcaattggcagtgtgtgcttgcagcccagaaggccaaccgtatcctgggttgcatcaagagaagcgtgaacaactggtcaagggaaatgcttctgcccctgtactctgtcttgtgagaccctgcctggggtactgcgtccattgctggagcccccagcacaaaaaagacatggagttgttggagcagatccagaggagggccacaaagatgatcacaggactggagcacctcygctgtgaggacaagctgagagagctggggcttttcagcttggagaagtctcctgcaggaccttacagcagccttccagtatctgaaggaggcctgcaagaaaactgtggcgagacttaatataatggtatgtagtgacaggatgaggggaaacgattataacctgaaggagtgtagacttagactagatattaggatgaaattctttactgtgagggtagtgagacgctgaaacaggttgcgcagagagtctctggatgttcccagcctggaagtgtttaaggccaggctggatggggct

SEQ ID NO: 26309 - DNA, 553 bp, Chicken  19866894242418_2
ggctgaaataagcctaactgggaatgagtggcaaaagcaccccattgtgtctgtcccagagactccatgcatccttgatattacctcagagtagaatacttcaggaatccaaaaggatactgttggccttcagtatatatttcttgcagatggaggacattaatcagctgtgcttgccttacccagtctttcagtggaccctttgccatgggactgtgagaaacggaacagcaggtgcgagttgttgcagtgactgtgcactgatggcagtgttgcaccagctgggactacctgattccyatctgtatgctgatccatcaactggagagtcaaagagtaatcagcaagactggctcacctttaacaatcccatatggccagtgtaaaagtccagtggagagtggaggctaacaatggactatcatggcctgaatgaagtcagttaagttaagtgcttctgtgccagacatgctagaacttaagtatgaactggagccgtaggcaaataagtagtattctataattgattctgcctatgcatttttctcaatcc

SEQ ID NO: 26310 - DNA, 600 bp, Chicken  19866894242419_1
aatgcactggaacaggctgcccagagagttcgtgaagtcacggtccctgaaagtgttcaagaaacacgtggatgaggcactgagttatacagttttgtgggtgtagtagcggtgagctgttggttggatgagatgatcgtagtggtcttttccaaccttaatgattctgtgattctgtgattcagcatgccgaaccaaagttagtgttgtttcctactctcttatagatgtaaaacaatactaaaaaagtttagaataatcctctccagtatggcttcagagatgtgagggggtgagatktgctgaccttgaaccaactgttttacaaaactctctgtttgctgtatcctctacttctgcaccatgatatcttctccagtcagaagaccttagggtctatctctgatcctagtgggaaagagttctttgaacagtacaagcctgatctcttgagcttctttattcctgtgaggaaagtggaactacactaaaaaataacatttgagagcttcaagcaaaagtgtgttctaggaaagagacctcagtaatgcaacaaaatgtttttgattcacacacaaaacagtagccatctatagccaa

SEQ ID NO: 26311 - DNA, 600 bp, Chicken  19866894242419_2
tgtgttctaggaaagagacctcagtaatgcaacaaaatgtttttgattcacacacaaaacagtagccatctatagccaaacactcacttctatcagtggagaaaaactgccacaccagtctctcactagcttgttttctatccttcctttagaggaattttgcattataatcttttctggcagaggtgtttgaaatcttacactttactaatacctatattaatgatatatatatttttttgttctgacttcagaaacatcgctactggttttcagggttttttggaaattcaggtgttycagcagaatgtaacatcaaatttcttatgaaactgagagttatgagtaaatgaaatattcaaatataaataaagaaataaacagacgggtaaaaaaataaacaaaaatactgaaagataggaaaaaatgcatttaccttttgttcattatttaattcattcatttacaaggaaaagatactcttccatctgaatactactgcagcactttaagagcctgtatcaagaaaaagcagcatatgaaatctttataggttcttacatccagaatattctccctagttactttaattgaactgta

SEQ ID NO: 26312 - DNA, 599 bp, Chicken  19866894242425_1
  misc_feature (1)..(71): n is any nucleotide
nnnnnnnnnnnnnnnnnnnnnnnnnnnnnnnnnnnnnnnnnnnnnnnnnnnnnnnnnnnnnnnnnnnnnnngctcatgaagaaatttgtgaacgatctgaagttcgacgtgaccttcaccttcaaccgcctgccgctgcaggtgcagcaccgcgccgccgccatggccatgcagaagggcctggacagtgtgctcttcccctcggcctcctgccagcgctctctcttcacgggcatcttccagccccggtgagtcgcgatgaggaccggctctgtgcatcgggtgggactgagtgagggrtgctcagctcagcctctgcatctgcaggtggttcgaccgcaaggtggaggcgaacgaggagcagtgccaggctgtgaagcacatcgtcaccgggatgtcccgacctgcgccgtacctcatctttgggcctcctgggacgggcaaaacggtcaccctggtggaggccatcaagcaggtgggtggtggggcccacggccagcacagggcatcgctgcccagcccacggggctcagccttccctcccctcaggtgtggtcatgcttcaaggatgcccggatcctggcctgtgccccatccaa

SEQ ID NO: 26313 - DNA, 600 bp, Chicken  19866894242435_1
tcaaacaattctaagattcagagattttaagatagtatgatgtagccccctccccctacactgaagcaggacatgcatgcaactctaccagaagagcaaagggccacctcagtgccttggaatgaactacctgacccaatgccaatgtgtgcagctgtaatacaggtctggtaacatctgtctagtcatcacactatcacagcatatttatcataaactagttcactgcagctgaaaagagtacttcacatacactcaaatgtggcaaagctcttacgcgtattaaatccttcagtcatsactattttgatgaattatggcaaagtttacatttcttgctcagcttggtattttgatgattgcactgcagcaacacctaaaggcccaccccagcagaagagctcttttctgtgtgtggcacacagcagggaacccttcccacagagctgctgcctaaaagaaatacacagcatgggataaagtagtatttttctctattttgcagatgggrcagggaagcccagaaagacaactggattatcaaagcaagagaagaaactctggcagagctagggattacatccaggcctagagaggagt

SEQ ID NO: 26314 - DNA, 600 bp, Chicken  19866894242435_2
cataaactagttcactgcagctgaaaagagtacttcacatacactcaaatgtggcaaagctcttacgcgtattaaatccttcagtcatsactattttgatgaattatggcaaagtttacatttcttgctcagcttggtattttgatgattgcactgcagcaacacctaaaggcccaccccagcagaagagctcttttctgtgtgtggcacacagcagggaacccttcccacagagctgctgcctaaaagaaatacacagcatgggataaagtagtatttttctctattttgcagatgggrcagggaagcccagaaagacaactggattatcaaagcaagagaagaaactctggcagagctagggattacatccaggcctagagaggagttctgtactatctgagcatctgcattttaaaaggcacactattaaccaacactgccccacagagcagaggcctgctgctcacatccgcaacccacacccccaggcacgagtggctctgcgagccctccctcctgagaagggcagggagctctgacgactggagtggagtagagccagtggaagaaaccaccagacagccagcccacttcrcc

SEQ ID NO: 26315 - DNA, 600 bp, Chicken  19866894242435_3
grcagggaagcccagaaagacaactggattatcaaagcaagagaagaaactctggcagagctagggattacatccaggcctagagaggagttctgtactatctgagcatctgcattttaaaaggcacactattaaccaacactgccccacagagcagaggcctgctgctcacatccgcaacccacacccccaggcacgagtggctctgcgagccctccctcctgagaagggcagggagctctgacgactggagtggagtagagccagtggaagaaaccaccagacagccagcccacttcrcccactgcatttccccttctagaacagccacagctggaacatctatccctgagagcaagggctgtgctgagctacgtgggattcctccaggccaagtaggaaataaaaggaaaacacccaacatccatgctccaagcagatcctatctgaaaaccagtacaataaccacttctcaggtcagaacatcacttcactacatcaaagaaggacagacagacaaagatattcagtgacgcaggtccaattccctaacgctgtaattagcaaaaatctattacatagcaatttcaaataaaaatt

SEQ ID NO: 26316 - DNA, 600 bp, Chicken  19866894242438_1
acagcctgcatcggtcctgccaggcacagaggtaaaatccaaaccagctgcagttgtgttctccacacagtcatgctcaaaccccaagggcttgctcaactgcatgtggaaaatctgaatgttttctattttgctgattggtttttaagtctaatctgatttttctcttgaaatgagataatgaggcagctctggtagccattccctgcctagatgatcaccagggtgtgaggtacagggcagggctgctagctgagggagctcatgcttttcaccaggctgcctgagcagcactccctyacagctcctggccagcttccttaggctgctgcctgcctgcttctgtacctctctgcttcacagggcatgagagcaactgcgtatgctgacgttgtggggtgtaagaagcagcatcctagaaaacgcaatcactcagtgaggtcagagactgcttgaagtgaagctctaagactgcttgaggtgatgctttaagcccacattrggaagaatcacgcatttttactttctcttatataattctactctgagtctgagggaagctgctgtttcttccataacacctagctataggtgtgatgt

SEQ ID NO: 26317 - DNA, 600 bp, Chicken  19866894242438_2
tccctgcctagatgatcaccagggtgtgaggtacagggcagggctgctagctgagggagctcatgcttttcaccaggctgcctgagcagcactccctyacagctcctggccagcttccttaggctgctgcctgcctgcttctgtacctctctgcttcacagggcatgagagcaactgcgtatgctgacgttgtggggtgtaagaagcagcatcctagaaaacgcaatcactcagtgaggtcagagactgcttgaagtgaagctctaagactgcttgaggtgatgctttaagcccacattrggaagaatcacgcatttttactttctcttatataattctactctgagtctgagggaagctgctgtttcttccataacacctagctataggtgtgatgtcaccmcttcattatgtgcatagtcgtagttcatagctgcagagaaaagtaaagacacaagtgtctcttgaaatctcagaagccacttgataatgaagaaaygtgttacacgtttgcatgaacaaacatggacaagtgtatatttgggagatccttcctaggcctcaccaaagtcatttattcccctttgtggagaatcatat

SEQ ID NO: 26318 - DNA, 600 bp, Chicken  19866894242438_3
tcctggccagcttccttaggctgctgcctgcctgcttctgtacctctctgcttcacagggcatgagagcaactgcgtatgctgacgttgtggggtgtaagaagcagcatcctagaaaacgcaatcactcagtgaggtcagagactgcttgaagtgaagctctaagactgcttgaggtgatgctttaagcccacattrggaagaatcacgcatttttactttctcttatataattctactctgagtctgagggaagctgctgtttcttccataacacctagctataggtgtgatgtcaccmcttcattatgtgcatagtcgtagttcatagctgcagagaaaagtaaagacacaagtgtctcttgaaatctcagaagccacttgataatgaagaaaygtgttacacgtttgcatgaacaaacatggacaagtgtatatttgggagatccttcctaggcctcaccaaagtcatttattcccctttgtggagaatcatattaagttacactgacctatgggaactgaagtactccttgaggcagacgtcagctcagctgctgtgctcccatcagttgttgaaacaaaactcagcctgtctccc

SEQ ID NO: 26319 - DNA, 600 bp, Chicken  19866894242438_4
taagaagcagcatcctagaaaacgcaatcactcagtgaggtcagagactgcttgaagtgaagctctaagactgcttgaggtgatgctttaagcccacattrggaagaatcacgcatttttactttctcttatataattctactctgagtctgagggaagctgctgtttcttccataacacctagctataggtgtgatgtcaccmcttcattatgtgcatagtcgtagttcatagctgcagagaaaagtaaagacacaagtgtctcttgaaatctcagaagccacttgataatgaagaaaygtgttacacgtttgcatgaacaaacatggacaagtgtatatttgggagatccttcctaggcctcaccaaagtcatttattcccctttgtggagaatcatattaagttacactgacctatgggaactgaagtactccttgaggcagacgtcagctcagctgctgtgctcccatcagttgttgaaacaaaactcagcctgtctccctggctctgggtgactacaaaacaacacaataaaacatggcaacctctacacatggggtttttaatctcctgtttctcatcttacggaggattcaag

SEQ ID NO: 26320 - DNA, 600 bp, Chicken  19866894242438_5
gcttaattcttttctctttcacgaatcttaattgaagctagttctcctttcacaatcattagtatcaagtggtaggctatatcatgaccttcctgaagtttttttcatgttcagctatttccagtactatgtgtattttctacaacgagaaactttcagtaaaattacatcttcagacactttttatttcaaattgaagtgtgaatgcttttcttgcctaaagggagaatgaaaatcctgcatacctaacagcagagatcagggccttctgttgcagatacagtgcaaagaccctaggarggttgtgcagctgagtctgcataactacagtgcagtaggtggaaaagggctgcaaggaggtgaggagatgtgctttgttcatgtgtgagggagatggtgtgaatttggagtgcctgaatttgaagtgaccccattgaatccttgcctgttctgttgctccttcatgggatgagacgtagctgcactccagctcctgtgtytgtaacccaaaactgctctacccaaggcctttcttctgccaatatcacaattaactttggttatcagagataaccctcattttaactttattgcagcctg

SEQ ID NO: 26321 - DNA, 600 bp, Chicken  19866894242438_6
gtgaatgcttttcttgcctaaagggagaatgaaaatcctgcatacctaacagcagagatcagggccttctgttgcagatacagtgcaaagaccctaggarggttgtgcagctgagtctgcataactacagtgcagtaggtggaaaagggctgcaaggaggtgaggagatgtgctttgttcatgtgtgagggagatggtgtgaatttggagtgcctgaatttgaagtgaccccattgaatccttgcctgttctgttgctccttcatgggatgagacgtagctgcactccagctcctgtgtytgtaacccaaaactgctctacccaaggcctttcttctgccaatatcacaattaactttggttatcagagataaccctcattttaactttattgcagcctgagggggtttctgagataggaagcacagagtggtgggcgggggtgtttaaaggcatgtttaaatacagcttttcatacctaggcaatcccagaaagccatatatagcaggtgataaactcagataccaaacattctgctcagctgattaaagmtcccagtgcatcagagtgctccactcattcctgtcctccctgacagct

SEQ ID NO: 26322 - DNA, 600 bp, Chicken  19866894242438_7
gttgctccttcatgggatgagacgtagctgcactccagctcctgtgtytgtaacccaaaactgctctacccaaggcctttcttctgccaatatcacaattaactttggttatcagagataaccctcattttaactttattgcagcctgagggggtttctgagataggaagcacagagtggtgggcgggggtgtttaaaggcatgtttaaatacagcttttcatacctaggcaatcccagaaagccatatatagcaggtgataaactcagataccaaacattctgctcagctgattaaagmtcccagtgcatcagagtgctccactcattcctgtcctccctgacagctaatctgcagataaatcagggcagggaggagcacagctcagcatgggcaatttccttgagttgtagttactgtttacccagtacctgggtactcatggtgctgttgcatgaagagtggatgataccttcgtgtttctttgagacagttccctttacttaggaggaacatgggctttcccactgggtgctgtcagagcagaccagttcacaccctagtcctctaaccagggctcctcccacaagcacccaccag

SEQ ID NO: 26323 - DNA, 600 bp, Chicken  19866894242441_1
tgcttctcagtgactcttcaatgtgtaaaattagcacttaggtctttgcagaaggaggattttaatatgtaactgcatatgacagtcttaccctggcctcctgaagaaaaacaaaccatttgtaagcacagagctcattaatattttcttgagtcctttagccctggttcattcactatcactgatatgctgtgattgtggttacgtttcaagagtgtgcatatttttattttgtctgaataactccatggggtcctggttattttatattaccttgaccatcacaaacaggattagaascagataaaatgatgtaaatgcaaatgtcaataaaataaactattctatttttgcagatgttcttcatctggattgaatttgattgtagaagctagtcccagtgcacaatgatccaaagataaaggataaaagttttcttggagcaaagaaaacatattctgaatctttactgtaaattatacactatacaaaattagtccaaattgttcaaacccttggacagttacaatgttattctactcatcatgctgagtactgtgtaattatggtggttagcagcagtttgcttgctctcagccc

SEQ ID NO: 26324 - DNA, 510 bp, Chicken  19866894242442_1
cttgcacattgaaaacaagcatgtctgggatgcttaattatgttgtgattaatccatttaccattagtcaaggactgcagcatattcagtgctacacgatttgttaccagtgtgcaccttcttagctgaaggcaccatgtgggttttacctgcagctgttgtaaatgaatcacacatctcttcttcattgccctgaggagatgtgtggccacccactgggacagggatggtctgcagcatctgaggttgatattaaatgtgatgtgctctgtgtttttaagagcaaaaggagagtggggrgattcattcatttaaaacacatgtaagtattagattaattactttgagtcttttcagctgaacactgcaagcagtgataggaaaatgtttctgttgttctttgtgaatgcttcacatgaactgaattctgaatgtcctgcctttttaagctatattagcacccaccaggcaccaaagctcactgaagagatgtgagaacctctcctgggg

SEQ ID NO: 26325 - DNA, 600 bp, Chicken  19866894242444_1
ctgcatacctgcactgtgctctagaagtcatctatggcctccctctgtctgctgctggcggcgttggggggggataacaaaaccctatagggttataaggctcacattagggttgtaaatgcagagctgaggcttgttggagctcgcaccctgagccctgcggggccgtgctggctgctggctgctccacactctgcagcctctctgctcacagctgtgcttccaaaatagcttcagagagctccaggaactggtgtggccgggctgggaagaaggaggggatgggctgcactccccttstcagcttgggcagagggaaagcagcagccttgggtcctcactgggggagggttggctcaacccacgccataaaagcccccattgcagtgctccccactgtagggtgtcactggcttggttagaaactcactgccagactcctgggggctcgtggataaaccctggctgaatgggaggcccatttccctgctgccatcctaatgcagccaacctgctgccatccctgccgccatcctcacgttgccatcctcctgtcctcttgcactcaggatgttatgggtcccttccaactgggaacgt

SEQ ID NO: 26326 - DNA, 521 bp, Chicken  19866894242444_2
ctgggggagggttggctcaacccacgccataaaagcccccattgcagtgctccccactgtagggtgtcactggcttggttagaaactcactgccagactcctgggggctcgtggataaaccctggctgaatgggaggcccatttccctgctgccatcctaatgcagccaacctgctgccatccctgccgccatcctcacgttgccatcctcctgtcctcttgcactcaggatgttatgggtcccttccaactgggaacgttctatgatctgaccccagttgttcctccagaagtcattcycagctccacatcccccacttttcccaggcagtcacccccagagcttcctccccacacccccttttaggacccatcccaaaagcggaggggaccccgcgcagcgccgcgtggcgcgcagggagcggctcagagccatgtgttccccattagggccctttgatggaggtacccggcgcagggagccagcagggctttgatgtgcagccagcagggacgccccg

SEQ ID NO: 26327 - DNA, 600 bp, Chicken  19866894242448_1
aaatgtgtttttatgtggcagttgcatgaggttcaccccctggcaggaaccaataacagctacacacaccttcagcagcaccaggtgcctctctgtcactgttgtgcgagttgctctgaagccacatgcagaataactcaaaaagcaggtgaagtaaggaccgtggtggttctcacctcaagtcagacacagtgcacagacacaaggaggatccgaccaaagaagatctccatttcttcaggttatgctttgcatctcttcagtgggaagcgctgacagaccaatacacttgggtaaggwtgcagtcaaacaaatgcaaatgatcatttcaatttaggtgtaatagtaaaagacccttagctgtgagctgctctctgatacatgctgatgctcattatgccaagggaatatggtttatcccaagggggaatggttttaaactgagacaggggaggtttaggttggatattaggaagawgtttttcacacagagggtggtgacrcactggaacaggttgcccaaggaggctgtggatgccccatccctggaggcattcaaggccaggctggatgtggctctgggcagcctggtctggtgrt

SEQ ID NO: 26328 - DNA, 600 bp, Chicken  19866894242448_2
caagtcagacacagtgcacagacacaaggaggatccgaccaaagaagatctccatttcttcaggttatgctttgcatctcttcagtgggaagcgctgacagaccaatacacttgggtaaggwtgcagtcaaacaaatgcaaatgatcatttcaatttaggtgtaatagtaaaagacccttagctgtgagctgctctctgatacatgctgatgctcattatgccaagggaatatggtttatcccaagggggaatggttttaaactgagacaggggaggtttaggttggatattaggaagawgtttttcacacagagggtggtgacrcactggaacaggttgcccaaggaggctgtggatgccccatccctggaggcattcaaggccaggctggatgtggctctgggcagcctggtctggtgrttggcgaccctgcacatggcargggggttgaaactcartgrtcattgtggtccttttcaacccaggccattctaaggagaagaagtgacatagtatagatgctgttcagagatgcagatcctcagaaatggcacccactggcttcctggtaaccttcaagactttgctcatctctgtgc

SEQ ID NO: 26329 - DNA, 600 bp, Chicken  19866894242448_3
aaggaggatccgaccaaagaagatctccatttcttcaggttatgctttgcatctcttcagtgggaagcgctgacagaccaatacacttgggtaaggwtgcagtcaaacaaatgcaaatgatcatttcaatttaggtgtaatagtaaaagacccttagctgtgagctgctctctgatacatgctgatgctcattatgccaagggaatatggtttatcccaagggggaatggttttaaactgagacaggggaggtttaggttggatattaggaagawgtttttcacacagagggtggtgacrcactggaacaggttgcccaaggaggctgtggatgccccatccctggaggcattcaaggccaggctggatgtggctctgggcagcctggtctggtgrttggcgaccctgcacatggcargggggttgaaactcartgrtcattgtggtccttttcaacccaggccattctaaggagaagaagtgacatagtatagatgctgttcagagatgcagatcctcagaaatggcacccactggcttcctggtaaccttcaagactttgctcatctctgtgctctgatgctgcaaagccgtgcttcc

SEQ ID NO: 26330 - DNA, 540 bp, Chicken  19866894242448_4
wtgcagtcaaacaaatgcaaatgatcatttcaatttaggtgtaatagtaaaagacccttagctgtgagctgctctctgatacatgctgatgctcattatgccaagggaatatggtttatcccaagggggaatggttttaaactgagacaggggaggtttaggttggatattaggaagawgtttttcacacagagggtggtgacrcactggaacaggttgcccaaggaggctgtggatgccccatccctggaggcattcaaggccaggctggatgtggctctgggcagcctggtctggtgrttggcgaccctgcacatggcargggggttgaaactcartgrtcattgtggtccttttcaacccaggccattctaaggagaagaagtgacatagtatagatgctgttcagagatgcagatcctcagaaatggcacccactggcttcctggtaaccttcaagactttgctcatctctgtgctctgatgctgcaaagccgtgcttcccatcctcttcacatctcacatcagcccaagtcaact

SEQ ID NO: 26331 - DNA, 518 bp, Chicken  19866894242448_5
gatcatttcaatttaggtgtaatagtaaaagacccttagctgtgagctgctctctgatacatgctgatgctcattatgccaagggaatatggtttatcccaagggggaatggttttaaactgagacaggggaggtttaggttggatattaggaagawgtttttcacacagagggtggtgacrcactggaacaggttgcccaaggaggctgtggatgccccatccctggaggcattcaaggccaggctggatgtggctctgggcagcctggtctggtgrttggcgaccctgcacatggcargggggttgaaactcartgrtcattgtggtccttttcaacccaggccattctaaggagaagaagtgacatagtatagatgctgttcagagatgcagatcctcagaaatggcacccactggcttcctggtaaccttcaagactttgctcatctctgtgctctgatgctgcaaagccgtgcttcccatcctcttcacatctcacatcagcccaagtcaact

SEQ ID NO: 26332 - DNA, 502 bp, Chicken  19866894242448_6
gtgtaatagtaaaagacccttagctgtgagctgctctctgatacatgctgatgctcattatgccaagggaatatggtttatcccaagggggaatggttttaaactgagacaggggaggtttaggttggatattaggaagawgtttttcacacagagggtggtgacrcactggaacaggttgcccaaggaggctgtggatgccccatccctggaggcattcaaggccaggctggatgtggctctgggcagcctggtctggtgrttggcgaccctgcacatggcargggggttgaaactcartgrtcattgtggtccttttcaacccaggccattctaaggagaagaagtgacatagtatagatgctgttcagagatgcagatcctcagaaatggcacccactggcttcctggtaaccttcaagactttgctcatctctgtgctctgatgctgcaaagccgtgcttcccatcctcttcacatctcacatcagcccaagtcaact

SEQ ID NO: 26333 - DNA, 499 bp, Chicken  19866894242448_7
taatagtaaaagacccttagctgtgagctgctctctgatacatgctgatgctcattatgccaagggaatatggtttatcccaagggggaatggttttaaactgagacaggggaggtttaggttggatattaggaagawgtttttcacacagagggtggtgacrcactggaacaggttgcccaaggaggctgtggatgccccatccctggaggcattcaaggccaggctggatgtggctctgggcagcctggtctggtgrttggcgaccctgcacatggcargggggttgaaactcartgrtcattgtggtccttttcaacccaggccattctaaggagaagaagtgacatagtatagatgctgttcagagatgcagatcctcagaaatggcacccactggcttcctggtaaccttcaagactttgctcatctctgtgctctgatgctgcaaagccgtgcttcccatcctcttcacatctcacatcagcccaagtcaact

SEQ ID NO: 26334 - DNA, 600 bp, Chicken  19866894242454_1
gggttttatttatgaattaattaccaggatctcagtattcttagggaaattctgtttcctgtctgtccccttcttgattcacacagttgacagtggtttagtattagcatttctgcaagactgaagtcgaacagacctttttttgtttaaaacacatccgtcttgtctataatttgcagctgaagatggaaaccaaatgtttttgggacactccatatgcctggagggtttctgagctgtcttgtccactcttttattccccgtcaaactttagctaaaaggagaacttaagcattaacrttttgtgtcatttccgattgctgaaaatagttcaagtagtgaacagaaaaggagggggaaaggacaaaataagcatcagttaattggtggcatggaaacagtactcatacacatccagcccatgaaatttctgtgtcctatccaccactggcaaaattgaaagctgcgaggaagtattttgtactctttttcctagctcattaaccatttaaaaccatccrtagccatgtacctcccaaatgcaagaagtgcttaagttttgtagcattttaactgaagtatgcraatgacaaatatgag

SEQ ID NO: 26335 - DNA, 600 bp, Chicken  19866894242454_2
tggagggtttctgagctgtcttgtccactcttttattccccgtcaaactttagctaaaaggagaacttaagcattaacrttttgtgtcatttccgattgctgaaaatagttcaagtagtgaacagaaaaggagggggaaaggacaaaataagcatcagttaattggtggcatggaaacagtactcatacacatccagcccatgaaatttctgtgtcctatccaccactggcaaaattgaaagctgcgaggaagtattttgtactctttttcctagctcattaaccatttaaaaccatccrtagccatgtacctcccaaatgcaagaagtgcttaagttttgtagcattttaactgaagtatgcraatgacaaatatgagagaatgaagtgggaatgctcaaatcaagggaagaatattgcacccacctttaccgtggagcacaagatagaaagccagtaaaagrgagctcacagagcaaagggagacagatggactttgaaaccttcagtttagtctgggtataaagcatcctaaaatgaaggctctactttaccacttgttattttggaccacagataagatttcatgctgaaacatgg

SEQ ID NO: 26336 - DNA, 600 bp, Chicken  19866894242454_3
acttaagcattaacrttttgtgtcatttccgattgctgaaaatagttcaagtagtgaacagaaaaggagggggaaaggacaaaataagcatcagttaattggtggcatggaaacagtactcatacacatccagcccatgaaatttctgtgtcctatccaccactggcaaaattgaaagctgcgaggaagtattttgtactctttttcctagctcattaaccatttaaaaccatccrtagccatgtacctcccaaatgcaagaagtgcttaagttttgtagcattttaactgaagtatgcraatgacaaatatgagagaatgaagtgggaatgctcaaatcaagggaagaatattgcacccacctttaccgtggagcacaagatagaaagccagtaaaagrgagctcacagagcaaagggagacagatggactttgaaaccttcagtttagtctgggtataaagcatcctaaaatgaaggctctactttaccacttgttattttggaccacagataagatttcatgctgaaacatggcagggagatctctgctgtttgcagacatgaaggtgcatttttttgaatttccaatctctgtata

SEQ ID NO: 26337 - DNA, 600 bp, Chicken  19866894242454_4
ggtggcatggaaacagtactcatacacatccagcccatgaaatttctgtgtcctatccaccactggcaaaattgaaagctgcgaggaagtattttgtactctttttcctagctcattaaccatttaaaaccatccrtagccatgtacctcccaaatgcaagaagtgcttaagttttgtagcattttaactgaagtatgcraatgacaaatatgagagaatgaagtgggaatgctcaaatcaagggaagaatattgcacccacctttaccgtggagcacaagatagaaagccagtaaaagrgagctcacagagcaaagggagacagatggactttgaaaccttcagtttagtctgggtataaagcatcctaaaatgaaggctctactttaccacttgttattttggaccacagataagatttcatgctgaaacatggcagggagatctctgctgtttgcagacatgaaggtgcatttttttgaatttccaatctctgtataggttgaggcatgcatacctgaaaaattcctggtatagctttcctagttacgtgtcctagagaaatgagagacttgccagtagttcccatagtgttatgtc

SEQ ID NO: 26338 - DNA, 600 bp, Chicken  19866894242457_1
tcaggcctacaactactaatgattgctgttgatacttagaaggggttgttcattactgttttattttctttctttttctttttttctgaagtttgaaagtttttttgagttcttgagaaactttatactgctgatatttttaaattaattagctgattaaaacaggtaaattgctctccaaatgctataaaaagaaaatgaaggtgaaaaaatcttaactgctaaaatgagatcatgaaggaatccatccttaaatatggatcataccaataatatcatattaaacatctgtcttcagtrgtgtaaataatattccaggagaatgttgaataagatttgtaacatattgttttaggcttccttacccctcaggcaaattcctaaaagttgttttacacatcaaatatgtgagatacagaackattgtaacagaaatattcttgttttgcatataaaaattcagtcctcacccagtcttttttgtttgtttgtttgaatactgaaaagctcttaattttgctatcattagccaaaaggtatccatcaggatttattcaaagccagcttacagatatttaaaaaatctatatttcaattgct

SEQ ID NO: 26339 - DNA, 600 bp, Chicken  19866894242457_2
ttatactgctgatatttttaaattaattagctgattaaaacaggtaaattgctctccaaatgctataaaaagaaaatgaaggtgaaaaaatcttaactgctaaaatgagatcatgaaggaatccatccttaaatatggatcataccaataatatcatattaaacatctgtcttcagtrgtgtaaataatattccaggagaatgttgaataagatttgtaacatattgttttaggcttccttacccctcaggcaaattcctaaaagttgttttacacatcaaatatgtgagatacagaackattgtaacagaaatattcttgttttgcatataaaaattcagtcctcacccagtcttttttgtttgtttgtttgaatactgaaaagctcttaattttgctatcattagccaaaaggtatccatcaggatttattcaaagccagcttacagatatttaaaaaatctatatttcaattgctattaggtcatttaaatgaaaaaaaaaaaaagaaaaaaaaccccaaaatctgaatgcctatgtaattttatagttctgtatttttaattctgtcttcaacagatgaaaattaaatgacaattg

SEQ ID NO: 26340 - DNA, 600 bp, Chicken  19866894242467_1
aaaaaaagtaaaagacacaacagcatgcggtaacaaataaatagaacattctttccttccagaaatgagagaaagataatttgtagaaaatggtgtttcagagggtccagagccaaatgatttcctggagcacctcttgtatgaagtatctctttgtcaggactcagcctagcacctgccgtgctgtagcattatctttccttatcctgcagaaagtcttcagagtttgggatccatcccaaccatacatagtcaagtatgtttatgacagcctgaagtctgtagacagcagagatacaragaaagccaacaccatcatggcattgtagacaagtggccacgacatgctgcctggtggtatgcatcgccatgtaattgcagccatcagtatgagcatgggacacttccagaactcacaactggagtagaaccacttcagccgctgctataatctctcctcagaggtcctggtggggaatccaagcacctcctctgaggctggaaagctgcactgagtgggcagcaagggatactactgggagctttcaaattagcttcgagtcttaccatgatttttgcagtctgagactacaggctttg

SEQ ID NO: 26341 - DNA, 600 bp, Chicken  19866894242473_1
agagagagagcagtgaacaagcagttcaacctttccttttctctcacctccatttggatcctaccctgtttctcaaaaataagtgctgctttcaccttgaaacagctgttgtagttacagggatgctgaacatctaagcttcaggaagataaaatgatcaaaattctgtacagctgtttgctttctgggacagaataaagaaatgcaacagtaatatccctatagaggatacagcaaggattgttacagcaatgttacagcaatgagacacgctgcaagccctatcaaagaatctcatcwggtgtgtcacaaatgtttctgcatttggaatctagtgttaamtactgcataggtatgtttggtctacttagcaaatctaacactttcttaatctgttartaggagatgtatgttttgcagcctttgtagatatccttccagctctgctcagaagccaacacattattctgttctggcataatattgctagcaaacacacgaaaaacagaatggtttgtgtcccgaatcatctcaaaaagccaagcttgtttctgattgagaatagagcctgacatgagagtacccttacaaaggcagctg

SEQ ID NO: 26342 - DNA, 600 bp, Chicken  19866894242473_2
ctcacctccatttggatcctaccctgtttctcaaaaataagtgctgctttcaccttgaaacagctgttgtagttacagggatgctgaacatctaagcttcaggaagataaaatgatcaaaattctgtacagctgtttgctttctgggacagaataaagaaatgcaacagtaatatccctatagaggatacagcaaggattgttacagcaatgttacagcaatgagacacgctgcaagccctatcaaagaatctcatcwggtgtgtcacaaatgtttctgcatttggaatctagtgttaamtactgcataggtatgtttggtctacttagcaaatctaacactttcttaatctgttartaggagatgtatgttttgcagcctttgtagatatccttccagctctgctcagaagccaacacattattctgttctggcataatattgctagcaaacacacgaaaaacagaatggtttgtgtcccgaatcatctcaaaaagccaagcttgtttctgattgagaatagagcctgacatgagagtacccttacaaaggcagctgagaattaaagctccagcaaaacagaaatactgctgaagtttg

SEQ ID NO: 26343 - DNA, 600 bp, Chicken  19866894242473_3
aaacagctgttgtagttacagggatgctgaacatctaagcttcaggaagataaaatgatcaaaattctgtacagctgtttgctttctgggacagaataaagaaatgcaacagtaatatccctatagaggatacagcaaggattgttacagcaatgttacagcaatgagacacgctgcaagccctatcaaagaatctcatcwggtgtgtcacaaatgtttctgcatttggaatctagtgttaamtactgcataggtatgtttggtctacttagcaaatctaacactttcttaatctgttartaggagatgtatgttttgcagcctttgtagatatccttccagctctgctcagaagccaacacattattctgttctggcataatattgctagcaaacacacgaaaaacagaatggtttgtgtcccgaatcatctcaaaaagccaagcttgtttctgattgagaatagagcctgacatgagagtacccttacaaaggcagctgagaattaaagctccagcaaaacagaaatactgctgaagtttgggaaatgctaggtagrgaattttctttctccagtggagaaatataaggaggatgtga

SEQ ID NO: 26344 - DNA, 504 bp, Chicken  19866894242473_4
ttggtctacttagcaaatctaacactttcttaatctgttartaggagatgtatgttttgcagcctttgtagatatccttccagctctgctcagaagccaacacattattctgttctggcataatattgctagcaaacacacgaaaaacagaatggtttgtgtcccgaatcatctcaaaaagccaagcttgtttctgattgagaatagagcctgacatgagagtacccttacaaaggcagctgagaattaaagctccagcaaaacagaaatactgctgaagtttgggaaatgctaggtagrgaattttctttctccagtggagaaatataaggaggatgtgaaactgaaaagggaaacgagctccttgtgagcacagagacctgtaggtgatgctcgtctcagacacagatgtgccaaagacctgtgtgtcactgggccccaggattggtttggggagctgaacaagctgatctcggagacttgtttggcactgccattaggcag

SEQ ID NO: 26345 - DNA, 600 bp, Chicken  19866894242479_1
aaaatgtggtactatcatttgcaaaggacattgctagaaagcagctaagctccgtggatcttatttctaaagcttttgttccagactcacttccattgttcagttaaaagagctcccgctaaaataaaattgccatcttacagctgcttttcttgcagtaaatagatggaaggattgctaagtgaacaaattcactgtgagaataaactcagctttgcacacagtaaggagtaaagcagttttgtagctaaagtcagagatctcattaactgcagttccagctttgcacatctcatctgwaaaatagggatggagcacaaatctaaaattaagacttgacacagctacaagcatacacaactataatcaactactgtgccaattgaccttcagcacctcagagttctgagataaccttgctaggaaggaatgtcttttcacccctatgtttttgatgcaccacaaatgaaacaaatccaagatatggagcaaaaagatgggggactgcactctgaagatcgatattctggaatacctatgtcatagcaacaagtagaaaataaagtgctagttattaaaaactattaacagtaaactgtc

SEQ ID NO: 26346 - DNA, 599 bp, Chicken  19866894242481_1
  misc_feature (1)..(244): n is any nucleotide
nnnnnnnnnnnnnnnnnnnnnnnnnnnnnnnnnnnnnnnnnnnnnnnnnnnnnnnnnnnnnnnnnnnnnnnnnnnnnnnnnnnnnnnnnnnnnnnnnnnnnnnnnnnnnnnnnnnnnnnnnnnnnnnnnnnnnnnnnnnnnnnnnnnnnnnnnnnnnnnnnnnnnnnnnnnnnnnnnnnnnnnnnnnnnnnnnnnnnnnnnnnnnnnnnnnnnnnnnnnnnnnnnnnnnnnnnnnnnnnnnnnngatgctccttttttgtacagcccagttgggagtattcgcagtgtttttgttttgtrtttctgggtgcctgttaaaggctaggctgatactatagcccttctgttggggtatctcagcacctatcttcgtgtatggggtgcatcttggaagctctgtgccgtgtttgatctgggtgcagcaggytgctgggctcagagctgctgggctgtgtggcacaggcagaccttgatcctgcagcaggatccaaggtcctctgagctatgtgagcaaggtcatttgtagtgctcaggtgaatacaggccgaggatgccccgtagtaattgcactccatgcactggcatcctccttttggaga

SEQ ID NO: 26347 - DNA, 599 bp, Chicken  19866894242481_2
  misc_feature (1)..(117): n is any nucleotide
nnnnnnnnnnnnnnnnnnnnnnnnnnnnnnnnnnnnnnnnnnnnnnnnnnnnnnnnnnnnnnnnnnnnnnnnnnnnnnnnnnnnnnnnnnnnnnnnnnnnnnnnnnnnnnnnnnnnngatgctccttttttgtacagcccagttgggagtattcgcagtgtttttgttttgtrtttctgggtgcctgttaaaggctaggctgatactatagcccttctgttggggtatctcagcacctatcttcgtgtatggggtgcatcttggaagctctgtgccgtgtttgatctgggtgcagcaggytgctgggctcagagctgctgggctgtgtggcacaggcagaccttgatcctgcagcaggatccaaggtcctctgagctatgtgagcaaggtcatttgtagtgctcaggtgaatacaggccgaggatgccccgtagtaattgcactccatgcactggcatcctccttttggagactgtgtgttagtactcttcagaaatgttttcaaatgttaacacatactgcatgagcatagcactgagattggtgcatgttttctgttcacaatccttgacagcatccctttaaaatatgagcatact

SEQ ID NO: 26348 - DNA, 600 bp, Chicken  19866894242493_1
agcctttgtgtgacctaaaggatatcgtgctttttttttttccacatctgtcatacccatctgttcataagaaaagcagaatcgtatgactgctgtgtgtgtatgtgatacaaaaatcttacctgagatcttagttacctttgttgttctcctgtgttacctgcctgagctaacttaggatgcgtttgtgactaccttgaaaacaaagagtttctgagtttttgtctatttaattggaggacaccagccctctggaagaaagattgaattagggaacatctgaataaattgggcatatgyacacatctgctggacctaatgggatgtgcccataagtgccgatagagcttggtaatgtcatcgcaaagccactcttgattttctttgaagggccatggtgttcaggggaagttttttaggactggaagaaagcaaatgtcattcctgtttcaagaagcgtaagaaggaggatccagagatctgtcagcctcacccgagtccttagcaattaggtgaacaaatgatcttgcaagccattttcagacatgttagcggctgggagtagtcagtgtggatgtaggaaggagaaataatgctgac

SEQ ID NO: 26349 - DNA, 600 bp, Chicken  19866894242494_1
gctgtgatctgaaacaatttcttactctgagcttaactcctacttatttttaacctttcttagtttggcatgtacatgaagttcatgttattaaagctaaaaagtatggcatgattataaatttggttttaattgggaaaaagaaagaagcagttgggaaatgcagttctgacacccagggccattttactgctccatattagctctgtcttgcaggttggaaattatgatgtgttcttcctttgttttagtaagctgattgccaagtctagaaaagcatcctcttcacaggacgctcayacagcagcccatcacttcatcacttttcagcctggacttcgagctgtgagcagaagctgcttatctcagtcagccctgacagctttttgagatttaggatgagtatatttctggtcttaaattgggagygatgtgattgccatcattatatgctctccaggcttatcagtgctgctatttttcattttctcttgtctccagttaagaagggttaaactatagggttacctgtaaataaaacagcttgtttgatgtttttcttgctgagggggatatctttcttactgagcactgcagcag

SEQ ID NO: 26350 - DNA, 600 bp, Chicken  19866894242494_2
taattgggaaaaagaaagaagcagttgggaaatgcagttctgacacccagggccattttactgctccatattagctctgtcttgcaggttggaaattatgatgtgttcttcctttgttttagtaagctgattgccaagtctagaaaagcatcctcttcacaggacgctcayacagcagcccatcacttcatcacttttcagcctggacttcgagctgtgagcagaagctgcttatctcagtcagccctgacagctttttgagatttaggatgagtatatttctggtcttaaattgggagygatgtgattgccatcattatatgctctccaggcttatcagtgctgctatttttcattttctcttgtctccagttaagaagggttaaactatagggttacctgtaaataaaacagcttgtttgatgtttttcttgctgagggggatatctttcttactgagcactgcagcagtattgtttagtttgcagattcctgctttcgggcttgagttgatgctgtgtaggtggttttgtaaggacacctagaaaatgaagtcggctttgtgaagctaatcagtctttggctaggaaatgagactct

SEQ ID NO: 26351 - DNA, 600 bp, Chicken  19866894242498_1
tattgatctgtataccctttgattatacagcaagctacaaataaatataattgatcacgggaatgcaaaaaattaggtggcatctcaattcttacaaaaaaataactttaattttatatgcacactctgaatttccagtgatcacagaattttttctctgcttgctgcacaatctgctagtgtatagaaagcataaaagacatgctttaaattttagttttatatacataaatttttatattggttgtatttattgtttacatgtactttggtattgattatccatttatatatacttakcatatataatggggaacagcaaagtggaaggtggcagaagaaacatggtgtacctctttatatatgaagaaaacatatgtaaacatctgaaaaatattgcttattacattgtattataaacacaaatattatgtcttttttattatgtagaattataaaatgcatgttaagtatacaaaatacatcaatagtttaatgtatcacagtgtattcctcatacgtttagcatgtatcattgtattacaatatatgaactacttaaatacagcatatcttgtaaaagaaaatatgtataggaat

SEQ ID NO: 26352 - DNA, 600 bp, Chicken  19866894242498_2
atatatgaactacttaaatacagcatatcttgtaaaagaaaatatgtataggaatttcactttgaaaataaaatgcttgacatatagggagcttctatttttcataattgcattgcatttctctgattgtaataaacccacattgtcaggtatttttaataacactgtaatacattgaaaaggctaattctgactagcttcaatttgataatggagttaatgccaatgtctattagactaagtaggattgagactaagtactccgtgagcttaagtttattcccttcgagaaaagcagaygctaaattagatgaacattcacatcttttcttccaagtctatttacaaaatatcaaagattcaaaataagattaatcaattcaagctatcaaatgctaacaacatgaggcctttctaacgttagtatggtaggagacaacattcttctctttgacttcagcccttcatctatttccccttcttgctatggtttttaactatcaacatgtccatgagaagcaacaatccaaagtgtcctgacatgccaaaaccaagtcactgtcactttacaaaggacactctttaacgttaaactgctgt

SEQ ID NO: 26353 - DNA, 599 bp, Chicken  19866894242504_1
  misc_feature (1)..(50): n is any nucleotide
nnnnnnnnnnnnnnnnnnnnnnnnnnnnnnnnnnnnnnnnnnnnnnnnnntgttgattcatatgaacttactggaaactgaacactgagcaataaactcaattcctgcagctacacaggaacactgttagactggtattggtgaccgctgccctgaaggtgacacctatgatttactcggtgtgcattcacaacacaggaactagtgtgcctccagatcatccacttacacccaccttatattgcttgaggtattccaggaacaaaatctcacagacttaaataatctacaactagaatyctccagccactgcaaaagagcactggctgacctgtgccactgtctataggtatcttctagcaagaaaggaaaaggtgagaaatgcagaagtggrgacaaaagtctgggccatacggctccatatttgcaactgacaagcctcagtggaagaagtagcactcactcattctcctttctccctcccartttcctggagcttcctctgcactattttatcacgtgtccagaggaatcagggtgcagagtcaacacaagcaatgcacacagcacatatctcatgataagkgcaaggccagatt

SEQ ID NO: 26354 - DNA, 600 bp, Chicken  19866894242504_2
aactcaattcctgcagctacacaggaacactgttagactggtattggtgaccgctgccctgaaggtgacacctatgatttactcggtgtgcattcacaacacaggaactagtgtgcctccagatcatccacttacacccaccttatattgcttgaggtattccaggaacaaaatctcacagacttaaataatctacaactagaatyctccagccactgcaaaagagcactggctgacctgtgccactgtctataggtatcttctagcaagaaaggaaaaggtgagaaatgcagaagtggrgacaaaagtctgggccatacggctccatatttgcaactgacaagcctcagtggaagaagtagcactcactcattctcctttctccctcccartttcctggagcttcctctgcactattttatcacgtgtccagaggaatcagggtgcagagtcaacacaagcaatgcacacagcacatatctcatgataagkgcaaggccagattaattcctgggacagaacacgtgtgtccacgcgagggcagcagggagcaaaggggaattacaaagctaatctattattcaacaagcaagacaaagg

SEQ ID NO: 26355 - DNA, 600 bp, Chicken  19866894242504_3
ttcacaacacaggaactagtgtgcctccagatcatccacttacacccaccttatattgcttgaggtattccaggaacaaaatctcacagacttaaataatctacaactagaatyctccagccactgcaaaagagcactggctgacctgtgccactgtctataggtatcttctagcaagaaaggaaaaggtgagaaatgcagaagtggrgacaaaagtctgggccatacggctccatatttgcaactgacaagcctcagtggaagaagtagcactcactcattctcctttctccctcccartttcctggagcttcctctgcactattttatcacgtgtccagaggaatcagggtgcagagtcaacacaagcaatgcacacagcacatatctcatgataagkgcaaggccagattaattcctgggacagaacacgtgtgtccacgcgagggcagcagggagcaaaggggaattacaaagctaatctattattcaacaagcaagacaaagggcaaatgagttattatggtccaaaagaaaatatatttgctatactcttacagaaacaattagcaaaaacaggttcttaggctcagcccctgc

SEQ ID NO: 26356 - DNA, 600 bp, Chicken  19866894242504_4
ctacaactagaatyctccagccactgcaaaagagcactggctgacctgtgccactgtctataggtatcttctagcaagaaaggaaaaggtgagaaatgcagaagtggrgacaaaagtctgggccatacggctccatatttgcaactgacaagcctcagtggaagaagtagcactcactcattctcctttctccctcccartttcctggagcttcctctgcactattttatcacgtgtccagaggaatcagggtgcagagtcaacacaagcaatgcacacagcacatatctcatgataagkgcaaggccagattaattcctgggacagaacacgtgtgtccacgcgagggcagcagggagcaaaggggaattacaaagctaatctattattcaacaagcaagacaaagggcaaatgagttattatggtccaaaagaaaatatatttgctatactcttacagaaacaattagcaaaaacaggttcttaggctcagcccctgctgagcaacatcctgtggccycagtgatgtgccctcactgcatcagaagttatgtgagcatctgggaaagctgagagtattttgaaattgggccccctagc

SEQ ID NO: 26357 - DNA, 600 bp, Chicken  19866894242504_5
actattttatcacgtgtccagaggaatcagggtgcagagtcaacacaagcaatgcacacagcacatatctcatgataagkgcaaggccagattaattcctgggacagaacacgtgtgtccacgcgagggcagcagggagcaaaggggaattacaaagctaatctattattcaacaagcaagacaaagggcaaatgagttattatggtccaaaagaaaatatatttgctatactcttacagaaacaattagcaaaaacaggttcttaggctcagcccctgctgagcaacatcctgtggccycagtgatgtgccctcactgcatcagaagttatgtgagcatctgggaaagctgagagtattttgaaattgggccccctagctgtgaagtatgcactattatggctgggccctggaagacagactccacggaagtctcatacttactagcacaaactcgtgccaaatgcactgatctttcagaactgtgtaagtagactgaacgatgtaactgttcctcttaactcagcactttcagcctggtcccagtctcagacgtgtttataaaccaaagtggattcagcagaggctcactaggggctg

SEQ ID NO: 26358 - DNA, 600 bp, Chicken  19866894242505_1
atccactgaagtcttcctcacatctgtctttctgtttttattgaaagtcttgttgaacagaacccgccttcaattgctaattcaatttgtcactgatctatgaacatattagttttttttaatatgtggttgaagcccttgataattgggtatcaactaatgtgactacatggttttaatattattactccttcataggtgttttttgtttgtttgttttttgttttttgtttttttttctttatgatgtcagacattttaaactccagtaatttattgactattgtatctggtgttttytttttttttttaagttatttgaatggtgcttatttcaccactgccatgctaaagaagtaatttgaaaataaagaaacaaggaagaaacaagctatgcttcataatagaaagcagtcacaaagattttaatactgacatggttctcttcgttctatgagtaatatatcacattgaaaataactttctgttgctcctcaaaatacagtggtgcaaagaagaatcattacctactatggaattaatactttattaatctgttaaagaactgttcaactttaaaaatttactaattaaaagggt

SEQ ID NO: 26359 - DNA, 600 bp, Chicken  19866894242507_1
aacctaaacctcccctgtcccagtttaaaactgttcccccttgtcctatcactatccacccttgtaaacaatcctcctcttcctcaaatatgaggatctctaagccgcccctaatttgtatccagaggtggtacttaaaaaaaaaccaaaacaacaacaacaaaaaaaacttcatttttttttccttcccttttttaaagcttgatttgctgtaataagttccaacaggttctttggtgttttggtcaaaggttgttgctaatgacagcaacacgtggtactttcattctaggctgtgtrgggagctttccctgccacacacaggctgagtcaaaggggaaagttggttctgatgtgcagtgygtttctgttccttgcttcactgataaggcagcactgtgttgcttctagtctaatggctgctctgaatttccatttatgcttctaaaatgcatatattacaataacaacaaactcaggcacagctgcctcccagatcaatacacactcaccattcatctttttcttccttagctctctgaaacccagaagtcattggagaaatttgaagaggccttcagcatgcattctgcagagctg

SEQ ID NO: 26360 - DNA, 575 bp, Chicken  19866894242507_2
gtaaacaatcctcctcttcctcaaatatgaggatctctaagccgcccctaatttgtatccagaggtggtacttaaaaaaaaaccaaaacaacaacaacaaaaaaaacttcatttttttttccttcccttttttaaagcttgatttgctgtaataagttccaacaggttctttggtgttttggtcaaaggttgttgctaatgacagcaacacgtggtactttcattctaggctgtgtrgggagctttccctgccacacacaggctgagtcaaaggggaaagttggttctgatgtgcagtgygtttctgttccttgcttcactgataaggcagcactgtgttgcttctagtctaatggctgctctgaatttccatttatgcttctaaaatgcatatattacaataacaacaaactcaggcacagctgcctcccagatcaatacacactcaccattcatctttttcttccttagctctctgaaacccagaagtcattggagaaatttgaagaggccttcagcatgcattctgcagagctgtcagaggtaaagcattatccatgtcctttcgacagtcg

SEQ ID NO: 26361 - DNA, 600 bp, Chicken  19866894242508_1
tagagttggttgaattatcagtcatgtcatagagggaaaggcatggtatatattgatggaagatttttgtaaaagtacccgcgatcagatctttgcaaacattttctatagattttttaaggagtaactgcagcagtactttttgcatcttagtagttatatgacattagcatcgcattgagacagatgcatatgatttgtataaacgagtaatatcaaattaaaaatttgaatcattcttgctggaagcaaatactgggttggaattagctggtggtttcttctcttacatactcatgkatggatatgttctgttctagtggtcccataatttttccagtattaaagatgaataattctttatttgaacatgaaratctctatatttttgcctattttttttcttatatatgcttttttcacatttatttttacaagtatttacagcgtacccagcatgataaatctactacaatgagcctgaattctacagtgaaagaaatgaggacacagtaatttgctttgttctgatttgtttgtttatttaggctttggttttgaactttttcattttctgtaaagaaattttataagggcgca

SEQ ID NO: 26362 - DNA, 600 bp, Chicken  19866894242508_2
acccgcgatcagatctttgcaaacattttctatagattttttaaggagtaactgcagcagtactttttgcatcttagtagttatatgacattagcatcgcattgagacagatgcatatgatttgtataaacgagtaatatcaaattaaaaatttgaatcattcttgctggaagcaaatactgggttggaattagctggtggtttcttctcttacatactcatgkatggatatgttctgttctagtggtcccataatttttccagtattaaagatgaataattctttatttgaacatgaaratctctatatttttgcctattttttttcttatatatgcttttttcacatttatttttacaagtatttacagcgtacccagcatgataaatctactacaatgagcctgaattctacagtgaaagaaatgaggacacagtaatttgctttgttctgatttgtttgtttatttaggctttggttttgaactttttcattttctgtaaagaaattttataagggcgcatagtgacaggatgaggggaaatggctttgaactggaagagagtagatttagatactaggaagaaattctttactgt

SEQ ID NO: 26363 - DNA, 600 bp, Chicken  19866894242511_1
tctctttcaggccctgtaagtatcctgtccttgccacaccatactgtaacttcagcaggagaaactgaggtctgtcttccgcaggttactgtgcagcacaactgttattacaggggtcgtttctttagccccatgtggatgagtgtgaccagaagcattatgtcttggtacctacaaggaggagtaagggatagccaccatcactgccttcatggaactaatgcactttgtttctgatagtggtgacctctttcaaggaggcaggcaggggaacgcctgggctgagtgaagtggctctgmagcttagactctcctaaggtagtggtaggcttaaactttctagagatatagggaaaatggaaatcatctttctccatggagatcagattcatacacaaaggaggaaaatgtcctgcccaccagattttcttaatgataatacatactccctgcttgctaaggagcccaaccccagaaatggacctgccaaatcatcctctacctggtccattcagaaagcctgagcaccagagagagtgaaggcaggatgcacatccttgtgggtgctgcttgcaggaaatttctttctttggggaggat

SEQ ID NO: 26364 - DNA, 600 bp, Chicken  19866894242511_2
gtagtggtaggcttaaactttctagagatatagggaaaatggaaatcatctttctccatggagatcagattcatacacaaaggaggaaaatgtcctgcccaccagattttcttaatgataatacatactccctgcttgctaaggagcccaaccccagaaatggacctgccaaatcatcctctacctggtccattcagaaagcctgagcaccagagagagtgaaggcaggatgcacatccttgtgggtgctgcttgcaggaaatttctttctttggggaggataaaaacggggcagatctraagtgtttttttggagaagttttcatttgttggtagctgtagagcttacatggcatagctttgtctatccaaagcaccatagaagagaagcagccagctaccttctctgaaaatccagcattcttgaaaatgtcacagtatctctttgctgagcatttcctcattttgtttgtttttgtggaatttaatccaattttccttccatataaaggcatcataaattattcaagtgatgatagattgattatagatcaggttatttttatcggtcctccaggtgctcaagctttgatgtaacag

SEQ ID NO: 26365 - DNA, 599 bp, Chicken  19866894242514_1
  misc_feature (1)..(109): n is any nucleotide
nnnnnnnnnnnnnnnnnnnnnnnnnnnnnnnnnnnnnnnnnnnnnnnnnnnnnnnnnnnnnnnnnnnnnnnnnnnnnnnnnnnnnnnnnnnnnnnnnnnnnnnnnnnnnataataagcagtgcgggtcacctctctgcaatctctgggtctcctgagagtgcctgttagtgcagcagcagtggtgtggaaaggactgtcagctacaaggtaatttagagctacacagagacagaggcgtttggtgtgagtgtgctacaaacaacacaagctgttgtggtgcgaggtccttctccttcctytgtttctacactagccaggaactagattgtcctcctgaagggacagtgatatgtttgtttgtgtgtcctgaagctctaaacttttcccattgagtacattgtaataacgggtagcttaacactgggctttctgactattcttcttgctcaggtgccaagaaataaaacttaactgtatgagaaaactctgctttcccatctgccttcctattcttcctgcattgtggtacccactgatctcacagcacataacaatggggagaaatggcacaggcactgccaactggaggaacagatgg

SEQ ID NO: 26366 - DNA, 600 bp, Chicken  19866894242517_1
gaagactcctttttaattttctccttcccattcatcaagtgcaaattacacccccccactgtgactacacgacggtccatgcgacggcagactctttgacagcacccaaggacaagatgaaagaggagataaaatacagatatgaacaaggaacaaagggaaactgcagtgttagcagagagacagaatgaaaatcaggtacagctacaagggcttatccagctccattccacagagttcattttgagaatgtattcgtgttaatctcattgattctgttttaaatcaggccattttatkggcctgaattcatatgcctttagagggtgtgaaattttaagcractaagtaccatctcaagtgcttrtaaagactctctaaaagtggaatggctacaaacctccagtgatatacaggcatgggctctcttacctgtctgagatacatgtatcaggcgctataatcaattcaaggcatactccggtgccaaaaataccaaaatataaaataaaacccacatgactaaaacatgaaagatgttgtggacggtggaaggaaaaggttaaaacagcacagttaaaaacattctgctaatactga

SEQ ID NO: 26367 - DNA, 600 bp, Chicken  19866894242517_2
aattacacccccccactgtgactacacgacggtccatgcgacggcagactctttgacagcacccaaggacaagatgaaagaggagataaaatacagatatgaacaaggaacaaagggaaactgcagtgttagcagagagacagaatgaaaatcaggtacagctacaagggcttatccagctccattccacagagttcattttgagaatgtattcgtgttaatctcattgattctgttttaaatcaggccattttatkggcctgaattcatatgcctttagagggtgtgaaattttaagcractaagtaccatctcaagtgcttrtaaagactctctaaaagtggaatggctacaaacctccagtgatatacaggcatgggctctcttacctgtctgagatacatgtatcaggcgctataatcaattcaaggcatactccggtgccaaaaataccaaaatataaaataaaacccacatgactaaaacatgaaagatgttgtggacggtggaaggaaaaggttaaaacagcacagttaaaaacattctgctaatactgaacaattaagagagatgccaagaggatatgaaggaacagtccag

SEQ ID NO: 26368 - DNA, 600 bp, Chicken  19866894242517_3
cacgacggtccatgcgacggcagactctttgacagcacccaaggacaagatgaaagaggagataaaatacagatatgaacaaggaacaaagggaaactgcagtgttagcagagagacagaatgaaaatcaggtacagctacaagggcttatccagctccattccacagagttcattttgagaatgtattcgtgttaatctcattgattctgttttaaatcaggccattttatkggcctgaattcatatgcctttagagggtgtgaaattttaagcractaagtaccatctcaagtgcttrtaaagactctctaaaagtggaatggctacaaacctccagtgatatacaggcatgggctctcttacctgtctgagatacatgtatcaggcgctataatcaattcaaggcatactccggtgccaaaaataccaaaatataaaataaaacccacatgactaaaacatgaaagatgttgtggacggtggaaggaaaaggttaaaacagcacagttaaaaacattctgctaatactgaacaattaagagagatgccaagaggatatgaaggaacagtccaggttacacaaagttcatcctccaca

SEQ ID NO: 26369 - DNA, 600 bp, Chicken  19866894242517_4
aaagactctctaaaagtggaatggctacaaacctccagtgatatacaggcatgggctctcttacctgtctgagatacatgtatcaggcgctataatcaattcaaggcatactccggtgccaaaaataccaaaatataaaataaaacccacatgactaaaacatgaaagatgttgtggacggtggaaggaaaaggttaaaacagcacagttaaaaacattctgctaatactgaacaattaagagagatgccaagaggatatgaaggaacagtccaggttacacaaagttcatcctccacawgaatgcaaagtaagactaaayagaagagaggaaaatatcacatactgggaaaatataatcaaaattatctggttttctgccaatagtcaattcatgacacagatggggataaaaatttccaggcatcaaaacccacaacgtggttcaaataacagcaagcaaataaaaatattgcaagcctgttttatgctgttttttaaaatatttctgccacaagaggtaaccaccttcatttaggaatgtggtatttactaaaaagaagttacagaagtcctttgagacttgcataaaaatgaaatt

SEQ ID NO: 26370 - DNA, 600 bp, Chicken  19866894242517_5
tggctacaaacctccagtgatatacaggcatgggctctcttacctgtctgagatacatgtatcaggcgctataatcaattcaaggcatactccggtgccaaaaataccaaaatataaaataaaacccacatgactaaaacatgaaagatgttgtggacggtggaaggaaaaggttaaaacagcacagttaaaaacattctgctaatactgaacaattaagagagatgccaagaggatatgaaggaacagtccaggttacacaaagttcatcctccacawgaatgcaaagtaagactaaayagaagagaggaaaatatcacatactgggaaaatataatcaaaattatctggttttctgccaatagtcaattcatgacacagatggggataaaaatttccaggcatcaaaacccacaacgtggttcaaataacagcaagcaaataaaaatattgcaagcctgttttatgctgttttttaaaatatttctgccacaagaggtaaccaccttcatttaggaatgtggtatttactaaaaagaagttacagaagtcctttgagacttgcataaaaatgaaatttcctgccattttcagcagtaa

SEQ ID NO: 26371 - DNA, 600 bp, Chicken  19866894242518_1
agctttaaggtcccttccaactgaagccatttcatgattctaggattctaaatgagtctgcagctctcttagttttaactatcaaaaattcaaattcatatttacttggtaggcaaccagttctaaggctgagagtaagtcacatcttgatcttagagaagcaaaaaacagcttagagatcttttacagctgacaaacagctaaccatactcacaggtcaatggccataaaaatcattttcagagcaacagaacttgctatcagctcagtaaaacacagcctactggattttgcatgcaktttaagaatcatcatccacaagtgctacatcaaaggtaattaagtagaggaaaattgtaaaggcaaatcaaagtaaaaatgtacaagcatgcctcataaagaaacctttaaaacagaagacatttatgaaaaacccactccagaacaattacagcttaagaaaatatggtttgggcatctgaacaccaaggggaattcgggaatgcaagacactgtctatagaattattttcatagacatgagttatatctgagaacaccagtgatatagaacgttaccacactgccttttattattatt

SEQ ID NO: 26372 - DNA, 600 bp, Chicken  19866894242526_1
atgttgcttgctatgccttaaactaacaaattaatagggctttggtgaagtttcacaacctggtttatagtaatcataaaaagaaacaagaatggctgcattttacctgctcagaacttctctttgctgtctaattgcagtcacagaagttcatagtcacagtgcaaagtcactttcatagctacttccttcttaatgctggaagagtgtataatcttgaaagaaaatgcaaaaagtaaagcagacatctttgtaatcttaccctatttacaccactattaaagttataagatattacaygctcttctaagtgcatgcattttttccccacaggaaaaccagtagctgttactagcaacagaggtgcaggaaaggcaccgctgcgccctggtgcaaacccccagcttgaatggcaatattaccagaataagctattgaatggcaaagcaggtacagataagtctatttgtttaaattgttttgtaattgaagactttttccttaaagttattaataagtgcacagtggataaactgttttttcatatgtggaatttcagttaaagaaatgtctttggacaacttaatgttccgtggcttc

SEQ ID NO: 26373 - DNA, 599 bp, Chicken  19866894242540_1
  misc_feature (1)..(156): n is any nucleotide
nnnnnnnnnnnnnnnnnnnnnnnnnnnnnnnnnnnnnnnnnnnnnnnnnnnnnnnnnnnnnnnnnnnnnnnnnnnnnnnnnnnnnnnnnnnnnnnnnnnnnnnnnnnnnnnnnnnnnnnnnnnnnnnnnnnnnnnnnnnnnnnnnnnnnnnnnnnntgttagatttctgtgctagtggatgctcgcttaaaaaaaaaataatgaagtcactgctttaatgtaccacctagcagctaaagcaaggtttattttgaatgcacagtgaagctcaaaactatccatttaaaggtggactgacaragcagcaaccacacaaaactattttttaagtataaaacttytagtcttctggtctgaagcttatgctctagcatctacacagcaatgtgcccctgtggccaaggtcagtggtatcctgggatgcattaaaaagagcatggacagccggtcaaggaaggacatccttccactctatcctgccctggtgaagccacatctggaatactgtgtccagttctgggctctccagttcaaaaaaaagacagggatctcctagaaagagtgcagcagatggcaacaaagaagattaagggcctgga

SEQ ID NO: 26374 - DNA, 599 bp, Chicken  19866894242540_2
  misc_feature (1)..(115): n is any nucleotide
nnnnnnnnnnnnnnnnnnnnnnnnnnnnnnnnnnnnnnnnnnnnnnnnnnnnnnnnnnnnnnnnnnnnnnnnnnnnnnnnnnnnnnnnnnnnnnnnnnnnnnnnnnnnnnnnnnntgttagatttctgtgctagtggatgctcgcttaaaaaaaaaataatgaagtcactgctttaatgtaccacctagcagctaaagcaaggtttattttgaatgcacagtgaagctcaaaactatccatttaaaggtggactgacaragcagcaaccacacaaaactattttttaagtataaaacttytagtcttctggtctgaagcttatgctctagcatctacacagcaatgtgcccctgtggccaaggtcagtggtatcctgggatgcattaaaaagagcatggacagccggtcaaggaaggacatccttccactctatcctgccctggtgaagccacatctggaatactgtgtccagttctgggctctccagttcaaaaaaaagacagggatctcctagaaagagtgcagcagatggcaacaaagaagattaagggcctggagcatctcccgaaggaggaaagactgagaaagctgggactct

SEQ ID NO: 26375 - DNA, 600 bp, Chicken  19866894242540_3
ctaaagcaaggtttattttgaatgcacagtgaagctcaaaactatccatttaaaggtggactgacaragcagcaaccacacaaaactattttttaagtataaaacttytagtcttctggtctgaagcttatgctctagcatctacacagcaatgtgcccctgtggccaaggtcagtggtatcctgggatgcattaaaaagagcatggacagccggtcaaggaaggacatccttccactctatcctgccctggtgaagccacatctggaatactgtgtccagttctgggctctccagttcyaaaaaaagacagggatctcctagaaagagtgcagcagatggcaacaaagaagattaagggcctggagcatctcccgaaggaggaaagactgagaaagctgggactcttcagtctgaagaacagaaggctaaaagaggatctcataactgttcctaaatatctgaagtgtgggaggactcctttyggtggcatgtagtaatagaacaagggrcaagggracaaaactggagcacaggaagttccatactgacacaaggaagaacttctttacagcaagaccaatgcaacactggaacaggc

SEQ ID NO: 26376 - DNA, 600 bp, Chicken  19866894242540_4
gggatgcattaaaaagagcatggacagccggtcaaggaaggacatccttccactctatcctgccctggtgaagccacatctggaatactgtgtccagttctgggctctccagttcaaaaaaaagacagggatctcctagaaagagtgcagcagatggcaacaaagaagattaagggcctggagcatctcccgaaggaggaaagactgagaaagctgggactcttcagtctgaagaacagaaggctaaaagaggatctcataactgttcctaaatatctgaagtgtgggaggactcctttyggtggcatgtagtaatagaacaagggrcaagggracaaaactggagcacaggaagttccatactgacacaaggaagaacttctttacagcaagaccaatgcaacactggaacaggctgcccagagactttgtgaagtctccttctctgcagctattcaacacacatctggatgcctatgtgtttgacctaaagcacggaacctgctttagcagggggttggactcagatctctaaaggtcccttctaacccctacaattctgtgattctgtcatcctacaacttctactttcagtatgca

SEQ ID NO: 26377 - DNA, 600 bp, Chicken  19866894242540_5
ccggtcaaggaaggacatccttccactctatcctgccctggtgaagccacatctggaatactgtgtccagttctgggctctccagttcaaaaaaaagacagggatctcctagaaagagtgcagcagatggcaacaaagaagattaagggcctggagcatctcccgaaggaggaaagactgagaaagctgggactcttcagtctgaagaacagaaggctaaaagaggatctcataactgttcctaaatatctgaagtgtgggaggactcctttyggtggcatgtagtaatagaacaagggrcaagggracaaaactggagcacaggaagttccatactgacacaaggaagaacttctttacagcaagaccaatgcaacactggaacaggctgcccagagactttgtgaagtctccttctctgcagctattcaacacacatctggatgcctatgtgtttgacctaaagcacggaacctgctttagcagggggttggactcagatctctaaaggtcccttctaacccctacaattctgtgattctgtcatcctacaacttctactttcagtatgcartactctgtctccctcacttgaccaaa

SEQ ID NO: 26378 - DNA, 600 bp, Chicken  19866894242540_6
aggaaggacatccttccactctatcctgccctggtgaagccacatctggaatactgtgtccagttctgggctctccagttcaaaaaaaagacagggatctcctagaaagagtgcagcagatggcaacaaagaagattaagggcctggagcatctcccgaaggaggaaagactgagaaagctgggactcttcagtctgaagaacagaaggctaaaagaggatctcataactgttcctaaatatctgaagtgtgggaggactcctttyggtggcatgtagtaatagaacaagggrcaagggracaaaactggagcacaggaagttccatactgacacaaggaagaacttctttacagcaagaccaatgcaacactggaacaggctgcccagagactttgtgaagtctccttctctgcagctattcaacacacatctggatgcctatgtgtttgacctaaagcacggaacctgctttagcagggggttggactcagatctctaaaggtcccttctaacccctacaattctgtgattctgtcatcctacaacttctactttcagtatgcartactctgtctccctcacttgaccaaatcacawa

SEQ ID NO: 26379 - DNA, 600 bp, Chicken  19866894242540_7
gtggcatgtagtaatagaacaagggrcaagggracaaaactggagcacaggaagttccatactgacacaaggaagaacttctttacagcaagaccaatgcaacactggaacaggctgcccagagactttgtgaagtctccttctctgcagctattcaacacacatctggatgcctatgtgtttgacctaaagcacggaacctgctttagcagggggttggactcagatctctaaaggtcccttctaacccctacaattctgtgattctgtcatcctacaacttctactttcagtatgcartactctgtctccctcacttgaccaaatcacawatagcagttaccggtctcacacagaggtggaccttggaatcattgcacgtttatagtttgacatttagcaagtgccagtccttgctaaaaacctgattaactgttgattcaaaaatgaacatttagagttgtaaattatttgcaaccgacagtattttttttcctagagaaaaaaaaaaagttacacacaaaacaaaaagcacagcatctgtgacattgctttctgtctaaaatacaaacaattatttacaatttttaggaagctgaa

SEQ ID NO: 26380 - DNA, 600 bp, Chicken  19866894242540_8
racaaaactggagcacaggaagttccatactgacacaaggaagaacttctttacagcaagaccaatgcaacactggaacaggctgcccagagactttgtgaagtctccttctctgcagctattcaacacacatctggatgcctatgtgtttgacctaaagcacggaacctgctttagcagggggttggactcagatctctaaaggtcccttctaacccctacaattctgtgattctgtcatcctacaacttctactttcagtatgcartactctgtctccctcacttgaccaaatcacawatagcagttaccggtctcacacagaggtggaccttggaatcattgcacgtttatagtttgacatttagcaagtgccagtccttgctaaaaacctgattaactgttgattcaaaaatgaacatttagagttgtaaattatttgcaaccgacagtattttttttcctagagaaaaaaaaaaagttacacacaaaacaaaaagcacagcatctgtgacattgctttctgtctaaaatacaaacaattatttacaatttttaggaagctgaagaggggaataaaaaaaatagaagtaatttccc

SEQ ID NO: 26381 - DNA, 599 bp, Chicken  19866894242541_1
  misc_feature (1)..(97): n is any nucleotide
nnnnnnnnnnnnnnnnnnnnnnnnnnnnnnnnnnnnnnnnnnnnnnnnnnnnnnnnnnnnnnnnnnnnnnnnnnnnnnnnnnnnnnnnnnnnnnnnncttgaatttctggatatatggccatatacagcagagcccagcggatggttgtagaggtggtctcagtcccagcaaaaaacaggtcgagagtgcatgacaccatgttatcctcacagaagtcactgccattgggcttcagaaaattgagcgttagtgccatatgaacagcgaggacttcctcaataccccacacagttctgccygaagggttttggtataagctgtatcctcatccctccagtggatgtcccaaatctgatgtcctttctgagctaacagatggacacaccagcagctcaggtggggaatttgatttgtttctcagccctcctgatctctaatccccactgtggaaggccttgctccacattgctgaccttggccatctcctgcaggtagctgtcgatgaagtcccggctctctgaggggctcagatcttccttatgtttgctgatcttcttgcacacaaaccttttcatgagcttctcatttttcaaaactg

SEQ ID NO: 26382 - DNA, 600 bp, Chicken  19866894242541_2
tggctcattggctccccttggagggtaacagtctcatccatcagccgcagcaagttctggaagtcctcatcatgatattcaaaccggttgccaaaggtgacagagcagatgatgtttgaaacagcattattgactttaaggtgagggttgaaaggatttcctggagaaggaaaagcaaacaatcaattttcttcttgtctccacagaaaaagggaagaaagcgccatcagcagagggaaaatagtcaacaagtgaaatgaatggtattcagtgggcaccttcttagagatagttgtttaytttggaaaggaagrtttgaaatggctgcagaagagcaaacaccattggaattaattgtgaacattggtgctgacagattcatggaattttctagaggtctcaaattcagcaagaggacaaaggtggggtaagaataatgttttgattgttacacagctgcatctatcatttgatctgagggcaaaacacctgtagagggaatctggaatgaagacagcttgctagcattacttatgagatgaggaggaagcaggatgttggtgtgttagctggcagcctggctgaaggtgagccagtagt

SEQ ID NO: 26383 - DNA, 600 bp, Chicken  19866894242541_3
cccttggagggtaacagtctcatccatcagccgcagcaagttctggaagtcctcatcatgatattcaaaccggttgccaaaggtgacagagcagatgatgtttgaaacagcattattgactttaaggtgagggttgaaaggatttcctggagaaggaaaagcaaacaatcaattttcttcttgtctccacagaaaaagggaagaaagcgccatcagcagagggaaaatagtcaacaagtgaaatgaatggtattcagtgggcaccttcttagagatagttgtttaytttggaaaggaagrtttgaaatggctgcagaagagcaaacaccattggaattaattgtgaacattggtgctgacagattcatggaattttctagaggtctcaaattcagcaagaggacaaaggtggggtaagaataatgttttgattgttacacagctgcatctatcatttgatctgagggcaaaacacctgtagagggaatctggaatgaagacagcttgctagcattacttatgagatgaggaggaagcaggatgttggtgtgttagctggcagcctggctgaaggtgagccagtagtgtgcctacatggca

SEQ ID NO: 26384 - DNA, 600 bp, Chicken  19866894242546_1
gacgaagatgacacaaccttcctgaaacctatttccacctctcccctcttgcccatcccccccaggtgcttccagagttggtagtgtttcagcatgtccattttctaccaaagcagcccagcctatggctctgcacagacttgatgaggccttattactgtgatggctggctgcttgggaagaggcaggcaggcttagttcagagagattttacctcttttgcaatcagaattatcaataaaagtgcttgagagagatgcaggcactgctctgagggcagaactacaaggggaaaaggcrgggaaaacaaggtataataaaaactcaggacatttcatactgggatccaagttattggccttagctccattgcacagtttgaaggaaaagcaagaaaaagtcttcaatttaaggtaagaacttaggagacacttgcgtgaatgatggggcactcaggccctcttttttcattcatgtggatcagaccccactcacctcattctagggttgtcagaacacacagagttatagaatcacagaatagtaggatggcttgggttggaagggaccttaaagatcatagaaccatagaatggctgg

SEQ ID NO: 26385 - DNA, 600 bp, Chicken  19866894242547_1
cacctgcaaaatggaaacttagttcatgtcagtgggcatcacctagcccatgagcagggttggagccctggctttaagctctctcatgtttgcctctctctacagtccacagtagcgcagggtttattgttctcccataagattatctctacctcttcctacactctttttagccatttacacccagactaacgttgtcagtgtggcaacatgggagaagttcaggaaaagcttcattctatcgaatcacagccttcccaaagggctctgttcgacatgtgctgattgggaagcaacacrgaaacaaagcctttctctcagggactcgggtgaatgggccctgcagagtgggaaaggtggtggcaccagggctgatccctgctcctcccctgggagctgctgtcacagcttggcagctattgcagaaatcacaactcacaggcatgcggcgttgttcatcacactaaattaaatcaccagcacgaggcaatacggcctgctgggaattacagaggtcaaggaaccagcagacatttgcgcctccctccctttctgctatgaacacagaagctcacaccttctccgccccagagagatttg

SEQ ID NO: 26386 - DNA, 600 bp, Chicken  19866894242552_1
aacctccatctaaaccaaatacgcaattgagctgcactacacccaaagccaagccacattccgtgcccttcacctcagctaacaagcacaccaaccacagcactgtgctaagacagctaagaaggttcaagcttggccaccaactctttgctgagcctgctggctgtgtagcagcacatgaccactgaggggtgaagttggtccatacggccctttctgcattggaattttggtcagctgtagcctgcacactgctgctaccacaggctaatacagtcatggtccaacggctgtgcgcasctaaacactagaccttttgatttctgcagtgccctgtggcctttaaaggccatgagggtgagaggtcgagctgttacgcacctcagggctcacagttcagtaagtaaagccaccgacagctgtcatttggttacagtttgacattttgaaagctggaggacagccagcgtaagarctcagcctcaacgctaaggatggcattctgggcaaccctggaatgggatcctttgctcctgcagcgttgctgaggatctcatctatttatatcaaaaagggctcgtccaccacaagcagtgttga

SEQ ID NO: 26387 - DNA, 600 bp, Chicken  19866894242552_2
acatgaccactgaggggtgaagttggtccatacggccctttctgcattggaattttggtcagctgtagcctgcacactgctgctaccacaggctaatacagtcatggtccaacggctgtgcgcasctaaacactagaccttttgatttctgcagtgccctgtggcctttaaaggccatgagggtgagaggtcgagctgttacgcacctcagggctcacagttcagtaagtaaagccaccgacagctgtcatttggttacagtttgacattttgaaagctggaggacagccagcgtaagarctcagcctcaacgctaaggatggcattctgggcaaccctggaatgggatcctttgctcctgcagcgttgctgaggatctcatctatttatatcaaaaagggctcgtccaccacaagcagtgttgatttcttctgaccttagtcttagaggtttattgccccccaagtgacaagcaaccagcctcatgactactgggaacataacctgagcagctggctagccaggcaagtccagaagctcaattctttcaaatgcacacagtaattacttcaaatgatttatattttgagacaaggtcat

SEQ ID NO: 26388 - DNA, 600 bp, Chicken  19866894242552_3
gctcgtccaccacaagcagtgttgatttcttctgaccttagtcttagaggtttattgccccccaagtgacaagcaaccagcctcatgactactgggaacataacctgagcagctggctagccaggcaagtccagaagctcaattctttcaaatgcacacagtaattacttcaaatgatttatattttgagacaaggtcattcactgaccgcttgcaaagcctccaacagtgaagcagggcgaacaactgatagttgtgtactcctgcaggggtgcacaagtaactcaggagcagcagtcytgtaaaggaaatgcaagttcactcccccacgaggggggaaagaagtgaagggcctcagatatcagctacctgactcccaaggtagaggtaggtacagagaagggtgtggaaacaactcaagctgcttccagaaagcactgaaattttatcagcagtcttgcaggcttggtatttacagctggcacacttcccccacacataaagctaaagttctgtcttcctacactaccacagctgctctgcagcaagctcgatttcccttggtctcctcttacagaagggaaggaagggatgagcagt

SEQ ID NO: 26389 - DNA, 600 bp, Chicken  19866894242553_1
ctgaacgtacgttgaaatgctcagacctcaactttaacaactgttcgtactttctccttcactattatatttcatgcttcgctttttttagcaaaaaactatttcaactgcatcttcacaagatgtggtgaccacttcactttttagataacaatgtgaacagtctcatgaatgaaagattgtttgcaactttcacctatattactgcatggagacaaggactagaagaggtgttcagctttccctagacctactatttaatatgaaaaatagacattttcagccatgtacatgcactaytcagtgcaactagttttctcttgctaagttcttgcccacactaaggagtcagcccatgacactggcacatcaggagcactggtgagtgacagcttgttctgcctttctatcttagtttatcggtattctatgtcatggcatcatgcagcagactgtctgacatttaagcacagtgctgggtgcacttcctgcgctgaggaggactgactctcctcctgtttatttttggtttgtttgatttattatttttaattattctgtattatctcacattgcttttgataaattagtttctcttat

SEQ ID NO: 26390 - DNA, 600 bp, Chicken  19866894242554_1
ccccttcccctctctcctttccccatagtacttcaagtcagagaaatcatcacaacaagcaggtctcccttggagcccagggagaccacgcaactctcccttttctgactaggatttctttctatagtgactctgtaattttgtttagttaaattctattgccagtttgctggtaagaccagggttgtgtatgagtatgagactgtgtatttttaatctgtcttttcaatgattcaagtgagaccccttactgagcctgtatatttcagaatagtcttctactgagcaagaggagtctcyggggtagcttgaatgaatgtatggctatcttacttgacttaatgatgattctttgaaaaggaatttaaacttgccttttaaaatatttatcatttttggtagtatggccgtctctttgtagaagcatttctgaagcttgccatgcctctcctggaccacagctttaaaaaacatcgggtaagtgctttggaaagagaactgtctggacccarttgggaagcatgactaatgcttgctataacactcyggcgtaacacttgtgacacttratgaccaatgtgtctgatgtctccagctgtg

SEQ ID NO: 26391 - DNA, 567 bp, Chicken  19866894242554_2
ttaatctgtcttttcaatgattcaagtgagaccccttactgagcctgtatatttcagaatagtcttctactgagcaagaggagtctcyggggtagcttgaatgaatgtatggctatcttacttgacttaatgatgattctttgaaaaggaatttaaacttgccttttaaaatatttatcatttttggtagtatggccgtctctttgtagaagcatttctgaagcttgccatgcctctcctggaccacagctttaaaaaacatcgggtaagtgctttggaaagagaactgtctggacccarttgggaagcatgactaatgcttgctataacactcyggcgtaacacttgtgacacttratgaccaatgtgtctgatgtctccagctgtgctgtgttctgctycactagcctgtccagtgctccctcagcaaacagtatttcccagcttgtcaagaacctttggcaaagctggatggctttcctgatagcagaggaaaccctttcaacctcctccttcaaataccatcaccatagaggtgtcactcacagagtggggaagggtcacgtt

SEQ ID NO: 26392 - DNA, 532 bp, Chicken  19866894242554_3
ttactgagcctgtatatttcagaatagtcttctactgagcaagaggagtctcyggggtagcttgaatgaatgtatggctatcttacttgacttaatgatgattctttgaaaaggaatttaaacttgccttttaaaatatttatcatttttggtagtatggccgtctctttgtagaagcatttctgaagcttgccatgcctctcctggaccacagctttaaaaaacatcgggtaagtgctttggaaagagaactgtctggacccarttgggaagcatgactaatgcttgctataacactcyggcgtaacacttgtgacacttratgaccaatgtgtctgatgtctccagctgtgctgtgttctgctycactagcctgtccagtgctccctcagcaaacagtatttcccagcttgtcaagaacctttggcaaagctggatggctttcctgatagcagaggaaaccctttcaacctcctccttcaaataccatcaccatagaggtgtcactcacagagtggggaagggtcacgtt

SEQ ID NO: 26393 - DNA, 510 bp, Chicken  19866894242554_4
aatagtcttctactgagcaagaggagtctcyggggtagcttgaatgaatgtatggctatcttacttgacttaatgatgattctttgaaaaggaatttaaacttgccttttaaaatatttatcatttttggtagtatggccgtctctttgtagaagcatttctgaagcttgccatgcctctcctggaccacagctttaaaaaacatcgggtaagtgctttggaaagagaactgtctggacccarttgggaagcatgactaatgcttgctataacactcyggcgtaacacttgtgacacttratgaccaatgtgtctgatgtctccagctgtgctgtgttctgctycactagcctgtccagtgctccctcagcaaacagtatttcccagcttgtcaagaacctttggcaaagctggatggctttcctgatagcagaggaaaccctttcaacctcctccttcaaataccatcaccatagaggtgtcactcacagagtggggaagggtcacgtt

SEQ ID NO: 26394 - DNA, 466 bp, Chicken  19866894242554_5
tgaatgtatggctatcttacttgacttaatgatgattctttgaaaaggaatttaaacttgccttttaaaatatttatcatttttggtagtatggccgtctctttgtagaagcatttctgaagcttgccatgcctctcctggaccacagctttaaaaaacatcgggtaagtgctttggaaagagaactgtctggacccarttgggaagcatgactaatgcttgctataacactcyggcgtaacacttgtgacacttratgaccaatgtgtctgatgtctccagctgtgctgtgttctgctycactagcctgtccagtgctccctcagcaaacagtatttcccagcttgtcaagaacctttggcaaagctggatggctttcctgatagcagaggaaaccctttcaacctcctccttcaaataccatcaccatagaggtgtcactcacagagtggggaagggtcacgtt

SEQ ID NO: 26395 - DNA, 600 bp, Chicken  19866894242555_1
ctctaagggggctgagcagagtgagaaccagtgcttcaaggcccggctcgctcacatcccctgtgcagctctgcctcagccgctcggacgcagcgcagcttcccacccacggacaggagggtgggcgataccggctctcagcagctcttaccctggagatggagagcggcatgctgaagtccttccctccctgcagccggaacccccagggcgccggcccgttcagcatcaccttataggactccatctcgcccatctctgcaaaatggaagagggtgtgatcctgacgttatgccgcaygggaacgacgcggggagcgggcgaggagggggcccagcaggactgggcaggaggagacaggtcacactgccagcaggagctccaccctgaccgtcccacagcgtggttagggacgcaccccacatmcatcagcatctcctaaggggcagctggagccgaggggccggagtaaygcacrgagcgagactcagccatcccaaacccgggcccggctctgccttgcagcactgttacagaacctcgagctgcgaggagctgttccaggctgcagagaggcagcagcacagagggatggcagcc

SEQ ID NO: 26396 - DNA, 600 bp, Chicken  19866894242555_2
gataccggctctcagcagctcttaccctggagatggagagcggcatgctgaagtccttccctccctgcagccggaacccccagggcgccggcccgttcagcatcaccttataggactccatctcgcccatctctgcaaaatggaagagggtgtgatcctgacgttatgccgcaygggaacgacgcggggagcgggcgaggagggggcccagcaggactgggcaggaggagacaggtcacactgccagcaggagctccaccctgaccgtcccacagcgtggttagggacgcaccccacatmcatcagcatctcctaaggggcagctggagccgaggggccggagtaaygcacrgagcgagactcagccatcccaaacccgggcccggctctgccttgcagcactgttacagaacctcgagctgcgaggagctgttccaggctgcagagaggcagcagcacagagggatggcagccagaggcgttccgccgggtgagcagcacggcagcacgctgccaccagggctgcctggcacggcagctgggctgcagcagcagcagctggtcgagcagctgtacctgggtgtgagcccatctccgcag

SEQ ID NO: 26397 - DNA, 600 bp, Chicken  19866894242555_3
ctgaagtccttccctccctgcagccggaacccccagggcgccggcccgttcagcatcaccttataggactccatctcgcccatctctgcaaaatggaagagggtgtgatcctgacgttatgccgcaygggaacgacgcggggagcgggcgaggagggggcccagcaggactgggcaggaggagacaggtcacactgccagcaggagctccaccctgaccgtcccacagcgtggttagggacgcaccccacatmcatcagcatctcctaaggggcagctggagccgaggggccggagtaaygcacrgagcgagactcagccatcccaaacccgggcccggctctgccttgcagcactgttacagaacctcgagctgcgaggagctgttccaggctgcagagaggcagcagcacagagggatggcagccagaggcgttccgccgggtgagcagcacggcagcacgctgccaccagggctgcctggcacggcagctgggctgcagcagcagcagctggtcgagcagctgtacctgggtgtgagcccatctccgcagggttccgggcaggaggsatggatgccccgtgctcacgctgacagctg

SEQ ID NO: 26398 - DNA, 600 bp, Chicken  19866894242555_4
gtccttccctccctgcagccggaacccccagggcgccggcccgttcagcatcaccttataggactccatctcgcccatctctgcaaaatggaagagggtgtgatcctgacgttatgccgcaygggaacgacgcggggagcgggcgaggagggggcccagcaggactgggcaggaggagacaggtcacactgccagcaggagctccaccctgaccgtcccacagcgtggttagggacgcaccccacatmcatcagcatctcctaaggggcagctggagccgaggggccggagtaaygcacrgagcgagactcagccatcccaaacccgggcccggctctgccttgcagcactgttacagaacctcgagctgcgaggagctgttccaggctgcagagaggcagcagcacagagggatggcagccagaggcgttccgccgggtgagcagcacggcagcacgctgccaccagggctgcctggcacggcagctgggctgcagcagcagcagctggtcgagcagctgtacctgggtgtgagcccatctccgcagggttccgggcaggaggsatggatgccccgtgctcacgctgacagctgtcagc

SEQ ID NO: 26399 - DNA, 600 bp, Chicken  19866894242555_5
gggcagctggagccgaggggccggagtaaygcacrgagcgagactcagccatcccaaacccgggcccggctctgccttgcagcactgttacagaacctcgagctgcgaggagctgttccaggctgcagagaggcagcagcacagagggatggcagccagaggcgttccgccgggtgagcagcacggcagcacgctgccaccagggctgcctggcacggcagctgggctgcagcagcagcagctggtcgagcagctgtacctgggtgtgagcccatctccgcagggttccgggcaggaggsatggatgccccgtgctcacgctgacagctgtcagccggcccaggcgcggggcacgcggctgcacctcgcctaargggaaccgcggggaccttccgagccctacgtggcgggcaaaggcggctctgggacatctcgtcgtgccccgacggggcagggaagccgcgaggccggagccgggagtgcccccgctcccccccagcccgtcccgggctatataaggcgtgtaagctgacacccgctgctccccgctcgctgggtgcaggctgcgtgtcacacattccccagcacggagcggccgca

SEQ ID NO: 26400 - DNA, 600 bp, Chicken  19866894242555_6
ccttgcagcactgttacagaacctcgagctgcgaggagctgttccaggctgcagagaggcagcagcacagagggatggcagccagaggcgttccgccgggtgagcagcacggcagcacgctgccaccagggctgcctggcacggcagctgggctgcagcagcagcagctggtcgagcagctgtacctgggtgtgagcccatctccgcagggttccgggcaggaggsatggatgccccgtgctcacgctgacagctgtcagccggcccaggcgcggggcacgcggctgcacctcgcctaargggaaccgcggggaccttccgagccctacgtggcgggcaaaggcggctctgggacatctcgtcgtgccccgacggggcagggaagccgcgaggccggagccgggagtgcccccgctcccccccagcccgtcccgggctatataaggcgtgtaagctgacacccgctgctccccgctcgctgggtgcaggctgcgtgtcacacattccccagcacggagcggccgcacagccccgacggggctccccgctccgagggctccggcagcacygggccgggggctgctcgggaggagccgagat

SEQ ID NO: 26401 - DNA, 600 bp, Chicken  19866894242555_7
gcgcggggcacgcggctgcacctcgcctaargggaaccgcggggaccttccgagccctacgtggcgggcaaaggcggctctgggacatctcgtcgtgccccgacggggcagggaagccgcgaggccggagccgggagtgcccccgctcccccccagcccgtcccgggctatataaggcgtgtaagctgacacccgctgctccccgctcgctgggtgcaggctgcgtgtcacacattccccagcacggagcggccgcacagccccgacggggctccccgctccgagggctccggcagcacygggccgggggctgctcgggaggagccgagatagaagccccctccggcgggggggttgtgccctctaccgaaggatgggcagagccacgtcccgaggggtcgccgcgtcccgcggggcgcagccacgccccgagccccgctccagccctgccccacgggggcccccttaccccggccagccccacccgccccacgcagcctccttttcccctgccccgagcgatcgccttccctccccagacccaggactcagccccgggccccgctcctccccgcacgccgcgggcccgcccgcactcac

SEQ ID NO: 26402 - DNA, 600 bp, Chicken  19866894242560_1
gtaaggactgagctctacacttctcaggcatacttctcactacgccagcactgatccttatataaagccaaaagtcaaatcaatgctacagtcagctgtaagcaaaacttgattcagaaggtaaatactaaaatattcaaatatgaaaatagccatacaaataagctgcgttaacataattaaatgagaagttgatttatttccaagctgacatgctgtttaggtcccacataaacacctattctgctcccaccagaaaaccaaaggcacctattgccaacagatcaaaaaggcaacacrctgctcatgcctggatactttcattttgttttgtttatgattgcgtttatttccttttaattccatttatttctttccttttaattccgggtgtgtatatctgctatctgtgaccaaaatgtgctttgaagagaaacattcccacagagcaactaataacaaactggagtacaatgagagtggaaaacatttggcattctcatgaccagaatgatggtttgttttttttataagaagtgattttagagttcaattactgaaagcatttcagctctcgaaagagcaactaagtaaaggtta

SEQ ID NO: 26403 - DNA, 459 bp, Chicken  19866894242561_1
ggaaaacagtcagcataaggttctgtgtttcccttcacctatgcagcatctgctccgctcagtcacacaaagcccagatggcaccaatatttagctttgcaaataaaaatggtaacccttgctggagcgaaagctgtttaccacagtgctgtgtgcttgcagctgtcaaggactccctgcttcctacctgtggaagggtaaatgacaaaccttggtaccaaactcacagtctcaaagcagcaggtaatgtttcagcctcttcttcaagagcagttttctggcttcctgctgatttctggrgtgttattggctgtgccctttaagagagacttcacctatgsaatgaaatggcagcatcttgtaaaatgtaagctggtttgttttttctaggatgagctaatcctctccatgttcctttgcttgctagcagcattgcattgtcagctgttgtttcagtgt

SEQ ID NO: 26404 - DNA, 418 bp, Chicken  19866894242561_2
tgcagcatctgctccgctcagtcacacaaagcccagatggcaccaatatttagctttgcaaataaaaatggtaacccttgctggagcgaaagctgtttaccacagtgctgtgtgcttgcagctgtcaaggactccctgcttcctacctgtggaagggtaaatgacaaaccttggtaccaaactcacagtctcaaagcagcaggtaatgtttcagcctcttcttcaagagcagttttctggcttcctgctgatttctggrgtgttattggctgtgccctttaagagagacttcacctatgsaatgaaatggcagcatcttgtaaaatgtaagctggtttgttttttctaggatgagctaatcctctccatgttcctttgcttgctagcagcattgcattgtcagctgttgtttcagtgt

SEQ ID NO: 26405 - DNA, 600 bp, Chicken  19866894242564_1
gcttctctgcatcacatctcaaagtcaccaaaattaatgctcccgccaatctcatgcacgtttgtttccattcacctagatggctggttttcttacatgcatcttcataaagaaattcctcttaatttaaagggagcctttaaatggcagtgttagttacaggagatgtagtactagtgaaattgacaacatattaatccagctttaagaactgccattcttatatccagtcttccagtgtgattatgttccagccaaacctcacacaagtcaacccaagattgatatttgtactatgarttttactactgggaaggatatatatatatatatatatatatatatctccactcttatcatttttagacctttgtggaagtctgtgtaccaaatggagaggagctctcttatctgctcagagactgatgtacgaaaaagcaatactgctcgtggataaaatagctactttccaataacgtggggaaaggatgacagtggccatgatatccacgtgcctgtaatggtctgcgttttgctgacatccttatttgcacatcaagcagaaagatgaatctccagtttctaaaaaaaatgatgctg

SEQ ID NO: 26406 - DNA, 599 bp, Chicken  19866894242568_1
  misc_feature (1)..(114): n is any nucleotide
nnnnnnnnnnnnnnnnnnnnnnnnnnnnnnnnnnnnnnnnnnnnnnnnnnnnnnnnnnnnnnnnnnnnnnnnnnnnnnnnnnnnnnnnnnnnnnnnnnnnnnnnnnnnnnnnnncctattgaacctgaaaatgctcaggaaacgatgagaatctccagaggtccatttctgcaacacggatgtgctgtttcctgacaaccggtagctgaagaaggcttacaccaccttgagctggaataagctcatacatattctgagatgcagagaactgattatcaacactgaaatcattctgaacayggggaagcctaagtggaacaaatccttaacaagcttatcagggacrgtaaggaacacagctcattactgactctggatgagatctggacattgtggtatgcataccatttctggaaatgaggtgtttaaattagggaattcttagaggtaacttgctggatttgcagtctcttccatgtcctgtattyatctagtcacattcaccctgcttctctttggcatccatacaggcaacagaatccatgaaatccatgaaatgttaggcacrctgtaaagaaatgtaaaagatactttaaatt

SEQ ID NO: 26407 - DNA, 599 bp, Chicken  19866894242568_2
  misc_feature (1)..(68): n is any nucleotide
nnnnnnnnnnnnnnnnnnnnnnnnnnnnnnnnnnnnnnnnnnnnnnnnnnnnnnnnnnnnnnnnnnnncctattgaacctgaaaatgctcaggaaacgatgagaatctccagaggtccatttctgcaacacggatgtgctgtttcctgacaaccggtagctgaagaaggcttacaccaccttgagctggaataagctcatacatattctgagatgcagagaactgattatcaacactgaaatcattctgaacayggggaagcctaagtggaacaaatccttaacaagcttatcagggacrgtaaggaacacagctcattactgactctggatgagatctggacattgtggtatgcataccatttctggaaatgaggtgtttaaattagggaattcttagaggtaacttgctggatttgcagtctcttccatgtcctgtattyatctagtcacattcaccctgcttctctttggcatccatacaggcaacagaatccatgaaatccatgaaatgttaggcacrctgtaaagaaatgtaaaagatactttaaattgcacttgtgatagtgaactatagttatgtccattatgatgaaggct

SEQ ID NO: 26408 - DNA, 600 bp, Chicken  19866894242568_3
ttcctgacaaccggtagctgaagaaggcttacaccaccttgagctggaataagctcatacatattctgagatgcagagaactgattatcaacactgaaatcattctgaacayggggaagcctaagtggaacaaatccttaacaagcttatcagggacrgtaaggaacacagctcattactgactctggatgagatctggacattgtggtatgcataccatttctggaaatgaggtgtttaaattagggaattcttagaggtaacttgctggatttgcagtctcttccatgtcctgtattyatctagtcacattcaccctgcttctctttggcatccatacaggcaacagaatccatgaaatccatgaaatgttaggcacrctgtaaagaaatgtaaaagatactttaaattgcacttgtgatagtgaactatagttatgtccattatgatgaaggctaaaraaagtagtgcatgaatggttttcttggagaacaaagcaacagagaactatcatttttcttcttaaatgatttataaacatagttcattgaaacagaactagttaatctccaggagaattttactgaattacaaatcata

SEQ ID NO: 26409 - DNA, 600 bp, Chicken  19866894242568_4
ctgattatcaacactgaaatcattctgaacayggggaagcctaagtggaacaaatccttaacaagcttatcagggacrgtaaggaacacagctcattactgactctggatgagatctggacattgtggtatgcataccatttctggaaatgaggtgtttaaattagggaattcttagaggtaacttgctggatttgcagtctcttccatgtcctgtattyatctagtcacattcaccctgcttctctttggcatccatacaggcaacagaatccatgaaatccatgaaatgttaggcacrctgtaaagaaatgtaaaagatactttaaattgcacttgtgatagtgaactatagttatgtccattatgatgaaggctaaaraaagtagtgcatgaatggttttcttggagaacaaagcaacagagaactatcatttttcttcttaaatgatttataaacatagttcattgaaacagaactagttaatctccaggagaattttactgaattacaaatcataggatagacagatgcatttttatatatgttaaatatatttcacactaaacaattttacagtctagagccttagtaattatt

SEQ ID NO: 26410 - DNA, 600 bp, Chicken  19866894242568_5
aggaacacagctcattactgactctggatgagatctggacattgtggtatgcataccatttctggaaatgaggtgtttaaattagggaattcttagaggtaacttgctggatttgcagtctcttccatgtcctgtattyatctagtcacattcaccctgcttctctttggcatccatacaggcaacagaatccatgaaatccatgaaatgttaggcacrctgtaaagaaatgtaaaagatactttaaattgcacttgtgatagtgaactatagttatgtccattatgatgaaggctaaaraaagtagtgcatgaatggttttcttggagaacaaagcaacagagaactatcatttttcttcttaaatgatttataaacatagttcattgaaacagaactagttaatctccaggagaattttactgaattacaaatcataggatagacagatgcatttttatatatgttaaatatatttcacactaaacaattttacagtctagagccttagtaattattttcttatatgaaaatatggctctaaaatctgtcccaacaattttcctaaaatctttcattttcctcattgaacacaaacaa

SEQ ID NO: 26411 - DNA, 599 bp, Chicken  19866894242575_1
  misc_feature (1)..(73): n is any nucleotide
nnnnnnnnnnnnnnnnnnnnnnnnnnnnnnnnnnnnnnnnnnnnnnnnnnnnnnnnnnnnnnnnnnnnnnnnntctggagcacggggcagcaaaaaagacagggccacagatacctgagatcccttggagaccaggcagacctacagcagatccctaaccagaaagagtgcccaggatggggcttaaatggagcccagctcatgggtggggtggtggagcagctgaggatgattaggtcttagcagcaccatgtgtgcattgagctgctctatgctaggagctttggggttaggttgctsttgctagtccccctatgcattaaggcaagcagaaagctgctgtgagacctcagggagcagatgttgtttttcttttcctcgcttttataggtcttcctaggagcaaaacctcaacttcattggattctcaactaagggttcttcagccccaaggacgatgccaccacctgtcccctgtgctgaggggatccaagcagtgattataaatatccaaaagaatgggagtcatgtggatagggctgggctctcttccatggtgcccagtgccaggacaaggggcactgggcacagactggagc

SEQ ID NO: 26412 - DNA, 600 bp, Chicken  19866894242578_1
ccgagccgagctgagctgagctgagctgagccgagccgagccgagccgagccgagccgagccgccccggaaggcagcgagcagccaactgctctcccccaagcctcctcgctctgtttctaggctgggttcgcctggcagagtgggtgaaaatcccaatgcacagctggagaaggtttgggaatgggatctcccgctcctctgcagcttgcctttggttcacattaacaggatgggcctcggcaactgcctgagtgcttcaaaaaatacaagaaagacaagggaggaacgagttggaggyggaggtgcctcaagggcattgctcacccagacaaatctccgcagcccagcaaagcccagtgcagaaagagcatttagcattccctaccattgtgtgaggtttctagccagagacctctcagacaaatcattagctgtactgtattgccagaagggaaaacattcagccactttatgcaggctatatggggcaggaaggacaatggaagataccctcctcccacatcctttctctggcctgtaaggacagtcagttctgcccttctctcacccatcccctgtggctgcagaacattgtctt

SEQ ID NO: 26413 - DNA, 600 bp, Chicken  19866894242579_1
catgtctattcatctgcttcaagcaacagcaacattcccacaaacatgtaggcatttccttgtgctgaaatgtgttctaggaatgtttaagggatgtattgcttgtcatgtgactaaatagtcactttgtccatagcagtctgttaaacagtaacaaaaccctatctagtatggcattaaattctttactttctcttcaaatacatgaattaaggactgcagaatatgcaaacatagcttattctgcagtatctcttgcagttgccttttgtaattctaaaatatcataattctcagttraaatgtcaagctattgagagtgcttgtgtagaaaaagataccaaatggagttctttaagttttgaggctgtttcccaacgttgtttgctggtgtttttttctgtatgatgggtaatagagaacatacgtattcttagcctcttaaaaactattaagaatggttaaaatagtcacctgagagtgtagctcttggaactctgggctgtttcagataggacttaatgcatttgaatrgagtgctgttgcatggaggttctagtcattcgtgacttgaagcagtcccatcacatatggtctctc

SEQ ID NO: 26414 - DNA, 600 bp, Chicken  19866894242579_2
tagcttattctgcagtatctcttgcagttgccttttgtaattctaaaatatcataattctcagttraaatgtcaagctattgagagtgcttgtgtagaaaaagataccaaatggagttctttaagttttgaggctgtttcccaacgttgtttgctggtgtttttttctgtatgatgggtaatagagaacatacgtattcttagcctcttaaaaactattaagaatggttaaaatagtcacctgagagtgtagctcttggaactctgggctgtttcagataggacttaatgcatttgaatrgagtgctgttgcatggaggttctagtcattcgtgacttgaagcagtcccatcacatatggtctctccaggcctcagctgattcacttacagccagctgttcttttctgctttggtgcttttctaactgtattctttcagtattttaggtattatttttaatgcttgagcatcttgcaatcctgaaggcttgctaaacggaggtatgaggatagctggaaatcacttccaaactatctatgctacaacatgaaagatgtttgagtaattgttatggagtacgtatactgctagagctactg

SEQ ID NO: 26415 - DNA, 600 bp, Chicken  19866894242579_3
ggtgcttttctaactgtattctttcagtattttaggtattatttttaatgcttgagcatcttgcaatcctgaaggcttgctaaacggaggtatgaggatagctggaaatcacttccaaactatctatgctacaacatgaaagatgtttgagtaattgttatggagtacgtatactgctagagctactgaacttgctgaggcactccactttgctgtaattcaagcttttctagaagctgtatgattatctgaaatgcttatagtctgatgcagaactgtgctttctgagcaagacattayggttgagaaaaycaaggaaagaggattgaacagtagtagaagtctttggctagaagtaactttaagagtaaatggttcttagccactgaagcatagcttgctatcttattctaagctgcttcctccttggtctttttgaggggtcaagagacctttcaggtgaggagagaattgaggtgatgtttgctttatgggggggagggtaatctgcattctcaaatgacaaaatcatttctgggattgaatggggatgggtacatgctgctcacatttggtgttcatgaacaacttaaggaggaa

SEQ ID NO: 26416 - DNA, 600 bp, Chicken  19866894242579_4
actgtattctttcagtattttaggtattatttttaatgcttgagcatcttgcaatcctgaaggcttgctaaacggaggtatgaggatagctggaaatcacttccaaactatctatgctacaacatgaaagatgtttgagtaattgttatggagtacgtatactgctagagctactgaacttgctgaggcactccactttgctgtaattcaagcttttctagaagctgtatgattatctgaaatgcttatagtctgatgcagaactgtgctttctgagcaagacattayggttgagaaaaycaaggaaagaggattgaacagtagtagaagtctttggctagaagtaactttaagagtaaatggttcttagccactgaagcatagcttgctatcttattctaagctgcttcctccttggtctttttgaggggtcaagagacctttcaggtgaggagagaattgaggtgatgtttgctttatgggggggagggtaatctgcattctcaaatgacaaaatcatttctgggattgaatggggatgggtacatgctgctcacatttggtgttcatgaacaacttaaggaggaacaaaacaaatcc

SEQ ID NO: 26417 - DNA, 600 bp, Chicken  19866894242584_1
gtaactgttactgggcccagtggtggtctcagaaagaggagactcggagacccacttgttctacctgatgtatatgagggctgctccaaaagaaatatctcctatattatgttgctggcccacagtgttgaaggcagatgttggtgatatgtatgcaagtattaaaacttcctttcccccacaccccttaccccccttttttttaaaaaaagaaatagatctaaaatattttgtatagttcacatttgttcttgagaaggggttcattctttatttgtatggatccaagtcagatggtasggacgttggacttgaagccttgtactgttttgtatagactaagccgcaagtgtctcacctaccagctgggaaaaggatctggacgtgtgttgtggtttagccccagcagcagctcagcaccacgcaaccacttgctcactctccccaagtggtaagggraagagaattgraaagtgcaagaggtcgtgggttgagataagggcagtttgctaggtaaagaaaaggccatacacgcaagcaaaacaaaacaaggaaataaatttgctacaacccctcagcaggcaggagttaatctgcttc

SEQ ID NO: 26418 - DNA, 600 bp, Chicken  19866894242584_2
tattaaaacttcctttcccccacaccccttaccccccttttttttaaaaaaagaaatagatctaaaatattttgtatagttcacatttgttcttgagaaggggttcattctttatttgtatggatccaagtcagatggtasggacgttggacttgaagccttgtactgttttgtatagactaagccgcaagtgtctcacctaccagctgggaaaaggatctggacgtgtgttgtggtttagccccagcagcagctcagcaccacgcaaccacttgctcactctccccaagtggtaagggraagagaattgraaagtgcaagaggtcgtgggttgagataagggcagtttgctaggtaaagaaaaggccatacacgcaagcaaaacaaaacaaggaaataaatttgctacaacccctcagcaggcaggagttaatctgcttccaggaaagcagggctcctcacatataatggttacttgggaagacaaacaccaccactctgaacatcccttcttcctgttactttggtcctggctctgtcccctcccagctgcttgtgcacccccagccctttgctggcagcacagcaggaggagccaga

SEQ ID NO: 26419 - DNA, 600 bp, Chicken  19866894242584_3
cctttcccccacaccccttaccccccttttttttaaaaaaagaaatagatctaaaatattttgtatagttcacatttgttcttgagaaggggttcattctttatttgtatggatccaagtcagatggtasggacgttggacttgaagccttgtactgttttgtatagactaagccgcaagtgtctcacctaccagctgggaaaaggatctggacgtgtgttgtggtttagccccagcagcagctcagcaccacgcaaccacttgctcactctccccaagtggtaagggraagagaattgraaagtgcaagaggtcgtgggttgagataagggcagtttgctaggtaaagaaaaggccatacacgcaagcaaaacaaaacaaggaaataaatttgctacaacccctcagcaggcaggagttaatctgcttccaggaaagcagggctcctcacatataatggttacttgggaagacaaacaccaccactctgaacatcccttcttcctgttactttggtcctggctctgtcccctcccagctgcttgtgcacccccagccctttgctggcagcacagcaggaggagccagaagtccctggtg

SEQ ID NO: 26420 - DNA, 575 bp, Chicken  19866894242595_1
tccttaacatgtcctccaggaggatctgttccatgatcatcccaggcacacaggtgcctgctgttccctgggtccctccttcctccctttcttataaatggttcagtgtctctactcttaaaacaatggcagttacagatacattgtactgagataatttatgaagtgtagtctggaagaaggaatattagatatagcaaaagtagaaaatgcaaatattaatgtattttgtaattgttactgatctatttagtcaacattccaccaaattttagtataaaataatgaaaaccattgctwcatataaaaacattcaaaatcattatgtgatcagtttctttacacagattctgcagcaacagttcttacgttggtcaaacagcatttatggattcaaaatgttgttgtcatagaatcacagaatggcttgggttggaagggacctcaaggatcatgaagctccaacacctctgccacaggcagggccaccaacctccacacgtaataccagcccaggctgcccagggccccatccaacctggccttcaacacctccacagaggacggggcatcca

SEQ ID NO: 26421 - DNA, 600 bp, Chicken  19866894242599_1
agagggacctggacaggctggagaagtgggcccatgaaaacctaatgaggttcaataaggccaagtgcagggtggtgcagctggatcagggcaatcccaggtatttatacaaactgggggaagatctccttgagagcagccctgtagaaaaggacttgggggtcttggtggacgagaagttggacatgagccagcagtgtgtgcttgcagcctggaaggccaactgtgttctgggctgcatcaaaaaagtggtggccagcagggagagagaggtgattgcccccctctactcagctcttstgaggccccatctgcagtattgcatccaggcctagggccccctgtagaggaataacgtggagcttttagagcaggtccagaggagggccactaagatgatcagagggctggagcacctctcctatgaggaaaggttgagggaactgggcttgtttagcttggaaaagagagggctctgggagatctcactgtgagatccactatgatattctatacttgaagggagcatatcaacaggagggggaatggctttttacaaaggtgaatagtggtaagacaaggggtaatggttttaaacta

SEQ ID NO: 26422 - DNA, 600 bp, Chicken  19866894242609_1
tccgccactctgcgggcgcagcggagcgcggctatggcggcggccccggcgggtagggcagggctggggggcggcggcggcggcggcggcgggtcggggggctgcggggtcgggccgtgctaacggggctctccccttctccctacagaagcggagacccggcagcggctgctgcgcaccgtcaagaaggaggtgggtgcggggaagccgtcccgctgccgtgccccggccgctcgttccgctcacggtgtgtccgtgggtgcgggcagcggtaactccgcgggtccgtccgtgcgccgkgccgggcggtgggctttgggggggcggccgttcccctcgtgggacccattgcggagacccggcgtgtcgcggagccccgagagcatccctgcccaggccggctgtgccgggcgccgggagcgtgcggcggtctgttcgtggccgcgtgagcgtcttcgtgtatccccggtgggctcggggaagcggtgcccctcctgggagcgagcagggacgctgccagcgctgcgtttgttcattcagaccccttccccacctttaatcccgcgccgggcgtggtggagaggagcgctactcgttgcc

SEQ ID NO: 26423 - DNA, 600 bp, Chicken  19866894242609_2
ccgggcgccgggagcgtgcggcggtctgttcgtggccgcgtgagcgtcttcgtgtatccccggtgggctcggggaagcggtgcccctcctgggagcgagcagggacgctgccagcgctgcgtttgttcattcagaccccttccccacctttaatcccgcgccgggcgtggtggagaggagcgctactcgttgccttgacgacagctattaaaccagcgaaaggctgtgacatttctttagcatcgtggatgaagccgacatctcattattgccgtctgcctgcggctcctcccgaggctkcaggtggggatggggctgctgggagcgtggctggaggaggacagagcttccttctacagcctgctgggcctcagcgggcactactgctctccaggagcatcttctatgctggcaactgtgctgggcttctctctgtgctcccccccctctctctccagggtccctatgtttgaggaaagtgcctaaaggaggagagctgagggctgtgatgtgccgttctgatagcacaggaggcagtctgctggctcctgatggaccagctgtgctgcacggggggttggtgaatgcaggtggaggtga

SEQ ID NO: 26424 - DNA, 600 bp, Chicken  19866894242609_3
tccccacctttaatcccgcgccgggcgtggtggagaggagcgctactcgttgccttgacgacagctattaaaccagcgaaaggctgtgacatttctttagcatcgtggatgaagccgacatctcattattgccgtctgcctgcggctcctcccgaggctkcaggtggggatggggctgctgggagcgtggctggaggaggacagagcttccttctacagcctgctgggcctcagcgggcactactgctctccaggagcatcttctatgctggcaactgtgctgggcttctctctgtgctkccccccctctctctccagggtccctatgtttgaggaaagtgcctaaaggaggagagctgagggctgtgatgtgccgttctgatagcacaggaggcagtctgctggctcctgatggaccagctgtgctgcacggggggttggtgaatgcaggtggaggtgaaggagtgaggaagggtatggaaagagcctttctgccctggtgaaatgccaccagcccacgtgtcaccgtgtcgtgccatcagcaggcggctcatagcggccctatagggagggcagcgctgatgcagaacagaggtttcc

SEQ ID NO: 26425 - DNA, 600 bp, Chicken  19866894242621_1
agatttaggttggatgttagggggaagttctttaccaggagagtggtgaggtgctggaacgggctgcccagagaggttgtggatgccccatccctggaggtgttcaaggccaggttggatggggccctgggcaacctggtctagtaaatgaggaggttggtggccctgcccggcaggggggttggagctttgtgatccttgaggtcccttccaacccaggccattctgtgatccttctctccaaacaaacaaacaaaaaaacccagccctctctactgcctacaaaaagtgagaaaaatwatgagggaaagtaaggaaaaaactcatatttactgttctagcaagaaggtccctacggttgcagctgtcctacactcacaatgacagcatacacaaacaatgctgcttccctgtggctaggaaggctgtgattacccccccgactttgtgtaggccctggttactgcagtgcattgctcacacccttataaaaccagctcaggtgggaacaaagcaattccattgtctccagtttataagctgtccactgtgccattgcttattgttgagcagttgttgtacttgttacttgcaatccta

SEQ ID NO: 26426 - DNA, 600 bp, Chicken  19866894242622_1
gcatttggccagtatgcatagcctgatgtctaggatactcacataagaattctatattgcttaggaatccaaaaaaatggaatgattaaaacattaaacagtagcaccattaatacttattttcctaaaacatcctaaggaccagaacaaaattagaacagaacaggaacattgtgcttacactgcattgatagaaaacaatgggttggtcgtacttgcatctgtatctcagtaaagtctggccacgtttacagttttactggaatggtattggaaaagctcacactttgctcagcagtwttctgagtttcattcgtcctgtttccttttgggctttttgggattccgagatcggctttttgctttgcagagtggacatattggtgcattccgatgaatttgttggtgacaggataaacaggcctgaaatgcaacattgcagctttctgttataaatatttagagtggcattgatacattagttattgggtatcatattctaagatacagtacagaaaaaaaaaataacaaagacttcttgctttcaaaggcaaaccaatgccaatttttatttccaggtctctgaagaacaaggccaat

SEQ ID NO: 26427 - DNA, 599 bp, Chicken  19866894242625_1
  misc_feature (1)..(30): n is any nucleotide
nnnnnnnnnnnnnnnnnnnnnnnnnnnnnncctataagaacccaattacttttacgaagcagaaagaaaatagacctgatcatctaattagcacgcagtcgaggacaaaggttagtaagcaatgcttggctagtcaacagccttttgatagcctttgtgaatactgacatgaaattgcacctatttaaagagctgtcttgatgttttatttattgttcactgatgatagtctagtttcctctggtaactccagtctccacagtggatttaatcaagggttaaatttggccttatgtgtcytgtggctcacagtgagaatgacccaccttttctggcattygttgtattatacagagaagtgtgactttcttctcttttgggagtcttttgaacttgaataaagcagctattcccaagtgattacttcctttttcaatygatgcaacaaaagattatcacataaaaaagaatcccaccgtgatttttcttttgaacacaggcaatgctgaaaacatgygtgcaaaagctgtcatctcttgcccctctctgatatctgttagctccatgggatagtaaaagcaaagaagcacattaaagct

SEQ ID NO: 26428 - DNA, 600 bp, Chicken  19866894242625_2
cccaattacttttacgaagcagaaagaaaatagacctgatcatctaattagcacgcagtcgaggacaaaggttagtaagcaatgcttggctagtcaacagccttttgatagcctttgtgaatactgacatgaaattgcacctatttaaagagctgtcttgatgttttatttattgttcactgatgatagtctagtttcctctggtaactccagtctccacagtggatttaatcaagggttaaatttggccttatgtgtcytgtggctcacagtgagaatgacccaccttttctggcattygttgtattatacagagaagtgtgactttcttctcttttgggagtcttttgaacttgaataaagcagctattcccaagtgattacttcctttttcaatygatgcaacaaaagattatcacataaaaaagaatcccaccgtgatttttcttttgaacacaggcaatgctgaaaacatgygtgcaaaagctgtcatctcttgcccctctctgatatctgttagctccatgggatagtaaaagcaaagaagcacattaaagctttctacatcactggggtgaaacacttttttattattgcaag

SEQ ID NO: 26429 - DNA, 600 bp, Chicken  19866894242625_3
agccttttgatagcctttgtgaatactgacatgaaattgcacctatttaaagagctgtcttgatgttttatttattgttcactgatgatagtctagtttcctctggtaactccagtctccacagtggatttaatcaagggttaaatttggccttatgtgtcytgtggctcacagtgagaatgacccaccttttctggcattygttgtattatacagagaagtgtgactttcttctcttttgggagtcttttgaacttgaataaagcagctattcccaagtgattacttcctttttcaatygatgcaacaaaagattatcacataaaaaagaatcccaccgtgatttttcttttgaacacaggcaatgctgaaaacatgygtgcaaaagctgtcatctcttgcccctctctgatatctgttagctccatgggatagtaaaagcaaagaagcacattaaagctttctacatcactggggtgaaacacttttttattattgcaaggatagcattgataactggagaaaaggaagaacatacccgcagttcaccaaatcactgcaataatgcaaagtctagaaggaagtttagaggaaaaaata

SEQ ID NO: 26430 - DNA, 600 bp, Chicken  19866894242625_4
cactgatgatagtctagtttcctctggtaactccagtctccacagtggatttaatcaagggttaaatttggccttatgtgtcytgtggctcacagtgagaatgacccaccttttctggcattygttgtattatacagagaagtgtgactttcttctcttttgggagtcttttgaacttgaataaagcagctattcccaagtgattacttcctttttcaatygatgcaacaaaagattatcacataaaaaagaatcccaccgtgatttttcttttgaacacaggcaatgctgaaaacatgygtgcaaaagctgtcatctcttgcccctctctgatatctgttagctccatgggatagtaaaagcaaagaagcacattaaagctttctacatcactggggtgaaacacttttttattattgcaaggatagcattgataactggagaaaaggaagaacatacccgcagttcaccaaatcactgcaataatgcaaagtctagaaggaagtttagaggaaaaaataaaataaaattccatttatcagtaagtgatggtcagtactttacctctcatttctttgccactccagatagtaaagcaaa

SEQ ID NO: 26431 - DNA, 599 bp, Chicken  19866894242627_1
  misc_feature (1)..(91): n is any nucleotide
nnnnnnnnnnnnnnnnnnnnnnnnnnnnnnnnnnnnnnnnnnnnnnnnnnnnnnnnnnnnnnnnnnnnnnnnnnnnnnnnnnnnnnnnnnnaggtttgcttcttccattctgtgcccaggctacttcaaagtgcagccaccctgttggggttgctcccacggcacacaggtttcatgctcaccttgttgcccatgtcgttggagatcagagccttctttatggctgcaatgcgcccatccatcatatccgagggggcaacaatgtggcagcctgcaggggaaggccagagataacaagcycaacgctctaactgcctgcaggaggaggtgaccctaggcatctccttcataggrctgaaggaggtgtctggagtccctgcagctcctccagggttggcaggtggatgcttccccagctcagtggaagccctcccactggagccaggcacggtttgtttttgggctggctattaagtgagagggggcaggcaaagtgacaagagccacgtgtggttgctgctgctaggcactgctcacctgcttgggcataagccagtgccacttctgctagccgctggcaactggcctcattctggatg

SEQ ID NO: 26432 - DNA, 599 bp, Chicken  19866894242627_2
  misc_feature (1)..(37): n is any nucleotide
nnnnnnnnnnnnnnnnnnnnnnnnnnnnnnnnnnnnnaggtttgcttcttccattctgtgcccaggctacttcaaagtgcagccaccctgttggggttgctcccacggcacacaggtttcatgctcaccttgttgcccatgtcgttggagatcagagccttctttatggctgcaatgcgcccatccatcatatccgagggggcaacaatgtggcagcctgcaggggaaggccagagataacaagcycaacgctctaactgcctgcaggaggaggtgaccctaggcatctccttcataggrctgaaggaggtgtctggagtccctgcagctcctccagggttggcaggtggatgcttccccagctcagtggaagccctcccactggagccaggcacggtttgtttttgggctggctattaagtgagagggggcaggcaaagtgacaagagccacgtgtggttgctgctgctaggcactgctcacctgcttgggcataagccagtgccacttctgctagccgctggcaactggcctcattctggatggtgccatcttcccgcaggatgcctggaagaaaaaattagtcaggcaaggrgcag

SEQ ID NO: 26433 - DNA, 440 bp, Chicken  19866894242627_3
taggrctgaaggaggtgtctggagtccctgcagctcctccagggttggcaggtggatgcttccccagctcagtggaagccctcccactggagccaggcacggtttgtttttgggctggctattaagtgagagggggcaggcaaagtgacaagagccacgtgtggttgctgctgctaggcactgctcacctgcttgggcataagccagtgccacttctgctagccgctggcaactggcctcattctggatggtgccatcttcccgcaggatgcctggaagaaaaaattagtcaggcaaggrgcaggaccgtgaggtgatggtctcaatccttggaattctgtaacaagctatagagatgctcagagtaacagtggggaaggtgttagagctggataaagaggggctgagcaggagactaacaatgcagtgcccacaggcag

SEQ ID NO: 26434 - DNA, 600 bp, Chicken  19866894242642_1
ccctgaacacagaaggtattttctgtagactggaataggacggtactacattctcatttagctctcccagaccaaaaaggtaatcccaaagactgacagagttttgttaacatcatcccataaagtcatatcaagttaacaggcaaagataaaacagcaggagcagggattttttctccttttgcctgtcagtgtttgcagataccttgctgcagtgaatgctgtcctgaatgcaaattatctcagctctccgagatccatgctgcagtgtccgagactgccaacatgcagtgcagtgcmagcagccatgtayttagataaaagggaatgggaaaagtagtccggaaagggtataaatttgcacttaattgaacaaagccaaagaaccagtacaagatttgcatttcataggaaatgaatctagtcaatatgttgcaaggacagagacgaacatgctgatatcagaaaaaaagctatttattgctatgaacacaagtcactgcgccctcacgttctgaattgccttccttacaaggctaaatgaagttaactccgtggatatacagccctccagcacagtttaatccaatgcagcaacaa

SEQ ID NO: 26435 - DNA, 600 bp, Chicken  19866894242642_2
aggtattttctgtagactggaataggacggtactacattctcatttagctctcccagaccaaaaaggtaatcccaaagactgacagagttttgttaacatcatcccataaagtcatatcaagttaacaggcaaagataaaacagcaggagcagggattttttctccttttgcctgtcagtgtttgcagataccttgctgcagtgaatgctgtcctgaatgcaaattatctcagctctccgagatccatgctgcagtgtccgagactgccaacatgcagtgcagtgcmagcagccatgtayttagataaaagggaatgggaaaagtagtccggaaagggtataaatttgcacttaattgaacaaagccaaagaaccagtacaagatttgcatttcataggaaatgaatctagtcaatatgttgcaaggacagagacgaacatgctgatatcagaaaaaaagctatttattgctatgaacacaagtcactgcgccctcacgttctgaattgccttccttacaaggctaaatgaagttaactccgtggatatacagccctccagcacagtttaatccaatgcagcaacaaagtgctgccaggt

SEQ ID NO: 26436 - DNA, 600 bp, Chicken  19866894242643_1
tgtaacagcctctggagctggggatacaagctctggaattggctgggaggatccatcctctttgtaccctcatttcaggtgtttgtagacattgagtcctctctgcgctatgaaaagtcccaacttcctcagcctttcctcataggaaagatgctccagttctgcagtcatccatattgcctttcattggactctctacagtatgtccaggacttggtccagtctggtcttgaatacctccaggcatccacatcatcactgggcaacctgttccagtgtttcaccatcctctgagtaatkaatttcttttcaatatctaaactgaatctcaccttcttatttaaaattcttccccctccccctatcactgtccgtccatggaaaaagttgctcttggtcttctttataagccccctttaagtagtgtaagactgcaatgaggtctcttcagagcattctattctccaggctgagcaagcccagccctctgatcatctttgtggctcacttctgggcctgttccacatttttcatacgcagatctgaacacagtactccagatggggtctcatgaaatcagagtagagggggagaatcact

SEQ ID NO: 26437 - DNA, 600 bp, Chicken  19866894242646_1
aaggcagagttttaacctccattactgagtcagccttgtctcagagaactttaaagtctagtatgtggcttgaccttgatagtgcttatgaccttgaacctgaaagtcattttcctggtacatccaaaggaatataggatcatgaccaactatatgaaatatatcaaatatgtatcaaggatggagagtacagagagaaaggattatgaacatttcatagatgaaataggaactttgggcagattttggtggatgtcgttagagcctgaatgcttcaatgggaaggagagtagagaaggkaaaaaaaatacaaagagctgtaggagacaaagagataaaatgggaaaaaaataagagagtaaaatarcttgatacgaaaggaaacaagaggaaagataggaaagakyagtaaagatattgagaggacaattcaaactgggagaaaagtagatggacaggtaagtcaattgtgggctaaggagatttgaaagtagataaaggtgataaagaagaaactcacactgttgaatttagaaagtatcctatgacccagctagcaggacaaacatattgcacatgttatggaagtgaattgcaaaa

SEQ ID NO: 26438 - DNA, 599 bp, Chicken  19866894242646_2
gcttgaccttgatagtgcttatgaccttgaacctgaaagtcattttcctggtacatccaaaggaatataggatcatgaccaactatatgaaatatatcaaatatgtatcaaggatggagagtacagagagaaaggattatgaacatttcatagatgaaataggaactttgggcagattttggtggatgtcgttagagcctgaatgcttcaatgggaaggagagtagagaaggaaaaaaaaatacaaagagctgtaggagacaaagagataaaatgggaaaaaaataagagagtaaaatarcttgatacgaaaggaaacaagaggaaagataggaaagakyagtaaagatattgagaggacaattcaaactgggagaaaagtagatggacaggtaagtcaattgtgggctaaggagatttgaaagtagataaaggtgataaagaagaaactcacactgttgaatttagaaagtatcctatgacccagctagcaggacaaacatattgcacatgttatggaagtgaattgcaaaattcgtatggcagaggattgcattcaagcatattattaaggaaggtgacagcattagagtagggtag

SEQ ID NO: 26439 - DNA, 560 bp, Chicken  19866894242646_3
tcattttcctggtacatccaaaggaatataggatcatgaccaactatatgaaatatatcaaatatgtatcaaggatggagagtacagagagaaaggattatgaacatttcatagatgaaataggaactttgggcagattttggtggatgtcgttagagcctgaatgcttcaatgggaaggagagtagagaaggaaaaaaaaatacaaagagctgtaggagacaaagagataaaatgggaaaaaaataagagagtaaaatarcttgatacgaaaggaaacaagaggaaagataggaaagakyagtaaagatattgagaggacaattcaaactgggagaaaagtagatggacaggtaagtcaattgtgggctaaggagatttgaaagtagataaaggtgataaagaagaaactcacactgttgaatttagaaagtatcctatgacccagctagcaggacaaacatattgcacatgttatggaagtgaattgcaaaattcgtatggcagaggattgcattcaagcatattattaaggaaggtgacagcattagagtagggtag

SEQ ID NO: 26440 - DNA, 559 bp, Chicken  19866894242646_4
cattttcctggtacatccaaaggaatataggatcatgaccaactatatgaaatatatcaaatatgtatcaaggatggagagtacagagagaaaggattatgaacatttcatagatgaaataggaactttgggcagattttggtggatgtcgttagagcctgaatgcttcaatgggaaggagagtagagaaggaaaaaaaaatacaaagagctgtaggagacaaagagataaaatgggaaaaaaataagagagtaaaatarcttgatacgaaaggaaacaagaggaaagataggaaagakyagtaaagatattgagaggacaattcaaactgggagaaaagtagatggacaggtaagtcaattgtgggctaaggagatttgaaagtagataaaggtgataaagaagaaactcacactgttgaatttagaaagtatcctatgacccagctagcaggacaaacatattgcacatgttatggaagtgaattgcaaaattcgtatggcagaggattgcattcaagcatattattaaggaaggtgacagcattagagtagggtag

SEQ ID NO: 26441 - DNA, 599 bp, Chicken  19866894242655_1
  misc_feature (1)..(26): n is any nucleotide
nnnnnnnnnnnnnnnnnnnnnnnnnntgcccattcctgtgcttaagaggaaaaagccttttactcgtagtcataaagaaagccagggaggaatgcgggagtgggtgcagcattcttattgagtgggttagactcgaggagctggccttttcccaagggaatgaggctgccctccgtattcacctcttgaaaacaagagccctcgcatacactgagacatcttagaaagtgtcctctttgaccttcttcactaaaatgacacgactttgttctagaggactcggcacctgtctgtacagtytttttcccacactcrgggttctggtttgtatgcaagctttggactttgtgtcaaaatctgtggcttgcattaggatgaagatcagttgggacaatgcctccttttggtcctccgcccccaattttcatagggctggcatttgtgaaggtgctttatgagaactgtttttgtcttggaggtgcgttgctgggaaggtgcagccgctctgcataaaacccaaagcaaatctgcttggttttcatcaagtagcagaagcagatgctggcccatgttgacaaagcagatgagtcctctgtaat

SEQ ID NO: 26442 - DNA, 599 bp, Chicken  19866894242655_2
  misc_feature (1)..(11): n is any nucleotide
nnnnnnnnnnntgcccattcctgtgcttaagaggaaaaagccttttactcgtagtcataaagaaagccagggaggaatgcgggagtgggtgcagcattcttattgagtgggttagactcgaggagctggccttttcccaagggaatgaggctgccctccgtattcacctcttgaaaacaagagccctcgcatacactgagacatcttagaaagtgtcctctttgaccttcttcactaaaatgacacgactttgttctagaggactcggcacctgtctgtacagtytttttcccacactcrgggttctggtttgtatgcaagctttggactttgtgtcaaaatctgtggcttgcattaggatgaagatcagttgggacaatgcctccttttggtcctccgcccccaattttcatagggctggcatttgtgaaggtgctttatgagaactgtttttgtcttggaggtgcgttgctgggaaggtgcagccgctctgcataaaacccaaagcaaatctgcttggttttcatcaagtagcagaagcagatgctggcccatgttgacaaagcagatgagtcctctgtaatacatgggatgaagca

SEQ ID NO: 26443 - DNA, 434 bp, Chicken  19866894242655_3
tatgagaactgtttttgtcttggaggtgcgttgctgggaaggtgcagccgctctgcataaaacccaaagcaaatctgcttggttttcatcaagtagcagaagcagatgctggcccatgttgacaaagcagatgagtcctctgtaatacatgggatgaagcatgtgcgttacgaagtgaaagcattttctattgttccttcagtttctttgagtgctccttttattgtagcgtcttcctatacaaatggctgtacctccctcgggtacagatgactcagaaaggcatctatggccttcatyccatgagggttgtcttccaaaatccagcagagtagcaggataaatggggagggctgatgtagctttagtgggcaatattagtggtaggtggatagttggactagatgatcttagaggtcttttacaaccttaat

SEQ ID NO: 26444 - DNA, 600 bp, Chicken  19866894242660_1
acccttttgtgagcatctcaggagatgctcgggccctgcgagacaaggctccctgctaatttattctcagtgagcttgggatggggcttgggtttgcactgtgtgcgaacaaacacaccttcaagagcttttgcactgcgggtccctgggaggagaggcgccatgcacagcctcctatcccaaacaagttggttcaaaataaagaaatggcatggacgtaatcattttaccagatgacctatgcatttcattagttggagcatgcatttccctacaataaacatgctcagcacatgatcygcacgttgctttctggaacgcgtgtgctgcagtggagcaggtacgtgtgcactggctgggtagtgcctgctctcccccagccaggctcactgctgctgatggcatcgttatttgcttctaatgacactggttatcgcagcagcatgcgtattagttgtggccacaggactaatgactggtatccgagcctttattttaaaatcacttctcatcaatacattcatttttatatgtagagctttacataatttgttacacgtactcccccgttctgacctattttgctgcaccctgcatcta

SEQ ID NO: 26445 - DNA, 599 bp, Chicken  19866894242667_1
  misc_feature (1)..(89): n is any nucleotide
nnnnnnnnnnnnnnnnnnnnnnnnnnnnnnnnnnnnnnnnnnnnnnnnnnnnnnnnnnnnnnnnnnnnnnnnnnnnnnnnnnnnnnnnnccccaggtctccatcaatctgacctcagtaaatacgtttgcaatgttctgattaacaccagtggtaaatataaacccaccatatgttttattcaagattgataaatgcccagacaagcaagaccacactaatcggaatgtacccatcccaagacagagagctacaatcactcaaccaataaatagaaaccctaccatgaagggatctgtcrcaggcaaaggaggcagaagtagcgaacaataattcatgattaaaaggtcagaagcaattgatggcagaacagccaccaagtttccaatatatatacaaacatctcagattcactgcaggcaatgaagggacaggacagctccagctgtttattgcgtgcaggggatccagttggagcggtccatgggggacccttcctatggttctgctgtcctgggcttctcccctctcagcaaagatgctatttcaacagtgaattttcttgcctgtgatgttaaaatggaactggatcaaaagcaa

SEQ ID NO: 26446 - DNA, 600 bp, Chicken  19866894242667_2
agcaattgatggcagaacagccaccaagtttccaatatatatacaaacatctcagattcactgcaggcaatgaagggacaggacagctccagctgtttattgcgtgcaggggatccagttggagcggtccatgggggacccttcctatggttctgctgtcctgggcttctcccctctcagcaaagatgctatttcaacagtgaattttcttgcctgtgatgttaaaatggaactggatcaaaagcaaaacctcttttcccagaggtcacccacacagcaactttagtcagtacacacaaycttcrgcatccagagggactctggagaacgactgtcaatagcagtgaaatcttaragaaacacagctgcagycattgctgaagtttagcatttgctccacacccagtccagggaaggtaacacatccaccacagcaccagctcaaacagcacctcactcatttcactctgttttcctcatcacttgttggcaaaatacaactgatgtacctagttacctcaaggcttccaactaaacatctcttagagggcaggagaagagtcaggccaaagttgtgcatggagaccaagatctcactgg

SEQ ID NO: 26447 - DNA, 600 bp, Chicken  19866894242667_3
ttgatggcagaacagccaccaagtttccaatatatatacaaacatctcagattcactgcaggcaatgaagggacaggacagctccagctgtttattgcgtgcaggggatccagttggagcggtccatgggggacccttcctatggttctgctgtcctgggcttctcccctctcagcaaagatgctatttcaacagtgaattttcttgcctgtgatgttaaaatggaactggatcaaaagcaaaacctcttttcccagaggtcacccacacagcaactttagtcagtacacacaaycttcrgcatccagagggactctggagaacgactgtcaatagcagtgaaatcttaragaaacacagctgcagycattgctgaagtttagcatttgctccacacccagtccagggaaggtaacacatccaccacagcaccagctcaaacagcacctcactcatttcactctgttttcctcatcacttgttggcaaaatacaactgatgtacctagttacctcaaggcttccaactaaacatctcttagagggcaggagaagagtcaggccaaagttgtgcatggagaccaagatctcactggtcatt

SEQ ID NO: 26448 - DNA, 600 bp, Chicken  19866894242667_4
attcactgcaggcaatgaagggacaggacagctccagctgtttattgcgtgcaggggatccagttggagcggtccatgggggacccttcctatggttctgctgtcctgggcttctcccctctcagcaaagatgctatttcaacagtgaattttcttgcctgtgatgttaaaatggaactggatcaaaagcaaaacctcttttcccagaggtcacccacacagcaactttagtcagtacacacaaycttcrgcatccagagggactctggagaacgactgtcaatagcagtgaaatcttaragaaacacagctgcagycattgctgaagtttagcatttgctccacacccagtccagggaaggtaacacatccaccacagcaccagctcaaacagcacctcactcatttcactctgttttcctcatcacttgttggcaaaatacaactgatgtacctagttacctcaaggcttccaactaaacatctcttagagggcaggagaagagtcaggccaaagttgtgcatggagaccaagatctcactggtcattcattgctcctcatgtgaagcagcattccctcatgggcccacctttctccc

SEQ ID NO: 26449 - DNA, 600 bp, Chicken  19866894242667_5
aagggacaggacagctccagctgtttattgcgtgcaggggatccagttggagcggtccatgggggacccttcctatggttctgctgtcctgggcttctcccctctcagcaaagatgctatttcaacagtgaattttcttgcctgtgatgttaaaatggaactggatcaaaagcaaaacctcttttcccagaggtcacccacacagcaactttagtcagtacacacaaycttcrgcatccagagggactctggagaacgactgtcaatagcagtgaaatcttaragaaacacagctgcagycattgctgaagtttagcatttgctccacacccagtccagggaaggtaacacatccaccacagcaccagctcaaacagcacctcactcatttcactctgttttcctcatcacttgttggcaaaatacaactgatgtacctagttacctcaaggcttccaactaaacatctcttagagggcaggagaagagtcaggccaaagttgtgcatggagaccaagatctcactggtcattcattgctcctcatgtgaagcagcattccctcatgggcccacctttctcccatcctcagaatagcctc

SEQ ID NO: 26450 - DNA, 600 bp, Chicken  19866894242673_1
tgccccacatctgcgccccacatgtaccccatgtgcccttatgtgccccacatgtgcccctgtgtgcgcccccacgtgtcccatgtgtgccccttgcatgtccctaagtgtgccccacgtgtgtgccccatatgtgcctccatatgtgcccttatggacctcacatgtgctccacatgtgcccgtgtgcgcccctatgtgcccccacatgtcccatgtgtgccccttgcacacccctaagtgtgccccatgtctgcaccccatatgtaccccctatgtgtcctgtgcctcacacgtgccyctgtgtgcacccctgtatgtgccccgtgtgccacataggcctgtgagtgttccacgtgtgcccctatgtgtgccctacacatacgcccacgtcccccacatgtgcccccrtgtactccatacgtgctcttaagtgtgcccccacatgcccatgtgtgtcccacacgtgccctatgtgtgcatcatatatgccctacatgtgcccatgtgtgtgctcygtgcacgtgcactaagtgtgctccatgcgtgccccatatgtgcccccaatgagctccatatgtgcccttatgtatctcacatg

SEQ ID NO: 26451 - DNA, 600 bp, Chicken  19866894242673_2
tgccccacgtgtgtgccccatatgtgcctccatatgtgcccttatggacctcacatgtgctccacatgtgcccgtgtgcgcccctatgtgcccccacatgtcccatgtgtgccccttgcacacccctaagtgtgccccatgtctgcaccccatatgtaccccctatgtgtcctgtgcctcacacgtgccyctgtgtgcacccctgtatgtgccccgtgtgccacataggcctgtgagtgttccacgtgtgcccctatgtgtgccctacacatacgcccacgtcccccacatgtgcccccrtgtactccatacgtgctcttaagtgtgcccccacatgcccatgtgtgtcccacacgtgccctatgtgtgcatcatatatgccctacatgtgcccatgtgtgtgctcygtgcacgtgcactaagtgtgctccatgcgtgccccatatgtgcccccaatgagctccatatgtgcccttatgtatctcacatgtccacatgtgctccacgtgtgcccccatgtgcgcccctatatgtgcccccacatgtgccacatgtgtgtgccctacacatacacccatgtgccccacatatgcctccatg

SEQ ID NO: 26452 - DNA, 600 bp, Chicken  19866894242673_3
tgtgccccttgcacacccctaagtgtgccccatgtctgcaccccatatgtaccccctatgtgtcctgtgcctcacacgtgccyctgtgtgcacccctgtatgtgccccgtgtgccacataggcctgtgagtgttccacgtgtgcccctatgtgtgccctacacatacgcccacgtcccccacatgtgcccccrtgtactccatacgtgctcttaagtgtgcccccacatgcccatgtgtgtcccacacgtgccctatgtgtgcatcatatatgccctacatgtgcccatgtgtgtgctcygtgcacgtgcactaagtgtgctccatgcgtgccccatatgtgcccccaatgagctccatatgtgcccttatgtatctcacatgtccacatgtgctccacgtgtgcccccatgtgcgcccctatatgtgcccccacatgtgccacatgtgtgtgccctacacatacacccatgtgccccacatatgcctccatgtaccccgcatgtgctcttatgtgtgccccccatatgcccatgtgtgtcccacacgtgcccctatgtgtgccccatatatgccctacatgtgccctctacgtgtgtcc

SEQ ID NO: 26453 - DNA, 600 bp, Chicken  19866894242680_1
gagacctcagaatacatagaaactttttgtcccattaccgtggacattatgaagtggagaagggaacaaaacacatcttttctaacttttcttgtttcttgatttgtattccttttagtttatgttccagttaaacctgttatgtgaagaatgtatttgaaagattcttttcagttttagcttacactcgcagttttatgcaaggcagcagaccaaccttcttgattattttttttaacttccaattcaaagaatacagatacagtagtattgtgggtgatattttctatgtgagacctrtatgtaattgccatagaactttagttaccaaaattctgtttcacattggattgcagtttattatttgtcaccctgtaaaactaagtaatatatttcaaattcagaagagtcagcaaagttaagaaacaaaacaaaaagaggtgatgtcaggcaagatgtcactgtgtttcagtaagggataagctgatgggtagaaattgaaaatgttagtatagctgaggggctacatttgaaaaaatargggaagagatggatggtagtaaaaacatttagtacgtaacatgagaattacagaagaag

SEQ ID NO: 26454 - DNA, 600 bp, Chicken  19866894242680_2
ccaattcaaagaatacagatacagtagtattgtgggtgatattttctatgtgagacctrtatgtaattgccatagaactttagttaccaaaattctgtttcacattggattgcagtttattatttgtcaccctgtaaaactaagtaatatatttcaaattcagaagagtcagcaaagttaagaaacaaaacaaaaagaggtgatgtcaggcaagatgtcactgtgtttcagtaagggataagctgatgggtagaaattgaaaatgttagtatagctgaggggctacatttgaaaaaatargggaagagatggatggtagtaaaaacatttagtacgtaacatgagaattacagaagaagatgaaacagatggaaagaagctgtctgatgattctcagaatagagagaagattagaactcyacatgaaagtcagtatagttgaagatagtaaggtataaaacatggctgaaaatgtcagtgtatgaagaacctgcattacttttaccttttaaattgttccaagcttttcttttgggaatccagcctggtagatcttgtcatagagttaaatttgattactggattttcaccaggactggt

SEQ ID NO: 26455 - DNA, 600 bp, Chicken  19866894242680_3
tatttgtcaccctgtaaaactaagtaatatatttcaaattcagaagagtcagcaaagttaagaaacaaaacaaaaagaggtgatgtcaggcaagatgtcactgtgtttcagtaagggataagctgatgggtagaaattgaaaatgttagtatagctgaggggctacatttgaaaaaatargggaagagatggatggtagtaaaaacatttagtacgtaacatgagaattacagaagaagatgaaacagatggaaagaagctgtctgatgattctcagaatagagagaagattagaactcyacatgaaagtcagtatagttgaagatagtaaggtataaaacatggctgaaaatgtcagtgtatgaagaacctgcattacttttaccttttaaattgttccaagcttttcttttgggaatccagcctggtagatcttgtcatagagttaaatttgattactggattttcaccaggactggtaagattttcccagcaaaatgtcaaaggcccaaaagataatgccgctctgctgcatgcttttcatttttatctcattaaccttccatgttcttgcaggaggggatgagtaagacacaaaag

SEQ ID NO: 26456 - DNA, 600 bp, Chicken  19866894242688_1
tgactgacctcatggcagacagctccagccacggagcggacatttggccttggccacggctcatcccacgagcatgcaccatgtccatggggcacctcaaaatgggcaagaagctaaggatgtgtcactgcaggggcacagaccctggctgcaggggttgggggtgaaatgattttggttttgctatgcaaacttcccatctttcttgcaagaagcaaggctgagatcccacagcatcaggtgcaatccgcattgctttcagcaaagcccactttgagcaggaaacattctgctgctcayggataacctcagccctgtgctgtccctccatgccctgggaaagctgtcagagctctgcagcccaagcggctctgacaaacgctgcaagcagtgaaggtcagcaccaggcaaagatggagatggagcagggtggggcttgagacctggactgatggccaacaggtccaggctgcgggtctggtgctcaaccttgggcaagggtttgcaccctcctgataattagttagagccctattgctgttttgattaatgycagcttcgctcagtccccccatcctggagaagccccagcctgcagta

SEQ ID NO: 26457 - DNA, 600 bp, Chicken  19866894242688_2
tgctttcagcaaagcccactttgagcaggaaacattctgctgctcayggataacctcagccctgtgctgtccctccatgccctgggaaagctgtcagagctctgcagcccaagcggctctgacaaacgctgcaagcagtgaaggtcagcaccaggcaaagatggagatggagcagggtggggcttgagacctggactgatggccaacaggtccaggctgcgggtctggtgctcaaccttgggcaagggtttgcaccctcctgataattagttagagccctattgctgttttgattaatgycagcttcgctcagtccccccatcctggagaagccccagcctgcagtaccatcaatccatcaaggctcgcttagttttgggcatttctttggcatcgaccaacacatctttctgttccccatcagtgcctgacctttctgcacatctccagaccaagaaaactctccctgcagaagcctttcccaatgccaagctctgagactgagcagaggaaggggatccatctgcaacggtgggtgccggagtgcccttttccctgcagcacagctcccagcaaacccccccgagcacatccccccag

SEQ ID NO: 26458 - DNA, 599 bp, Chicken  19866894242693_1
  misc_feature (1)..(2): n is any nucleotide
nnccttatacgatgtgtccctagagttagagaccttttaacagaagggttctagaagtagagggaacatttatgatatatcttagcattaaagaccttgcactgaagatgcagaatttcctcttcactgtcattcattaatacttatgcaaagttcccttgctgctgttgtgaaacatccagctttatggtgcactgcaatccacatgctctgattcacttggagtgctgcagtcccacccagcacaagtgaggtatatagtgaatctattagctgatgtgaagcagcagagtgttttgkttcgtttttttttttttaatttaaggaaaatgacaatttatttaggaaggaaagtaaaagtcttcctcagaaaaatagattattttcaaatgttatagatgctgatctctcactgctttttctctgcttttacaagggaagtactttctgcagtctgcagtagctgccatttcctacacaactttttcttttcaggtttttttttttttttctcctctgaggtttttcctaatggacttacattgtaaaatgttcttttctgtattttatgaaaacgtttgtgctttacccagcaaaat

SEQ ID NO: 26459 - DNA, 600 bp, Chicken  19866894242695_1
aaataaaaagtgccccagagggtgtatttctgaagggtttgtgactaacctgattagtcaccctaaattgtgatagatggaaggaaaaagcagttgtcaaacaagaaggaaattccaatagaagagtaaatttaaggatgacagtgaagataaattcttacaagccttagaaaagatcagccttttgtctagctctcataaggaccattgagcactcactgtataatgggctgttgtttggataactgtggaatgagaagattggttttaagattaaaaaaaaaaaatagccacctcacrtccaggctgaactcagtttctttcaagctattaaaaattgtaatgaactttgttttaagaactccccttcctcaccactgctcttgcaggtgagcttgagaattggtgggccagagggatgtactgcatgggaaaacagcattcatagttagataacttcagattaaagccaggtgtaaattttacaaagtaagtactgggaagacctaaagttactgcttcatttttgtcactaataatttctgatcaatgagttcagaagtagcgacttctcccatctgttgtagcaccatggtaaat

SEQ ID NO: 26460 - DNA, 600 bp, Chicken  19866894242700_1
gttttggggtgggtttgttgctattgattgattgattgattgatcaccaacttctactggctaatgtaaataagctgtgaaattacaagaataacagatcaggttcttctgtgaggagccagctacacattagaggagtagactgattatttgtgcgtattgcgttttgcaacattctttctgtttatgagttattagcctatcactctgagagatttgccatcttctcccagaaaaacattagatgtttcaagtaataatatattatgctaacaatttcaggatgactgcattttgaayacaatttccttctcctaaagtgaattgaatgttataactgtggacattctcttctttaaaatgcagagattctgctcttttcagagaatatatattctaagtctcccagagcttaatgccacaattattattccagggttctgtagcgatttaacataatttaatcatttcctgttggtttggacttgtccttagcccagtaaaaagaaaaaaccttccactcaggaagcctcttgcatttgttttggatgtaatttattttaaaatgattgatgatgaggattaaaagtgcaggagaac

SEQ ID NO: 26461 - DNA, 600 bp, Chicken  19866894242701_1
gttgtgttgggacaacttgtctacaggatcttccagacctcacttgttcactctctagagatatctccagaattactgttgggcctttctgctcaataagttgtctgcaaatggaagcaagaccagactccaaatttatgtttgcatttagatatttgaatgaaaatgattcagtctaccattattcagtcccaagctatttcagcccactcccaaaagacaaacatgatgattgtggacctttgctgcatatagctatgactaggattagaccctgagcaatgaaaataaacaaactayatataaaagagagatattgatgtcttatgctgtgttagatacagatttgaggctttcataacttctgtaggtgagcagtgctggtactactgagtggtattgtgaaagagaacagtgaggtgtgtttgtgtctgtgtatgaatgtatgtaatagaaatgttattggcttttgagattgacactggagacttaggcacattatagcaaggtggtgtcagtgctcatatcagccttattcatctctatgagcctgatgccaggaataaaaagggtgtgatgctggtcagtggcacacaggca

SEQ ID NO: 26462 - DNA, 600 bp, Chicken  19866894242709_1
tgtgagatcaaggcatggtgccctgttcaaggggaagaaagaccccccgtgtaagtagcaaaattattttcattttttgtcaaaaggagagtttactttgacagccctacaactttagggtaatgactttgcccgggtgcagatggatctcaggtatgtaaaccagctatttatcacagccatgctgatcatacttactgtatctaaatcaattgctgttaaattacaactgtcctgctctgtgattctgaagtgaagccatagcctccagtcttagcatcacacagctgccacagaaaygattttagatgtcacaggctcatcttgaattccatcgaggcatttggataatgaattcaaatgtcaaggaagatgcatcaacataaggtttcctaacttgaggttctcagtgctctgtggtgtagaagctctgtgtgggttcatttaccacagtgaggcttcttccaccactcaaaccagtagtgctagattagttgcctgtgctgtagggtagcttttagggatccactctaaactaaagaacatctcttcatccgttctaggcaggtgatgaaaacttcagtgctggctgtatgtaat

SEQ ID NO: 26463 - DNA, 600 bp, Chicken  19866894242714_1
aggaaaaattttgaagtgccactttaagctcagcaaggttggactcggcaaacaattgggggaagcgagttgcagagtaaagggctcttcactgaaggaagccagcagcctgcccccagcagctggccctccccgactctgcagccatcggctgcccgcacagccgcagcgccaaatcctggcaggatgtgctcctcctgagctggcagccccaccagcctccatgggctgaccagggctctttgcacagatgtgcatctgtcactgacacttcactaacactgttgttggaaatgcttyggcaggacacctgcacggcgctaactaaaacccagctaccgattcatgctgtccctgagatccacggaaaaaagtgtggactgcacgggaaataaagtattcctggcaagaagcagtaaacaaatagatccacactttggaattcattgtgtttacagcagcctcaaggtctatcctgtgcaaggctgcagcagcagcccggggtcacagcaccgcgcccagctggtcccagcgctgcccggggaaaggggctgccctgcagggccggctctggcctgcacgcctcatcccaaccgtgct

SEQ ID NO: 26464 - DNA, 600 bp, Chicken  19866894242717_1
aagatgatcgttgcccataaagcatgaatatgcaaaagacaaagcaaagtatattttagaatcatagaactactcaggttggaaaggacctcaaagataatcaagtccaactgcagccaaaccatactactctaactctaacaaccctctgctaaaccatatctctgagcaccacatccaaacggctcttaaaacacatccagggatggggactcaaccacctccctgggcagcctattccagtgcttaaaaaccctttctctaaggaagtgtttcctgatatccaacctaaacttcccrtggtgcaacttgaggccatttttccctcgtcctgccacctctcaccagtgagaagagacctaccctgctctcactgtaagcacctttcagatattggaagagagcaataacgtcagcctcagcctccttttccccagcctaaacagccccagttccttcagtctctcctcgtagggcacattctccaaggccttcacaagcctcgctgcccttctttggacctgctccagcacctccatgtcctttctgtactgaggtgccccaaactgaacacagtactcaaggtaaggcctcaccaat

SEQ ID NO: 26465 - DNA, 600 bp, Chicken  19866894242719_1
gctccatcgttctgaacagccccagggatggggacgtcatcaccttttcccacctctgctggaaacctcgggctggtgaggcactgattgcccagaggggcggtggtgccccatccctgcagacccccaagcctgctttgtgccaaaatgttgcttctttgccttttaaggtggcaattgggtcgttctgctttcagattcatctttctcatttctggtaaatgagcccaaaggaacatacaagggaaataaccccaatgatttggctgaggcatctcggttgatcttaaacagagcgtmcactgaataactgctgtgtgcagcccttggtcagcgctgcagtgcaaccacggctggggtgaactgaaggaagttcccccctcccaccccacatgcagccactgagtgtgsggctcccagcaccgctgccctctcaggagcccaatgctgcgcctcggagctgcgctcagcccacacccagagatgaggccagggaaggagagcagcccgcatgccttgggatcagcgggatgaaatgaaggccttgcatggctccgctctcacaggcacagtgccatgtgatgagcatcattaactgga

SEQ ID NO: 26466 - DNA, 600 bp, Chicken  19866894242719_2
catccctgcagacccccaagcctgctttgtgccaaaatgttgcttctttgccttttaaggtggcaattgggtcgttctgctttcagattcatctttctcatttctggtaaatgagcccaaaggaacatacaagggaaataaccccaatgatttggctgaggcatctcggttgatcttaaacagagcgtmcactgaataactgctgtgtgcagcccttggtcagcgctgcagtgcaaccacggctggggtgaactgaaggaagttcccccctcccaccccacatgcagccactgagtgtgsggctcccagcaccgctgccctctcaggagcccaatgctgcgcctcggagctgcgctcagcccacacccagagatgaggccagggaaggagagcagcccgcatgccttgggatcagcgggatgaaatgaaggccttgcatggctccgctctcacaggcacagtgccatgtgatgagcatcattaactggatatttatccaatttttcacgtagtccctttttaatgccccctccccacacacctccccacctccccacagccatcaactttcaagctgatctccaccacaaactctggccc

SEQ ID NO: 26467 - DNA, 600 bp, Chicken  19866894242721_1
agtaaaagcataacaagaatttcagggaaatggaaagcaggttgaagagaaggttattaaatataactgacaaatactatatttaatggaacagtgatgcttcaaggtcatggccagaacagtcacaagcgctatggtcaatctgaggaaggaaaatcaaacttctgaagccaaatatggcaagaagggttgaaagctgaagaaagtgattctaatgctagaagcactcagaagcactttgcttaacagtactgcagatcccattcgcagcagtggaaaaaaaaaatgaacgggaccatytttctagtgtttagaaagaaactaggagctttgaaggtgagatcacaggagagactacttatgagaacacacagaagaaaggaaaagcatgagggagtggagtgccttaatcaggcaatgaaatgaactctgaatagctgtgaaacgtggttcagtgtgccctcagctttggcacggtgccaccctgtccttgtgctgaggtcataggcatgaggaactgtgctaaggcacctccctcagtgctggaggagtaaggtagctgaaatgtggtggatgagggcagttaactaggtgggtttt

SEQ ID NO: 26468 - DNA, 600 bp, Chicken  19866894242723_1
aggatggataattctttactcggaggtattgaggccctggcacaggctgcccagagaagctgcggatgcaccattcctggaagcaatcaaggccaggctggacagggccctgggcagcctgagctggtgggtggcagccctacccatggcaggggactgtaactgggtgatcttcaatgtcccttccaacctaagttattctatgatttagctgaatgtcattatgatcacacagcatacattaaaaggagatttacccgtcaaaacagtttgaagagtgcatatcagatccaagatttmagtaaacctacatccaagtaaacctccatcccttatcctgtagctgcataaaaggactgtgatatacatctccagggatgagttaactgtacgtatgtattttgatttaaatcctcaaaaaggaaagcagcagtacagcaagtcacgtttagaagctctgctaaatgccttgcagtaggaaaaaggagactagctgcagagtcaagccaattagtacagtgacacttaatccaagggcaaccatttcatacatctctaatgcttgtgcatcacatcacactgcaagcatttccatgatgc

SEQ ID NO: 26469 - DNA, 600 bp, Chicken  19866894242726_1
gcacaacttaaggccatttcccctcgtcctgtcaccagtgagaagagaccaaccccgctctcgctgtaagtacctttcagatattggaagagagcagtaaggtctcccctcagcctccttttccccagactaaacagccccagttccttcagttgctcctcatagggcatgttctccaagcccttcacaagtcttgttgcccttctttggacctgctccagcacctccatgccctttctttactcaggtgcccaaaactgaacacagtactcgaggtgaggcctcaccaatgctgagtayggggacagaattacttccctagtcctgctcaccataccattcctgatacaagccaggatgccatcggccttcttggccacctgggcacactgctggctcatattcagctgactgtccatcagtacaccaaggtccctttccatcaggcagctttccagccactcttccccaagcccaagtagggctgcctgggggtttgttgtgaccaaaatggaggacctgacacttggacctactgaaactcatacagtttaccttggtccatcgatccagtgtatccaggttgctctgtagtgcctt

SEQ ID NO: 26470 - DNA, 600 bp, Chicken  19866894242733_1
gacaatgcatatgctggtgtttaagaacttcattcgtaagttcatagcatattgaaaagaagcagttactggaaaatctagatctggaccaggacttcatactgccttcagaaaccaaatataggttagcacgtagccagtagttaacttagtcagaagaaagcaattcataaattgtttatcaaattaaatgcaattccacttttgcatctgcccattagcagtttcttggaaggaaaggatagagaaaatactgaaacgtcttatggtttgtgacttaaatgcatgtttacagggcartgctaatccagatagtccagtgttaactgttgaagtcatataacaggtaatttgtgttagattgatttcctgctgcattattagcagcagttatgtattatgaaatggtaaaaacaaccaaggatagaattaatgagcatatggaaaatgcttgcaagaaagaagtgaaccgatattatcttacagtatttatagtggtataagaaaatgagcctgagttttaatccagatggaaaagtaataattgtagtctgtttcaacagtgcataatgactatatggactaacctctgaaaatcca

SEQ ID NO: 26471 - DNA, 600 bp, Chicken  19866894242743_1
tccccatttacaaaaagacaggaattctccagggatttagttatattttaaatctaaatagaagtaaatgcaggcacgccctgggcaattcactcccactggatcatgcagccactgacaggggaacttctgtgttcccgcctcatcgctctccagaagacctcactcctcatggggctgctgctcagctgccagaccccatagaaggagcagtgtcatgccagctgaactgtggggagtggaacagtaccttaagaagtagcctaaaccagatctggtcagttctaatgggaaatgacrctctgcatctttcttatatttcttgaggcacgcagcatgtttagagaaaaatatatggcctactcagtgacacctgcaggaacacaaagataaatatataaggaagaaaaataaaggaacatatgccagtgacaagtattaaacaaatgaagtgccatgcagcaagatgaaagtcttcatatgaaaaaaagaccaactcatattgttccatacaagagcagcatggttactttgatccctggaaaacacagttaagggtgaatcttgaaaagccaagagaaaaattaagagtgaaagtca

SEQ ID NO: 26472 - DNA, 600 bp, Chicken  19866894242743_2
cagtgacaagtattaaacaaatgaagtgccatgcagcaagatgaaagtcttcatatgaaaaaaagaccaactcatattgttccatacaagagcagcatggttactttgatccctggaaaacacagttaagggtgaatcttgaaaagccaagagaaaaattaagagtgaaagtcaatgttaacgtgttgagattattaaaataaagcaatttcaaattgaaaacaaaagagaagagagtatcagtaaaataaagcaaaattaaaagaaacagtgactggccagagcaaaccaacattaatwrggcaattcaataaaggaaaatacccagtaaagtaaaagcagcacttagggatatttacttaaactaagtttgcctttggtctctatttctaactcataatcttctcaagaattcttcaagaggctgtagtaggacaagtgccaactgaagacatgaaagcaatgctatccaaactttaaaaatagtgtaaaggaatacataaaacttatgaaataaattttattcatgcaagtgaaattaacacaagcatgaaacacagaagaggtaatacagtgaatattgtcacaaagcagggcact

SEQ ID NO: 26473 - DNA, 600 bp, Chicken  19866894242743_3
agtgacaagtattaaacaaatgaagtgccatgcagcaagatgaaagtcttcatatgaaaaaaagaccaactcatattgttccatacaagagcagcatggttactttgatccctggaaaacacagttaagggtgaatcttgaaaagccaagagaaaaattaagagtgaaagtcaatgttaacgtgttgagattattaaaataaagcaatttcaaattgaaaacaaaagagaagagagtatcagtaaaataaagcaaaattaaaagaaacagtgactggccagagcaaaccaacattaatwrggcaattcaataaaggaaaatacccagtaaagtaaaagcagcacttagggatatttacttaaactaagtttgcctttggtctctatttctaactcataatcttctcaagaattcttcaagaggctgtagtaggacaagtgccaactgaagacatgaaagcaatgctatccaaactttaaaaatagtgtaaaggaatacataaaacttatgaaataaattttattcatgcaagtgaaattaacacaagcatgaaacacagaagaggtaatacagtgaatattgtcacaaagcagggcacta

SEQ ID NO: 26474 - DNA, 600 bp, Chicken  19866894242750_1
ttgtttaaatacattattttgagttttattgtattgcttgactgctgagaaacagaaactcacttcagttgacggttttatttactgtgtacatgaaggatgaccttagcaaagagcagtctattactgaagatgacaacaaggtaactctctagatgttcctgaggcagggagattgttctttctttaactgcaaatgaaatcccttgcaatggtgaagcccaacctgacagaagtcccatcaagaatgtactctgggctgacaggctgggcagacttgtgcatctcctggtagatcayagcttcttccacagcagtgcttgggtttgcctgaggtcagctcttcagggagataggacttggtgctgaaagatatgatcttttcatatgaccctgtggagtacttcctggggcaaaaatgccttgcttttctctaaatgtcaaccactgtttcctattttaagttcagggtggctaacaccccccactggatgtaagtgtatgccagtcaggtaaaaggaaagaagttagtgctgttcttcaacagaagcaaccatctcctttctgagcctatttctgtacactgtcagagcagagctt

SEQ ID NO: 26475 - DNA, 599 bp, Chicken  19866894242757_1
  misc_feature (1)..(40): n is any nucleotide
nnnnnnnnnnnnnnnnnnnnnnnnnnnnnnnnnnnnnnnnattgcatcaagcgcgctcaaggagctgcagtttgcgttgcatgctgcgcctgtaagagctgttcacgcgcactcatgactcctctggagcatgagatctccaccgtggtttagctccagcatgaagaagttgtttcgtgaccaccatgagagtggtggtcaatggctcagtgtccggatggagatcagtgagcaatggcgtccctcaggggtcagcactgggcccagaattctttaataccctcaatgacattgacagtrggattgagtgcaccctcagcagtttgcagatgacacaccccagggatgggatgccatacatagagacctggacaggctgagcagtgggcccaggagaacctcacgagatacaacacatccaagtgcaaggcctgcacctggctggtggcagcccctgctatcagcagaggctggggagtgtaaggatggagcacagccctgccaaaaaggacctgggtgcaccagtggatggcagtgggacatgtgagagcatggtgccctcacagcccagaaagccaaccagatcctgggctgcatcc

SEQ ID NO: 26476 - DNA, 600 bp, Chicken  19866894242767_1
aatttgttaaacagtggtggaatattctgcttactaataaccaagagctacaaaaatatactcaaggcttgacattcagcaataccttcacgaagaagtccttcaagctaaagaaagaaattgctacagtcagaagctattttggtttggagtttaacctgttgtattcccacgagtatctgctttgtgtttctctataatgagctatctaatctaaaccacattgtctttagcagacaaaaatacacaaactaactttcaactgaaaaagcagcaggagcatcacttctacttgatcaygaagagcagcatgttctgactcaatacatggctttaggaggttgtattttccagctgtatttgaaagagaagggtgagcgtggccactgargctccctcaagcattctaataaagatgtcaagatgctaagtcacaagaggaaaataaaaatcagtcccaataataacaaaattaaaactacattggaataaattttggattcaaactgtctataatatcttccaaaataagatactgtgcttagctcaggctagcatcctttcagctatatatttctctaacctctttgagaattactg

SEQ ID NO: 26477 - DNA, 600 bp, Chicken  19866894242767_2
gaagaagtccttcaagctaaagaaagaaattgctacagtcagaagctattttggtttggagtttaacctgttgtattcccacgagtatctgctttgtgtttctctataatgagctatctaatctaaaccacattgtctttagcagacaaaaatacacaaactaactttcaactgaaaaagcagcaggagcatcacttctacttgatcaygaagagcagcatgttctgactcaatacatggctttaggaggttgtattttccagctgtatttgaaagagaagggtgagcgtggccactgargctccctcaagcattctaataaagatgtcaagatgctaagtcacaagaggaaaataaaaatcagtcccaataataacaaaattaaaactacattggaataaattttggattcaaactgtctataatatcttccaaaataagatactgtgcttagctcaggctagcatcctttcagctatatatttctctaacctctttgagaattactggtttcttccccacatttcccactgtttaacctcaggagggtgtaagaaactggcattataaaagtattctggggtacagtcagtgcttctg

SEQ ID NO: 26478 - DNA, 600 bp, Chicken  19866894242768_1
cacgtgcactcaagagttgatcatgcagtgccagggtgttccctgagtttctcagccatttccaggtaaacagctgctcagaaagggtcagaaacctggaattagaatttgaagtcctctctgcttcagcactagattgtctctgagagaagtggtgctcatcagtgatgttctttccctgtaaccaacatcgcttttgtcactgtggtaagccggagttacaatatgtactcatatatccagcccaaggctctcttgcaaaataattatgctttaagggaattttaatctcatattaaygagacacctcccccccatctttgctctctgtcatactagaaactgatttatgattaatgaaaactgcatgagagaaatcttttgctatctcctcagaacagtttggaaaaagaagaaaaacgggagtgaaagatttaataatggtatttacagctgctttgccatgctgataataacaacaagtggttgtcrcttacamgatcttggaagcttagaatatatgagcaagagaatatcctctgtgtatggagtatacagattacaggagaaaaatactttatttgcagcaaaccaagagaa

SEQ ID NO: 26479 - DNA, 600 bp, Chicken  19866894242768_2
gcttttgtcactgtggtaagccggagttacaatatgtactcatatatccagcccaaggctctcttgcaaaataattatgctttaagggaattttaatctcatattaaygagacacctcccccccatctttgctctctgtcatactagaaactgatttatgattaatgaaaactgcatgagagaaatcttttgctatctcctcagaacagtttggaaaaagaagaaaaacgggagtgaaagatttaataatggtatttacagctgctttgccatgctgataataacaacaagtggttgtcrcttacamgatcttggaagcttagaatatatgagcaagagaatatcctctgtgtatggagtatacagattacaggagaaaaatactttatttgcagcaaaccaagagaatattccaagtggtaaaatagttaataactgtattttgtctttagagttagtaatttgaccagtatttgatagtatacacagttcacgttcatgataagggcgtttgaaggaggagtgctcttaagattattaaatgtaagctagtttaacataggattttgttgttgtttttgttgacttcattcctcacct

SEQ ID NO: 26480 - DNA, 600 bp, Chicken  19866894242768_3
tcactgtggtaagccggagttacaatatgtactcatatatccagcccaaggctctcttgcaaaataattatgctttaagggaattttaatctcatattaaygagacacctcccccccatctttgctctctgtcatactagaaactgatttatgattaatgaaaactgcatgagagaaatcttttgctatctcctcagaacagtttggaaaaagaagaaaaacgggagtgaaagatttaataatggtatttacagctgctttgccatgctgataataacaacaagtggttgtcrcttacamgatcttggaagcttagaatatatgagcaagagaatatcctctgtgtatggagtatacagattacaggagaaaaatactttatttgcagcaaaccaagagaatattccaagtggtaaaatagttaataactgtattttgtctttagagttagtaatttgaccagtatttgatagtatacacagttcacgttcatgataagggcgtttgaaggaggagtgctcttaagattattaaatgtaagctagtttaacataggattttgttgttgtttttgttgacttcattcctcaccttctccct

SEQ ID NO: 26481 - DNA, 566 bp, Chicken  19866894242768_4
gttgttagagttggcatttgctttgcacaaaggggttatgttatgggaaaggaaatgaatttccttgtggtcacccttagctctttctgcttctctgtctcatgccaaacactggtgagtctacacaaagaagaaaagagtccacttgctaataaagaaagggtgtttgtttaagagaaggatttacttggggtccatctgacagctctctatttgaggatgcttgctgcgaggacggggaaaaggcaatgagctcaaccgtctgctgtaaaggttgctcattgcttttaaagtataaayccaaaatactctataagaacaacaacaatgaaacaattatcaytgtcgtcttggggaatggggggaatcttctgctttgcaaatatcatgagatagtaactaaaaaggagatagtgacttttttttttttacaagaaaaaatgtgaggcactgtctgcccaactttaggtaccaaaatgtcattaagaaatgggctaaaaagagccatgggccacattctcatgcagtgagtgtattggttggattttcttgcagggagatccagt

SEQ ID NO: 26482 - DNA, 523 bp, Chicken  19866894242768_5
tgggaaaggaaatgaatttccttgtggtcacccttagctctttctgcttctctgtctcatgccaaacactggtgagtctacacaaagaagaaaagagtccacttgctaataaagaaagggtgtttgtttaagagaaggatttacttggggtccatctgacagctctctatttgaggatgcttgctgcgaggacggggaaaaggcaatgagctcaaccgtctgctgtaaaggttgctcattgcttttaaagtataaayccaaaatactctataagaacaacaacaatgaaacaattatcaytgtcgtcttggggaatggggggaatcttctgctttgcaaatatcatgagatagtaactaaaaaggagatagtgacttttttttttttacaagaaaaaatgtgaggcactgtctgcccaactttaggtaccaaaatgtcattaagaaatgggctaaaaagagccatgggccacattctcatgcagtgagtgtattggttggattttcttgcagggagatccagt

SEQ ID NO: 26483 - DNA, 599 bp, Chicken  19866894242771_1
  misc_feature (1)..(99): n is any nucleotide
nnnnnnnnnnnnnnnnnnnnnnnnnnnnnnnnnnnnnnnnnnnnnnnnnnnnnnnnnnnnnnnnnnnnnnnnnnnnnnnnnnnnnnnnnnnnnnnnnnnacttctgtggttgtggaagggatcgctttggctgaaagtacatccagctcaggggcgagcaattagaagccctggggtgggtaagggggggaagagaccgaggaagaataggaggctgggaagggtatgagcacagaaggacgtggatgtgtgaaggtatgttagcatggaagaaatgctatttgtggtatattcccacartagattgaaacactgacatgataaagataaaaacgttcatgagacgtttgttctgtgtttcaaaaatagggataatgtactcctggctcctgagggcgctgggttgcttcctagtctgctgataaatgtgtcagatactctgcaagtattagaagcttttaagagggcaagttaataattcctgttcaggagctctctgacctgttgttccttatcttgaagaaatcttagtgtcaaggggatagctaagaacaggaagcttccaagagggcagttgaggcagcccccactaattgcta

SEQ ID NO: 26484 - DNA, 600 bp, Chicken  19866894242779_1
catacctccacgggatgcagacagcccataccaagcaaccgtggggagcctgggggtcactgtggccagagttaagtcagcagcccatttctttccctgtcgctggaggcatttgaggccaggctggatgtggctctgggcagcctggcctggtgtttggcgaccctgcacatagcagggtggttgaaacttgatcattgtggtccttttcaacccaggccattctatgattccatgattcttttccagtcaggctgctgttcatactctcttatgctggaagagagatggctttttccytgtctttttttccgttttttattttgagagtttgctccatctctttgctaatttaatgaaaatgttacataaataaagtgcagctttgcttcactaagcagaggaatggaacagcattttgcttgagttgtattcaagatcgaaattagtgctcaacaggcagcactggactgcacagtcagcaattttagagagctggaggagtaaggatcttttttccctcggactgtaagaaaaggccgtacagctgaagctatcaatgcaaatgatagctaaccttgccagccagtagctcctctt

SEQ ID NO: 26485 - DNA, 600 bp, Chicken  19866894242780_1
atgtttgaactctagtttaactgcaaagaaccagaagcgtaaacaactagaggatcggtgcgatgctttggtatccttaaggcttgcttataaccttcaaggtaaacaggctttatgctggtgtgcatcatagaggtgctgatatgtccattgttttgtttaggaccactcaaaactaaaaaaaatactgcctaaacactcaagagcattgttcattttctcatcagattcagcatttgggcagtatttaactgtatcaattatttcagtgatcactgtctctttttaggactggatttygtatcaaatccctctgtaagggtagggctctagaaacaggcttagcagagaagcatgaatatatggtggtggaagcccacctcccttaaggcaaaaatctcagctaaagcaccttggcagcatattaatagctataaaagactctttctttgctgaccacaaatatgctgtggtcaacaagaggtctactcactgttttgttaaaaacagtgatgatttattttgcttcagccatgtgtgaaactagtcaccacattatgaataataatatcctcttagtctcaatggagctctttttag

SEQ ID NO: 26486 - DNA, 600 bp, Chicken  19866894242789_1
ggtggatgctagctccatccctttccgggacactcagatgcattgcatgcacctgagctctactgacttggccctgccttcccaccaggtgctcaatcactacttcagactgggacttagcatttctgctacatgcagacaagctgtttttttatttttatttttttaaccatcagggttgtcagtacagctcaatataacaagaatttcagacaaacttggatttaaccaatcccaccaaccacaaggtgtggaatttctctcacctcccatccttccatctccagtcctctcctcccrtatatgtcatagatggccctggtctgtggatcactaagcactgcaagttaaaataraaagagaataaggacttgatcttcttaaatctcaggccaacacaatagcattacttagaattcaggcagattctggaaactcattctacagggaagtcaggaagataatgataaaattgtttataatacatagaagataagaccaggacttcacatcttcttcactgcagaacatacaatgcactgctcctctgatttacaggacagaaaaaggaaacaragcactacagtgatgtgataatgt

SEQ ID NO: 26487 - DNA, 600 bp, Chicken  19866894242789_2
gctctactgacttggccctgccttcccaccaggtgctcaatcactacttcagactgggacttagcatttctgctacatgcagacaagctgtttttttatttttatttttttaaccatcagggttgtcagtacagctcaatataacaagaatttcagacaaacttggatttaaccaatcccaccaaccacaaggtgtggaatttctctcacctcccatccttccatctccagtcctctcctcccrtatatgtcatagatggccctggtctgtggatcactaagcactgcaagttaaaataraaagagaataaggacttgatcttcttaaatctcaggccaacacaatagcattacttagaattcaggcagattctggaaactcattctacagggaagtcaggaagataatgataaaattgtttataatacatagaagataagaccaggacttcacatcttcttcactgcagaacatacaatgcactgctcctctgatttacaggacagaaaaaggaaacaragcactacagtgatgtgataatgtttatttgcactttaaagagcacgaagayattccctgcctagaagacccctagaaag

SEQ ID NO: 26488 - DNA, 517 bp, Chicken  19866894242789_3
tccatctccagtcctctcctcccrtatatgtcatagatggccctggtctgtggatcactaagcactgcaagttaaaataraaagagaataaggacttgatcttcttaaatctcaggccaacacaatagcattacttagaattcaggcagattctggaaactcattctacagggaagtcaggaagataatgataaaattgtttataatacatagaagataagaccaggacttcacatcttcttcactgcagaacatacaatgcactgctcctctgatttacaggacagaaaaaggaaacaragcactacagtgatgtgataatgtttatttgcactttaaagagcacgaagayattccctgcctagaagacccctagaaagttctggcaaactcaaagacttctgctgaccttcataagcttggtgaacaaggttaaacagccgctcagcctgcgatttcagctctgggtctctgtgcttgtctggatggtacagcatacacaaccgtcggtaggcag

SEQ ID NO: 26489 - DNA, 465 bp, Chicken  19866894242789_4
gatcactaagcactgcaagttaaaataraaagagaataaggacttgatcttcttaaatctcaggccaacacaatagcattacttagaattcaggcagattctggaaactcattctacagggaagtcaggaagataatgataaaattgtttataatacatagaagataagaccaggacttcacatcttcttcactgcagaacatacaatgcactgctcctctgatttacaggacagaaaaaggaaacaragcactacagtgatgtgataatgtttatttgcactttaaagagcacgaagayattccctgcctagaagacccctagaaagttctggcaaactcaaagacttctgctgaccttcataagcttggtgaacaaggttaaacagccgctcagcctgcgatttcagctctgggtctctgtgcttgtctggatggtacagcatacacaaccgtcggtaggcag

SEQ ID NO: 26490 - DNA, 522 bp, Chicken  19866894242790_1
gtgaccagaaccaattgggattcagacagaactctggcactgtcacagcccccagccaaatgcttcttgggttacatacacatctagtttggctggaagggttggatcaaatatacccagcatctgggcctgtttaacagctatttttgcttgctggaaagcttcttgttctgttctaccccaatcccatacttggcctttttttttgttaatcgatataaatgttttagcggttgtgctaagtggggaataagggatcgccaatatcctaatatacccaaaaactcttgcaactgcttyggttttgtgggaatctggaacacttggatcttatcactgattgcactgagtaacaccttagtcttacctgactagacaacacccaggaatttaactgttagccttggtccttgtaccttttgtgggttcatagctcatcctttttcctgtaaaaagtaattaatgatgggactggcttctctaatgcctcgatggagtcagacgttagcatcaaatcatcga

SEQ ID NO: 26491 - DNA, 600 bp, Chicken  19866894242794_1
ctgaaacaccatgaggaattactgtttccagtccattttcacttctgcctagctattttgtttacatgcaatccaggccctctccaatggctctcaagggctgtctagttgaatgtcattttagggagtatgcctcctctgaattcagctagggagaaaaataaagcgtgattcttacctctttttgaaaaagaagcttaatctatattagattagctctctcataaggctgtgtcatttccatgttacaaagaggatatgatgtatgtgtcactgccaaatacgacagctgaaaggctygtgtagttcatcagtacaacctcaggagcagcaaccataacactgttgatacagtgatacaggttggttacctcaggaagcagcaattaaatctaaaagacagagggttgttcagtctcttctgtgatatgtgtggaaaagtttaaaggatttctaagtaaggtaaagtaaggtatttaaaacatgcctacagcaggcaaacactttgtaaacaggctagcctacttctactaagccatgtataaaaacatagttctattaaacagacttctgtgttatgtaatagtggagacatatagt

SEQ ID NO: 26492 - DNA, 599 bp, Chicken  19866894242795_1
  misc_feature (1)..(128): n is any nucleotide
nnnnnnnnnnnnnnnnnnnnnnnnnnnnnnnnnnnnnnnnnnnnnnnnnnnnnnnnnnnnnnnnnnnnnnnnnnnnnnnnnnnnnnnnnnnnnnnnnnnnnnnnnnnnnnnnnnnnnnnnnnnnnnnnaagaactgtgaagcattgaacagattgcccaaggaagtagttgggccgacatctctgatggtattaaaaggcatgtagatctggtgaatagaatcacagaatcatagaatcgtagaatcatagaatcgctaaggttggaaatggcccacaggatcatccagtccaaccattygcccttcaccaatggttctcgctaaaccgtgtcccccaacacaacatccaaacgctctttgaacaccaccaggctcagtgactccaccacctccctgggcagcccattccagtgcctgatcaccctttcagagaagtagtatttcctaacgtccagcctgaatcttccctgacgcagcttgaactcattccctctagtcctatcactagtcacaygagagaagaggctgaaccccagctcactacaacctcccttcaggtagttatagagagcaataaggtctcccctgagcctcctct

SEQ ID NO: 26493 - DNA, 600 bp, Chicken  19866894242795_2
atagaatcacagaatcatagaatcgtagaatcatagaatcgctaaggttggaaatggcccacaggatcatccagtccaaccattygcccttcaccaatggttctcgctaaaccgtgtcccccaacacaacatccaaacgctctttgaacaccaccaggctcagtgactccaccacctccctgggcagcccattccagtgcctgatcaccctttcagagaagtagtatttcctaacgtccagcctgaatcttccctgacgcagcttgaactcattccctctagtcctatcactagtcacaygagagaagaggctgaaccccagctcactacaacctcccttcaggtagttatagagagcaataaggtctcccctgagcctcctcttctctagactgaacaatcccagctccttcagccgctcttaataaggcctgtgctcaccagctttgttgccctcctctggacacgctccagagccttgatgtctttcttgcagcgaggggcccaaaactggacacagtacttgagttgcagcctcaccagtgctgagtacagggggataattacttccctgttcctgctggccacactatttctgat

SEQ ID NO: 26494 - DNA, 600 bp, Chicken  19866894242798_1
agatagcaggaaggtgagagctgcctgcagcctgccttgccaagaagcacttccagcaagctccagatccgagatagtcatagaatggctttggttgaaaggaatctcaaatgctttcctgttccaacccacttgccgcagacaggattgccaaccactaaatcagacaccaggtcaggctgcccagggcaccatccagcctgaccttgaactcttccaggaatgtggcatccacaacttctctgggcacctcaccaccaaacagtgcccaagccctgctcaccctagggatgcacaacrgtcccccagacccagaggcagtcagtggaggacctgcttctctccaagtagcattttacagcagtgcctatagcagccccagagacaaaagggctgaggagtgtttcctaaagccatccacccgttcccagccgcctgcctatttgtgygttgctggtggaagcacgatcattttgtctgcaggcttccatctccagccattcgagcactgcagcgatagtttattactttcctaataaagcctgaatagaaatgaagcctttgtagccctaagtgtgtgctttattctcgctgtaataa

SEQ ID NO: 26495 - DNA, 600 bp, Chicken  19866894242798_2
gccaaccactaaatcagacaccaggtcaggctgcccagggcaccatccagcctgaccttgaactcttccaggaatgtggcatccacaacttctctgggcacctcaccaccaaacagtgcccaagccctgctcaccctagggatgcacaacrgtcccccagacccagaggcagtcagtggaggacctgcttctctccaagtagcattttacagcagtgcctatagcagccccagagacaaaagggctgaggagtgtttcctaaagccatccacccgttcccagccgcctgcctatttgtgygttgctggtggaagcacgatcattttgtctgcaggcttccatctccagccattcgagcactgcagcgatagtttattactttcctaataaagcctgaatagaaatgaagcctttgtagccctaagtgtgtgctttattctcgctgtaataaccttactacgctctgtttccacagcaactgttttctcagccacttcatccctctgcttccaggaacgcaggctgctcgctccactgacataaaagccctgcagaaagcacgaggagggcagcaatccaagctgcagggtcacaaactgg

SEQ ID NO: 26496 - DNA, 600 bp, Chicken  19866894242802_1
tgggagatcttttttaaacaagtctaaaaactgaacaaactgtgctcattcactttttggatatccagccttatgacctaagcaggctctgctagccatatgctgatagatgttatgcaagtgctgtatgcgctctcatttgatgacttgaacgtcttcagctgtgtttaagatttatctgaagctcaaaatagagagtgaatttgtcttctgttggcagaagtgctgcacttgctattgcaacaacattaatcctgagcagagactccccatctgagagcacttacgaaattatctttyaaaggcatgcctttagatacaatagaggttggagactgagaccgagtctttggtatgcaaaaccttgagacgagagcaggtggaatggcatgcaagagagtttaaatattaaaagagaaagacatacgccttgataagagttaaggtttctagacagaattgaaagaagagtagctgtcaaaatgaaaatgaagtctggttgtttcattcactggataggctttccacatattaaatgctcagaattctgcatttcaaagtcagaacatgaatcatgctgatctactgtactacagcttt

SEQ ID NO: 26497 - DNA, 600 bp, Chicken  19866894242803_1
gtgacagaaacaacactttttatgagaatacagaatattaaaaatggggcacaatatacagatggcagttttcactacagcttgtttttttcccccccaacctgctcctgctactcagcttcccactgaatgcatttgtagtaacaccataaatgtcactttcactgactgccttttggcatgttatttaaatgggaatgcggctcttgctgctgccaccactgcattgaggctgtgttttgcaggagtgcatggccctccttcacccaacacatcttggagcagccaaaatagcagccycrgccgtgctggtgccatgctgtgcatctctatgtgcacgcctgcctctctggttggactggggtggtcgctgcaagccatccaagtgtgctttgccactcggtgagatacttttctctctactcagctcctctgaggctcgcatcttgccagcgaaacgcaaagtcgtttgctgctgcgatggcaccaagaggcggatgagatctgcagttgctaactgctgcttttaactcccggggctctttgggctgttttctgcctaaaatctggctgtttgctctagctgcgttgctgtggtgt

SEQ ID NO: 26498 - DNA, 600 bp, Chicken  19866894242803_2
gacagaaacaacactttttatgagaatacagaatattaaaaatggggcacaatatacagatggcagttttcactacagcttgtttttttcccccccaacctgctcctgctactcagcttcccactgaatgcatttgtagtaacaccataaatgtcactttcactgactgccttttggcatgttatttaaatgggaatgcggctcttgctgctgccaccactgcattgaggctgtgttttgcaggagtgcatggccctccttcacccaacacatcttggagcagccaaaatagcagccycrgccgtgctggtgccatgctgtgcatctctatgtgcacgcctgcctctctggttggactggggtggtcgctgcaagccatccaagtgtgctttgccactcggtgagatacttttctctctactcagctcctctgaggctcgcatcttgccagcgaaacgcaaagtcgtttgctgctgcgatggcaccaagaggcggatgagatctgcagttgctaactgctgcttttaactcccggggctctttgggctgttttctgcctaaaatctggctgtttgctctagctgcgttgctgtggtgttg

SEQ ID NO: 26499 - DNA, 599 bp, Chicken  19866894242805_1
  misc_feature (1)..(29): n is any nucleotide
nnnnnnnnnnnnnnnnnnnnnnnnnnnnnaattgcaggaatgacgggaaactgaggaatctgaaaaaaatataataccacataaattgcaagagctttcattgatggtacaaagcagtttcatttgccatacaagaatgtaaagatcacctgtgccatgataattatgtctgttaatcacttccatttatttcctgaggtttacaaacagtaataaaaactttattattaaatcgttagggaaaaaaaattgaaatttcattttaaggggatatttttgggagtttaaaactgtttctcrtgatagtttggagccttcaagcaacatcctaattaacaaaacatagcttccatttaaacagaagggaaatggaatcagaccggacaaaacactgcactctttcatgcaaaatacaacacgatgattaaaaatctttgttyttataaggtctgtctgcaacacaggcagcgggggaaatgctgtaaaaccctttttaaaaccaaaacctcccagtgacacggcagaccatgataactaccccattatcatggaaggggcgtgcttcttccccttggggtaagctgtttcacatcacaatg

SEQ ID NO: 26500 - DNA, 600 bp, Chicken  19866894242805_2
aaagatcacctgtgccatgataattatgtctgttaatcacttccatttatttcctgaggtttacaaacagtaataaaaactttattattaaatcgttagggaaaaaaaattgaaatttcattttaaggggatatttttgggagtttaaaactgtttctcrtgatagtttggagccttcaagcaacatcctaattaacaaaacatagcttccatttaaacagaagggaaatggaatcagaccggacaaaacactgcactctttcatgcaaaatacaacacgatgattaaaaatctttgttyttataaggtctgtctgcaacacaggcagcgggggaaatgctgtaaaaccctttttaaaaccaaaacctcccagtgacacggcagaccatgataactaccccattatcatggaaggggcgtgcttcttccccttggggtaagctgtttcacatcacaatggctgccactagcaaacacaccagcaaaccattccaggcataggaaaggtccatccctagcactgagcctggggacagagctgggagggaggtagagactgtggggaagcaaagagctcgaaaacaaaaaaacaacaacaac

SEQ ID NO: 26501 - DNA, 600 bp, Chicken  19866894242807_1
cctctgataaaacatatcattttagccacccacttgccattaggctttgttgctctttcttccccagcccccagatggacttctcatctatctattcaatacacatttctactgtctttcccatttctccttttttcccatagctgtctcttcctagccttatgatcacatgtgatggtgaagttactagctggactgttgcttttcccaaggctgttacaaaagtagatgtttcctcatgtctgtctggtgtccgttcatgagcctccctttatatcccagcatcaggtaactccttaycagtcctaccaggcaatatgtgtgcttcacctgccggtccactatgcattgccctcctcagaatgaaaaaatgtgttgcctgggttggttattatctcactgtccaaacatgtaccatttaaatggatagttggcaaagtttaatggtgctttattgtgacccttctcttattacctccaaattttaatttagtgttgtggcagaaaatcaacagggagggaacagaggccctacactcgaactagacagcttactgcatcaaatgaaattttataayctgaaggaccccccagcttact

SEQ ID NO: 26502 - DNA, 600 bp, Chicken  19866894242807_2
ccagcatcaggtaactccttaycagtcctaccaggcaatatgtgtgcttcacctgccggtccactatgcattgccctcctcagaatgaaaaaatgtgttgcctgggttggttattatctcactgtccaaacatgtaccatttaaatggatagttggcaaagtttaatggtgctttattgtgacccttctcttattacctccaaattttaatttagtgttgtggcagaaaatcaacagggagggaacagaggccctacactcgaactagacagcttactgcatcaaatgaaattttataayctgaaggaccccccagcttactatagccccaatactaatgtcgccttcttcacctctctgtatgcagaacaaggtgaaaggaaaagaactgatggtggatgaaaaagcaatagaagtttgcaacaggacaatgagtacaagaaaaaaaaaatcctccagcagtaartgtactctgtaaacataaaaaaaataacaactgatacacacattccaaatccatttccagtgagaatcaactatgttacgtacaatgaatcgtgagaagaggctggtgagagagaaagggcaccaattattatt

SEQ ID NO: 26503 - DNA, 600 bp, Chicken  19866894242807_3
tggtgctttattgtgacccttctcttattacctccaaattttaatttagtgttgtggcagaaaatcaacagggagggaacagaggccctacactcgaactagacagcttactgcatcaaatgaaattttataayctgaaggaccccccagcttactatagccccaatactaatgtcgccttcttcacctctctgtatgcagaacaaggtgaaaggaaaagaactgatggtggatgaaaaagcaatagaagtttgcaacaggacaatgagtacaagaaaaaaaaaatcctccagcagtaartgtactctgtaaacataaaaaaaataacaactgatacacacattccaaatccatttccagtgagaatcaactatgttacgtacaatgaatcgtgagaagaggctggtgagagagaaagggcaccaattattattttcaagtcaagtcaaccatccaagtttgcatacagaagcattttttctctgttttgttgatggcctccccttgtctctcttcctcagcatatttcctacagttcccccacccagcagtagttacatacatctgaataacactgcagttcaaacactaaagggatgg

SEQ ID NO: 26504 - DNA, 600 bp, Chicken  19866894242807_4
gattttttctgtattaccaaaattacaaagtgggaaatgaaaagagaagggggagaaaaaaaactgctggaaatgattgtctcgtagggtgttctctaataatgagaagggagccacactttgaacccttgattctttgacagagaacaaaaaccttacagcattttgctacctttaattgtattactcttctggtaatcaataaagataaaaaaagatcattctatgtacaatatgaaatctcatggagtctgactatgtggagatagattccacttatctgtctctaggggtaacttytcttgtagtagaaaactcaatttttatttggattttaaaaatgtttcaaattatccagtcaatgctacatgcatattaaaagatttattaccaaatattcttatcttgatgtactggatctatgcacccaattcccacttatgttaatggaactgcttctgcagatccctgtacatcaaagcaagacagtacccataagtactgcaaacacataggtacctggataaacagcacacagattaaccacctctagcattactgtttttaattctttatgtaaaccttcgtctcatctttcta

SEQ ID NO: 26505 - DNA, 600 bp, Chicken  19866894242807_5
gaacctgagccaaattccctcacacttgagctgaggtttttaatggcgacactcatatgcagcatggcagcacttactctaattggagagggaggggggcacttccacatcatgactcagatcttgggtgtgctgaatcatccttgtttctgactatcaaccaggggtgtaaaaagtgttgttaatttaagtacttgaaggcagacaggttgcatcaggccatgtagttagtggtaactcccattcttgtccaatgccaggggtggttcagaggacctagctaacacagtggttcttagrgagtaggctgctggggaccatgttagcctttaatgttaaaggtgagaggagtgatggagaaagagcaattaagatgatcaaacattttcctggagtcttaaacttaaaaccccargttagcttcttaaaaatcacctccaaggtgattacttaacccttaaccttacgcattcatgctttgtaacacctgagtcatgttttaatattaagagaaaacccatgtattattatgattatgattattattaacagtactattaattacagtcctatatgttcgccaatgtaaactgtaattaa

SEQ ID NO: 26506 - DNA, 600 bp, Chicken  19866894242807_6
ctcagatcttgggtgtgctgaatcatccttgtttctgactatcaaccaggggtgtaaaaagtgttgttaatttaagtacttgaaggcagacaggttgcatcaggccatgtagttagtggtaactcccattcttgtccaatgccaggggtggttcagaggacctagctaacacagtggttcttagrgagtaggctgctggggaccatgttagcctttaatgttaaaggtgagaggagtgatggagaaagagcaattaagatgatcaaacattttcctggagtcttaaacttaaaaccccargttagcttcttaaaaatcacctccaaggtgattacttaacccttaaccttacgcattcatgctttgtaacacctgagtcatgttttaatattaagagaaaacccatgtattattatgattatgattattattaacagtactattaattacagtcctatatgttcgccaatgtaaactgtaattaaagtaagctaaatatattaaaaccaaaacaaaatttaaaaaaccccatgtactgtattaggattgaaagtaaacaaatgcatgtttttaaaaggaaaaaaaaaataaaaataaaaa

SEQ ID NO: 26507 - DNA, 600 bp, Chicken  19866894242808_1
tttgtcttttatttgtgatagcactaacttggaaatgtcacaagcgtttgatgaggcaataaattcaggttcatatgaaatcagtacgtttctatcttttaaatttatttctgacttactgtgtttctgtcaattaacactgctctgttttttgttccaaattgtttactacagtaagttgatgttgtgttcttttgtcaatacctccagaagaaagtgcttgatttttcacatgcattgtgtatgtatatatatatacatttatatgtacatctatctgaagatgtttctttacaatgrtttttttttcccaattgcattcaacagctcatgaaacaagctataatgaagtgctagattaaccacagttttgttcaaggcttacaggaccatcagaattgtttacaattgggaaatttggaaggatgggatattagtgagattgatctccacaagatatcagatcaaatgatatcttctcccaggcaacaaataggacccaaggaaataaccacaagttgtgccaagggagatatagattagacataaggaagaactttttctctcagagagtggtcaggcactggaatggcccgccca

SEQ ID NO: 26508 - DNA, 600 bp, Chicken  19866894242808_2; identical to SEQ ID NO: 26507

SEQ ID NO: 26509 - DNA, 600 bp, Chicken  19866894242824_1
aaaaaaattctgaaaaagttcagtaatagtgtgctttgggaacagaatttgtggtaaatgtcagaaatgaatgatgtcttctgcttttttttttttattattattttatttttaagcttttgtgacacactgtgaaatcccatgggataagtttgcttcctttagtacttgatgggatggatacgagagcaaagggaatattttgacttagaaaagaacactaagaaaggcactgcacgacggattaatttgggataactgacagtatgtggtggtgtgtcattctatgttgagtgaacrtctcaacaagggtttcacctcctctctgtaaacctagttctttagtcaattaaaagttcacagaaccagctgtaacatgtgcttcacatgtatatgtttaaattgaattattatccttcaagcacactggaacagtgtgtacttactcagtacttagtcagtaatcaagtagctcaaccctctcttcatgtcrtttgcaaatagaaatggtttccctttgggcaacacatgaaaggaagcttcagatttcgtaggacatgtccactaatttcaccagtatttttgtactgcattgtgacg

SEQ ID NO: 26510 - DNA, 600 bp, Chicken  19866894242824_2
gggaatattttgacttagaaaagaacactaagaaaggcactgcacgacggattaatttgggataactgacagtatgtggtggtgtgtcattctatgttgagtgaacrtctcaacaagggtttcacctcctctctgtaaacctagttctttagtcaattaaaagttcacagaaccagctgtaacatgtgcttcacatgtatatgtttaaattgaattattatccttcaagcacactggaacagtgtgtacttactcagtacttagtcagtaatcaagtagctcaaccctctcttcatgtcrtttgcaaatagaaatggtttccctttgggcaacacatgaaaggaagcttcagatttcgtaggacatgtccactaatttcaccagtatttttgtactgcattgtgacggtgtgttgtccaggagcaaggagtacttacaaattatcagaataatgcaagtgttgtcagagaaaagacactcacrctcacgtttgtgcacattgtaggaaaacagtgtggcagctgctggtttccaggaaggatagatgccattaaaagcgytgtaaaactttgagctaatgaacatgaatgtgggtgggtg

SEQ ID NO: 26511 - DNA, 600 bp, Chicken  19866894242824_3
atgtgcttcacatgtatatgtttaaattgaattattatccttcaagcacactggaacagtgtgtacttactcagtacttagtcagtaatcaagtagctcaaccctctcttcatgtcrtttgcaaatagaaatggtttccctttgggcaacacatgaaaggaagcttcagatttcgtaggacatgtccactaatttcaccagtatttttgtactgcattgtgacggtgtgttgtccaggagcaaggagtacttacaaattatcagaataatgcaagtgttgtcagagaaaagacactcacrctcacgtttgtgcacattgtaggaaaacagtgtggcagctgctggtttccaggaaggatagatgccattaaaagcgytgtaaaactttgagctaatgaacatgaatgtgggtgggtgaactcaattttaagaaaaacgatttaatgtggcttttttctgcatctgccagtttgcagggtcagtatttttcatttgcagtaagccactgtgtgccatagaatggtagggaaacgaagcaagagctatgtgaaatgggcaaatatttaaattagtaaaggcacagactttagcagcatcgtc

SEQ ID NO: 26512 - DNA, 600 bp, Chicken  19866894242824_4
ttagtcagtaatcaagtagctcaaccctctcttcatgtcrtttgcaaatagaaatggtttccctttgggcaacacatgaaaggaagcttcagatttcgtaggacatgtccactaatttcaccagtatttttgtactgcattgtgacggtgtgttgtccaggagcaaggagtacttacaaattatcagaataatgcaagtgttgtcagagaaaagacactcacrctcacgtttgtgcacattgtaggaaaacagtgtggcagctgctggtttccaggaaggatagatgccattaaaagcgytgtaaaactttgagctaatgaacatgaatgtgggtgggtgaactcaattttaagaaaaacgatttaatgtggcttttttctgcatctgccagtttgcagggtcagtatttttcatttgcagtaagccactgtgtgccatagaatggtagggaaacgaagcaagagctatgtgaaatgggcaaatatttaaattagtaaaggcacagactttagcagcatcgtctgaagtattatatatgtaggaaagcattaggccagtggcaaatctgcttctgggatgtgtaacatactgccaaactc

SEQ ID NO: 26513 - DNA, 600 bp, Chicken  19866894242825_1
tagttaatgatagtgtctacgttgaaaagtagtgttttgcagctgagaatttgctgtatcaaagagtgtttttggtgtccattttaatttccatggaaacgaataggaggcattacttttggagagacctacatgaatataagatcatcagagtctgaaaagtatatttgagtaggtgtggaaacatggaagaaaaatataaaaataaatatttcagagtaaatttcaaggtcatatgacatacagctagcacatctgtcctcttgagaactgtaaaacagctcctgctgacaggagcawatgcatttctyctcccaagttttgtaacaggatgataattatgaggtgcattaagtgtgcttaagacagatttttgcaktattaaatatcattttcttgctttagtctgcagagatgtgtatagtattaaaaacagaaaatgattcagaacataaagcaattgcataggaaacatttgagcaatcagtattgcttagatatatttaaaagtgktttttttatcttttttttttaattcagtagttgtattagcagtagtatttgagctgtttgtatgttacagagaaacctgcaagttgt

SEQ ID NO: 26514 - DNA, 600 bp, Chicken  19866894242825_2
agtgtctacgttgaaaagtagtgttttgcagctgagaatttgctgtatcaaagagtgtttttggtgtccattttaatttccatggaaacgaataggaggcattacttttggagagacctacatgaatataagatcatcagagtctgaaaagtatatttgagtaggtgtggaaacatggaagaaaaatataaaaataaatatttcagagtaaatttcaaggtcatatgacatacagctagcacatctgtcctcttgagaactgtaaaacagctcctgctgacaggagcawatgcatttctyctcccaagttttgtaacaggatgataattatgaggtgcattaagtgtgcttaagacagatttttgcaktattaaatatcattttcttgctttagtctgcagagatgtgtatagtattaaaaacagaaaatgattcagaacataaagcaattgcataggaaacatttgagcaatcagtattgcttagatatatttaaaagtgktttttttatcttttttttttaattcagtagttgtattagcagtagtatttgagctgtttgtatgttacagagaaacctgcaagttgtaagttctgtga

SEQ ID NO: 26515 - DNA, 600 bp, Chicken  19866894242825_3
cattttaatttccatggaaacgaataggaggcattacttttggagagacctacatgaatataagatcatcagagtctgaaaagtatatttgagtaggtgtggaaacatggaagaaaaatataaaaataaatatttcagagtaaatttcaaggtcatatgacatacagctagcacatctgtcctcttgagaactgtaaaacagctcctgctgacaggagcawatgcatttctyctcccaagttttgtaacaggatgataattatgaggtgcattaagtgtgcttaagacagatttttgcaktattaaatatcattttcttgctttagtctgcagagatgtgtatagtattaaaaacagaaaatgattcagaacataaagcaattgcataggaaacatttgagcaatcagtattgcttagatatatttaaaagtgktttttttatcttttttttttaattcagtagttgtattagcagtagtatttgagctgtttgtatgttacagagaaacctgcaagttgtaagttctgtgagagaactttaatgctgaaggccattttcttttgagcataaattagaacgtcagtccaaagaaagttac

SEQ ID NO: 26516 - DNA, 587 bp, Chicken  19866894242825_4
tcagagtaaatttcaaggtcatatgacatacagctagcacatctgtcctcttgagaactgtaaaacagctcctgctgacaggagcawatgcatttctyctcccaagttttgtaacaggatgataattatgaggtgcattaagtgtgcttaagacagatttttgcaktattaaatatcattttcttgctttagtctgcagagatgtgtatagtattaaaaacagaaaatgattcagaacataaagcaattgcataggaaacatttgagcaatcagtattgcttagatatatttaaaagtgktttttttatcttttttttttaattcagtagttgtattagcagtagtatttgagctgtttgtatgttacagagaaacctgcaagttgtaagttctgtgagagaactttaatgctgaaggccattttcttttgagcataaattagaacgtcagtccaaagaaagttacagagaacatttgggatccttgtggatgtgcagctgaagtctgtctccatttcctgcgcacacttgtgtgtgatcacacatcagaaactggaccagaactgagcatgcatcacagtaaccaa

SEQ ID NO: 26517 - DNA, 600 bp, Chicken  19866894242831_1
tgctagaagtgaacaagaatacaaaagaaagaaaacaaacaacagatagaaggaaccccccaaattaagattacagagtatggccaaaacactgcagaccaaagcaggaactgctgcttgctttggaaagtaaaagcagcatggctgattagcaggatttgtatggctggaatcctccgcctctcagaagatttttaaaaataaacaagaatgactggcttctgtggcaatttgaattccttaaagagccgccattaaaaacaaaaatcagaaggctcattcaaatttcagctgggagawcggggatccttccacatcagacaaaatgggattttgcaaaaggacctcagtaaatagaggagctcagctacagacaagcctagtgggtgccatggaagcagaaagctgttgccataatggactgaatgctcttgaagaaaacaggacgaatgcgctgacctgcattcatgagttaattcatcgatttcatcagcaattccttagtttgactcagactcaaactgaaatataaacacacastgcaccaaaagccaggctgtgaaacaatcccaagggcagtgctttcctcaaagatgtgtg

SEQ ID NO: 26518 - DNA, 600 bp, Chicken  19866894242831_2
ttaaagagccgccattaaaaacaaaaatcagaaggctcattcaaatttcagctgggagawcggggatccttccacatcagacaaaatgggattttgcaaaaggacctcagtaaatagaggagctcagctacagacaagcctagtgggtgccatggaagcagaaagctgttgccataatggactgaatgctcttgaagaaaacaggacgaatgcgctgacctgcattcatgagttaattcatcgatttcatcagcaattccttagtttgactcagactcaaactgaaatataaacacacastgcaccaaaagccaggctgtgaaacaatcccaagggcagtgctttcctcaaagatgtgtgatgacttgaagacatgggtattagccaggatcagattataaagtggtacgaaatccttttgaataggcagtgtgaaagaaaaacttattaaacaaggtgacaactccacagggtttaggaaatcttcagggttactcatggcagtaccccagatgcacagcgctgccttgggcaagtctctccattccagcttcccagctgtaagggagcagcagtgccccattacctctaccccrttac

SEQ ID NO: 26519 - DNA, 600 bp, Chicken  19866894242831_3
acastgcaccaaaagccaggctgtgaaacaatcccaagggcagtgctttcctcaaagatgtgtgatgacttgaagacatgggtattagccaggatcagattataaagtggtacgaaatccttttgaataggcagtgtgaaagaaaaacttattaaacaaggtgacaactccacagggtttaggaaatcttcagggttactcatggcagtaccccagatgcacagcgctgccttgggcaagtctctccattccagcttcccagctgtaagggagcagcagtgccccattacctctaccccrttacctacccttctgcctgagcagaacagccaccacagcacctgatggggcacccaaggacaaagcgaagcaaatgttctgcagctgtgctggctttacctggcatgtgctaaagcaggcttaaactcccacgttaggtgaagaaaaggaaaaaatacacgagcagctcattactttctgtgtattaaactgcaacgctatctggttatagaaacagtgagagattaagtgattaatagctacaccctagcacactttgcacactttgcaaattccttcagtaattyctaaaatcagcac

SEQ ID NO: 26520 - DNA, 442 bp, Chicken  19866894242831_4
tacctctaccccrttacctacccttctgcctgagcagaacagccaccacagcacctgatggggcacccaaggacaaagcgaagcaaatgttctgcagctgtgctggctttacctggcatgtgctaaagcaggcttaaactcccacgttaggtgaagaaaaggaaaaaatacacgagcagctcattactttctgtgtattaaactgcaacgctatctggttatagaaacagtgagagattaagtgattaatagctacaccctagcacactttgcacactttgcaaattccttcagtaattyctaaaatcagcacacttaactttataatcttagtcacaattcaaagacatgaaaataagactgtattattgtaatctgttcacaaatccaagacctacacttaccttaaaagccaaaaagaaaagaacagaaggtcgtttag

SEQ ID NO: 26521 - DNA, 599 bp, Chicken  19866894242834_1
  misc_feature (1)..(84): n is any nucleotide
nnnnnnnnnnnnnnnnnnnnnnnnnnnnnnnnnnnnnnnnnnnnnnnnnnnnnnnnnnnnnnnnnnnnnnnnnnnnnnnnnnnnggcagaagctgaactgaactcagagctcccgagcattagtagggccttaaccacagaacgatcttttgtctcattatgttaacatgatctcaggttaaatgctgcctgacttaagtctgaagataaaagcaatgctctagctcaaaaatggaataaaatgctggaatcacttcagtactagtgaattattaatattaaccatgtaaagaaaaagtycagtgtttcagaggagtagcttaaaaaaaaaagggcttttcaaaggatgaatgtttatattgatgtgagttttttccttatccgttcagtaaccagactgcagggaataatctccatgaaagctactttgactctttctctgaattttttacctacaatttgctaatgaatttcagctcaagtgcagttaaaatgtgagaggtttgactagggaatggattgaaaataatcattttccttcttcctggtccctctctaggcacttgttaggaaatgtttgaatgcactgaagcrttaag

SEQ ID NO: 26522 - DNA, 600 bp, Chicken  19866894242834_2
aaagtycagtgtttcagaggagtagcttaaaaaaaaaagggcttttcaaaggatgaatgtttatattgatgtgagttttttccttatccgttcagtaaccagactgcagggaataatctccatgaaagctactttgactctttctctgaattttttacctacaatttgctaatgaatttcagctcaagtgcagttaaaatgtgagaggtttgactagggaatggattgaaaataatcattttccttcttcctggtccctctctaggcacttgttaggaaatgtttgaatgcactgaagcrttaagagactgatagcttgttaaaacagcagaggggctgctgttggaggggaggcaaagaagaaagtgaggacagaatctgaagaaacttcttttgcaaggaagattaaaagaatttcaaacggagggaaaaaaactctgtgttcagatcttctggttgcacacttgaaaatcaaatgagctagaaaatttgtttggctgcttttatgagcattgatcttttatgactgcatcaggacactggacctggtatgcatatgtacgtgtccaggcaggttgtgaaaacccacccttggtaaat

SEQ ID NO: 26523 - DNA, 600 bp, Chicken  19866894242834_3
tctagatacaatctcttccaaccagctctaatttattagaaagaggatgtcctttaaaatgcattgatagcttcttttggactggatcctgaaactgacattctcttccctactgccaggatgatctttgtacctcttgtgttatctcctattctctgtgctcttaatatttctggtatctgaaattttgtagtgataacaccaaggagagtgtaggaccttattcgctgtagtgaaggcttccttgtgaagacccactgccatgaggatgtgctcatgttcaatcacatttctatgtaygcttgcaaaacaagttccttaaaacaatcatcaaaatcatttaaaaatgtcctgtcacttgaaaaattctagccgctgaaacaggaggaaacaacatcttgaccttacgcacacttgacagagaccagctgaaattaatgtcatctttgccaaaatttgatggatattttggaataacagatgcattaatagggactgagatcggcccaaaccaggacaatatctttaaatatccagcttgcagtcagtgtgatccatccaattctgctaaggatattttgcatgaaaaaggtttttctc

SEQ ID NO: 26524 - DNA, 600 bp, Chicken  19866894242835_1
tctggaaccccttattcatgctgttactggtagacaatcaagactgttttttaaggggtcaatagagaagtatacagaaatattaaatataagaattaaggaaaaagatgagaaatcatgaagctatctgccaatcacacgtttaagtcaattacttgctattttatgccatcaagagaagtctcctttgttagggctgtagaaagaaaattgttctccctttagttaatagaaactcaacagtcttttatttagatctgcctagaaaaaacactctttcatccccaaagtttccagagrctttcaacatatttatcatcatccacagttatggtttgtgatgcccatagttattgtctcattcagaataaatgaactacctaccwgtctggatttcaaagaaaaaaaatatttaagtgcatgctcatttcagtctgtctagcctaactacattagcggtcgttgtctcctggcagaaatgagtattagccatgctgttgctaaatcccaagtacaaaaaaattctcattcattggtgccagtgcgtggaatgtggagagacgagaacaggttgttcaaatgatgggcttagatggaaca

SEQ ID NO: 26525 - DNA, 600 bp, Chicken  19866894242835_2
atataagaattaaggaaaaagatgagaaatcatgaagctatctgccaatcacacgtttaagtcaattacttgctattttatgccatcaagagaagtctcctttgttagggctgtagaaagaaaattgttctccctttagttaatagaaactcaacagtcttttatttagatctgcctagaaaaaacactctttcatccccaaagtttccagagrctttcaacatatttatcatcatccacagttatggtttgtgatgcccatagttattgtctcattcagaataaatgaactacctaccwgtctggatttcaaagaaaaaaaatatttaagtgcatgctcatttcagtctgtctagcctaactacattagcggtcgttgtctcctggcagaaatgagtattagccatgctgttgctaaatcccaagtacaaaaaaattctcattcattggtgccagtgcgtggaatgtggagagacgagaacaggttgttcaaatgatgggcttagatggaacacagagtctatctctctttgttggttgaatgcctgttttggtgttgttttgttttagtgaatacaagagaatttttgtaaaatatat

SEQ ID NO: 26526 - DNA, 599 bp, Chicken  19866894242836_1
  misc_feature (1)..(107): n is any nucleotide
nnnnnnnnnnnnnnnnnnnnnnnnnnnnnnnnnnnnnnnnnnnnnnnnnnnnnnnnnnnnnnnnnnnnnnnnnnnnnnnnnnnnnnnnnnnnnnnnnnnnnnnnnnnctggcttagaaacagcttagaaattatccataggtagcaggggagcttctccatttcttaagcagttattcttagtcagaccttgtttataaaaatgttagtacagaggtcacaataacagaaccctaaatcgacctagagtgtgtattagataaataataaatgggaataaagtatcaatgagtggtgtctrtagcagacatctgtttccttactggcctgcagccatgcctctctgggctgggatctcataagccaaagtgaggtcaggcgagttcagctctggatgaatgcaagtgtgtggatggccatgctgatatgggctgttggctgagcatctgggattggtcttcaccagtacctgacaytgcaagcagaggggcaggtccccagcctcccagggagaatcttcttgaaatcctaaacctaccgacaaaaattggtgttcgccgcacgtggattagcaacagcttctgtttgctggaagctgtg

SEQ ID NO: 26527 - DNA, 600 bp, Chicken  19866894242836_2
ttcttagtcagaccttgtttataaaaatgttagtacagaggtcacaataacagaaccctaaatcgacctagagtgtgtattagataaataataaatgggaataaagtatcaatgagtggtgtctrtagcagacatctgtttccttactggcctgcagccatgcctctctgggctgggatctcataagccaaagtgaggtcaggcgagttcagctctggatgaatgcaagtgtgtggatggccatgctgatatgggctgttggctgagcatctgggattggtcttcaccagtacctgacaytgcaagcagaggggcaggtccccagcctcccagggagaatcttcttgaaatcctaaacctaccgacaaaaattggtgttcgccgcacgtggattagcaacagcttctgtttgctggaagctgtgagatactccaatatttttatgaggtgctgaatatcaggaaggtgccagagttgcttcttggcaggccaacagcacaaacaccccaacaaatgtcgatggtgttattcccgggaaggaaacaaaggtacagcagttattggaagggttttactaaagagcaaggcagaggcatattt

SEQ ID NO: 26528 - DNA, 599 bp, Chicken  19866894242841_1
  misc_feature (1)..(107): n is any nucleotide
nnnnnnnnnnnnnnnnnnnnnnnnnnnnnnnnnnnnnnnnnnnnnnnnnnnnnnnnnnnnnnnnnnnnnnnnnnnnnnnnnnnnnnnnnnnnnnnnnnnnnnnnnnnacccctggagttggcagtctgataaaggatgagctgttctgctggaacctctcacataagcaagctagaatatatgtggatacgcttccatctagcaggagacagttgctttttcaccagggagatgaacaaaaaaaggagcagtatgcagcaacctgtttgtctccctcggacacaaattcaggctcatttycagtccccagtctatgcttttggctgtttggtttgtgaagtatagrctttccatcactttcagaccaattaaactttgggactgagctttgggactgctcattagatgtgggtgtttttttttcaggscagtgggagtggtggtgtgctgaggggagaataaacatctcaggatcaatccaagaatatcattattgttcaagtccaacgcatgagttagataaaaataaacattatagtgaaacgtgaatacagtctcttaaccccagccaagcatcttttcttctaaaatattttctt

SEQ ID NO: 26529 - DNA, 599 bp, Chicken  19866894242841_2
  misc_feature (1)..(61): n is any nucleotide
nnnnnnnnnnnnnnnnnnnnnnnnnnnnnnnnnnnnnnnnnnnnnnnnnnnnnnnnnnnnnacccctggagttggcagtctgataaaggatgagctgttctgctggaacctctcacataagcaagctagaatatatgtggatacgcttccatctagcaggagacagttgctttttcaccagggagatgaacaaaaaaaggagcagtatgcagcaacctgtttgtctccctcggacacaaattcaggctcatttycagtccccagtctatgcttttggctgtttggtttgtgaagtatagrctttccatcactttcagaccaattaaactttgggactgagctttgggactgctcattagatgtgggtgtttttttttcaggscagtgggagtggtggtgtgctgaggggagaataaacatctcaggatcaatccaagaatatcattattgttcaagtccaacgcatgagttagataaaaataaacattatagtgaaacgtgaatacagtctcttaaccccagccaagcatcttttcttctaaaatattttcttttatacaagatgatatgtagacatatgtcagtgacattacaggctt

SEQ ID NO: 26530 - DNA, 600 bp, Chicken  19866894242841_3
ataaaggatgagctgttctgctggaacctctcacataagcaagctagaatatatgtggatacgcttccatctagcaggagacagttgctttttcaccagggagatgaacaaaaaaaggagcagtatgcagcaacctgtttgtctccctcggacacaaattcaggctcatttycagtccccagtctatgcttttggctgtttggtttgtgaagtatagrctttccatcactttcagaccaattaaactttgggactgagctttgggactgctcattagatgtgggtgtttttttttcaggscagtgggagtggtggtgtgctgaggggagaataaacatctcaggatcaatccaagaatatcattattgttcaagtccaacgcatgagttagataaaaataaacattatagtgaaacgtgaatacagtctcttaaccccagccaagcatcttttcttctaaaatattttcttttatacaagatgatatgtagacatatgtcagtgacattacaggcttaaatcaaaatgaaaggataagatagcccaaagaagctacgctggtttagtaactggtaagggtcaaagaygttacagatgtgc

SEQ ID NO: 26531 - DNA, 600 bp, Chicken  19866894242841_4
ttttttttcaggscagtgggagtggtggtgtgctgaggggagaataaacatctcaggatcaatccaagaatatcattattgttcaagtccaacgcatgagttagataaaaataaacattatagtgaaacgtgaatacagtctcttaaccccagccaagcatcttttcttctaaaatattttcttttatacaagatgatatgtagacatatgtcagtgacattacaggcttaaatcaaaatgaaaggataagatagcccaaagaagctacgctggtttagtaactggtaagggtcaaagaygttacagatgtgctgctggctttccatgtgtatcgcttgagattgccagagcaagacaactcctggcaagccactcacttttaatgaatttcatttaagaaaacaactgttctcccaaaacgtgcccaaaaatgggttgtctgctcacattattattgtagtgatcacaaaaaaagtcacatgaatttatggcttcagagaaagacagattacaaaaataaataaataaataagacagggacagtgctcttcttgtgtgggccagattctgtgttcctgcttatctaaatgtcctgctag

SEQ ID NO: 26532 - DNA, 599 bp, Chicken  19866894242848_1
  misc_feature (1)..(55): n is any nucleotide
nnnnnnnnnnnnnnnnnnnnnnnnnnnnnnnnnnnnnnnnnnnnnnnnnnnnnnntaacgtgcaacgtcttttgcaagtcatatatgctaccttttttcaaacacaattaccctagataactctcctggtctattatgtaacatcattttggcttaactctccctttatcttcttgaacctgaggcataatgaacagttgaaattatttttaatctactttttctctcttgtaatccttcactttttttgttgtaatttgagtaatatgccagcatttccagcatttgaagtgctttgcrtggatgcacataccttaaaggatattcttttcatcaagacgtggaacacttctgtttaagtcatggtgtattccccttttaggttaaaaaatgcatctgtggaaacagtaggtatttacttttttgcccattttactgtcctttacagtgtaagtcactttagtaacacctgaagtgtttatgggtaaactgagaagtttatggctgaattttaaaaacaatatttctaatgtatgttataaagttagcatagaattgkgaaaaataaacagaaaaaggttaaattgcacatacacaaa

SEQ ID NO: 26533 - DNA, 600 bp, Chicken  19866894242848_2
gagtaatatgccagcatttccagcatttgaagtgctttgcrtggatgcacataccttaaaggatattcttttcatcaagacgtggaacacttctgtttaagtcatggtgtattccccttttaggttaaaaaatgcatctgtggaaacagtaggtatttacttttttgcccattttactgtcctttacagtgtaagtcactttagtaacacctgaagtgtttatgggtaaactgagaagtttatggctgaattttaaaaacaatatttctaatgtatgttataaagttagcatagaattgkgaaaaataaacagaaaaaggttaaattgcacatacacaaaaatcctggatctttgcattttatctaatttatctacatagtccatctttcatcagttcaggcctgaattgatagaagtcrgaaggtaccacatccagactacatggtaggtgtggtaggatagtccagccaaggctgacagtgtgctccatggtcttctgctggtatggggcctggtgttatcatgttgcaagagaaaagttgtctacttctctgtcctgaatctgagagttcaagcattcagcttagtcagtgttacga

SEQ ID NO: 26534 - DNA, 600 bp, Chicken  19866894242848_3
taggttaaaaaatgcatctgtggaaacagtaggtatttacttttttgcccattttactgtcctttacagtgtaagtcactttagtaacacctgaagtgtttatgggtaaactgagaagtttatggctgaattttaaaaacaatatttctaatgtatgttataaagttagcatagaattgkgaaaaataaacagaaaaaggttaaattgcacatacacaaaaatcctggatctttgcattttatctaatttatctacatagtccatctttcatcagttcaggcctgaattgatagaagtcrgaaggtaccacatccagactacatggtaggtgtggtaggatagtccagccaaggctgacagtgtgctccatggtcttctgctggtatggggcctggtgttatcatgttgcaagagaaaagttgtctacttctctgtcctgaatctgagagttcaagcattcagcttagtcagtgttacgatctagtgatcagaattgatgatttgttcaggttccagaaaatcaagaaggataacccctttcctatcccaaaaggcagcatatatcactttactttgggctgcatcttgaactttttctt

SEQ ID NO: 26535 - DNA, 599 bp, Chicken  19866894242850_1
  misc_feature (1)..(48): n is any nucleotide
nnnnnnnnnnnnnnnnnnnnnnnnnnnnnnnnnnnnnnnnnnnnnnnngctctttactttggaaattaagttgtaagtcaacagtaattgtttttaccttgacttgctagagacctcacaagctggtttagaatacagctgttttaaaatgatatagcattttatttttagttttagtttttagttttctgttttgttttggtttggtttttctttggttgccgggtgggttttttttcttccttgttttttgttttctttttggaggtaaatagaaggttggctgtctagctgttgtgycttttcttgaaaagtatggttctttcagctaccttattgatttctgcttaaaacaaaaaggaaagaataaaaaaagggaggaagaaagcataagctagtatttctctcagtcaattctagctgagagccttctgtctcatggaaagtgcctaggccatcagtattagtttgcattgggttgatttgttcctgagatcacctcaatggatgggtatcatgtaatgcaacaaggtaattacagacactgagctaagctgagttcaagggacttattcatctatttkactggatgatcaacc

SEQ ID NO: 26536 - DNA, 600 bp, Chicken  19866894242850_2
tgtctagctgttgtgycttttcttgaaaagtatggttctttcagctaccttattgatttctgcttaaaacaaaaaggaaagaataaaaaaagggaggaagaaagcataagctagtatttctctcagtcaattctagctgagagccttctgtctcatggaaagtgcctaggccatcagtattagtttgcattgggttgatttgttcctgagatcacctcaatggatgggtatcatgtaatgcaacaaggtaattacagacactgagctaagctgagttcaagggacttattcatctatttkactggatgatcaacccagagaaaacgtgatttttggacaaaaaaaaaatactagacaaggttttgtatactgttcatgcaaactttctccctattttgtgaagaaaggctactgtgaactagtcttaactaaggttaacaaaagaaggaaaataaaaagataagctgggatttttgtttttttattttcaagaagtttctgaatgaatatcaaagtagtgtggaaatgagacaaattaaaagtagaattgtactgtttctttatatgatagtacagaaaagtctttacctgtgaataggg

SEQ ID NO: 26537 - DNA, 523 bp, Chicken  19866894242857_1
  misc_feature (1)..(50): n is any nucleotide
nnnnnnnnnnnnnnnnnnnnnnnnnnnnnnnnnnnnnnnnnnnnnnnnnngagtcctgtgggtctgtgttgtcctatggggccgtatatagcactgagggggcgaggagcgtctgtcgggccagggagggctgtgtggggaccggggctgtgggagcggcccctctgcggggcagggatgggggagcggttctggggatgtgtggggctgagtgtggggagtgagcgccggcattctctggggcctggctggggtcaatgtgtggggtgtgtagggctgagttgggggtcagggaggggrctgggtaggggtcacagtgagggggatacgtagggaccaggttgggaatctscacaggggatgtctagggctgagctgggcgtcactgagggggatgtatagggcagatgtggggtcagtgaggggaatgcgtagggctgcatagtgttggggatcaaatgcaggggatgtgtggggctgagttgggggtcagggccaggcatgtgcagggaaggtgatgtgt

SEQ ID NO: 26538 - DNA, 471 bp, Chicken  19866894242857_2
gagtcctgtgggtctgtgttgtcctatggggccgtatatagcactgagggggcgaggagcgtctgtcgggccagggagggctgtgtggggaccggggctgtgggagcggcccctctgcggggcagggatgggggagcggttctggggatgtgtggggctgagtgtggggagtgagcgccggcattctctggggcctggctggggtcaatgtgtggggtgtgtagggctgagttgggggtcagggaggggrctgggtaggggtcacagtgagggggatacgtagggaccaggttgggaatscacaggggatgtctagggctgagctgggcgtcactgagggggatgtatagggcagatgtggggtcagtgaggggaatgcgtagggctgcatagtgttggggatcaaatgcaggggatgtgtggggctgagttgggggtcagggccaggcatgtgcagggaaggtgatgtgt

SEQ ID NO: 26539 - DNA, 529 bp, Chicken  19866894242859_1
aggtttggtcagagctgctccaggatatgatttcagtgtcacccagcaggagctcagtcagtgctgagaacagccacacaaccaagattcctagcactgtttttagcagccaagacctaaaatccactgcaactcagcagaacgcaaatgaataacagcagaggtgttgctgcggccatgatggactacagttttaaaagaacatggtttgaggagccgagttctgtctttttagagcagttgatgtatctgataataattcatttgggggatagagaccatttacaagcataatttggrtagaaaacatcacaacccatagaacaagctaaagcacaataaaggagcctcttacgcctttctccctttctttgaggtcactctctactctttccctctccatcccatagatgtgacccataatgggcctctggtacctgtctcagaggctgttccaccagcttagctctcagctgattctttgggctcatgaaggggaaggcaaggaggaagtcacaaggatgaaagt

SEQ ID NO: 26540 - DNA, 600 bp, Chicken  19866894242861_1
aggcaccaaggaatcatccttgccttggaagtaacgtagaactagaagcttaagttaacaccttttctgtggtttaaagtgtttaatgctgaaaggaagaagatacatgaaagccaaaatggcagattttcagtttctaatatcctcatgtctattttgatgatgtttttatattctaagccactggttaatgaagctaagttagcagttggaaacataaaaccagagtcattgtcagaaattcggtccctacggatgccccctgacataatcagagacatcctagaaggagttttacgkcttatggggatttttgatacatcatgggtgagcatgaagaggtgaggattttatttatgatctgatcttaagacaataatttacaatgtgaaatactttctgcaatcttcaggaatgatgtgtgtgcagaattctttagtttgtattttctttctttctttttttttttacagtttcttggccaaaagaggagtgaaggaggacattgcaacctttgatgcccgtaacattccaaaagaaatacgagagagcgttgaagaacttctttcaaaaaacagaacatcttttgatcctaaagta

SEQ ID NO: 26541 - DNA, 600 bp, Chicken  19866894242861_2
tttacagtttcttggccaaaagaggagtgaaggaggacattgcaacctttgatgcccgtaacattccaaaagaaatacgagagagcgttgaagaacttctttcaaaaaacagaacatcttttgatcctaaagtaatttgtgatgctgttacataaaacaaataaaaaatcacaaaataaagccaacaacagaaaaaccacacatgattttaagagtcaacattacatgtaattaaaaaagggggaactaatgattattaaatacattagtgatctttcaaacctaatttgacagtagctmctagatttcttagatactagtttgttagttttaaagggaaagttgtgattgtctggaaaggaacacgatgattcttaaattcatttacaacttcataacgcctgtggagcttcctagttgtaaacccattattttctttggtaacctacaatataaactcttagtaacaatataaaaagatcatttcatcagataatttggctaattggtaaatttgataactggcaaatctgctgcagtgtttatctcatttacattatatttatcctgtgtttatctaatttacattatatttcaagg

SEQ ID NO: 26542 - DNA, 600 bp, Chicken  19866894242873_1
tagacatgcagtgcaactttcccagaatggtctactagcatgcaataatttcttgtcaggaccttcccaagtcagtgctgtctttaaatatttaacagctttcattagatttctctactaaattgcttagtagcttttaaacttatccatgaatctatcagaatcctgctgcaagggagaaggattctttttttacatcttttttttccattttcatagtaaagccattcctttttaatgttgaatttttatacactcatttcaattaagattttttgtgtcaaaagttactgtgtacakctgttccccattcactattttagctgttcttattatttcatctgaaatgagtttagtcattcaaccctagtataaagtatatttcataactatgattttacttgctatttttcctgtatcttttctgttacttgaaacaaagggataaaaagaagtaaattaaaatacttaatattattgtgcatatatacaaaaataaaaagccaccatctgtgagaaaagcctttaattttatatctgtattatcttaaaaatattcactgaaagaataaactaggtagaaaggttagtatttgcttt

SEQ ID NO: 26543 - DNA, 600 bp, Chicken  19866894242892_1
agtaccctgcaagaggtcacacaagtgggcgtccagatgggtcttgagtttcttcacaggaggagactccacaacctctctgggcagcctctcccagtgatctgtcacccttactgtaaaaaagctcttctgcttgttagtacagagcttcctttgtgcaagtttcaggccattgctcttcgtcctattgctacacaccaccgagaagagcctggccgcatccatttacctcccaccgcccttcagacgtttataaacactgatcaggttccctggtaagaagagctgtgttgctcttcytgtgggctgtcctgcaagggaggtggcagacatgaggagaggcgaggagtgcctcaagcccatgctgtgctctccagcacatggtcagctgcgagctctgcacatccccaaggaactttggggcgctactttgtgtctggataagaaatggtggaggaggccgactatacagggaggtgaaggatttatgctgtagggtgacaacagaaaggtaccggtcatctgtatggcacctggaacatggtggagcagcgtgggacacaagaggtggatagggctgaggtatgctgcaggacatgg

SEQ ID NO: 26544 - DNA, 600 bp, Chicken  19866894242893_1
tgggtcacctgtagcacagtccttaacaagagcccagatgagaagcaatgcttatttatgcccagaaatcatatttggaattactgagaaaattgaaagaagtcttaaaatgaggaaaaaacatataatctgggaatatttcttttcctatgcccttgcctcccagttggagcggaatgggttaaagctttctgaacgaaggacactcataagagagctgggaaactcagatgcacgttaacagaaacttctccaagaagaacagactaatgggactgcaaccccatgtagaagcatctyatgttgtataagcaaggattgaagtaggttccacctcctgagaactaatggcactgacagcagaggacactacttacctcaccattcaagaagcagtaaaayactgacacaaagaaaccctggaaagaacagaaaacagtcaattattaggtattttaacatgcagaactggggactgttttatcctggtatcatcctgagcataaacacaaccttgttgaagtcatcctcttacagccagaccaaatctttacaatttcactagatttccaggtgccttacagcaaactgttaaaaaat

SEQ ID NO: 26545 - DNA, 600 bp, Chicken  19866894242893_2
tcttaaaatgaggaaaaaacatataatctgggaatatttcttttcctatgcccttgcctcccagttggagcggaatgggttaaagctttctgaacgaaggacactcataagagagctgggaaactcagatgcacgttaacagaaacttctccaagaagaacagactaatgggactgcaaccccatgtagaagcatctyatgttgtataagcaaggattgaagtaggttccacctcctgagaactaatggcactgacagcagaggacactacttacctcaccattcaagaagcagtaaaayactgacacaaagaaaccctggaaagaacagaaaacagtcaattattaggtattttaacatgcagaactggggactgttttatcctggtatcatcctgagcataaacacaaccttgttgaagtcatcctcttacagccagaccaaatctttacaatttcactagatttccaggtgccttacagcaaactgttaaaaaatgagagctacagcccagacactgatagagcaacattaccaatacagttgtgctaaagcctctctccagcttccagctgtctcccccaaatggcagagcccttc

SEQ ID NO: 26546 - DNA, 600 bp, Chicken  19866894242898_1
atttcaatttaattttattttatcttttgtagatctaggaaatcaggtcttcggggaaataaacaatgtcataaaacttaatagacttaatctttcggaacctcttcaactcgtgtccttggaaaaccagagctcagtaagaacacccgctacttctttggcatgaaatttctgcctcctctcctaccaccaaggcttgatttgcaaaaatatctagtgtctaatctacctcaactgcatactaaatttgattcaaatttcttttaatccttttaaataacagtatgtgcttcagggttktgaaagattaacccaaacaaattatcaatgctctgcatacaacatcgggttttgattgcctgctttactttctaaataaacttattcaataaataaatgatcagtccagaagcatggtaatgattaatgagagatgttttggacttacctgccaattatctctcaggtgtctggatatattggtgtaacttagagattttccctgatttctcatgtcagcagacagttgggaattagtgtttaaactgcagacaagggaaagcactgaaagggagtaggttctttgctatggagtgtgac

SEQ ID NO: 26547 - DNA, 600 bp, Chicken  19866894242898_2
atagaagatatggtataaaattattgtcttgttctatggaatataccactaatataacaaatcccctcaaagctctgttattcagatttgaaacgtgttctccctgtccttttatctcataatttcctcgagtggagcccagatataggataatattctatcaatagcaggtgctatggttccttcccaagctcttttggccctctcagcagtaactgtttgtcttgtctgagccattgtttagcacttagcatgtctctttaaacaccgtatgctatgaaaactaacatctgctcaacrtgtgtgtgtacgtatatatatatatatatatgcataggacatatcagtacacttgtagaagtaatgtgacaaaccagaggcagagctgccaggttactcctacaataatttttcctttattttatctatcttaaaagagtgaaagagcaaaagcagcactgaactatgacagctggaagcttgggctgacggtagatttactgtaaagaaaatttttcaaagtgttgcactcacctgctatctttttttatttcagtccattatactcagaagtaccagtgtgatgcaccaaagagttca

SEQ ID NO: 26548 - DNA, 600 bp, Chicken  19866894242903_1
aatttattatcttctagccacctagaatagatcatcctgaaatgtcctctctgtgaggacaggcctttgaccctttctcaaatgcagaaatgaaactggaacaatacattctggccagtccaccacttctgtcttgctcttctttatcaatgccttttatttctgcctctaagtgttctattggaagagcagcatgcccttgatgcactgaggatgggtttcattatcagctgctgtgaagaatggtcattaaaactcagggcacatgctgaattaattacctgggtagcaaatgagcakactagagtatcttcaaccatcartgccacacactgctaatgtgttttagagaaacaratgaaaatgaaataccaygttcagtttctccctctagtttatagctactctgtgcatcaagaaatgaaaccacagcattaccattttgtctgcccctcctgaatggggatattttgagcggccttctgagcccagatggacattctttaacttcctaagcacagccatccaactctcaagatccaagagaaagcaagctagagaagttgtggacatgtgttttataactataaatgttgatca

SEQ ID NO: 26549 - DNA, 600 bp, Chicken  19866894242903_2
agaatagatcatcctgaaatgtcctctctgtgaggacaggcctttgaccctttctcaaatgcagaaatgaaactggaacaatacattctggccagtccaccacttctgtcttgctcttctttatcaatgccttttatttctgcctctaagtgttctattggaagagcagcatgcccttgatgcactgaggatgggtttcattatcagctgctgtgaagaatggtcattaaaactcagggcacatgctgaattaattacctgggtagcaaatgagcakactagagtatcttcaaccatcartgccacacactgctaatgtgttttagagaaacaratgaaaatgaaataccaygttcagtttctccctctagtttatagctactctgtgcatcaagaaatgaaaccacagcattaccattttgtctgcccctcctgaatggggatattttgagcggccttctgagcccagatggacattctttaacttcctaagcacagccatccaactctcaagatccaagagaaagcaagctagagaagttgtggacatgtgttttataactataaatgttgatcacataagccacagttcaagtctct

SEQ ID NO: 26550 - DNA, 600 bp, Chicken  19866894242903_3
gacaggcctttgaccctttctcaaatgcagaaatgaaactggaacaatacattctggccagtccaccacttctgtcttgctcttctttatcaatgccttttatttctgcctctaagtgttctattggaagagcagcatgcccttgatgcactgaggatgggtttcattatcagctgctgtgaagaatggtcattaaaactcagggcacatgctgaattaattacctgggtagcaaatgagcakactagagtatcttcaaccatcartgccacacactgctaatgtgttttagagaaacaratgaaaatgaaataccaygttcagtttctccctctagtttatagctactctgtgcatcaagaaatgaaaccacagcattaccattttgtctgcccctcctgaatggggatattttgagcggccttctgagcccagatggacattctttaacttcctaagcacagccatccaactctcaagatccaagagaaagcaagctagagaagttgtggacatgtgttttataactataaatgttgatcacataagccacagttcaagtctctcactagatacacaaacagtgctttaaaatgtatt

SEQ ID NO: 26551 - DNA, 600 bp, Chicken  19866894242903_4
tctcaaatgcagaaatgaaactggaacaatacattctggccagtccaccacttctgtcttgctcttctttatcaatgccttttatttctgcctctaagtgttctattggaagagcagcatgcccttgatgcactgaggatgggtttcattatcagctgctgtgaagaatggtcattaaaactcagggcacatgctgaattaattacctgggtagcaaatgagcakactagagtatcttcaaccatcartgccacacactgctaatgtgttttagagaaacaratgaaaatgaaataccaygttcagtttctccctctagtttatagctactctgtgcatcaagaaatgaaaccacagcattaccattttgtctgcccctcctgaatggggatattttgagcggccttctgagcccagatggacattctttaacttcctaagcacagccatccaactctcaagatccaagagaaagcaagctagagaagttgtggacatgtgttttataactataaatgttgatcacataagccacagttcaagtctctcactagatacacaaacagtgctttaaaatgtatttttccccagaatttgata

SEQ ID NO: 26552 - DNA, 600 bp, Chicken  19866894242904_1
ttcacactttactattcttcttttggtaaaataatgaaaactcgaagtccgtggctttacagatagcgctgggcaacgccagtctgaatctgagtccttagcagggaagaagcagtgagaagccaacataaacattgtcaaaggactgattttgactattttaaatattgtagtctttatcacttgtccaacagaaagcattttagcagttttcagatgactgatgattcctcttcatctagattttctagaattctaccagaacagggttaaaaatatctacttctacgtaacattttrcattacttcccttaactgttgaatcttacatatagcatacacagctaatgcatcaactgttcaccctgagagaggagaatatttgtatgtctgaaatattctcctccacctcttgttcttatcatagtttgtgtttgggagcaaagaagctgctatttgttttagaaataactatcttacccatactgaattgggataattcctctcatatcaatgtaattattcttatttataatatatatcaatttctcatggagggaaatgattttatgattattttattttaacattaattggcag

SEQ ID NO: 26553 - DNA, 599 bp, Chicken  19866894242906_1
  misc_feature (1)..(185): n is any nucleotide
nnnnnnnnnnnnnnnnnnnnnnnnnnnnnnnnnnnnnnnnnnnnnnnnnnnnnnnnnnnnnnnnnnnnnnnnnnnnnnnnnnnnnnnnnnnnnnnnnnnnnnnnnnnnnnnnnnnnnnnnnnnnnnnnnnnnnnnnnnnnnnnnnnnnnnnnnnnnnnnnnnnnnnnnnnnnnnnnnnnnnnnnnttcctgacctgtgctattgctggcactatgcttttgcttttcttatacttgcagtgaactacacaattgtcagctggtaagttaactgaaaactgtctataactatggagacctmtatgtttaccaggagctttatttttggaagacttttccggcaagtcgaacagtttccacaaagtaattaattgtcttggaaagtaaaatggaattagctatagctaatcagtgaggaaaacgtgactagttgcttcagtagaaaggtaaaaaacattcataaaatacagtttggatagaataatgcttctagcattgatagtcttccacacttctaactgcataacttgcagtgagttagaagttgggagacctttttccctcttttcagtggttgtctttactaattccaagtggatt

SEQ ID NO: 26554 - DNA, 600 bp, Chicken  19866894242906_2
atttttggaagacttttccggcaagtcgaacagtttccacaaagtaattaattgtcttggaaagtaaaatggaattagctatagctaatcagtgaggaaaacgtgactagttgcttcagtagaaaggtaaaaaacattcataaaatacagtttggatagaataatgcttctagcattgatagtcttccacacttctaactgcataacttgcagtgagttagaagttgggagacctttttccctcttttcagtggttgtctttactaattccaagtggatttaacagcaggcttaatgacktgaagatgattggtcaggtttcaytgctactactttcctttgaccggacctgtttttttttttcactwgccagtttcatcctctaatttctaaagacagcycttttccttgcttcccagcactaattgtgacagtattctgacggctgtgtgaactttgctgtaaaaatgatcctgatcctcttcacagtgtcttcagcagtggtctgttacgggtcttcataaatcaatcacctgaacgccctgatcagatgcaagagttgaatagttttttaccttctaaaatgggccatgttagcct

SEQ ID NO: 26555 - DNA, 600 bp, Chicken  19866894242906_3
gtcgaacagtttccacaaagtaattaattgtcttggaaagtaaaatggaattagctatagctaatcagtgaggaaaacgtgactagttgcttcagtagaaaggtaaaaaacattcataaaatacagtttggatagaataatgcttctagcattgatagtcttccacacttctaactgcataacttgcagtgagttagaagttgggagacctttttccctcttttcagtggttgtctttactaattccaagtggatttaacagcaggcttaatgacktgaagatgattggtcaggtttcaytgctactactttcctttgaccggacctgtttttttttttcactwgccagtttcatcctctaatttctaaagacagcycttttccttgcttcccagcactaattgtgacagtattctgacggctgtgtgaactttgctgtaaaaatgatcctgatcctcttcacagtgtcttcagcagtggtctgttacgggtcttcataaatcaatcacctgaacgccctgatcagatgcaagagttgaatagttttttaccttctaaaatgggccatgttagcctttgagtctctgtctgattcctaat

SEQ ID NO: 26556 - DNA, 600 bp, Chicken  19866894242906_4
atggaattagctatagctaatcagtgaggaaaacgtgactagttgcttcagtagaaaggtaaaaaacattcataaaatacagtttggatagaataatgcttctagcattgatagtcttccacacttctaactgcataacttgcagtgagttagaagttgggagacctttttccctcttttcagtggttgtctttactaattccaagtggatttaacagcaggcttaatgacktgaagatgattggtcaggtttcaytgctactactttcctttgaccggacctgtttttttttttcactwgccagtttcatcctctaatttctaaagacagcycttttccttgcttcccagcactaattgtgacagtattctgacggctgtgtgaactttgctgtaaaaatgatcctgatcctcttcacagtgtcttcagcagtggtctgttacgggtcttcataaatcaatcacctgaacgccctgatcagatgcaagagttgaatagttttttaccttctaaaatgggccatgttagcctttgagtctctgtctgattcctaatayttatgacaaacctttctttttttctccagggcagttcggtca

SEQ ID NO: 26557 - DNA, 600 bp, Chicken  19866894242906_5
cgtgactagttgcttcagtagaaaggtaaaaaacattcataaaatacagtttggatagaataatgcttctagcattgatagtcttccacacttctaactgcataacttgcagtgagttagaagttgggagacctttttccctcttttcagtggttgtctttactaattccaagtggatttaacagcaggcttaatgacktgaagatgattggtcaggtttcaytgctactactttcctttgaccggacctgtttttttttttcactwgccagtttcatcctctaatttctaaagacagcycttttccttgcttcccagcactaattgtgacagtattctgacggctgtgtgaactttgctgtaaaaatgatcctgatcctcttcacagtgtcttcagcagtggtctgttacgggtcttcataaatcaatcacctgaacgccctgatcagatgcaagagttgaatagttttttaccttctaaaatgggccatgttagcctttgagtctctgtctgattcctaatayttatgacaaacctttctttttttctccagggcagttcggtcaaagattaagcagtctcagtccatggaaatggga

SEQ ID NO: 26558 - DNA, 600 bp, Chicken  19866894242906_6
ctactactttcctttgaccggacctgtttttttttttcactwgccagtttcatcctctaatttctaaagacagcycttttccttgcttcccagcactaattgtgacagtattctgacggctgtgtgaactttgctgtaaaaatgatcctgatcctcttcacagtgtcttcagcagtggtctgttacgggtcttcataaatcaatcacctgaacgccctgatcagatgcaagagttgaatagttttttaccttctaaaatgggccatgttagcctttgagtctctgtctgattcctaatayttatgacaaacctttctttttttctccagggcagttcggtcaaagattaagcagtctcagtccatggaaatgggattactgaaaacatctgaacgagatcaggagtcagaagatgaaatttagtatgaatatggctcaactagtttgtccgctctaccattyggctaactgatacctcatttcttgaattgtttactgtcttatttgctctttactccagcttgcagtggaaatatcatcacctaagaagtgtctacatctacacagttaggtctttacttgtggagggtaagcttggta

SEQ ID NO: 26559 - DNA, 600 bp, Chicken  19866894242906_7
gtgtcttcagcagtggtctgttacgggtcttcataaatcaatcacctgaacgccctgatcagatgcaagagttgaatagttttttaccttctaaaatgggccatgttagcctttgagtctctgtctgattcctaatayttatgacaaacctttctttttttctccagggcagttcggtcaaagattaagcagtctcagtccatggaaatgggattactgaaaacatctgaacgagatcaggagtcagaagatgaaatttagtatgaatatggctcaactagtttgtccgctctaccattyggctaactgatacctcatttcttgaattgtttactgtcttatttgctctttactccagcttgcagtggaaatatcatcacctaagaagtgtctacatctacacagttaggtctttacttgtggagggtaagcttggtattgtttcgtgttggtgccactagtaccttgcttatcacgtgcctcaatgaaaaacagactaatattagacatgctcagacttgagtgaagtggcattaccaagtctgtgtgttggactcattaaaagctaagcaaaatgttttccatctgctgctgaacaca

SEQ ID NO: 26560 - DNA, 599 bp, Chicken  19866894242908_1
  misc_feature (1)..(74): n is any nucleotide
nnnnnnnnnnnnnnnnnnnnnnnnnnnnnnnnnnnnnnnnnnnnnnnnnnnnnnnnnnnnnnnnnnnnnnnnnntggagagcggcgagtgcggcctggcggctgcccgcaggtgggaaagcggggtggtctccgggcgggcggcaggggcccggcgatggcgctggggaagtgtctgaccatgagggcctccttgggcaccttgacgtcctgctccaggcagcggtcgcggtagttcagccccacgctgatcgccttctcggggtcgtcgatgggcgccaacagccgcactcccgcccgrggcaaacggtgccggcccgaagccagcgctctgcgggacggggctgagcgcggggcgatcgcctcctgctggctgcgctgccgctcctataaatgggcttcttggctacccggtcacgctgctggstcacgttcagccctgcgtcgacccacacctccagatcgttttcctccacgcggccttccagccgctctgccccaagcctgcagcggtgcctggggtcgttgtgaccaaaaacccggcatttggtattgttgaaccattgtcgtgccattggcctcagccatcgatgaggccgt

SEQ ID NO: 26561 - DNA, 600 bp, Chicken  19866894242908_2
ggtctccgggcgggcggcaggggcccggcgatggcgctggggaagtgtctgaccatgagggcctccttgggcaccttgacgtcctgctccaggcagcggtcgcggtagttcagccccacgctgatcgccttctcggggtcgtcgatgggcgccaacagccgcactcccgcccgrggcaaacggtgccggcccgaagccagcgctctgcgggacggggctgagcgcggggcgatcgcctcctgctggctgcgctgccgctcctataaatgggcttcttggctacccggtcacgctgctggstcacgttcagccctgcgtcgacccacacctccagatcgttttcctccacgcggccttccagccgctctgccccaagcctgcagcggtgcctggggtcgttgtgaccaaaaacccggcatttggtattgttgaaccattgtcgtgccattggcctcagccatcgatgaggccgtccggatctttctgcagggtcttcatgtccttaggcagataataggagaatgcaagagctggggggcaatgggagggagggagggatgggattatcctgccgtgccaccaggagcctggggaccacgt

SEQ ID NO: 26562 - DNA, 600 bp, Chicken  19866894242911_1
atgttgttcttccatttaaatctgcataaatcagcctgcatcgtagctttgtcagctggctgatattcaacaatgagaggaagtagaaagcggcagaattaatatccactggctgaatgtagttccagtaccacctaacactagagtgtttgactaattgattgcccttagcattctgctaacaacagatgtacggtatgagttaaattagtaaatttgtattgctcctattgctttccatagcctgaaacagttgtaattattgaaattatttaaatcagaaacattgtattcaaaacrctttaattgattttctttgtatttttgttaataaaaactgctctaataaaagtaccgyggggtaatgatttgtagwttcggcygcacacttgaaaacacgaaggggatygtgctgaagagcagaacacctatcagagccagctccaagaactcagaatctgattctccacaatcagagtttcagaaaataagcctccttccaaaaggagtatgttcagacatactggcaaagagcaaaagctattgtttctttgtagctacaccagctccactgagattgcaattttgttttggtctttt

SEQ ID NO: 26563 - DNA, 600 bp, Chicken  19866894242911_2
gctgatattcaacaatgagaggaagtagaaagcggcagaattaatatccactggctgaatgtagttccagtaccacctaacactagagtgtttgactaattgattgcccttagcattctgctaacaacagatgtacggtatgagttaaattagtaaatttgtattgctcctattgctttccatagcctgaaacagttgtaattattgaaattatttaaatcagaaacattgtattcaaaacrctttaattgattttctttgtatttttgttaataaaaactgctctaataaaagtaccgyggggtaatgatttgtagwttcggcygcacacttgaaaacacgaaggggatygtgctgaagagcagaacacctatcagagccagctccaagaactcagaatctgattctccacaatcagagtttcagaaaataagcctccttccaaaaggagtatgttcagacatactggcaaagagcaaaagctattgtttctttgtagctacaccagctccactgagattgcaattttgttttggtctttttttttctacataatgaaactcgcagttcataaaagatcaggttaaggtaaggaaactg

SEQ ID NO: 26564 - DNA, 600 bp, Chicken  19866894242911_3
gaggaagtagaaagcggcagaattaatatccactggctgaatgtagttccagtaccacctaacactagagtgtttgactaattgattgcccttagcattctgctaacaacagatgtacggtatgagttaaattagtaaatttgtattgctcctattgctttccatagcctgaaacagttgtaattattgaaattatttaaatcagaaacattgtattcaaaacrctttaattgattttctttgtatttttgttaataaaaactgctctaataaaagtaccgyggggtaatgatttgtagwttcggcygcacacttgaaaacacgaaggggatygtgctgaagagcagaacacctatcagagccagctccaagaactcagaatctgattctccacaatcagagtttcagaaaataagcctccttccaaaaggagtatgttcagacatactggcaaagagcaaaagctattgtttctttgtagctacaccagctccactgagattgcaattttgttttggtctttttttttctacataatgaaactcgcagttcataaaagatcaggttaaggtaaggaaactgaaattagtgttaactgtg

SEQ ID NO: 26565 - DNA, 600 bp, Chicken  19866894242911_4
tagaaagcggcagaattaatatccactggctgaatgtagttccagtaccacctaacactagagtgtttgactaattgattgcccttagcattctgctaacaacagatgtacggtatgagttaaattagtaaatttgtattgctcctattgctttccatagcctgaaacagttgtaattattgaaattatttaaatcagaaacattgtattcaaaacrctttaattgattttctttgtatttttgttaataaaaactgctctaataaaagtaccgyggggtaatgatttgtagwttcggcygcacacttgaaaacacgaaggggatygtgctgaagagcagaacacctatcagagccagctccaagaactcagaatctgattctccacaatcagagtttcagaaaataagcctccttccaaaaggagtatgttcagacatactggcaaagagcaaaagctattgtttctttgtagctacaccagctccactgagattgcaattttgttttggtctttttttttctacataatgaaactcgcagttcataaaagatcaggttaaggtaaggaaactgaaattagtgttaactgtgtttctat

SEQ ID NO: 26566 - DNA, 600 bp, Chicken  19866894242911_5
tggctgaatgtagttccagtaccacctaacactagagtgtttgactaattgattgcccttagcattctgctaacaacagatgtacggtatgagttaaattagtaaatttgtattgctcctattgctttccatagcctgaaacagttgtaattattgaaattatttaaatcagaaacattgtattcaaaacrctttaattgattttctttgtatttttgttaataaaaactgctctaataaaagtaccgyggggtaatgatttgtagwttcggcygcacacttgaaaacacgaaggggatygtgctgaagagcagaacacctatcagagccagctccaagaactcagaatctgattctccacaatcagagtttcagaaaataagcctccttccaaaaggagtatgttcagacatactggcaaagagcaaaagctattgtttctttgtagctacaccagctccactgagattgcaattttgttttggtctttttttttctacataatgaaactcgcagttcataaaagatcaggttaaggtaaggaaactgaaattagtgttaactgtgtttctatcatcatgctttacataataccagaag

SEQ ID NO: 26567 - DNA, 600 bp, Chicken  19866894242911_6
aagcagtttctttgctttcttctttttgtttgttttttttttctgttgttgttaatttcataaatcagttgtctgaagtcagaacaacaaagcaaatatctgcatgtatacccaaagtataatgaaaaacaaagacaagtagttacgatctgtcatcacctttattctccctgattctccttctgatttgtaatgcaccactgtaaaacagtgaggtcaccaaagccaagatttgcatataggatacccacatttagataacctttttaaaggcgtgcggtgtcagtaagtgatctctcytgaaggagcaaagcacagaacagctccaaaacacagacggtcaattttgctgcctttttgctggttcaggaagttcagaataggagctcaggttggatcagtattcactatttgttttctcaactattcaaattgttagggttttttgttagagagggaatagatgtgctaccacttgaggcaaaaagcacatgaattggaacagttttttgtaaccatttgctttcaatctgctgctgtgaccaaaagaaatgtgaactggcagagtgctgctgttaatataattctattttgcaacag

SEQ ID NO: 26568 - DNA, 600 bp, Chicken  19866894242926_1
ccttcccattgcaccgcacgaggccgtgcctgaagatctgcctttctctttggctgaaatgtgactctaattagatgataacaaggctctgacattccctaattgtaatcctagccgtgcgaggggacgttattaaaatgattaaaattattgataaaggggaggaaggacgttgggtcagaatacagtttttggcccacggcgcagaacaacgcaggtccagatctgtccctgggggacacccgaggatgggcccggcccacaccgagcagagggcctcgatggtacaccgcagcttgmggtgaccacaggccgtgcacctcatagggagacgtttccccacagagtccccagggctggggctgcttcaaaatgggggacgagctaaagcagcacagggaattcaccccgtgctggggtggctgcaggctgcaggcaggcccatggggcacacgggacatgataccgccggagttgaagccttcgtgacaaagacttaaaggaaaggcggtttgggtggcaagggggtggatccagccttcaggcagaacaaacgaagcacaacttcatcagacctgaggctgctaagctgattgctgg

SEQ ID NO: 26569 - DNA, 600 bp, Chicken  19866894242931_1
acaatatattgcttttgtgttattgttaaatgtataaagagtctttttacaaaactgttgcaagacacaaaaagcttcttcccagaaaggaaattgtatagtcagaacatttcattgcttttcaaaagaagataataatgaataatatgatgagaactttcagaacatactgcatcaatcaagttctgcatgagtaattataataatgttttataacatcattaattttgtctgcacaacataactcaaatttctgaaatacaacatttcttcctcaaaggacaaaagcccttaatatargttcttggtaaactactataactctgragagaacatccaagaagtaaatatttgttttctgtactaggacttgaggtcacagaaggtattgtctgcaaagctggctattctcctactgtgrcaaagaaagattttacaaatgcatagaagctgttaggtgcagtgaggcttatgtctgtaagtattaaaattatttttccttctggtgggaaagccagcttacttctttgtctgtattgctcctcagacgggaatgtatccattccttatggctatatcttcagatatcaagttagtttt

SEQ ID NO: 26570 - DNA, 600 bp, Chicken  19866894242931_2
aaatgtataaagagtctttttacaaaactgttgcaagacacaaaaagcttcttcccagaaaggaaattgtatagtcagaacatttcattgcttttcaaaagaagataataatgaataatatgatgagaactttcagaacatactgcatcaatcaagttctgcatgagtaattataataatgttttataacatcattaattttgtctgcacaacataactcaaatttctgaaatacaacatttcttcctcaaaggacaaaagcccttaatatargttcttggtaaactactataactctgragagaacatccaagaagtaaatatttgttttctgtactaggacttgaggtcacagaaggtattgtctgcaaagctggctattctcctactgtgrcaaagaaagattttacaaatgcatagaagctgttaggtgcagtgaggcttatgtctgtaagtattaaaattatttttccttctggtgggaaagccagcttacttctttgtctgtattgctcctcagacgggaatgtatccattccttatggctatatcttcagatatcaagttagtttttttcatctgtgatgtacatatcataat

SEQ ID NO: 26571 - DNA, 600 bp, Chicken  19866894242931_3
tcaaaagaagataataatgaataatatgatgagaactttcagaacatactgcatcaatcaagttctgcatgagtaattataataatgttttataacatcattaattttgtctgcacaacataactcaaatttctgaaatacaacatttcttcctcaaaggacaaaagcccttaatatargttcttggtaaactactataactctgragagaacatccaagaagtaaatatttgttttctgtactaggacttgaggtcacagaaggtattgtctgcaaagctggctattctcctactgtgrcaaagaaagattttacaaatgcatagaagctgttaggtgcagtgaggcttatgtctgtaagtattaaaattatttttccttctggtgggaaagccagcttacttctttgtctgtattgctcctcagacgggaatgtatccattccttatggctatatcttcagatatcaagttagtttttttcatctgtgatgtacatatcataatgaactaataattcctctgtggaagtcaacagccagtgaacagtttaattgttacaaaaaacaatagtaattataagtaaggctaaacttcaaaa

SEQ ID NO: 26572 - DNA, 599 bp, Chicken  19866894242933_1
  misc_feature (1)..(74): n is any nucleotide
nnnnnnnnnnnnnnnnnnnnnnnnnnnnnnnnnnnnnnnnnnnnnnnnnnnnnnnnnnnnnnnnnnnnnnnnnnttttgtccacccgcccgagggcgtgcacggccgggccacgcggattttaatggttccatttcttcctttctcctctggagaggaactccgttattctcccggcggccgcccgaggtgcgcggacctcaaaaccgaagcgatgagaggagatttctggcccgtccgtttggatgtgggtatcgcacggggccgctttcctgaggccggaggccaagagcggctgtcyccgacaaacctccctccccccgcaaagccatcaggggcgccctattcacaaccccttccgtgacgcgcagagatccgatggaaacggcaccgcaggcgctacgcgcatccacgggcgcagcggcaccgttgaaaatcgctttgcgcgccgcggctccgcgcgctcgtttgcgcctcgttttcctgtctctcccatcccctcctggcccaccgcagccctcccggctcgcactttgccctggctcaattttccccaaaatgattttttgccggcggacactcgaaagttgcactgcctcc

SEQ ID NO: 26573 - DNA, 599 bp, Chicken  19866894242936_1
  misc_feature (1)..(86): n is any nucleotide
nnnnnnnnnnnnnnnnnnnnnnnnnnnnnnnnnnnnnnnnnnnnnnnnnnnnnnnnnnnnnnnnnnnnnnnnnnnnnnnnnnnnnncggtggtggaaatcttaatttatgactaaatgttgcactgcgctcttattcctccaatagactttaatgtctcttgagggagtgaaaaagagctgtttgtatttcagtgtgctgcaaaaaaaatctgtaacgaattcttctctttgtgatttctgagctgaacccaaggtgggcacgtccagcaggctcagacatggcacgctgatgcacaccragaggaccggggtgccctataggaggatgctgagcacttctggaagcacaaacaatgaagatgtgcagagtatttttggaacgtttggaagggttgggcttctttccttgttttggtttggggtgtttttgatctttacaagaaaagatggatgagacgttcttcgtggaactcccacaggctcattatggggaaagcagagctggaaaagccatgctctcactccttgcttcaaggcaaaactggagctattcctggcacaagtgcttcagaaacctgttcttagaaacccatctaat

SEQ ID NO: 26574 - DNA, 469 bp, Chicken  19866894242936_2
gcagagtatttttggaacgtttggaagggttgggcttctttccttgttttggtttggggtgtttttgatctttacaagaaaagatggatgagacgttcttcgtggaactcccacaggctcattatggggaaagcagagctggaaaagccatgctctcactccttgcttcaaggcaaaactggagctattcctggcacaagtgcttcagaaacctgttcttagaaacccatctaatggggattcccatgtttcctcaggcaacatgttcagggcttggagctgattcccctccaccccaakgtgtaacctctatcaaacttgtctctgttacctcttatcacyccacacctctgagaaacatgcaccatcctgctcgtaacctccctgcgggtacaacagtaatgaggttcccctgcaccttctccagctcatcccaggaggctcctgctggtcttaccccagcatctcg

SEQ ID NO: 26575 - DNA, 427 bp, Chicken  19866894242936_3
cttgttttggtttggggtgtttttgatctttacaagaaaagatggatgagacgttcttcgtggaactcccacaggctcattatggggaaagcagagctggaaaagccatgctctcactccttgcttcaaggcaaaactggagctattcctggcacaagtgcttcagaaacctgttcttagaaacccatctaatggggattcccatgtttcctcaggcaacatgttcagggcttggagctgattcccctccaccccaakgtgtaacctctatcaaacttgtctctgttacctcttatcacyccacacctctgagaaacatgcaccatcctgctcgtaacctccctgcgggtacaacagtaatgaggttcccctgcaccttctccagctcatcccaggaggctcctgctggtcttaccccagcatctcg

SEQ ID NO: 26576 - DNA, 599 bp, Chicken  19866894242937_1
  misc_feature (1)..(123): n is any nucleotide
nnnnnnnnnnnnnnnnnnnnnnnnnnnnnnnnnnnnnnnnnnnnnnnnnnnnnnnnnnnnnnnnnnnnnnnnnnnnnnnnnnnnnnnnnnnnnnnnnnnnnnnnnnnnnnnnnnnnnnnnnnnaattatatcaagttctgaaatcaactgagtgtagccctcactgtcatctgcacttcaactttacactcagctgctagtgaaattacaagtaaagtaatggctattcatgtaactagatggtatcaaatgcaaatgactttggttttgttagtagctttggataaaagttgacactcwgtataaattgtgtggatttctgcatggatcagatgaacatttcagcctcttgtgtgtatgctagaggaacaaaaacagtacttgcaactgctgkcatgcagcatctttttctaayctagtgttttgtttcctactttaaaagatatcatctttctccatgttaatcataatagaagtcaaaatgttatgttttttagctgtgtcactcgagagagaagagtactgtaaagcttatgttattacagataactgtggccayaacatccccactttgcaactttccttatcggtcacgaata

SEQ ID NO: 26577 - DNA, 599 bp, Chicken  19866894242937_2
  misc_feature (1)..(29): n is any nucleotide
nnnnnnnnnnnnnnnnnnnnnnnnnnnnnaattatatcaagttctgaaatcaactgagtgtagccctcactgtcatctgcacttcaactttacactcagctgctagtgaaattacaagtaaagtaatggctattcatgtaactagatggtatcaaatgcaaatgactttggttttgttagtagctttggataaaagttgacactcwgtataaattgtgtggatttctgcatggatcagatgaacatttcagcctcttgtgtgtatgctagaggaacaaaaacagtacttgcaactgctgkcatgcagcatctttttctaayctagtgttttgtttcctactttaaaagatatcatctttctccatgttaatcataatagaagtcaaaatgttatgttttttagctgtgtcactcgagagagaagagtactgtaaagcttatgttattacagataactgtggccayaacatccccactttgcaactttccttatcggtcacgaatagtctgcgttgtcccagtgcttgcttttctaaattcataaaacaacttaaacatatccaaataacattgtgtgctgttcctttgtggacttgtgt

SEQ ID NO: 26578 - DNA, 599 bp, Chicken  19866894242937_3
  misc_feature (1)..(8): n is any nucleotide
nnnnnnnnaattatatcaagttctgaaatcaactgagtgtagccctcactgtcatctgcacttcaactttacactcagctgctagtgaaattacaagtaaagtaatggctattcatgtaactagatggtatcaaatgcaaatgactttggttttgttagtagctttggataaaagttgacactcwgtataaattgtgtggatttctgcatggatcagatgaacatttcagcctcttgtgtgtatgctagaggaacaaaaacagtacttgcaactgctgkcatgcagcatctttttctaayctagtgttttgtttcctactttaaaagatatcatctttctccatgttaatcataatagaagtcaaaatgttatgttttttagctgtgtcactcgagagagaagagtactgtaaagcttatgttattacagataactgtggccayaacatccccactttgcaactttccttatcggtcacgaatagtctgcgttgtcccagtgcttgcttttctaaattcataaaacaacttaaacatatccaaataacattgtgtgctgttcctttgtggacttgtgtaccaaaagggcgtggataaat

SEQ ID NO: 26579 - DNA, 600 bp, Chicken  19866894242937_4
ctttggttttgttagtagctttggataaaagttgacactcwgtataaattgtgtggatttctgcatggatcagatgaacatttcagcctcttgtgtgtatgctagaggaacaaaaacagtacttgcaactgctgkcatgcagcatctttttctaayctagtgttttgtttcctactttaaaagatatcatctttctccatgttaatcataatagaagtcaaaatgttatgttttttagctgtgtcactcgagagagaagagtactgtaaagcttatgttattacagataactgtggccayaacatccccactttgcaactttccttatcggtcacgaatagtctgcgttgtcccagtgcttgcttttctaaattcataaaacaacttaaacatatccaaataacattgtgtgctgttcctttgtggacttgtgtaccaaaagggcgtggataaatatgatgaaccgtgacttktttaaatgaaataattattacgtagctttttaatttcatggtttagcttgttctttttccaatcgagtgtggagactgttcactttggattgctgttattcatggacttcataaactgttagagcat

SEQ ID NO: 26580 - DNA, 600 bp, Chicken  19866894242937_5
actttaaaagatatcatctttctccatgttaatcataatagaagtcaaaatgttatgttttttagctgtgtcactcgagagagaagagtactgtaaagcttatgttattacagataactgtggccayaacatccccactttgcaactttccttatcggtcacgaatagtctgcgttgtcccagtgcttgcttttctaaattcataaaacaacttaaacatatccaaataacattgtgtgctgttcctttgtggacttgtgtaccaaaagggcgtggataaatatgatgaaccgtgacttktttaaatgaaataattattacgtagctttttaatttcatggtttagcttgttctttttccaatcgagtgtggagactgttcactttggattgctgttattcatggacttcataaactgttagagcatactgctttatgttttcctgtgaaatgttattgtggcaaatgtttaagctccaactgaaagctttacttgtgatgatgaccaagctgtgctttatttggttggagcagtctcactgaattccctggaagtactggtggaggcagatgagccgttctgtcttagcaaggttgcct

SEQ ID NO: 26581 - DNA, 599 bp, Chicken  19866894242938_1
  misc_feature (1)..(3): n is any nucleotide
nnnaatttagtactagatttaaaagtttaaccaaaaaaggtaggaagcaggcttgtagggaaaagagcttttccaatatagcaaagtagttcaaattgactgagaaggcaaatacatttaataaatcagatttgtcacgaatactcaggctggctgtaagttagtctatccattttactaatgcttctataaatctgagcaaacataatactgatttaaatgttattactagtatttagcattttgtaatcaatttcaaggaggaaaaatctttttttgtatcagttttttttcttatcrgttgttgaatgtaaacttcctgatagttcattaatgtttttaaattacaggatatcgtccaccgcctttttcagaraagttctacttggtagtaattgaaaaagatagcactggctgttctgttcttcagatgtggcatcttcatctcaaatctgtgcaggcctgcttaggtgagtattttcttatagatcagtgtttattttaaatatcatgacatgtcatgaatttaaagcttgccgttttagragcaataggaataaggttccatgcaaacattggctgtgttctatactactgac

SEQ ID NO: 26582 - DNA, 600 bp, Chicken  19866894242938_2
tatagcaaagtagttcaaattgactgagaaggcaaatacatttaataaatcagatttgtcacgaatactcaggctggctgtaagttagtctatccattttactaatgcttctataaatctgagcaaacataatactgatttaaatgttattactagtatttagcattttgtaatcaatttcaaggaggaaaaatctttttttgtatcagttttttttcttatcrgttgttgaatgtaaacttcctgatagttcattaatgtttttaaattacaggatatcgtccaccgcctttttcagaraagttctacttggtagtaattgaaaaagatagcactggctgttctgttcttcagatgtggcatcttcatctcaaatctgtgcaggcctgcttaggtgagtattttcttatagatcagtgtttattttaaatatcatgacatgtcatgaatttaaagcttgccgttttagragcaataggaataaggttccatgcaaacattggctgtgttctatactactgacaatataaaaatatgttgaaatgatcattgaattctttattttaaactgtcagtatttcagaatgttatgaatgtctt

SEQ ID NO: 26583 - DNA, 600 bp, Chicken  19866894242938_3
taatcaatttcaaggaggaaaaatctttttttgtatcagttttttttcttatcrgttgttgaatgtaaacttcctgatagttcattaatgtttttaaattacaggatatcgtccaccgcctttttcagaraagttctacttggtagtaattgaaaaagatagcactggctgttctgttcttcagatgtggcatcttcatctcaaatctgtgcaggcctgcttaggtgagtattttcttatagatcagtgtttattttaaatatcatgacatgtcatgaatttaaagcttgccgttttagragcaataggaataaggttccatgcaaacattggctgtgttctatactactgacaatataaaaatatgttgaaatgatcattgaattctttattttaaactgtcagtatttcagaatgttatgaatgtcttaaaatgagtatcggtcatagcataaaattatttgcaataaaactaaagcagccaacacatgatataattattttctgcataattgaagcacatctaagaaaaagttttgttatagcatattcatgctttgtcctaacatataaactgggttttttttttaactgttttca

SEQ ID NO: 26584 - DNA, 600 bp, Chicken  19866894242939_1
agagcagaattgctcctgaaacaacttgagcccattgcttcttgctttgtcatattgcagccttgtgaggagactactttcttagttctctctaactcacttttagatactcagagcaaacgattaatagtttccattctttctcttctctaggctgagtaaatccagtttcttcaaactttcttcctgtgccaaggcattcaaccatctaatcatattggcagtctttcactggacactctccaattgtgcagtgagggatcaaaacagtcaatcgtgcataacaattatctcaaaaayaattcatgctgagtgctgccaatttactgtctcttcaacaactaacaaagatggcctgagagattttgaaattttacattttccaaaagtattttaattcttcaattctattggtataatgttttgctgttaatttttattttttagtaatttctggggaaatctttaaacttaaaaaaaaaaaggaaaataatcttaattctgataattttacttttaaaaatacggtgtaggttctcagcatttattgattgtaatggtggttgcaaaatagcttagcagcttaaaacaacttaaaat

SEQ ID NO: 26585 - DNA, 600 bp, Chicken  19866894242939_2
agtgctgccaatttactgtctcttcaacaactaacaaagatggcctgagagattttgaaattttacattttccaaaagtattttaattcttcaattctattggtataatgttttgctgttaatttttattttttagtaatttctggggaaatctttaaacttaaaaaaaaaaaggaaaataatcttaattctgataattttacttttaaaaatacggtgtaggttctcagcatttattgattgtaatggtggttgcaaaatagcttagcagcttaaaacaacttaaaataaatcactgtmatgtttaaaatcatatatattcaacatacagacattcatttaatctgagcatcactttctgaaaagaagtctaatgaatcaatagtagtgataaatattcttttgtttctgcataagctacagtacttgtatctataagagtagtcgtagatgcatctgtcagcttcaattagaacacttctgttttcatgctgctaaagagaaagatctattcagcaattaagaaagcagtacagaaaaagaaactagtagagaaaagtggacagagtcatcagctatcatctatcagacaacaaagca

SEQ ID NO: 26586 - DNA, 600 bp, Chicken  19866894242939_3
tgaacttgatataatggtgtgttactaatgaggaatagaacagaaagattttttttacttctgtataaataaggaacagcattttgttgacttatttccaacagatctacaacaatatttagattactttgcaacagagcatctacctagagagtcttcctacctgtatgcaaactgcttgttatttctacttaaatatagtaatttgaaaaaggaaaatgtacacctttcttacgaaggtttacattatcacattccccttaagatataactggggatagaaatttttttccatatttktcaaattacatgccacaaagaaatctacgctttcatttccatttcatttcgcaattattattaagtaactaaatcacctttattattcataagtggccctgagtagaaattatgccacattttagaaatacaatctgtattttgagaattgggaagattctgttctgtccatgttttcataaataaacattctatgttgaaaatgttactaatactgcatgacatcctggaaactgagttgaatgtcttgtatgtgatactaaaatcatataatgtttgtgtaagcataaaagtataata

SEQ ID NO: 26587 - DNA, 599 bp, Chicken  19866894242941_1
  misc_feature (1)..(77): n is any nucleotide
nnnnnnnnnnnnnnnnnnnnnnnnnnnnnnnnnnnnnnnnnnnnnnnnnnnnnnnnnnnnnnnnnnnnnnnnnnnnntcaagctgaaccagctcttgtcagtctgttttccatttaccaaaaaataacaaaatccatcagtaaagcttgttcacacatttctactccagatatcaatttcagcccaaagatcaactcctgacagttaattaggtgaattgaggtgagagatgtttctgctgatggaaaagttgcagggagagaaaataacgccacgatttgccagtgcagatggaggctktgcaacgtgtgggaggtgtaggcagccccagagtgcagcgctgggtgagggcacacaactggcagcagctgggagcatcggtgctgctgggctccacctgctgcagggggaaatgcaaaggttcttgctttcaggcaacatcaaatggtgatgattgttgaacctcagctcctgaggctggagtaggatattcttccacacctagctgtgccctgctgtgccctccctccttccctggggaggcagggggagcaccgtgtacacggcacagggtcatcatccccagggcacaggtgggg

SEQ ID NO: 26588 - DNA, 600 bp, Chicken  19866894242941_2
cacttgcattctccatccacctccattaatttcactcctccctgctcagtaacctggatttagcagggattcaccttaccccacagcccagtctgttccttggatatctggggagtgactagagatgtgcattgatatgtgaattattaagaaaaatcaattagctctattttaaagaaagatttggaaggaccttccttaggaaagcattcctgactgagggcctcccatggacaaatgcaggtcctgtgttcctgtggacagaactcatccccctcagctgccatacagtcaggcatkttcccagcaagcttgtccttcatgagcatctgatgcctagaaatgcagaatgcagaatccttctttggatcagggctgatgaatcagcacctgcttgggaaaaaaagattaatgcacacttgagttgtaaccaaagaatcacagaatgctttaggttggaagagacctcaaagatcacccagttgccccccagcagctcagtctgcccagggcccagccgtggcctcaggcacctccagggatgggcaaccacagctctgagcagcagtgccagcactgcaccgccctctgagcaaagca

SEQ ID NO: 26589 - DNA, 600 bp, Chicken  19866894242945_1
catctccagaatgatttttgtggtttaaaaacagccgcgccatcctgacagacttcctctttccatcgataatgtctgggggaggactgagcatggattttgctctgctgtgaggtgacaaatccttccccacacagcgctgaggacgccgcaatttgtggcgggaaaaggttcggtcccacacctgcatgcatggcaatcaggtggaggtgaactgcataagaagcatcaaaaagaagaattttcctgctcccaagctacttgagaaaattccctaggtgttattttttcccaaagctscayraacaaagccaggccttgctcagtcagtccgagtgcagcaggacagcctccatgttgggcgccattttgtcagcrcccctctgctggagctgctctgggaagggrctgcatggaaaacggatctcagggcagtgccccctcagtggcatcactactgagtgcttctcagtgctgaagttatgctgcaattgttgcactttagttggtgaatgaggaaacagttcgttctgtgacagagatgcattacattcctgcattgaaatagtgcaattccccyagttttcctccacaaaggaa

SEQ ID NO: 26590 - DNA, 600 bp, Chicken  19866894242945_2
ctccagaatgatttttgtggtttaaaaacagccgcgccatcctgacagacttcctctttccatcgataatgtctgggggaggactgagcatggattttgctctgctgtgaggtgacaaatccttccccacacagcgctgaggacgccgcaatttgtggcgggaaaaggttcggtcccacacctgcatgcatggcaatcaggtggaggtgaactgcataagaagcatcaaaaagaagaattttcctgctcccaagctacttgagaaaattccctaggtgttattttttcccaaagctscayraacaaagccaggccttgctcagtcagtccgagtgcagcaggacagcctccatgttgggcgccattttgtcagcrcccctctgctggagctgctctgggaagggrctgcatggaaaacggatctcagggcagtgccccctcagtggcatcactactgagtgcttctcagtgctgaagttatgctgcaattgttgcactttagttggtgaatgaggaaacagttcgttctgtgacagagatgcattacattcctgcattgaaatagtgcaattccccyagttttcctccacaaaggaagaa

SEQ ID NO: 26591 - DNA, 600 bp, Chicken  19866894242945_3
tccagaatgatttttgtggtttaaaaacagccgcgccatcctgacagacttcctctttccatcgataatgtctgggggaggactgagcatggattttgctctgctgtgaggtgacaaatccttccccacacagcgctgaggacgccgcaatttgtggcgggaaaaggttcggtcccacacctgcatgcatggcaatcaggtggaggtgaactgcataagaagcatcaaaaagaagaattttcctgctcccaagctacttgagaaaattccctaggtgttattttttcccaaagctscayraacaaagccaggccttgctcagtcagtccgagtgcagcaggacagcctccatgttgggcgccattttgtcagcrcccctctgctggagctgctctgggaagggrctgcatggaaaacggatctcagggcagtgccccctcagtggcatcactactgagtgcttctcagtgctgaagttatgctgcaattgttgcactttagttggtgaatgaggaaacagttcgttctgtgacagagatgcattacattcctgcattgaaatagtgcaattccccyagttttcctccacaaaggaagaaa

SEQ ID NO: 26592 - DNA, 600 bp, Chicken  19866894242945_4
ggggaggactgagcatggattttgctctgctgtgaggtgacaaatccttccccacacagcgctgaggacgccgcaatttgtggcgggaaaaggttcggtcccacacctgcatgcatggcaatcaggtggaggtgaactgcataagaagcatcaaaaagaagaattttcctgctcccaagctacttgagaaaattccctaggtgttattttttcccaaagctscayraacaaagccaggccttgctcagtcagtccgagtgcagcaggacagcctccatgttgggcgccattttgtcagcrcccctctgctggagctgctctgggaagggrctgcatggaaaacggatctcagggcagtgccccctcagtggcatcactactgagtgcttctcagtgctgaagttatgctgcaattgttgcactttagttggtgaatgaggaaacagttcgttctgtgacagagatgcattacattcctgcattgaaatagtgcaattccccyagttttcctccacaaaggaagaaaatggcgccactgtgagactccggaaattatcttatgcagcacctgcaaatctctgctatgcatgagcccagcag

SEQ ID NO: 26593 - DNA, 600 bp, Chicken  19866894242945_5
tgtgaggtgacaaatccttccccacacagcgctgaggacgccgcaatttgtggcgggaaaaggttcggtcccacacctgcatgcatggcaatcaggtggaggtgaactgcataagaagcatcaaaaagaagaattttcctgctcccaagctacttgagaaaattccctaggtgttattttttcccaaagctscayraacaaagccaggccttgctcagtcagtccgagtgcagcaggacagcctccatgttgggcgccattttgtcagcrcccctctgctggagctgctctgggaagggrctgcatggaaaacggatctcagggcagtgccccctcagtggcatcactactgagtgcttctcagtgctgaagttatgctgcaattgttgcactttagttggtgaatgaggaaacagttcgttctgtgacagagatgcattacattcctgcattgaaatagtgcaattccccyagttttcctccacaaaggaagaaaatggcgccactgtgagactccggaaattatcttatgcagcacctgcaaatctctgctatgcatgagcccagcagcatccaagccccaaagcatttcaatatatt

SEQ ID NO: 26594 - DNA, 600 bp, Chicken  19866894242945_6
gttattttttcccaaagctscayraacaaagccaggccttgctcagtcagtccgagtgcagcaggacagcctccatgttgggcgccattttgtcagcrcccctctgctggagctgctctgggaagggrctgcatggaaaacggatctcagggcagtgccccctcagtggcatcactactgagtgcttctcagtgctgaagttatgctgcaattgttgcactttagttggtgaatgaggaaacagttcgttctgtgacagagatgcattacattcctgcattgaaatagtgcaattccccyagttttcctccacaaaggaagaaaatggcgccactgtgagactccggaaattatcttatgcagcacctgcaaatctctgctatgcatgagcccagcagcatccaagccccaaagcatttcaatatatttcacatttaaacaccatgcaatgtgctgtgctyttcagccatttcctacgacaaaaggtggaaaaacaacaaaccggacagatgtgaagatgaggaaccctttccagcagtcacctggcagcgaagggagcttatatttttgctgaatattttctcacatgatttttttcct

SEQ ID NO: 26595 - DNA, 584 bp, Chicken  19866894242945_7
ctcagtggcatcactactgagtgcttctcagtgctgaagttatgctgcaattgttgcactttagttggtgaatgaggaaacagttcgttctgtgacagagatgcattacattcctgcattgaaatagtgcaattccccyagttttcctccacaaaggaagaaaatggcgccactgtgagactccggaaattatcttatgcagcacctgcaaatctctgctatgcatgagcccagcagcatccaagccccaaagcatttcaatatatttcacatttaaacaccatgcaatgtgctgtgctyttcagccatttcctacgacaaaaggtggaaaaacaacaaaccggacagatgtgaagatgaggaaccctttccagcagtcacctggcagcgaagggagcttatatttttgctgaatattttctcacatgatttttttcctaaaacagtttcttcagaaagccttaaaatattttaagcctgctgaacctcagttatttttaaattattattcaacagtaactgcaggagattttttcaaatgcgatgttttatgacatgtttttcttgcctcactttgctttggt

SEQ ID NO: 26596 - DNA, 599 bp, Chicken  19866894242946_1
  misc_feature (1)..(126): n is any nucleotide
nnnnnnnnnnnnnnnnnnnnnnnnnnnnnnnnnnnnnnnnnnnnnnnnnnnnnnnnnnnnnnnnnnnnnnnnnnnnnnnnnnnnnnnnnnnnnnnnnnnnnnnnnnnnnnnnnnnnnnnnnnnnnncactgggatgccccagtcggttctcataacattaccagcctcagcaaggcacccacagcaaggcactttttccaggggcacctgctgccctgcctctctgtgcagctcagcacgtggtgctgctcatgtcctacgcacaccagtatccaacattccagttaaaataaatgaggkaagttggcttaagtagaacacagctcactgcgttgacatttaaatggcagggagctactttgccttatgctctgtgtgggtgtaagtcaatactggctattaactgatgtgtgaatcagtcctctgtattagatgatgcccatcagtctcagatcagtgaacatcaacagaaggagcatacctgtccctggcgtgacgtcagttctgggacgtggttaaagaacacgatcatttcctacataaagacagttttgcagtaacagagatacatcagcatgtatatatatccctgagctgag

SEQ ID NO: 26597 - DNA, 600 bp, Chicken  19866894242956_1
cagaccagaaaatgtttggggaataaaagagactgagagagaagagtggctccaaactccaactcaagacctttgtgctccccaggtcagggtacctgtgctccattcatggctgtgagggcttgtttgggaacatgggatggtacatccattaccccctccactgcccctcctggatctgaacataggggcacagtgagcaggtggtagcagccctgtccatgcattgcctgtctccccatttcctctgacgtcaacatgtgataaatggcatggcaagataaggaggagaaacaaggygtggagtgccctggatgagcagagggtgtggaagaggttctgtggaacatccattgagttaacatactgaagtgaggtttgtttatgaggagtcattgtacctgttttgagaatggtggatgctcattgggatttgttctgcagcaccctctgaggactgtgatcctgagcaggaatgcactgtcccagctgctaatgtcccaaatgcattgctgtggaaagatgctcggagcccacagtaaaatgctctgagacatgggtgaagtaaggaaagagaacaaagataaaaacacaggggtc

SEQ ID NO: 26598 - DNA, 578 bp, Chicken  19866894242957_1
actaaagaaggaacagccattttggcctgtctcttctggccaatgtacctgtagaatgtcttcttattgtttttcacatccctcgccaagttcagttctacctgcgccttggctttcctgatcctacgtctgcaagtccggacagcatccctgtacttttcccaggtgacaagccattgtttccagagcttgtacgcacctttcttcgccctcagtgtgcccagcaggtccttgccaagccatgctggtttcctatctcatctgcccactttcttattcagagggatggagacctcttgkgctttcagaagggcatccttgaagagtagccagctctcctcaacatctttatctttaaggacagcatcccaggggatcttggccaacaatccattgaacagcttaaaggtcgctcttccaaagttcagggtcctgaccccactctttgccaggcccacatccctttgagatcacaaactcaaccagggcatggtcgctgcagcccaggctgccttcaacgttgacgcctttgatgatctcttctgcattggtgagcagcaggtccggcaatgcttcac

SEQ ID NO: 26599 - DNA, 600 bp, Chicken  19866894242960_1
aagcagaaagaagtcatattaaatgtgcttaatgacaatgggccaccactgacagttccttggattgcaaacagctctgaatcagcatcttgcatgtgtataagcaacaacttcttgccttggtattttattcccttcttggaagagagtcaggagtgttgtaaaaatacttatcatagaccttgaggaaaggtggagatatcaagtgcctccctttgttgaacagttggctccagtgctgcaacccctaaggagatttttctccagacctcctgtcttttccttttccctcaaacatgyagatcctcagttcctgagatatatgtgatatgtctcctttaaagggaaggagaccccaagaaaagggcagttttattctgatgtgaacatctggttcataggtgttaatattagatttcctttatgaggactttccttttagggaaagatatacctgaagacaattttctcatgcatttccccagtgggcaactgacactgagtgtgaagtaaatattcagtatgtgaaaccattttaggaacaaaggtatgttagcataatctccatacggaaaatcaaatcaaagtgcaacaaagaaa

SEQ ID NO: 26600 - DNA, 600 bp, Chicken  19866894242961_1
tctactttgcaaatgtggccatgagcaacatgctgcaactggacctgctatgagcagcaggctgggctagaaacctctgcaggtcccttatccgtgtgactgattaataagaacaaattgttttctcctctcactgctgaagttaatgagattgaacttctgtagataaaacatgcacagatcctcagtttgcaaaactcttttgaatccttctggatgagaatttactacataaatgcaagatgtcatgttttgattattgtttaaatagccagtgcttatctcaatctttctattcayggtacagagatcctagataatacaagattatattgctggctaggggacaaaagtgcaaacagatatgagtttcygtcagttttaaagctatttataggtacctctgtggaggaaccaacacaacctttaacactcaattcttggactatcaaagccttggcccggtagctgatcagtagtgcagaaagggaatttattctgtagctatgtaggaacatgatgtgttttgaatgtttgatcaragcccagtgcacatagtgctgagcagcagagggtgctgtcagagtatgctacaaataa

SEQ ID NO: 26601 - DNA, 600 bp, Chicken  19866894242961_2
ctctgcaggtcccttatccgtgtgactgattaataagaacaaattgttttctcctctcactgctgaagttaatgagattgaacttctgtagataaaacatgcacagatcctcagtttgcaaaactcttttgaatccttctggatgagaatttactacataaatgcaagatgtcatgttttgattattgtttaaatagccagtgcttatctcaatctttctattcayggtacagagatcctagataatacaagattatattgctggctaggggacaaaagtgcaaacagatatgagtttcygtcagttttaaagctatttataggtacctctgtggaggaaccaacacaacctttaacactcaattcttggactatcaaagccttggcccggtagctgatcagtagtgcagaaagggaatttattctgtagctatgtaggaacatgatgtgttttgaatgtttgatcaragcccagtgcacatagtgctgagcagcagagggtgctgtcagagtatgctacaaataatatgggtgtggattgtgggtgtgaaattgtgtggctgacttcagtaattaagcaaagtcaagcccagagtgtta

SEQ ID NO: 26602 - DNA, 600 bp, Chicken  19866894242961_3
atgtcatgttttgattattgtttaaatagccagtgcttatctcaatctttctattcayggtacagagatcctagataatacaagattatattgctggctaggggacaaaagtgcaaacagatatgagtttcygtcagttttaaagctatttataggtacctctgtggaggaaccaacacaacctttaacactcaattcttggactatcaaagccttggcccggtagctgatcagtagtgcagaaagggaatttattctgtagctatgtaggaacatgatgtgttttgaatgtttgatcaragcccagtgcacatagtgctgagcagcagagggtgctgtcagagtatgctacaaataatatgggtgtggattgtgggtgtgaaattgtgtggctgacttcagtaattaagcaaagtcaagcccagagtgttataaaagcacattcctagtgtgggcatgttagggcatgagcaaagcatgactgtggggagatcatggatcatgcagacagttaactcttaacttgcagtagtcagacctagtctgaatcttccttggtagattcaagtggtatttctcttcaaaccaccatgagaagca

SEQ ID NO: 26603 - DNA, 600 bp, Chicken  19866894242961_4
cagagtgttataaaagcacattcctagtgtgggcatgttagggcatgagcaaagcatgactgtggggagatcatggatcatgcagacagttaactcttaacttgcagtagtcagacctagtctgaatcttccttggtagattcaagtggtatttctcttcaaaccaccatgagaagcatagtgttctttgagtccaatgaaacaggttagagactcacctcaaacaccttaagcgctcgtgagagtggagaggtcttggcacccttgagcatgaagaacaggttcagcatggctctcccrtccttctcctcaaaaacaattgtctctgtggactctgcagcatcggtggctgcagctgcagcctctcgttccttcctggcatcttcaatgaggctttggcgtctaccaatgaaccgtggagactgaaggcagaatagaaataagtaacaattcttatggagctgtgggggggatcagaggcaaccctggtagctgcatgaggtgtgactggagtgtctcatcagaggaagtttggaaaggctgggctgacttgctcagctttgcaaaggaagatccagtgttgagaactaaagctttaga

SEQ ID NO: 26604 - DNA, 480 bp, Chicken  19866894242961_5
tggcatcttcaatgaggctttggcgtctaccaatgaaccgtggagactgaaggcagaatagaaataagtaacaattcttatggagctgtgggggggatcagaggcaaccctggtagctgcatgaggtgtgactggagtgtctcatcagaggaagtttggaaaggctgggctgacttgctcagctttgcaaaggaagatccagtgttgagaactaaagctttagaactgaactttcagaaatgtgaccttttgggaaaaagcaaaatacgcttatagtatgactgaagtgggcttttctcycacaccttctccagcaatatatgtatatattcttcaaaaactgaaaatcagaaataatcttatacagttttaaggagtctcgtaaactgaaggggagaggtgctagataaacacaaaatcatttaagaaaaagatatgctatgaggtgcaactgaagcctgcagctgtgccccagccagg

SEQ ID NO: 26605 - DNA, 599 bp, Chicken  19866894242971_1
  misc_feature (1)..(183): n is any nucleotide
nnnnnnnnnnnnnnnnnnnnnnnnnnnnnnnnnnnnnnnnnnnnnnnnnnnnnnnnnnnnnnnnnnnnnnnnnnnnnnnnnnnnnnnnnnnnnnnnnnnnnnnnnnnnnnnnnnnnnnnnnnnnnnnnnnnnnnnnnnnnnnnnnnnnnnnnnnnnnnnnnnnnnnnnnnnnnnnnnnnnnnncagtacataggcattaaggcatacatcacacctatttgtttatcacacagtcaccgtggggaaaaaaaacccctaaacacaagtatctcaaaccccagtgatgcaagaaaccagagsttgctgctctggttggtttgctgaactctggagagcaaacatcacaactcgaggttttactacatggattgaactttttttcttcctcctagaaggagcacctggaattgcaaggaaaactaaagtaaaagtacaggaacaaaatgcagacattgagaacttacattacattcagagaatcagattttatgcaatcaacaatatccagattgttcatgcctgagtcacaaaactagttctaaagcacaaaaaacaaatcatgctcagtagccgagactattattataggatatgtttct

SEQ ID NO: 26606 - DNA, 600 bp, Chicken  19866894242976_1
atgtgactaatatcacagatattagaaatcacaaagactgatttcttgtttgtttttttttttttccttgtttgtttgttttaaagcagaacccatatccttgagattgcagtttgtattggaaactggaaagttaaaaggagtttaatctatgctgatttgtttgtaggcagactgactttttttcaggtcccttatagtgtggaatttctcattacacaagggtaaaaaagccttgaacaaaagtagtttagactgtcttttttgagcaacagttccttaatctctttttgagttttygggtcatgttttagtcagcaaaacaaatacgctgctcaatgttgtaggtaatgataacaccaggataaacacaggaaatgcttttattaatatgatctaagtatttaattgccttccttgtagtttaatcttatctttacacattgaagcagtgcatattgtacacttctgattctcaaaggacagcttttcatatagtattgtagaataagacgttttcaccacaaacctgacagacctgtaaagttgcttgtcagccgaagggcgagaaagtttgttgtaattatggagaagatgtac

SEQ ID NO: 26607 - DNA, 600 bp, Chicken  19866894242980_1
ccttcacagcgcacagcctgacggatgggctgcacacccggcatttgtgcctggatgtgttttctctcctgagtgcttctttggtagcaatgctgcagtgcaggtgctgcgctgctgtcagtggcaacagaggcacagcctgagtgcttctgggcctggtctctgtgtggtggtgctcgagtcccactgaatgtttgcagtgttccctcaggttttgggatcgtgtcccagtgttacccccttccagcatactacaactacaggctttgagccctgaccacagcagccctggccgccccrcacgctacctttgctcttccagttgcggtctgcggcgtagcccaggtgcccagcaaatttcctgttgaactctgccatgagtgatttgtacgggttccgtatcagcaggatagcagagtcaaacatttcaatctctgtcttgccactttcatgtgttttcacacagatggtccgtctacttcgccagtggtctttttctcctttaaagcctgtttataagacaagatttttttttttttttccacgtgagtgtatgtctgtgacttcttacactcttaaacaaggccttactgttgtgga

SEQ ID NO: 26608 - DNA, 600 bp, Chicken  19866894242980_2
ccagtgttacccccttccagcatactacaactacaggctttgagccctgaccacagcagccctggccgccccrcacgctacctttgctcttccagttgcggtctgcggcgtagcccaggtgcccagcaaatttcctgttgaactctgccatgagtgatttgtacgggttccgtatcagcaggatagcagagtcaaacatttcaatctctgtcttgccactttcatgtgttttcacacagatggtccgtctacttcgccagtggtctttttctcctttaaagcctgtttataagacaagarttttttttttttttccacgtgagtgtatgtctgtgacttcttacactcttaaacaaggccttactgttgtggaaaacaccagctgattaaacttgttgtccagtacctgggaccagggctgccaccaacaagaggttactgaggcaggagccactctatgagctcctccacagctgctgggatcaacagcagtgatggccttgggcagctccaagcagaaggatgctggagcaagcaaagccccgtgcctcagaatggctctgtgtcccatcaccccctgaaaatggtacctttgttgta

SEQ ID NO: 26609 - DNA, 600 bp, Chicken  19866894242980_3
cagtgttacccccttccagcatactacaactacaggctttgagccctgaccacagcagccctggccgccccrcacgctacctttgctcttccagttgcggtctgcggcgtagcccaggtgcccagcaaatttcctgttgaactctgccatgagtgatttgtacgggttccgtatcagcaggatagcagagtcaaacatttcaatctctgtcttgccactttcatgtgttttcacacagatggtccgtctacttcgccagtggtctttttctcctttaaagcctgtttataagacaagatrtttttttttttttccacgtgagtgtatgtctgtgacttcttacactcttaaacaaggccttactgttgtggaaaacaccagctgattaaacttgttgtccagtacctgggaccagggctgccaccaacaagaggttactgaggcaggagccactctatgagctcctccacagctgctgggatcaacagcagtgatggccttgggcagctccaagcagaaggatgctggagcaagcaaagccccgtgcctcagaatggctctgtgtcccatcaccccctgaaaatggtacctttgttgtag

SEQ ID NO: 26610 - DNA, 600 bp, Chicken  19866894242990_1
gtcaacaaacagacctgaaaatgcataaatatgggataaataagaaggtacctgggacactgaagcagcaaaaacgcagaatgagcatttatatttatttttctcttatgaaaataatattattccaaaatggaagaacaacaaaaactagtttaaaaataaaaaacgactgcaatattattcatatttttgtcacaagatgtcagaagtaacatcttgcctgtattctcaagtcaggtatttgagaacactgagctttgactttttttaaagcttaattcacacttaatttaacgttcytgaggggcagaaaggtagtaggcaattttattccattaaaaacctgctaaaggctcctctgtgctaattcagacatctcttgttggttacaaacgagtcttgcttagtcagtgttcagcttctgacagcagtcatatcttttgctgaggcagtgtttgtgggaataaatattttattaragcaaataatcwcttgattaggggcaagactttaggctgcaaatgatagtggttgctttaacaagatacggctcgatcttgtttagcctgagtctttagttcattgttggtacagaggtat

SEQ ID NO: 26611 - DNA, 600 bp, Chicken  19866894242990_2
attcatatttttgtcacaagatgtcagaagtaacatcttgcctgtattctcaagtcaggtatttgagaacactgagctttgactttttttaaagcttaattcacacttaatttaacgttcytgaggggcagaaaggtagtaggcaattttattccattaaaaacctgctaaaggctcctctgtgctaattcagacatctcttgttggttacaaacgagtcttgcttagtcagtgttcagcttctgacagcagtcatatcttttgctgaggcagtgtttgtgggaataaatattttattaragcaaataatcwcttgattaggggcaagactttaggctgcaaatgatagtggttgctttaacaagatacggctcgatcttgtttagcctgagtctttagttcattgttggtacagaggtatcataaataatttaattctattgtggctctccaagggagcaataataattaagggagttgtttgtttgctttagctgtacttttgtaaatgcttgattttatttaatctaagacatgtagtgcttacccgctgacacagaataaatacttccttaagtagtatttgataaccacagagtg

SEQ ID NO: 26612 - DNA, 600 bp, Chicken  19866894242990_3
gtcacaagatgtcagaagtaacatcttgcctgtattctcaagtcaggtatttgagaacactgagctttgactttttttaaagcttaattcacacttaatttaacgttcytgaggggcagaaaggtagtaggcaattttattccattaaaaacctgctaaaggctcctctgtgctaattcagacatctcttgttggttacaaacgagtcttgcttagtcagtgttcagcttctgacagcagtcatatcttttgctgaggcagtgtttgtgggaataaatattttattaragcaaataatcwcttgattaggggcaagactttaggctgcaaatgatagtggttgctttaacaagatacggctcgatcttgtttagcctgagtctttagttcattgttggtacagaggtatcataaataatttaattctattgtggctctccaagggagcaataataattaagggagttgtttgtttgctttagctgtacttttgtaaatgcttgattttatttaatctaagacatgtagtgcttacccgctgacacagaataaatacttccttaagtagtatttgataaccacagagtgtgtctgcatcta

SEQ ID NO: 26613 - DNA, 600 bp, Chicken  19866894242990_4
ttgtttagcctgagtctttagttcattgttggtacagaggtatcataaataatttaattctattgtggctctccaagggagcaataataattaagggagttgtttgtttgctttagctgtacttttgtaaatgcttgattttatttaatctaagacatgtagtgcttacccgctgacacagaataaatacttccttaagtagtatttgataaccacagagtgtgtctgcatctagaagaatgctaactctttgaaatgctgagagtgtgatcagtattcctcagtgaaattaaggtagascataagtattttctgtgaaactgtagtgccaagtttgcttaaatacttctgttcttttaatttagcattgatgatgcacttcaggtgaagatcacggacaatgcgctatcccgagacctatttcctatggactaccattgcctgggagataatgagaacagaccggttcgatggatggctcttgaaagcctggttaacaatgaattttccagtgctagtgatgtggtaagtttggttggttggttttgttttttttcttgagggaggagacgtgaattagatgtgtacatttatttcaac

SEQ ID NO: 26614 - DNA, 600 bp, Chicken  19866894243019_1
cgttcttctttcttcatttccagaatgagagataaacgttagtaacagctagaacaaaactgtttcctattaaatttcttgtttccacattgcagaagtccttcaggcagtaaagtaacttaaatactgtgacactgttgctaccacttacccactattatcttaacagtttcctcaatattgctgcttcaagtaacacatttccacgcagtaagtaggatctgcacatcgaacacaagaggtatgatctgcagattatgacacctcttcagtacattgtctgtcacactgtttaactgyttcaacgagagatctgattgggatcactacgtgctttcctccaagtcaaacttytgaagtaagaaagaagacagatgtgtatgtgtatacatargttgytctgaaagtaacacctcctatatattttcacagaaaygacaacakatacaaagagcacartaacactacttgatagagcaaattctcagctacaaaatgctatttttcaacacagtcacctactgcactcaaagttatctgaatgtggcttctctttcacatcactgccaccactgctgaaatgcaccacccaccacctca

SEQ ID NO: 26615 - DNA, 600 bp, Chicken  19866894243019_2
caaaactgtttcctattaaatttcttgtttccacattgcagaagtccttcaggcagtaaagtaacttaaatactgtgacactgttgctaccacttacccactattatcttaacagtttcctcaatattgctgcttcaagtaacacatttccacgcagtaagtaggatctgcacatcgaacacaagaggtatgatctgcagattatgacacctcttcagtacattgtctgtcacactgtttaactgyttcaacgagagatctgattgggatcactacgtgctttcctccaagtcaaacttytgaagtaagaaagaagacagatgtgtatgtgtatacatargttgytctgaaagtaacacctcctatatattttcacagaaaygacaacakatacaaagagcacartaacactacttgatagagcaaattctcagctacaaaatgctatttttcaacacagtcacctactgcactcaaagttatctgaatgtggcttctctttcacatcactgccaccactgctgaaatgcaccacccaccacctcactgtgctcacatccactgtttggtctccatggatgttcagcaagtgtcgatgaa

SEQ ID NO: 26616 - DNA, 600 bp, Chicken  19866894243019_3
gaagtccttcaggcagtaaagtaacttaaatactgtgacactgttgctaccacttacccactattatcttaacagtttcctcaatattgctgcttcaagtaacacatttccacgcagtaagtaggatctgcacatcgaacacaagaggtatgatctgcagattatgacacctcttcagtacattgtctgtcacactgtttaactgyttcaacgagagatctgattgggatcactacgtgctttcctccaagtcaaacttytgaagtaagaaagaagacagatgtgtatgtgtatacatargttgytctgaaagtaacacctcctatatattttcacagaaaygacaacakatacaaagagcacartaacactacttgatagagcaaattctcagctacaaaatgctatttttcaacacagtcacctactgcactcaaagttatctgaatgtggcttctctttcacatcactgccaccactgctgaaatgcaccacccaccacctcactgtgctcacatccactgtttggtctccatggatgttcagcaagtgtcgatgaatgttaatgggtgcaactttttccacatggaggaattcaat

SEQ ID NO: 26617 - DNA, 600 bp, Chicken  19866894243019_4
ccttcaggcagtaaagtaacttaaatactgtgacactgttgctaccacttacccactattatcttaacagtttcctcaatattgctgcttcaagtaacacatttccacgcagtaagtaggatctgcacatcgaacacaagaggtatgatctgcagattatgacacctcttcagtacattgtctgtcacactgtttaactgyttcaacgagagatctgattgggatcactacgtgctttcctccaagtcaaacttytgaagtaagaaagaagacagatgtgtatgtgtatacatargttgytctgaaagtaacacctcctatatattttcacagaaaygacaacakatacaaagagcacartaacactacttgatagagcaaattctcagctacaaaatgctatttttcaacacagtcacctactgcactcaaagttatctgaatgtggcttctctttcacatcactgccaccactgctgaaatgcaccacccaccacctcactgtgctcacatccactgtttggtctccatggatgttcagcaagtgtcgatgaatgttaatgggtgcaactttttccacatggaggaattcaattccac

SEQ ID NO: 26618 - DNA, 600 bp, Chicken  19866894243019_5
gttgctaccacttacccactattatcttaacagtttcctcaatattgctgcttcaagtaacacatttccacgcagtaagtaggatctgcacatcgaacacaagaggtatgatctgcagattatgacacctcttcagtacattgtctgtcacactgtttaactgyttcaacgagagatctgattgggatcactacgtgctttcctccaagtcaaacttytgaagtaagaaagaagacagatgtgtatgtgtatacatargttgytctgaaagtaacacctcctatatattttcacagaaaygacaacakatacaaagagcacartaacactacttgatagagcaaattctcagctacaaaatgctatttttcaacacagtcacctactgcactcaaagttatctgaatgtggcttctctttcacatcactgccaccactgctgaaatgcaccacccaccacctcactgtgctcacatccactgtttggtctccatggatgttcagcaagtgtcgatgaatgttaatgggtgcaactttttccacatggaggaattcaattccacacctttgcttcattcacacttccacatcagacatcat

SEQ ID NO: 26619 - DNA, 600 bp, Chicken  19866894243019_6
cacttacccactattatcttaacagtttcctcaatattgctgcttcaagtaacacatttccacgcagtaagtaggatctgcacatcgaacacaagaggtatgatctgcagattatgacacctcttcagtacattgtctgtcacactgtttaactgyttcaacgagagatctgattgggatcactacgtgctttcctccaagtcaaacttytgaagtaagaaagaagacagatgtgtatgtgtatacatargttgytctgaaagtaacacctcctatatattttcacagaaaygacaacakatacaaagagcacartaacactacttgatagagcaaattctcagctacaaaatgctatttttcaacacagtcacctactgcactcaaagttatctgaatgtggcttctctttcacatcactgccaccactgctgaaatgcaccacccaccacctcactgtgctcacatccactgtttggtctccatggatgttcagcaagtgtcgatgaatgttaatgggtgcaactttttccacatggaggaattcaattccacacctttgcttcattcacacttccacatcagacatcattctgtcag

SEQ ID NO: 26620 - DNA, 600 bp, Chicken  19866894243019_7
atcttaacagtttcctcaatattgctgcttcaagtaacacatttccacgcagtaagtaggatctgcacatcgaacacaagaggtatgatctgcagattatgacacctcttcagtacattgtctgtcacactgtttaactgyttcaacgagagatctgattgggatcactacgtgctttcctccaagtcaaacttytgaagtaagaaagaagacagatgtgtatgtgtatacatargttgytctgaaagtaacacctcctatatattttcacagaaaygacaacakatacaaagagcacartaacactacttgatagagcaaattctcagctacaaaatgctatttttcaacacagtcacctactgcactcaaagttatctgaatgtggcttctctttcacatcactgccaccactgctgaaatgcaccacccaccacctcactgtgctcacatccactgtttggtctccatggatgttcagcaagtgtcgatgaatgttaatgggtgcaactttttccacatggaggaattcaattccacacctttgcttcattcacacttccacatcagacatcattctgtcagactgtccctctgctg

SEQ ID NO: 26621 - DNA, 600 bp, Chicken  19866894243021_1
gctgattgttttcagtgaagtgttgtttaaaattaagggttgctggtattggaagctgatttttctacaggtctagagtttgtagtacatgttttgtctcccgggtgaaatagatgcagaaatgttgattattcacttgtatgaaaaaaggaaatgaaaagaagcacttgtatgcagtactaaggctggcatgttagtcatgcttccttctcccctccccctcatttctgggtactggatttaaaagaagcagccttttacctaactcttcatagtcatccctcatgcaatgaacatgcmgtttctttcagccactttctttctattttgtgtcttaaatctattttggagtcggtatgctatgttcacagaagcccgtgtactctcttgcaatggtcatgttctccaacragttggaagcagatggtttcctgtgagctttctcccagcaggacctcacttctgcttggttctttcttaccgcttcatgctttcatcatgtaattatttgcatttctgatcttgctctcttgctacgcgttataggcggaatacctgaagcggcatatgagagggcacggagctgcatcttatgataca

SEQ ID NO: 26622 - DNA, 600 bp, Chicken  19866894243021_2
agatgcagaaatgttgattattcacttgtatgaaaaaaggaaatgaaaagaagcacttgtatgcagtactaaggctggcatgttagtcatgcttccttctcccctccccctcatttctgggtactggatttaaaagaagcagccttttacctaactcttcatagtcatccctcatgcaatgaacatgcmgtttctttcagccactttctttctattttgtgtcttaaatctattttggagtcggtatgctatgttcacagaagcccgtgtactctcttgcaatggtcatgttctccaacragttggaagcagatggtttcctgtgagctttctcccagcaggacctcacttctgcttggttctttcttaccgcttcatgctttcatcatgtaattatttgcatttctgatcttgctctcttgctacgcgttataggcggaatacctgaagcggcatatgagagggcacggagctgcatcttatgatacaccatggatgagaacgtttaagaaagctaatatgctaagtagtcatgtaagataattctaagcgacatgactgggaatgccatttttatgcatctgtctctttcatgtgtac

SEQ ID NO: 26623 - DNA, 498 bp, Chicken  19866894243025_1
tccctgggctcttgttttccttgttctgtgatagtgggtttttgttgtttgtttacatgcttatttaaaatgcagttctgcaggctatttaaagcatctctgtcttaattaagaaagtatatgtctgtttctttaggcagtaagaattgattgaagtacactgttggctctctagtaccaggtactaacccatacaattcctgaaggttatggcatagtacacagtaatactgtaggtaaatgataaccacacaagctgtacgctggcttttttagaaggcaaggctaaattgtttgtgkgacaaatgctgacaccagcagtgacaaattttacttgtgaaacgttagggcgattgataactaatgagggaagacttgtgacatttgttgcccagtctgtctggtaacttaatctggactgtatcttattatgatgagagactgggaattgagtgaaatgttcttttgtaatgaggatgtgatttgggtgcatttgtt

SEQ ID NO: 26624 - DNA, 600 bp, Chicken  19866894243026_1
tgttcttagactggatcagtagaaaaaagtacttagagcatatgttattataatacttattgactgtcaggtagaaaacactgaaatttaaacatgactggggacataactcgattccattgtgaagagctgccttgaagacctgtactaaagcatcttgatagtttagaaaaacttacagaaggttttatgtttcttttcctttttgttgcccagcatttcctttcttttcctcattgttctcttttagctttttttccaagactgtacatgaagtggttctacttttacagactcttyctgcatcctattgtgcaacctactgttgttacttcagctccaaacattttcattagcgttgaaggtaggcagtttctaagtacatggaatgagctccccaggaaaacagttgagtcatcatccctggaggtatttagaagagatgtagatgtggtgcttatgaagatgatttagtggcagacacgacaatattacgttaacagttagttaacaggcctcttccaacgttaatgagtcaatgccactgttctgcttgctcattctcatagctttcttttgtctctgttcttatatacaagg

SEQ ID NO: 26625 - DNA, 600 bp, Chicken  19866894243036_1
ggttctgggcacaccatacagcacccttttagtacttaaaaggaggcctacaagaaatataggaagattctctttttaagagagtgtagctacaggacaaggtgtaatggttttaagctaaaggagggcatatttagattagctataaaggagaaatgctttactcagaaggtggtgaggcactggaacaggctaccagagaagttgtgtataccaaatccctggaagggttcagagttggatggagctctgtgcaacctggtctagtagaaagcgtccctgcatgtggcagtggagttrgaactaggtgatctttaagacctcttctaatctaacccagcatgattctatgaagatgaaattcaataagaaggtgaattgctatggggtgaaatctggcaagctggattctggaactccagattgatctacaaagaaccatgactaggtctttgtgtgaatggaatcaaaagcatttcttctctcacaaagtttaggggagaagagatccattcaggaaagcaaaaaagaccttatcatcctgctgctaaaagttttctacatgtaagggaatttcaaaatttcttctttcagttttcc

SEQ ID NO: 26626 - DNA, 600 bp, Chicken  19866894243036_2
aagaaccatgactaggtctttgtgtgaatggaatcaaaagcatttcttctctcacaaagtttaggggagaagagatccattcaggaaagcaaaaaagaccttatcatcctgctgctaaaagttttctacatgtaagggaatttcaaaatttcttctttcagttttcctggcatgagtggaagtgaatgtaatgtcaggatataatttcagtattttctaaatggacctcactgtcacaagtggctgttcctcaaactcatatggttgttttgacatttttttctttttcttccttatttwttattattattatttttttgcagacatctatgaaatgcacctatttgtaataaatataaaataagacaaggatatctgtatgatcacacttccgtgcaggaaaggtgagtatgagtaatattactttcatatatttctctctttcaggtcttttactaaaaggaagagtcttgttgtgtgtcaatagtcatcattccacctagaaactgaaaaggtactaagaaggatctaaattaagttagtcaactgattatgcatattttttctcatagttttcccactgcatgtacctcaacccaa

SEQ ID NO: 26627 - DNA, 599 bp, Chicken  19866894243037_1
  misc_feature (1)..(151): n is any nucleotide
nnnnnnnnnnnnnnnnnnnnnnnnnnnnnnnnnnnnnnnnnnnnnnnnnnnnnnnnnnnnnnnnnnnnnnnnnnnnnnnnnnnnnnnnnnnnnnnnnnnnnnnnnnnnnnnnnnnnnnnnnnnnnnnnnnnnnnnnnnnnnnnnnnnnnnnccaactcacttacatgcaggcatccctcaaagcagtgccagccttcatgaactcgggaagatcctttcagtgctgtgttattatcttgctctgtgcttgtctgacctcacccaggaggacggaccctccactgcacccccccctcagcrctcacccaaacaaaaccccatggctgatctcrttgttactcggtgtgctctcacaccaatcacgaatgttgtttcatataaattatcttcttgactctggcctggtgattttgcttggcttgctagctcgttttgcttcatcctcattttgcggtatctattaaatcagtatgcaagtaacattttctgtcatactaaaagattagctgtaagaaatagagaaacagaaaagttccttactgctgtacagatttatcatgttctgggagcatatttggcattataaaggagatcatata

SEQ ID NO: 26628 - DNA, 599 bp, Chicken  19866894243037_2
  misc_feature (1)..(119): n is any nucleotide
nnnnnnnnnnnnnnnnnnnnnnnnnnnnnnnnnnnnnnnnnnnnnnnnnnnnnnnnnnnnnnnnnnnnnnnnnnnnnnnnnnnnnnnnnnnnnnnnnnnnnnnnnnnnnnnnnnnnnnnccaactcacttacatgcaggcatccctcaaagcagtgccagccttcatgaactcgggaagatcctttcagtgctgtgttattatcttgctctgtgcttgtctgacctcacccaggaggacggaccctccactgcacccccccctcagcrctcacccaaacaaaaccccatggctgatctcrttgttactcggtgtgctctcacaccaatcacgaatgttgtttcatataaattatcttcttgactctggcctggtgattttgcttggcttgctagctcgttttgcttcatcctcattttgcggtatctattaaatcagtatgcaagtaacattttctgtcatactaaaagattagctgtaagaaatagagaaacagaaaagttccttactgctgtacagatttatcatgttctgggagcatatttggcattataaaggagatcatataaattcagaaaaatggtaatgaaatacagcttg

SEQ ID NO: 26629 - DNA, 600 bp, Chicken  19866894243040_1
ttctgctcatagcaaatagtgaaggttatgctgcaagttttcactcataaggaaacttcttccaaactgatttactctgaaacacgttttgtggacagacaccaaatctgtccatgctgctgattctggctgtaacttgaaatagagcataactcgtgtgtgtggcagatggttgggggatttgaactcaagactgatgtgctcctgcagtaaacgtggcacagcttggtagtgccggtatcaaacctggatctccagaatcataaacctctgtctgagtgagagaactgtgctcccacrtgcatctgtctgcactctgctgtcacacacctatgcataaaggcaatgcactttcagaaattcatgtggtagctccgctccgagcttggtggaggtgaagggctgagrcagtgttagagctggtgaccagcccrtgtgctgtgtccagacaggacggagctgcagaaggccatggagcacaacagcaggctggacaaggaaattttggcactgcgtgcacgggtccaaacactcgacttggaaagaaaaacgttccttgatctggtgagtgcccatcctgtcctggcttgttgtctgggt

SEQ ID NO: 26630 - DNA, 600 bp, Chicken  19866894243040_2
tgtccatgctgctgattctggctgtaacttgaaatagagcataactcgtgtgtgtggcagatggttgggggatttgaactcaagactgatgtgctcctgcagtaaacgtggcacagcttggtagtgccggtatcaaacctggatctccagaatcataaacctctgtctgagtgagagaactgtgctcccacrtgcatctgtctgcactctgctgtcacacacctatgcataaaggcaatgcactttcagaaattcatgtggtagctccgctccgagcttggtggaggtgaagggctgagrcagtgttagagctggtgaccagcccrtgtgctgtgtccagacaggacggagctgcagaaggccatggagcacaacagcaggctggacaaggaaattttggcactgcgtgcacgggtccaaacactcgacttggaaagaaaaacgttccttgatctggtgagtgcccatcctgtcctggcttgttgtctgggtcagcagtctgctgacagctggcagtcctgggcttgactcctgatgttcagctgggctcctttccctgctctgcctctgtgctccccctctctttgctatgagtctttc

SEQ ID NO: 26631 - DNA, 600 bp, Chicken  19866894243040_3
acttgaaatagagcataactcgtgtgtgtggcagatggttgggggatttgaactcaagactgatgtgctcctgcagtaaacgtggcacagcttggtagtgccggtatcaaacctggatctccagaatcataaacctctgtctgagtgagagaactgtgctcccacrtgcatctgtctgcactctgctgtcacacacctatgcataaaggcaatgcactttcagaaattcatgtggtagctccgctccgagcttggtggaggtgaagggctgagrcagtgttagagctggtgaccagcccrtgtgctgtgtccagacaggacggagctgcagaaggccatggagcacaacagcaggctggacaaggaaattttggcactgcgtgcacgggtccaaacactcgacttggaaagaaaaacgttccttgatctggtgagtgcccatcctgtcctggcttgttgtctgggtcagcagtctgctgacagctggcagtcctgggcttgactcctgatgttcagctgggctcctttccctgctctgcctctgtgctccccctctctttgctatgagtctttccagaactgcagttctgatatcgtgtg

SEQ ID NO: 26632 - DNA, 599 bp, Chicken  19866894243042_1
  misc_feature (1)..(223): n is any nucleotide
nnnnnnnnnnnnnnnnnnnnnnnnnnnnnnnnnnnnnnnnnnnnnnnnnnnnnnnnnnnnnnnnnnnnnnnnnnnnnnnnnnnnnnnnnnnnnnnnnnnnnnnnnnnnnnnnnnnnnnnnnnnnnnnnnnnnnnnnnnnnnnnnnnnnnnnnnnnnnnnnnnnnnnnnnnnnnnnnnnnnnnnnnnnnnnnnnnnnnnnnnnnnnnnnnnnnnnnnnnnnnnncaaaagccaaaaatctataaataaaagtcaatctgcattttgggaattataagataatatggcaattaaaaaaaaamcaaaaaaacagtaattgaaattaatcaacaaattgaaaacactgacacaaacgttcaccagaacataactgagttgtacttggtcaagattgtgaccaggtagtaaggaatgaggaaagtaaagacagcagaaactgcatttatgcaaggaaagggaatagggttgcactttgccatgaggataggaagaagcagatggacaacacaagatactggaggcttgataagacagacacccaacattatatgttgagtgaaatttccttctactagcaacattatagaggttctcttctaaa

SEQ ID NO: 26633 - DNA, 600 bp, Chicken  19866894243047_1
aatgttgacaaacacggcaccttccataaaaagtcagcgtctcctatgcacgttcaccaccacagcacatctttcaagcttccttagcaacaccttaagttcggaatataaagtcaacttgcttctacggtcccctttctgcatttcattcccttcgcagggagtcttgcctgaggacacggcttcacttgcacacatccaaagctggcactgctttcgtgagaactcctctgtcctctggttaaagagtggcagtctggctgggttagttctaacccagatagctgagctggtcccacygcatggcaggatcagcattcatgctgtttgttcacacaatagcagtgtgcagagatgagaatggcagcactagctaaaatgctctggcccagaacacgagaaactgcatccccaggcttcagtttccagggaagtcaccctccactactcacagtcactcaccccaaggtgctgctgtttgtctcagcaatacttcggggaaagacaaaggaaccacatgctgtggggtcctccgcaccacacgacgggtaaatctacgcgcggccagtctgagtcttaatgttctttttgattcactaa

SEQ ID NO: 26634 - DNA, 600 bp, Chicken  19866894243049_1
atccagccatggttaagtcaagcctctctccaaaagaagaaagctggatattgatcagcagagcccagcatgctgaggaactgcactaaaatactgcacccgaagtagtctgtgcactctttcctctcctttgactcaaatattaattcttctaatccaaaagtgtgctttcaagctccccacaagcccaagggtggtatctcgttttgcgacacatgagcccaattcccttgccatgggtttttggcactcccaacacaacgtcacctgaagtggcagactccaaaacgctcagcgacraattccaggcttccctcagcacattgccagatgcctgatgtctccaaatggctttacagggaagaggcaaccatgcacaaatacgcgttatatcggtaactgcgtttggccagaccactcctctttggaggtcagactgaatgagccaagacttctctgacagccacaaacacaggaatctaatgcaccgaatatgcacagcatttaaaaacagaagaagatcagcaaaaccataacagcttctctagaaaaaacaaacctcactgtcacaatgagatgcaatctcatcctgcatctact

SEQ ID NO: 26635 - DNA, 600 bp, Chicken  19866894243053_1
tcttgctaagaagctaagagactgcaatataatgttttgcaactcaaaggagaaaaagaaagcttagaaccatcaacagtggctattttcactagagaattttgcccttgacagatatatactgcagggtcgggtctctcaggttttcgggaaggatgagagatggtgaggttttggaaaaattctggattttgagtaagagtacaagaaatcagcctagcattccagctggtcccacagcactcaataatgtgttgtagaaaaaaagtacgtgcatactttacgctacaacttactgasatcactgtcacattaagcaccctgtgaaccctattcctgaagatgtaatctctgctaaagaagaaaatgtaagcatcctgcagcaattaatttcacagcacttatctgccacagctctaagtaaaattcttgtgcttcgcagaagagaacacctttcttggtttgggatacacagcaacgaaactaaacacgggaattacctacaagcccactcagattccaataagcatactcatttcaggaatatcaacaaatttgttaagacttcttgagaaacaacacagcattttcaatttctaa

SEQ ID NO: 26636 - DNA, 600 bp, Chicken  19866894243057_1
tgggcgctgcgtgcatagctgctgagctcggagttactggctttgccttgcgagcgaccgcttcgtggctgttaaactcctgggtctccggttagctaatagctctgtgttgattttaggttttgactgagggtggaccgctttcaaaggcactaattcatcaactattaaagtgaaaatctggagggtgtgggagttggttccctggtaaggagggatggcacgggtagaagctgggttgacaattccagtcagtcagttctaaacttctagtaattaatggtgaaagtgttgggctcrtgctttgctttgtatgcaygatatgagaggaaagaaagtatgtactttccttctaatgtgcttaatggaaatcttccaatcttgttcttggatgtttttctctgtagctcagacagtttgttttgtagaaacttcacctttgcttcctttgctttttgctctggtatttgtctcttgctcactctatcaacctgagttctgtggataacagccatggggtgctcctgcttgtcaggcaccggctgatacccacttgattggtgccagtccctgtaactgctgcagagccatctcagcggg

SEQ ID NO: 26637 - DNA, 600 bp, Chicken  19866894243057_2
tgctgagctcggagttactggctttgccttgcgagcgaccgcttcgtggctgttaaactcctgggtctccggttagctaatagctctgtgttgattttaggttttgactgagggtggaccgctttcaaaggcactaattcatcaactattaaagtgaaaatctggagggtgtgggagttggttccctggtaaggagggatggcacgggtagaagctgggttgacaattccagtcagtcagttctaaacttctagtaattaatggtgaaagtgttgggctcrtgctttgctttgtatgcaygatatgagaggaaagaaagtatgtactttccttctaatgtgcttaatggaaatcttccaatcttgttcttggatgtttttctctgtagctcagacagtttgttttgtagaaacttcacctttgcttcctttgctttttgctctggtatttgtctcttgctcactctatcaacctgagttctgtggataacagccatggggtgctcctgcttgtcaggcaccggctgatacccacttgattggtgccagtccctgtaactgctgcagagccatctcagcggggagaaagattcgtgtgcag

SEQ ID NO: 26638 - DNA, 600 bp, Chicken  19866894243064_1
ggtattgttgccagatttggaaaatatttaaatgagatgtttcctttataaaaatatgtttagaattggtgtttccctgctgagtattttttacagctacaatactgcttacagctagcatttctgctatttaacttctgctattcttattttccgtgtgatgtctaagacagatttagattgcaagatactcctgcctggctcttcaccctctctgagtagtggctactcaagtaattcaagtagttctagcaagccacccaggtctacatcagcactgcagagagaaagtctctgtcytgtgtttctrtgagagagcagatagcaatgggagcatctactgtcctacatctccatgtactccaccatgtagacctatttctagagtagggcagcccaaagtgaaacatgtcagctaggatgtagccctgaagctggagaatttcaaactgttaggctggaaattcagttccctttaatgtgtataactaagagcttgggaggatattctgtgaaagttacttttaaagatggttatgaatggctgatgtgagaaatcagacccaataaaaagaagagggaaagttgaaaatagaagtt

SEQ ID NO: 26639 - DNA, 600 bp, Chicken  19866894243064_2
gtattgttgccagatttggaaaatatttaaatgagatgtttcctttataaaaatatgtttagaattggtgtttccctgctgagtattttttacagctacaatactgcttacagctagcatttctgctatttaacttctgctattcttattttccgtgtgatgtctaagacagatttagattgcaagatactcctgcctggctcttcaccctctctgagtagtggctactcaagtaattcaagtagttctagcaagccacccaggtctacatcagcactgcagagagaaagtctctgtcaygtgtttctrtgagagagcagatagcaatgggagcatctactgtcctacatctccatgtactccaccatgtagacctatttctagagtagggcagcccaaagtgaaacatgtcagctaggatgtagccctgaagctggagaatttcaaactgttaggctggaaattcagttccctttaatgtgtataactaagagcttgggaggatattctgtgaaagttacttttaaagatggttatgaatggctgatgtgagaaatcagacccaataaaaagaagagggaaagttgaaaatagaagtta

SEQ ID NO: 26640 - DNA, 600 bp, Chicken  19866894243064_3
ccagatttggaaaatatttaaatgagatgtttcctttataaaaatatgtttagaattggtgtttccctgctgagtattttttacagctacaatactgcttacagctagcatttctgctatttaacttctgctattcttattttccgtgtgatgtctaagacagatttagattgcaagatactcctgcctggctcttcaccctctctgagtagtggctactcaagtaattcaagtagttctagcaagccacccaggtctacatcagcactgcagagagaaagtctctgtcatgtgtttctrtgagagagcagatagcaatgggagcatctactgtcctacatctccatgtactccaccatgtagacctatttctagagtagggcagcccaaagtgaaacatgtcagctaggatgtagccctgaagctggagaatttcaaactgttaggctggaaattcagttccctttaatgtgtataactaagagcttgggaggatattctgtgaaagttacttttaaagatggttatgaatggctgatgtgagaaatcagacccaataaaaagaagagggaaagttgaaaatagaagttaaggatactt

SEQ ID NO: 26641 - DNA, 600 bp, Chicken  19866894243064_4
gcagaagctggaggtgtacaggatgagcatcatccttcaacaagtaaagaggaggggacgggatgcacatggagttgaattgtaggtgtgtttctctgagcgagagcagagctggtttcttctcactggtgacaggtgagagtacaaagggaaatggccttaagttgcaccaggataagtttaggttggatatcaggtaatacttctttacagaaggagttgttaagcactggaataggctccccagggagatggttgagtcaccatccccggatatgtttaaaaactatttggatgtgrtgctcagggacataatttagtggagtattgtcagagttagggtagtatggttaggttgtggttggaactgatggtctttttgaaggtcttttccaacatgagcagttctatgattctatgattctatgagctcttcaggcagtgagtagagaagagcactcacctgcatactggaattttctgatttgatcacattttcatccttcttttcttcatacatacttatatgctagctcagagttgcacattggattgtaacacaatgttgtaggttttcactgttggattttgcagttcact

SEQ ID NO: 26642 - DNA, 599 bp, Chicken  19866894243077_1
  misc_feature (1)..(85): n is any nucleotide
nnnnnnnnnnnnnnnnnnnnnnnnnnnnnnnnnnnnnnnnnnnnnnnnnnnnnnnnnnnnnnnnnnnnnnnnnnnnnnnnnnnnngaacaggaggctaggattgcaatttgcagctgggagtaattggaggcagctgagaaaagggtgagggcattttccctattcctctatctcaatgggggtaagcctgaggcaaaggagctcttgagctttgtagatgaggaagaaagcaaagcatttttgtttagagaagaaataatagagagttcttttgtgatcaggagaaaagttgtgtcttrgggtattattattattgttaaccttttcttccactttactgaagagacaaaggctctcactactctggaaaggtaagttcttaaaagcatacactgaagatrtagtttgctcatgaagggtaagagcagcctgtggcttccccttgtagcacagcctgagccatgctggagagaggrcagtttcctgtaggaaatcacggcattactttcagctacaaaaataattattgctgttgcatgtgagctgtactcacaaaaatctgtgattttcctcatctaaatgagcaygtatcattgga

SEQ ID NO: 26643 - DNA, 600 bp, Chicken  19866894243077_2
tgcaatttgcagctgggagtaattggaggcagctgagaaaagggtgagggcattttccctattcctctatctcaatgggggtaagcctgaggcaaaggagctcttgagctttgtagatgaggaagaaagcaaagcatttttgtttagagaagaaataatagagagttcttttgtgatcaggagaaaagttgtgtcttrgggtattattattattgttaaccttttcttccactttactgaagagacaaaggctctcactactctggaaaggtaagttcttaaaagcatacactgaagatrtagtttgctcatgaagggtaagagcagcctgtggcttccccttgtagcacagcctgagccatgctggagagaggrcagtttcctgtaggaaatcacggcattactttcagctacaaaaataattattgctgttgcatgtgagctgtactcacaaaaatctgtgattttcctcatctaaatgagcaygtatcattggagactcctatagctgctgcccccatggtgggaggcagatgggaagcatctgctccmcctgggttgggacactgtagaagccaaacacgtgaaggtatctcaggc

SEQ ID NO: 26644 - DNA, 600 bp, Chicken  19866894243077_3
tgggggtaagcctgaggcaaaggagctcttgagctttgtagatgaggaagaaagcaaagcatttttgtttagagaagaaataatagagagttcttttgtgatcaggagaaaagttgtgtcttrgggtattattattattgttaaccttttcttccactttactgaagagacaaaggctctcactactctggaaaggtaagttcttaaaagcatacactgaagatrtagtttgctcatgaagggtaagagcagcctgtggcttccccttgtagcacagcctgagccatgctggagagaggrcagtttcctgtaggaaatcacggcattactttcagctacaaaaataattattgctgttgcatgtgagctgtactcacaaaaatctgtgattttcctcatctaaatgagcaygtatcattggagactcctatagctgctgcccccatggtgggaggcagatgggaagcatctgctccmcctgggttgggacactgtagaagccaaacacgtgaaggtatctcaggccaagtgtgtaaaacccacttatttcacctgcatggatctggtggccattcacagctaactagtgtctttcataac

SEQ ID NO: 26645 - DNA, 600 bp, Chicken  19866894243077_4
agttgtgtcttrgggtattattattattgttaaccttttcttccactttactgaagagacaaaggctctcactactctggaaaggtaagttcttaaaagcatacactgaagatrtagtttgctcatgaagggtaagagcagcctgtggcttccccttgtagcacagcctgagccatgctggagagaggrcagtttcctgtaggaaatcacggcattactttcagctacaaaaataattattgctgttgcatgtgagctgtactcacaaaaatctgtgattttcctcatctaaatgagcaygtatcattggagactcctatagctgctgcccccatggtgggaggcagatgggaagcatctgctccmcctgggttgggacactgtagaagccaaacacgtgaaggtatctcaggccaagtgtgtaaaacccacttatttcacctgcatggatctggtggccattcacagctaactagtgtctttcataacattttctgcctgacacctgtgataagggtttgcttttctgaattctggcatctgatttaattcttttaacaatttgactcctaagtactttaatctagtggcatagaacta

SEQ ID NO: 26646 - DNA, 600 bp, Chicken  19866894243077_5
tctcactactctggaaaggtaagttcttaaaagcatacactgaagatrtagtttgctcatgaagggtaagagcagcctgtggcttccccttgtagcacagcctgagccatgctggagagaggrcagtttcctgtaggaaatcacggcattactttcagctacaaaaataattattgctgttgcatgtgagctgtactcacaaaaatctgtgattttcctcatctaaatgagcaygtatcattggagactcctatagctgctgcccccatggtgggaggcagatgggaagcatctgctccmcctgggttgggacactgtagaagccaaacacgtgaaggtatctcaggccaagtgtgtaaaacccacttatttcacctgcatggatctggtggccattcacagctaactagtgtctttcataacattttctgcctgacacctgtgataagggtttgcttttctgaattctggcatctgatttaattcttttaacaatttgactcctaagtactttaatctagtggcatagaactatcaaatctaataaaactgagtaaattaggtaatatcagctctcagtcagatgctcaaaattttctg

SEQ ID NO: 26647 - DNA, 600 bp, Chicken  19866894243077_6
ctcctaagtactttaatctagtggcatagaactatcaaatctaataaaactgagtaaattaggtaatatcagctctcagtcagatgctcaaaattttctgagaacgcttccctttacactcagttgtaaaactgaaataacctacttcagcacattagtgtctcaaggaatgaaactaacttaagcagaagaaaaatcctgtctgctacttgttctggcattttcctatgatttctgagcacaacaggctcaccactggccatctccccttgtctcctctctgctttctcatcagccccrtttcaaggttttctttcagttctcagcccttgaaaggctggcatagtctttcctttataagaaatgtggttttgtttcttggtaaatattttgcttggacgtaacccatgcactctggagcattaatgtttccttgtattgtttttcttctaacatgtttttgaaattagtaacttttggtattgtacctctcattacccatgacgtctctccattctctatgtctgtctcataatgaagatctgaccctttgtgatgccctttctaactttttactttctgtatttgctaaagatgtaa

SEQ ID NO: 26648 - DNA, 600 bp, Chicken  19866894243077_7
aatggacaagtcttgaactgccaagataaaaaggttaaaaaaaaaaaaagtaaattccactgactataatcacatgagaaataatcaaattggtattgggaaaactttctgactggtcatatgtgttaaggtattacttatgcaactgtgtttcctttgtacatatatttcatttatttagaaaaaaaatatatgtatatatttcccctttttcccctttttaacactctttggttcagagtttccatttatgaaagtgcatcaagcactaaggacaatccagtacagattggacaccaycatggagctgagcttggcatctatctgaatcaccacaaattgagggatagataatgtgctgccactctctacagagatgggaagaagatagaagacttgctatgaaatctagttactatttttaaccaaaaattttgaaacacatcaagtgggcaaaaattattctatgattcctaaaatatacttgaccatggaggtcatgctgttcaacatgtgcatgtttaacaaggataagtttgactggtccttcagacttagcctgttttggctgtagttcatttaaatcagattaatatgtac

SEQ ID NO: 26649 - DNA, 600 bp, Chicken  19866894243079_1
ttaggctaggaaaaccagacatcatcaccaacagcgatcaaaacaatatttttgctatgttcattattattccattttcagcagaattaccatttcttgaaactgatttccagtgaaagtgaagaagactttctctgaaactacttttgcctattaacagagcagcccaggctgtgggctgagccagctggcagcgacacaggcagactgcttcctgctttccctccttcctcctgaaaggattccaaacaagatgtgatcaaggcctgggaatcctctgttgctggggcaaggccacamggcaccccttctcctgagcaggagacacagagctgggcacgctgaccacagagacttcccactgcagtcttcattcaacacgggtactacaggtgacttgcctttgatgtgctatacaaaaccacatgaagcatagatacaagcttttaactaatattattagtaccatggcatctaatgccaaattttcattagtatacattagaatgtcttttttttttcctgtgtaaacacagaaaacaaagtatgacaacatctgagtttacaagctgttcccagggcaaggccaaactgctcaca

SEQ ID NO: 26650 - DNA, 536 bp, Chicken  19866894243083_1
taggtagagttgactgttgtccaagtactaactagtggcagatatggctgatgctggcaaaatagagcgctgtgaaaacgatagttcaggaaaacaactcaaaaatgccaccctttagtcatacgaccaacatccacctctgatatcatggatcaatctaataacgtaggcattacttttggaacagccttcatagtttgtattgcctttatgaaagcaggtactaattccattaggtagtgtaaagcttaagtactttgaagaaaacaacaacaaaaaagtcatttatatttaaaagcraatgtctgctcttcctgtaaactgaattttaaaagccccaaaagatartaaattgtttgaaaactaaaatagtttgattcttcaattggataaattattgtatgacaaagcaagacttaaattaactgcgtattactcaaaaactcattgacagaaggcagtgacctttccattacccaaaatgttgtgctgtttattttagacagtctgtttaattctcctttgctttcattttg

SEQ ID NO: 26651 - DNA, 488 bp, Chicken  19866894243083_2
tgatgctggcaaaatagagcgctgtgaaaacgatagttcaggaaaacaactcaaaaatgccaccctttagtcatacgaccaacatccacctctgatatcatggatcaatctaataacgtaggcattacttttggaacagccttcatagtttgtattgcctttatgaaagcaggtactaattccattaggtagtgtaaagcttaagtactttgaagaaaacaacaacaaaaaagtcatttatatttaaaagcraatgtctgctcttcctgtaaactgaattttaaaagccccaaaagatartaaattgtttgaaaactaaaatagtttgattcttcaattggataaattattgtatgacaaagcaagacttaaattaactgcgtattactcaaaaactcattgacagaaggcagtgacctttccattacccaaaatgttgtgctgtttattttagacagtctgtttaattctcctttgctttcattttg

SEQ ID NO: 26652 - DNA, 600 bp, Chicken  19866894243084_1
tggacactgaggatgaactctcggacatacaggtcggattcggtcccactggaagtgcgagactggttagcttctacattcacaagggaaatgggaatagtgaagcggagacctgaagaaaagcccaaatttcgaagcattgtgcatgctgtacaggctgggatttttgtagaaaggtgagagctctgttttcttactgtggcaagtattatatttaactgcagagtctattgtaaatggtgagatgagcctgaataaaatctttgagacaggctttaggattcaaattctgtaatcttygtatgtttctgtacagaaacccagacaaaacctctacatttgtaatgaaatctcctggaatttggaaaattttgagaatgsattttaaagcttggaatcttctayatgaagatgtgtgccaaatattgcagaaacataaaaaataatccaccatcagagggttttttctcataagttcataaaaatgcttatgtcatctttgagatcagatcctcaagtagcctggtattattttcatggatcatgaatgacaactaaacaaaacaagaaattgttacaatactttttaatgaaatactc

SEQ ID NO: 26653 - DNA, 600 bp, Chicken  19866894243084_2
acaagggaaatgggaatagtgaagcggagacctgaagaaaagcccaaatttcgaagcattgtgcatgctgtacaggctgggatttttgtagaaaggtgagagctctgttttcttactgtggcaagtattatatttaactgcagagtctattgtaaatggtgagatgagcctgaataaaatctttgagacaggctttaggattcaaattctgtaatcttygtatgtttctgtacagaaacccagacaaaacctctacatttgtaatgaaatctcctggaatttggaaaattttgagaatgsattttaaagcttggaatcttctayatgaagatgtgtgccaaatattgcagaaacataaaaaataatccaccatcagagggttttttctcataagttcataaaaatgcttatgtcatctttgagatcagatcctcaagtagcctggtattattttcatggatcatgaatgacaactaaacaaaacaagaaattgttacaatactttttaatgaaatactcttactgaatattttatttgttcttttaggatgtaccgaagaacttctagcatggttggtttggcttacccggcagaagtga

SEQ ID NO: 26654 - DNA, 600 bp, Chicken  19866894243084_3
cggagacctgaagaaaagcccaaatttcgaagcattgtgcatgctgtacaggctgggatttttgtagaaaggtgagagctctgttttcttactgtggcaagtattatatttaactgcagagtctattgtaaatggtgagatgagcctgaataaaatctttgagacaggctttaggattcaaattctgtaatcttygtatgtttctgtacagaaacccagacaaaacctctacatttgtaatgaaatctcctggaatttggaaaattttgagaatgsattttaaagcttggaatcttctayatgaagatgtgtgccaaatattgcagaaacataaaaaataatccaccatcagagggttttttctcataagttcataaaaatgcttatgtcatctttgagatcagatcctcaagtagcctggtattattttcatggatcatgaatgacaactaaacaaaacaagaaattgttacaatactttttaatgaaatactcttactgaatattttatttgttcttttaggatgtaccgaagaacttctagcatggttggtttggcttacccggcagaagtgattgtaacatttaaggtgaaataac

SEQ ID NO: 26655 - DNA, 600 bp, Chicken  19866894243087_1
cagtcatcccacccagaacatagagaaataccataccacaaacactaatacataaacactgacaaaacttttacagacacacaaaaatcacagactgagtcagcagggtcactagtccagctaagtcaacagttacggtataaccagcttaacataaccagtatagtaatactggttatattaaatggacagaaatctgtgtccttcaaacgtactccataaaagaatattgatgtctttagggtttatggtctatgggaccatttatagaacttactgttgaaaagaaaaggtgttaayctcttgttttataattacagtacaggaaaaaaagataaatgcacgacctgaggaagcaaatgctatcaataaaatataaaataatttattcaagattaaaagacccttgcctcaaaacttctgaaaagagcctatatattttcatgttattgatctcagaatttcctactgtttcaattttcctttcagagtttaagatcttcatctctaatgtttacaaaagatgaacactattccttctcacaaatgtctgattagaccttgagtgtttaatcacaccagaagtactggaagtgttaa

SEQ ID NO: 26656 - DNA, 599 bp, Chicken  19866894243088_1
  misc_feature (1)..(21): n is any nucleotide
nnnnnnnnnnnnnnnnnnnnnagctattatagctgtactctgtactggggtatgttatccattaggcaacaaacagcttttcccagtcacacataaggaagtgccaacctgtccccagtgcctctacaaatgtttctatgggatctcacagttataatgcacaacgcttgccaagtgcacccaagtatcctgaaaagtagctacaacaatgaaagaatatgttagataagtcaaagtcagctgtcatagcaaacatcaggaatgccgcactgcataatggtcacagcagagtcttagccraaatcctctgtggtaattacagaaaaaaatataaaacagaagtagacttaaatattgatttgtatctcataggcatcatcacaaagatttaacattctggaaaatgccagaaggcctgagatcaacatctattcataaagctctgcctccagcttggacatcttaaaagagggcaaacatatgctatgtcagactgtgctatagttctctgatgagtgtgtcactcataaactccttaaatgtcattaacttatataaatgacctgcataattcaggttcgatacaattcagatataat

SEQ ID NO: 26657 - DNA, 600 bp, Chicken  19866894243088_2
ctctgtggtaattacagaaaaaaatataaaacagaagtagacttaaatattgatttgtatctcataggcatcatcacaaagatttaacattctggaaaatgccagaaggcctgagatcaacatctattcataaagctctgcctccagcttggacatcttaaaagagggcaaacatatgctatgtcagactgtgctatagttctctgatgagtgtgtcactcataaactccttaaatgtcattaacttatataaatgacctgcataattcaggttcgatacaattcagatataattcaatwtaaatatagtttccctatacagaatataataactcataactaaagtttagcttccaaaacatattctagttttattttgaggatttatatacggggaatacaaaatgtcctcttaatttgtaacataattgtgttaagaataaggaccttagtyatatttaagcgtgtctgtcaaatctgttttcatggattatcattgtatttttcacaagaatgaagtattctcgatatttttgttctcattatgcaaaggtttattaaaaacactggaaatcctactggtaaacagtcttaacttat

SEQ ID NO: 26658 - DNA, 600 bp, Chicken  19866894243088_3
atcttaaaagagggcaaacatatgctatgtcagactgtgctatagttctctgatgagtgtgtcactcataaactccttaaatgtcattaacttatataaatgacctgcataattcaggttcgatacaattcagatataattcaatwtaaatatagtttccctatacagaatataataactcataactaaagtttagcttccaaaacatattctagttttattttgaggatttatatacggggaatacaaaatgtcctcttaatttgtaacataattgtgttaagaataaggaccttagtyatatttaagcgtgtctgtcaaatctgttttcatggattatcattgtatttttcacaagaatgaagtattctcgatatttttgttctcattatgcaaaggtttattaaaaacactggaaatcctactggtaaacagtcttaacttatgtgaatctgttgacttgttttcaccttttgcctatgatgacgttacagaaatacataatctttaccaacaccctaactttggaagtaccagagcaaatctcttagcattaacagcacttgattcaatgtctcctgtacgagtggaagaactgaa

SEQ ID NO: 26659 - DNA, 600 bp, Chicken  19866894243093_1
ttgctctcctctgagaaacacaaattggtattttattcctctgctgcatctgtgacatgagaaaggagattccaaaacagagtggactctgatttcaggaaaatcttgaggcataagtattctaaacaatgtatttctacaccgtatacatcttcataaatatatacattgtagaaatctatatttatacattatatatgcaggaaaatctaacaaaatgcttgaaatgtttccagctgcagtatagtctatctggccttaaaatatttagcacaccatactcagttccttttgtacttygcacacttcatcagtgcatcgaggcatgaaagatgaagcagctctatgctcagcaagctctggagaagcaaacagggatggtagcagggatttagtgggttgtggggttcagctgcaaacaggatgggcaatagtatgtcctagcttcttgacctgtccttgtatttgtgaatttactgacctgcagctcaggtgttaagatgctttccgcttattttagcaaggcaagacagaattttagtatgtgaaaagaacagctttgtagggaacaacataacttctccracaagatatacacca

SEQ ID NO: 26660 - DNA, 369 bp, Chicken  19866894243093_2
ttccttttgtacttygcacacttcatcagtgcatcgaggcatgaaagatgaagcagctctatgctcagcaagctctggagaagcaaacagggatggtagcagggatttagtgggttgtggggttcagctgcaaacaggatgggcaatagtatgtcctagcttcttgacctgtccttgtatttgtgaatttactgacctgcagctcaggtgttaagatgctttccgcttattttagcaaggcaagacagaattttagtatgtgaaaagaacagctttgtagggaacaacataacttctccracaagatatacaccagcttccttaacatttaaaatgcctaaaaataaactaaggcaatagaaattctgt

SEQ ID NO: 26661 - DNA, 599 bp, Chicken  19866894243095_1
  misc_feature (1)..(31): n is any nucleotide
nnnnnnnnnnnnnnnnnnnnnnnnnnnnnnnctggcccgcttcttttgatgcagcctaggatacagttggctttctggactgcgaaggcacatgttcaacttcctatccaccagtacctccaggtctcttttggcagggctgcactcaatcccttcatctcccggcttgtactggtaatggaggttgactcaatccagatggaagatcttgcatttggatttattgaacctcatcaactcaggttcaaccccactgcctaggtccttcggtatggcatcactgcacaccttagtgtcatyagcagacttgctgagggtgcactccaccccactgtcagtgtcactgattaagatattaaagaatatcagccccaacagtgacccctgggggacaccactcatcactgatctccatccggacattgagcaattgaccaccactcttaggacttgatcctgcagccagttctttgcctattgaacaggctgcccaaaagatccatatctttccaatttggagagaaggatgttgtggagtacaatgtcaaaggcctcactgaaatccagatagatggcattaatggttattcctttgtcca

SEQ ID NO: 26662 - DNA, 600 bp, Chicken  19866894243095_2
gccctggcacagaggtgacactgacaggtaggtagtttccgtggtcatcctttttaccatttctaagaatgggtgtgatgttgtcctttttttccagtagcaagggacttcacctgtttgccatgactttttaaatcataaagatgtggcttcatggccacatcagccagttctgttaggactcagagatgcatcttattgggacccatggacttgtggatgttcaggttccttggctggtcacgaacctgatattcacttacagtggggggggacattgcttccccaatgcccttctgycaaaccaaatgtttgagggctgtgttgtgagcagttatcagagaagactgagscagaaaagtcattaagtacctcagccttctccttgtctgttgttaatagcctgtctgtgtcactcactagtgagtgtataccctcctagacatttcttttctttttgagttacctgtagaagccatttttgctcttttttttgcatccctagccatgttcagttcaagctggctatttaacaaactgctagaaaacagtgtaacaataatactctaaataacagctaaattgactttcattggctaa

SEQ ID NO: 26663 - DNA, 600 bp, Chicken  19866894243095_3
ttaccatttctaagaatgggtgtgatgttgtcctttttttccagtagcaagggacttcacctgtttgccatgactttttaaatcataaagatgtggcttcatggccacatcagccagttctgttaggactcagagatgcatcttattgggacccatggacttgtggatgttcaggttccttggctggtcacgaacctgatattcacttacagtggggggggacattgcttccccaatgcccttctgycaaaccaaatgtttgagggctgtgttgtgagcagttatcagagaagactgagscagaaaagtcattaagtacctcagccttctccttgtctgttgttaatagcctgtctgtgtcactcactagtgagtgtataccctcctagacatttcttttctttttgagttacctgtagaagccatttttgctcttttttttgcatccctagccatgttcagttcaagctggctatttaacaaactgctagaaaacagtgtaacaataatactctaaataacagctaaattgactttcattggctaatgtcacattaattttcctttggaaaatgtcttctatacatcagttacttattt

SEQ ID NO: 26664 - DNA, 600 bp, Chicken  19866894243095_4
tcagttcaagctggctatttaacaaactgctagaaaacagtgtaacaataatactctaaataacagctaaattgactttcattggctaatgtcacattaattttcctttggaaaatgtcttctatacatcagttacttatttaatgcacataacattccccagttcagattacacttcatatactggagagttcccatgatgtagcattttagctaagaaggtatttatgactccttcagctccaaagtaggtcaataattgagtaaggcggcaattaaactggagctttcaaattgccytgccacttctgaggatgtatttgctgtaagcaattacagtcatcacagattacggttttcacttttcacgggtaggtacaatactggtgttttgagaaggtagtttctgcatatcaaatgaaaaatattccccaaataatttttctctcatcaggcattaaggaagctgaaagaaattcacatccttgtcaaacaccccaaaatttgcttttacaaataaaaatcttttaaaaatttgtctgttgaagaacagaaaataatgcataacatgacttacattggagtcttctcttaatattt

SEQ ID NO: 26665 - DNA, 599 bp, Chicken  19866894243099_1
  misc_feature (1)..(235): n is any nucleotide
nnnnnnnnnnnnnnnnnnnnnnnnnnnnnnnnnnnnnnnnnnnnnnnnnnnnnnnnnnnnnnnnnnnnnnnnnnnnnnnnnnnnnnnnnnnnnnnnnnnnnnnnnnnnnnnnnnnnnnnnnnnnnnnnnnnnnnnnnnnnnnnnnnnnnnnnnnnnnnnnnnnnnnnnnnnnnnnnnnnnnnnnnnnnnnnnnnnnnnnnnnnnnnnnnnnnnnnnnnnnnnnnnnnnnnnnnnnacccaccccccccctgcaccaagttaagcactcaatcttatgttttcccaccacccatccaattytttcgtatttccttctgacaacccaccagtctcctgctacctcaaaggattttccagctagactggctacagagtggtgttcctgtttttcttcactcacatactctttttctgtgcccttgggtcccagcaacaggtcaagctctcaaaatatggaacatgacactatttgctgttcatgcactcagtctctgagcagcccagggaacaaatgctgacttgcctgacctggagagtgaaaaatgaagatggatcaattaagatagctagacagcttgtgatgcttatcaataaaatac

SEQ ID NO: 26666 - DNA, 600 bp, Chicken  19866894243099_2
agatctcttcttgagtaccttcaaataacagtcaagtaagaatcttttacatttctcttacatgtttacttcttaaaaaacagggacctactagctcctaaaagatgtttagacacttgattcgtgtactttgtccactgtttcttgttaagaagaaagacaggaattgtttttcttgttctctatttcaaacagtgtcaacctctgaatgtatcacagttctgaagttatgaattatctgggggatttagttacatttccctttcttcttcttgtgaacttcaaaaattcctatagggrccrgagtgatgttgaccctaacctctatgaggtatawtttacttcactaatttcacaaagaataggtttgctgaatgaagtctactgccgttcatgtctggtatccttctatgwgaacttcctgggaagaggtctggcaatgaggaaagactgtgctccagtgaagtcagaaattttcttacragtttctgaattattttcaaaaatgtacattttcaagtgctttcacccactctagggatttctagacagaatgagcagtttgagaagctctttcacattttctctgatctcccagta

SEQ ID NO: 26667 - DNA, 600 bp, Chicken  19866894243099_3
tctcttcttgagtaccttcaaataacagtcaagtaagaatcttttacatttctcttacatgtttacttcttaaaaaacagggacctactagctcctaaaagatgtttagacacttgattcgtgtactttgtccactgtttcttgttaagaagaaagacaggaattgtttttcttgttctctatttcaaacagtgtcaacctctgaatgtatcacagttctgaagttatgaattatctgggggatttagttacatttccctttcttcttcttgtgaacttcaaaaattcctatagggrccrgagtgatgttgaccctaacctctatgaggtatawtttacttcactaatttcacaaagaataggtttgctgaatgaagtctactgccgttcatgtctggtatccttctatgwgaacttcctgggaagaggtctggcaatgaggaaagactgtgctccagtgaagtcagaaattttcttacragtttctgaattattttcaaaaatgtacattttcaagtgctttcacccactctagggatttctagacagaatgagcagtttgagaagctctttcacattttctctgatctcccagtaatg

SEQ ID NO: 26668 - DNA, 600 bp, Chicken  19866894243099_4
aagaatcttttacatttctcttacatgtttacttcttaaaaaacagggacctactagctcctaaaagatgtttagacacttgattcgtgtactttgtccactgtttcttgttaagaagaaagacaggaattgtttttcttgttctctatttcaaacagtgtcaacctctgaatgtatcacagttctgaagttatgaattatctgggggatttagttacatttccctttcttcttcttgtgaacttcaaaaattcctatagggrccrgagtgatgttgaccctaacctctatgaggtatawtttacttcactaatttcacaaagaataggtttgctgaatgaagtctactgccgttcatgtctggtatccttctatgwgaacttcctgggaagaggtctggcaatgaggaaagactgtgctccagtgaagtcagaaattttcttacragtttctgaattattttcaaaaatgtacattttcaagtgctttcacccactctagggatttctagacagaatgagcagtttgagaagctctttcacattttctctgatctcccagtaatggaggaagatattatcagaggtagatggtttccat

SEQ ID NO: 26669 - DNA, 600 bp, Chicken  19866894243099_5
acttgattcgtgtactttgtccactgtttcttgttaagaagaaagacaggaattgtttttcttgttctctatttcaaacagtgtcaacctctgaatgtatcacagttctgaagttatgaattatctgggggatttagttacatttccctttcttcttcttgtgaacttcaaaaattcctatagggrccrgagtgatgttgaccctaacctctatgaggtatawtttacttcactaatttcacaaagaataggtttgctgaatgaagtctactgccgttcatgtctggtatccttctatgwgaacttcctgggaagaggtctggcaatgaggaaagactgtgctccagtgaagtcagaaattttcttacragtttctgaattattttcaaaaatgtacattttcaagtgctttcacccactctagggatttctagacagaatgagcagtttgagaagctctttcacattttctctgatctcccagtaatggaggaagatattatcagaggtagatggtttccatctaatttctctcttttctcatttcatattgtggaggagataattacattcactggcattcatcgacgtttgctgaac

SEQ ID NO: 26670 - DNA, 600 bp, Chicken  19866894243099_6
tatttcaaacagtgtcaacctctgaatgtatcacagttctgaagttatgaattatctgggggatttagttacatttccctttcttcttcttgtgaacttcaaaaattcctatagggrccrgagtgatgttgaccctaacctctatgaggtatawtttacttcactaatttcacaaagaataggtttgctgaatgaagtctactgccgttcatgtctggtatccttctatgwgaacttcctgggaagaggtctggcaatgaggaaagactgtgctccagtgaagtcagaaattttcttacragtttctgaattattttcaaaaatgtacattttcaagtgctttcacccactctagggatttctagacagaatgagcagtttgagaagctctttcacattttctctgatctcccagtaatggaggaagatattatcagaggtagatggtttccatctaatttctctcttttctcatttcatattgtggaggagataattacattcactggcattcatcgacgtttgctgaacatttatggagaccaaacagtggatgtgaatacagtgatgaagtgggtggtgcatttcaacagtggcaac

SEQ ID NO: 26671 - DNA, 600 bp, Chicken  19866894243103_1
cattctgtttatgagcaaaataatggtatattttttagtttaatacttgactcaaggtttatgtaggatgactcatgatgtcaataaaattactatgacagtagtgaagtttcagtagcattctctgttttgaattaataatgtcctttaagtttgcttttccagaatttagttcaatgtacacttcaagtttaagttcccataacatatcctgataattatattgcccacttgaatgttctgttgcttggacatgtatatgcatttgtatttaaaagataagaggggaaaaaagacctytgtatggttaaaatgttttgcttatactctgttgctttacaacgtttgtttttttttctcccacacctatcatcatctagtgaggcgaatctgctcagcatagatgacagtgatgggcccttcagtccaaatgaagaaagaaaggtaagtactctgtttatcttatagtgaaacggtatattcgaagttagctagtttttaaaacaatgttgcatagtcatttgtccagtgttacaaaatgaaagtttgtgttaatttggcagcctgtgtgctcaacttgtttatctgcgtgcttttaat

SEQ ID NO: 26672 - DNA, 599 bp, Chicken  19866894243106_1
  misc_feature (1)..(165): n is any nucleotide
nnnnnnnnnnnnnnnnnnnnnnnnnnnnnnnnnnnnnnnnnnnnnnnnnnnnnnnnnnnnnnnnnnnnnnnnnnnnnnnnnnnnnnnnnnnnnnnnnnnnnnnnnnnnnnnnnnnnnnnnnnnnnnnnnnnnnnnnnnnnnnnnnnnnnnnnnnnnnnnnnnnnnaatccgaattcctgcagctgaccttttcctgctgtttcctcctcctatatgaatgaacattaatagctgcgattttccctcctctgctccctgctctgccctttctgagtacaactcagagcaacgtggtcaacratttgcacagatctgaaaaaagcacaagcaattttcatagatggrgattttacttttccttagcagcataaacaggatattctgctcaaaataaaactaagtgcctcaacgttatctatcatgcacataatattctccaaccgaacgctcctatttgcatgatgttaaacacaawctsagggaaatacgacttgtttcaatagatcaggaatttaaakagatcactycatgcgctatcrttgttatcgacatcttaaacttcccccagcagaaagctgcccagaatgaggacagcaaaa

SEQ ID NO: 26673 - DNA, 599 bp, Chicken  19866894243106_2
  misc_feature (1)..(120): n is any nucleotide
nnnnnnnnnnnnnnnnnnnnnnnnnnnnnnnnnnnnnnnnnnnnnnnnnnnnnnnnnnnnnnnnnnnnnnnnnnnnnnnnnnnnnnnnnnnnnnnnnnnnnnnnnnnnnnnnnnnnnnnnaatccgaattcctgcagctgaccttttcctgctgtttcctcctcctatatgaatgaacattaatagctgcgattttccctcctctgctccctgctctgccctttctgagtacaactcagagcaacgtggtcaacratttgcacagatctgaaaaaagcacaagcaattttcatagatggrgattttacttttccttagcagcataaacaggatattctgctcaaaataaaactaagtgcctcaacgttatctatcatgcacataatattctccaaccgaacgctcctatttgcatgatgttaaacacaawctsagggaaatacgacttgtttcaatagatcaggaatttaaakagatcactycatgcgctatcrttgttatcgacatcttaaacttcccccagcagaaagctgcccagaatgaggacagcaaaagtgagttcatcccgcagcatccaggaactaactctgcctcccgcg

SEQ ID NO: 26674 - DNA, 600 bp, Chicken  19866894243106_3
cctgcagctgaccttttcctgctgtttcctcctcctatatgaatgaacattaatagctgcgattttccctcctctgctccctgctctgccctttctgagtacaactcagagcaacgtggtcaacratttgcacagatctgaaaaaagcacaagcaattttcatagatggrgattttacttttccttagcagcataaacaggatattctgctcaaaataaaactaagtgcctcaacgttatctatcatgcacataatattctccaaccgaacgctcctatttgcatgatgttaaacacaawctsagggaaatacgacttgtttcaatagatcaggaatttaaakagatcactycatgcgctatcrttgttatcgacatcttaaacttcccccagcagaaagctgcccagaatgaggacagcaaaagtgagttcatcccgcagcatccaggaactaactctgcctcccgcgggagctggggctttcctttggccttggaaccaaggaacttgcaactttggctgcgcatgtttatgtttccatccctgatccaacgtcagctggaaaaaaaaaaggctctgggggctttctgtgcacaagga

SEQ ID NO: 26675 - DNA, 600 bp, Chicken  19866894243106_4
gcagctgaccttttcctgctgtttcctcctcctatatgaatgaacattaatagctgcgattttccctcctctgctccctgctctgccctttctgagtacaactcagagcaacgtggtcaacratttgcacagatctgaaaaaagcacaagcaattttcatagatggrgattttacttttccttagcagcataaacaggatattctgctcaaaataaaactaagtgcctcaacgttatctatcatgcacataatattctccaaccgaacgctcctatttgcatgatgttaaacacaawctsagggaaatacgacttgtttcaatagatcaggaatttaaakagatcactycatgcgctatcrttgttatcgacatcttaaacttcccccagcagaaagctgcccagaatgaggacagcaaaagtgagttcatcccgcagcatccaggaactaactctgcctcccgcgggagctggggctttcctttggccttggaaccaaggaacttgcaactttggctgcgcatgtttatgtttccatccctgatccaacgtcagctggaaaaaaaaaaggctctgggggctttctgtgcacaaggacaa

SEQ ID NO: 26676 - DNA, 600 bp, Chicken  19866894243106_5
tgaacattaatagctgcgattttccctcctctgctccctgctctgccctttctgagtacaactcagagcaacgtggtcaacratttgcacagatctgaaaaaagcacaagcaattttcatagatggrgattttacttttccttagcagcataaacaggatattctgctcaaaataaaactaagtgcctcaacgttatctatcatgcacataatattctccaaccgaacgctcctatttgcatgatgttaaacacaawctsagggaaatacgacttgtttcaatagatcaggaatttaaakagatcactycatgcgctatcrttgttatcgacatcttaaacttcccccagcagaaagctgcccagaatgaggacagcaaaagtgagttcatcccgcagcatccaggaactaactctgcctcccgcgggagctggggctttcctttggccttggaaccaaggaacttgcaactttggctgcgcatgtttatgtttccatccctgatccaacgtcagctggaaaaaaaaaaggctctgggggctttctgtgcacaaggacaagctcccagcctgctgctgccaggacagcaatgcatgcaga

SEQ ID NO: 26677 - DNA, 600 bp, Chicken  19866894243106_6
atagctgcgattttccctcctctgctccctgctctgccctttctgagtacaactcagagcaacgtggtcaacratttgcacagatctgaaaaaagcacaagcaattttcatagatggrgattttacttttccttagcagcataaacaggatattctgctcaaaataaaactaagtgcctcaacgttatctatcatgcacataatattctccaaccgaacgctcctatttgcatgatgttaaacacaawctsagggaaatacgacttgtttcaatagatcaggaatttaaakagatcactycatgcgctatcrttgttatcgacatcttaaacttcccccagcagaaagctgcccagaatgaggacagcaaaagtgagttcatcccgcagcatccaggaactaactctgcctcccgcgggagctggggctttcctttggccttggaaccaaggaacttgcaactttggctgcgcatgtttatgtttccatccctgatccaacgtcagctggaaaaaaaaaaggctctgggggctttctgtgcacaaggacaagctcccagcctgctgctgccaggacagcaatgcatgcagaagaaatgct

SEQ ID NO: 26678 - DNA, 600 bp, Chicken  19866894243106_7
ttccctcctctgctccctgctctgccctttctgagtacaactcagagcaacgtggtcaacratttgcacagatctgaaaaaagcacaagcaattttcatagatggrgattttacttttccttagcagcataaacaggatattctgctcaaaataaaactaagtgcctcaacgttatctatcatgcacataatattctccaaccgaacgctcctatttgcatgatgttaaacacaawctsagggaaatacgacttgtttcaatagatcaggaatttaaakagatcactycatgcgctatcrttgttatcgacatcttaaacttcccccagcagaaagctgcccagaatgaggacagcaaaagtgagttcatcccgcagcatccaggaactaactctgcctcccgcgggagctggggctttcctttggccttggaaccaaggaacttgcaactttggctgcgcatgtttatgtttccatccctgatccaacgtcagctggaaaaaaaaaaggctctgggggctttctgtgcacaaggacaagctcccagcctgctgctgccaggacagcaatgcatgcagaagaaatgctggctgatgcctg

SEQ ID NO: 26679 - DNA, 600 bp, Chicken  19866894243111_1
tatctgaaagtcagtgaaagccatttcctatgaagaactggattcacaataagacaaagagaaggactaaataatatgtgaatttgtgcctgtcaccatggagtataaattcctagaacttgtcaaataaactagggatggtaataaaggggacttccaacatatatcacagcctgtaacttaaaatgccttttttcctaattactcgtccagttcaaattccatgagttcttgaaagctgtttcctttaaatgttgttcctttgttcaagtttttatccttattcgctttgaaatttaygtacttccggtatctacaattatcctggaactcttacacagtttcagtttgtgggagatcttccctgttggttattctgattcttctcccattgaagctttgtggaagtcctgcaattaataccagaagaggcaggatgtaatgataaatgaggatgtcaggggagtcactaaaacataactgatgcagcaccgctactttgcctgtaccaaagaaatagatctactttcgcttgtgaccttagtcattttgagctcatcagagggtcttgtgtgaacagcagaaaaacgttctctgcat

SEQ ID NO: 26680 - DNA, 600 bp, Chicken  19866894243114_1
gtgaggaatggcccttttgaaaaccttggggtggttgacggggaggagggaatgccagcaggaatcctgcaaacacactggctgccaaaaatagtagcagtgtaacagcatgttgaaaaattgcctgtcagaaagatgaattgatacttctaaactgcttggtgacagcagatatggctaaattaaccctgattggcctcttgtaagtacacagataacagccttgtctggctgctaattcactaggttaagggaatcttcccttgttgtacttctgctgttgagtagttaaatagggcrtttactgacggtcccagttaatgttatcctgttgccatatagcctacaaaattaagrtagttatttcagaaacagtgagtgagaaggtgcccctaagccaaggttagcttgctcagggaagtggtgatgccaccgtccttggaagtgctcaagaaacgtttaggtgtgkcagtgagggacgtggtcagtgggcacagtggggatgggctgccggctgggctggttggtcttgcagatcgtttaacgacccgaagagattcgaggccggagcgctccccgcgctcggtgcggcgctgtcgc

SEQ ID NO: 26681 - DNA, 600 bp, Chicken  19866894243114_2
gcaggaatcctgcaaacacactggctgccaaaaatagtagcagtgtaacagcatgttgaaaaattgcctgtcagaaagatgaattgatacttctaaactgcttggtgacagcagatatggctaaattaaccctgattggcctcttgtaagtacacagataacagccttgtctggctgctaattcactaggttaagggaatcttcccttgttgtacttctgctgttgagtagttaaatagggcrtttactgacggtcccagttaatgttatcctgttgccatatagcctacaaaattaagrtagttatttcagaaacagtgagtgagaaggtgcccctaagccaaggttagcttgctcagggaagtggtgatgccaccgtccttggaagtgctcaagaaacgtttaggtgtgkcagtgagggacgtggtcagtgggcacagtggggatgggctgccggctgggctggttggtcttgcagatcgtttaacgacccgaagagattcgaggccggagcgctccccgcgctcggtgcggcgctgtcgctgcgctgcgcgctccctctggcggccgtcccggcgcttcccgcggtggccgtgcggt

SEQ ID NO: 26682 - DNA, 600 bp, Chicken  19866894243114_3
agatatggctaaattaaccctgattggcctcttgtaagtacacagataacagccttgtctggctgctaattcactaggttaagggaatcttcccttgttgtacttctgctgttgagtagttaaatagggcrtttactgacggtcccagttaatgttatcctgttgccatatagcctacaaaattaagrtagttatttcagaaacagtgagtgagaaggtgcccctaagccaaggttagcttgctcagggaagtggtgatgccaccgtccttggaagtgctcaagaaacgtttaggtgtgkcagtgagggacgtggtcagtgggcacagtggggatgggctgccggctgggctggttggtcttgcagatcgtttaacgacccgaagagattcgaggccggagcgctccccgcgctcggtgcggcgctgtcgctgcgctgcgcgctccctctggcggccgtcccggcgcttcccgcggtggccgtgcggtgactgccggagcgcttcgggaatgcgggaggacgctgtgagagccaacctccagccggcccggggctgcgcgatgctgygcgaggaaccaggcatcacgtctgcctttggca

SEQ ID NO: 26683 - DNA, 600 bp, Chicken  19866894243114_4
ccttggaagtgctcaagaaacgtttaggtgtgkcagtgagggacgtggtcagtgggcacagtggggatgggctgccggctgggctggttggtcttgcagatcgtttaacgacccgaagagattcgaggccggagcgctccccgcgctcggtgcggcgctgtcgctgcgctgcgcgctccctctggcggccgtcccggcgcttcccgcggtggccgtgcggtgactgccggagcgcttcgggaatgcgggaggacgctgtgagagccaacctccagccggcccggggctgcgcgatgctgygcgaggaaccaggcatcacgtctgcctttggcagagcagcgctacagttttaaagccaaacttcatgtttcacttgcagcatcagcaacaacagccaaaataagcagcgttttagcaactgagatattactgattcttactgtttatgttctcagatgatgtagaggggaataaaacactccgggtgatttactgcctcggcagcgttttgggctccttggcagcactgccatgagttggggtttttggtgccggcgagcagctcaggagcaggcagctgactatggctgcgctagcgtt

SEQ ID NO: 26684 - DNA, 600 bp, Chicken  19866894243117_1
taaaatgacgtctgtcctttcatatataacatctgtccattcatgaaataacatctgtccattcatatataacatccatccattcataaaataacattcgtccattcatatctaatgtttatccatccatatataacgtctgcattcatgaaataacatctgtcctttcatgtatgacaaccatccattcataaaataacgtctgtccattcatatgtaacatttgtcctttcctatatcacattcgcccattcagtgttcatccattcataaaataatgtttgtccactgtatataacrttcatccattcataaaacaacacaggtcctttgatgtttaacattcatttgcatataacgttcgtccattcacaaaataacgtttgtcctttcatatatagcattcattcattcatatataatgtttgtccattcataaaccacagttatccattctcatataacatttgtccgctcgttcataatgttcattcataaataatgttcatccatttgtaaaataaggtctgtccattcataattactgttcctccataaaataatgtttgtccattcatggataatgtttacctattccta

SEQ ID NO: 26685 - DNA, 600 bp, Chicken  19866894243118_1
actgtagcacataaccatttccaagttgtgaaatgcttaaaggggataaatgcaatcatgtgttttgttctcccaactcaagcccttccctaaggccattctgatgtatgtgtgctctgacaggttccgtaccatcggcagtatccatcagactggaccgattggatcccttgtgcatgcccttcacgatccctgaaggaggaaggtcaattgctgctgggcgtgtagaggaagaggaggtagttgctgtgacatctgggggaactgagaaattttctaaaaattaaaaaaaaaaaaaargggggggggggggagataattaagatgataattaacatataccacttattatcagatggaaaaagcaaagcatgaattacctgctaccaaccagcttaaaaataattcaatgggttgcawttatgaggcctcttaataatgctaaacttgttgcttcctaaatattaagtaactctgggaagcatatgttatttattccagaaagcaaaggcacaagatgagtagctttatccaggtcaggaaagctgtttggtaaaatattcagataatttggttttggtcacaaaccttcaaaatcaa

SEQ ID NO: 26686 - DNA, 600 bp, Chicken  19866894243118_2
ctgtagcacataaccatttccaagttgtgaaatgcttaaaggggataaatgcaatcatgtgttttgttctcccaactcaagcccttccctaaggccattctgatgtatgtgtgctctgacaggttccgtaccatcggcagtatccatcagactggaccgattggatcccttgtgcatgcccttcacgatccctgaaggaggaaggtcaattgctgctgggcgtgtagaggaagaggaggtagttgctgtgacatctgggggaactgagaaattttctaaaaattaaaaaaaaaaaaaarrggggggggggggagataattaagatgataattaacatataccacttattatcagatggaaaaagcaaagcatgaattacctgctaccaaccagcttaaaaataattcaatgggttgcawttatgaggcctcttaataatgctaaacttgttgcttcctaaatattaagtaactctgggaagcatatgttatttattccagaaagcaaaggcacaagatgagtagctttatccaggtcaggaaagctgtttggtaaaatattcagataatttggttttggtcacaaaccttcaaaatcaag

SEQ ID NO: 26687 - DNA, 600 bp, Chicken  19866894243118_3
caggttccgtaccatcggcagtatccatcagactggaccgattggatcccttgtgcatgcccttcacgatccctgaaggaggaaggtcaattgctgctgggcgtgtagaggaagaggaggtagttgctgtgacatctgggggaactgagaaattttctaaaaattaaaaaaaaaaaaaargggggggggggggagataattaagatgataattaacatataccacttattatcagatggaaaaagcaaagcatgaattacctgctaccaaccagcttaaaaataattcaatgggttgcawttatgaggcctcttaataatgctaaacttgttgcttcctaaatattaagtaactctgggaagcatatgttatttattccagaaagcaaaggcacaagatgagtagctttatccaggtcaggaaagctgtttggtaaaatattcagataatttggttttggtcacaaaccttcaaaatcaagcttatctcctggcattcagtactgttaaaaaaaagcttaaaatccaggtgacatctgaaatattcagaactccagaacagcaacctgcatcacctgcactgtaatctctcttgctagaa

SEQ ID NO: 26688 - DNA, 600 bp, Chicken  19866894243119_1
ccagcattcatgttcgctcagtcctgtcctcatagggtaagttgttccagcctcagtgaaatctgggtaagttttacacagtcatttgtggattatttagggaatcaaacttactttatggtgataacggattctcaacaagaatattttcaactccattgtaaatactgtaaatatttcacagaacttttcagagaaaagctttttggaaaagcagcctattgcctatacaggcctgaagacaacatcaaaaacgcacaaggcggtgtgcatgttactggctatgggaagagcatcagktcctctagaactgatatatgcttcattttctacacgtgtgataygatatgctgctgcagtgctaagaacactataagctgtgcaatgtcaatatgcagagccaagtgagctcttacacacaaggtggtgctgctgggccgcacagtgcctctcccgctacttcactgcacagaccattttgtgagagaaagtctcacccatgaaaagctttcttttttaattttccacttcccaaatactccaccctcccagtatgagacagctaggaaatagcagtcctgcttgtctgacttctgtctt

SEQ ID NO: 26689 - DNA, 600 bp, Chicken  19866894243119_2
ttccagcctcagtgaaatctgggtaagttttacacagtcatttgtggattatttagggaatcaaacttactttatggtgataacggattctcaacaagaatattttcaactccattgtaaatactgtaaatatttcacagaacttttcagagaaaagctttttggaaaagcagcctattgcctatacaggcctgaagacaacatcaaaaacgcacaaggcggtgtgcatgttactggctatgggaagagcatcagktcctctagaactgatatatgcttcattttctacacgtgtgataygatatgctgctgcagtgctaagaacactataagctgtgcaatgtcaatatgcagagccaagtgagctcttacacacaaggtggtgctgctgggccgcacagtgcctctcccgctacttcactgcacagaccattttgtgagagaaagtctcacccatgaaaagctttcttttttaattttccacttcccaaatactccaccctcccagtatgagacagctaggaaatagcagtcctgcttgtctgacttctgtcttttttggactctttgggatttttgacactattttcaattccgtcc

SEQ ID NO: 26690 - DNA, 600 bp, Chicken  19866894243122_1
acacgtggcttacagtaatcccagtctcaccttcaactctgtaagctgtaaacagaatcaaagattagccagaagttgcctctctgacacactgatattctgtgctacttttctatttttgtcccctattacttagtgaaactttgctccattgactcaagtggtcttcatttctaactggtacgcatgttgataagagcttttctctgatcttgtgaattggtaaagaaatacataaaacatgcacattgacatcatcaaagaggaatatgttaattgtattataatttcctactgcakgcaagtgaattctcaaggataacgtgaaactgcctgtgaatcactggtaatgggagtctgaaattaaaagcatcaaataaataatgaatttgtagatgtggcttcagcctaattttctttccttcttccccttgtatcttgtaattaagagctatcagtagaagattggggcaggmaatgataattttgttctctagtctccaaataaaacatgtatttttgtaagagaataataaatatttttcttgaaggtctttatattgcattgagaaggatgtccctgacttcttatcctgtttt

SEQ ID NO: 26691 - DNA, 513 bp, Chicken  19866894243122_2
actggtacgcatgttgataagagcttttctctgatcttgtgaattggtaaagaaatacataaaacatgcacattgacatcatcaaagaggaatatgttaattgtattataatttcctactgcakgcaagtgaattctcaaggataacgtgaaactgcctgtgaatcactggtaatgggagtctgaaattaaaagcatcaaataaataatgaatttgtagatgtggcttcagcctaattttctttccttcttccccttgtatcttgtaattaagagctatcagtagaagattggggcaggmaatgataattttgttctctagtctccaaataaaacatgtatttttgtaagagaataataaatatttttcttgaaggtctttatattgcattgagaaggatgtccctgacttcttatcctgtttttctggtttgagcagagtaacaagtttgagtgaaaatgcatgcaggaggaggaatgtagcctgaaatcatgtacttgttttcaataagca

SEQ ID NO: 26692 - DNA, 600 bp, Chicken  19866894243123_1
taattaattgctttccactttgttaatattaaaataaaacatatgagatgaagctgtatcagagaagttgtattgctgagaaatactgtttattaaaaacaaaacaaaacacctcctctaagctttaatctactggactgcctgggaataaagtattaaatgaaactgaatgctgcctttgcacagcaactgtgacactgaagggacacattgcactttgaaggtgaataatagtttaagtaaattgacatggactacagttactgctgccatgcagcatgattagctgcattgctcctrtggcaggtgaagaccttgttctgtattgctaatagaagaaatttctgatttccattttttcaggaggtgtctggtctttgtctttgctttcttaaactcttgtttttgtgagctgaacccttctatagagagaagcaactatctatgctcaagacttggtatttgctgatctatggctagtccttgttccagtacaaatagttaatttactgtctgggagcacttctttcttgggattactttccttcctgaagtcactaagaagatgacattaggacctctagattttattgctatgaa

SEQ ID NO: 26693 - DNA, 600 bp, Chicken  19866894243123_2
atgacattaggacctctagattttattgctatgaactgattttggtcatcacttctacttaaagtgatttaaaaccttgcgtaagaaccaagaacatttacaatttctaattctcattttgttctaccactgcaacccatccaaatatgtcattctacattctacttgtcctgaaattggtaacaaagctcttccctcggtggaacaggatcagatataataccaaagtccctcagaagcaaaacaccctttgggctaactaatttctgttcccactttctcaagtattaagccaaaacmtttcagtctgaattaacattccagaattaattgtagcagtgatgactttgtgctggagtcctagttcaaagcccacagagatcactgcaaacacccgggcttgtgagtagtatttactagatagattagacctgggttgacatgctgagctgtgcacactgggacaggcttaagccattttggatagcagtgtggctttacatttatacactatgatacatacagtcagacatatattttggcctcgtttttagagaagattaatggctttgttacagtatacgatacattgtatctcag

SEQ ID NO: 26694 - DNA, 600 bp, Chicken  19866894243123_3
ttccagaattaattgtagcagtgatgactttgtgctggagtcctagttcaaagcccacagagatcactgcaaacacccgggcttgtgagtagtatttactagatagattagacctgggttgacatgctgagctgtgcacactgggacaggcttaagccattttggatagcagtgtggctttacatttatacactatgatacatacagtcagacatatattttggcctcgtttttagagaagattaatggctttgttacagtatacgatacattgtatctcagcttcaaaaagtttttatwaaaaaaaagtttcaaattaagtggaaacattccaatttcttttaattattccagaagtgttgtgtggacaagagaagattttggctagagtttccagaagttctgttgtatagagaagaactcatgtttattcaaccgtatttttcatattcagcatgcagttatgatgtttctgactctgtcacctatcagagctttttattttttcagttcctagcatgagtttgcacacttcctgtattttttttttccctgtgtgagaatatagaggtaaaagtatctgtgcagatttcaagcggg

SEQ ID NO: 26695 - DNA, 600 bp, Chicken  19866894243123_4
agcagttgttttttccttgatatgatactgctcttctgaccaagtgtaacgtgtccttaggtgcgtgagaagtcagcgcatgcctggcatgtgctggctgataccaatgcctgggagagattgcacctttaggctgtgcgtccttccacgtgtttctaggagaaagggaatcacacaaatggggctgggagataaatagtgatataaacatcccagaactagtcagagcatgggatggccagcataggacagagcaaagaaagtgaaaggcaaggcatgggcagccaggcatggaagcgyttctaggtctctccttgtgactggctgtctgtcttgtgaaaatgtgcaaaaacacagaggagacaaaggtagatattcaagactttgaggatgaagacaccaacctaacatatgttatatagcccctgtggaaaaactgctttagcatcatttgcttaaagggcacctgggctctgcagctcagggctgctctggagtgacagaattgttttcttgctttttgtttggctttaataccggcatgaagtgaatctcaaatttagttaacacctgttctgatataaaagctatgaaatctga

SEQ ID NO: 26696 - DNA, 600 bp, Chicken  19866894243133_1
tgcccccaagtgcatcagagttgtgccctctgcagctgcccttggcatcttgagcagcacacccaaatattccctgtctctgtgccctatgcagcacagtgcctgagggtgcgatgccgtgggccacctcagccgcatccgcagcctgcatgatgggtttgtctggaaggactggaaagaaaaaagcttttcgctcaaagggaagtaaataacagtagaaaagctttcaatttctgcagctgcaagagggggaaaacaaagcttttccaaagtgctgcgtgtactggaagtgccctcagyrgtcagcgggtgctctgggggtgtctgtctgtgtggtgccaactgcagcaggacggacaggcggggacaccacagcacgtggtggtgaggggcaccgcgcagggccagcggctctgcagagggcagcggggccgaatcagggcctgtgcaggtggaggagtgcagcacggagtgcacggcagggaaggatccaggctctgggtctgcatcctgcaccctgcgtcctgctggggcagcggtggcatcaccgtgaccctctggctgggctgatgctgtcagcgtggctggggcactggggat

SEQ ID NO: 26697 - DNA, 600 bp, Chicken  19866894243133_2
gcccccaagtgcatcagagttgtgccctctgcagctgcccttggcatcttgagcagcacacccaaatattccctgtctctgtgccctatgcagcacagtgcctgagggtgcgatgccgtgggccacctcagccgcatccgcagcctgcatgatgggtttgtctggaaggactggaaagaaaaaagcttttcgctcaaagggaagtaaataacagtagaaaagctttcaatttctgcagctgcaagagggggaaaacaaagcttttccaaagtgctgcgtgtactggaagtgccctcagyrgtcagcgggtgctctgggggtgtctgtctgtgtggtgccaactgcagcaggacggacaggcggggacaccacagcacgtggtggtgaggggcaccgcgcagggccagcggctctgcagagggcagcggggccgaatcagggcctgtgcaggtggaggagtgcagcacggagtgcacggcagggaaggatccaggctctgggtctgcatcctgcaccctgcgtcctgctggggcagcggtggcatcaccgtgaccctctggctgggctgatgctgtcagcgtggctggggcactggggatg

SEQ ID NO: 26698 - DNA, 600 bp, Chicken  19866894243135_1
ttgttgccttgaactgcaatttacaattagctctgtcagacagcaccatatccacttcactttcttctcagcgtaatagcaaataaaagtggcatcaatgttaatatatttctaaataatcatatcaaacttgacagagacttaagctgtctcagtggcttagctaagcagcagcgttgtcaatgttgtcattaatcctggtgctgagaagtggcaaagcagatagtctcattctgtctcattagggaaagctttttacaaatttgtggtgctgtctctgaaaaaataaatcccgtgccrttttagcaaccacatgtcagtttaatatcaactccgagtggcaatttccagctagtaaattaaatctggtttgcaatctgtttcattctatttgccgtttagggcagtaaaacgtctgtgaaaagtatttccttctgaaggagttataagtgccattttcaacccacctgtattttaaggtggatgcaattgtgaatattccaatttttttttttgatcttttatcattcaaaatgtacgtggacttgcaccagattaagctgctttccacataaaccaacagtaaagacaacttctaat

SEQ ID NO: 26699 - DNA, 600 bp, Chicken  19866894243137_1
acaagaccgagtgccgggtcctgcacttgggccacaacaaaccccccacgcagcgctgcaggcttggggcagagcggctggaaggctgtgcggagggaaaggacctgcggggtgtcggtcggcgctgggctgaacgtgagccagcagtgtgcccaggtggccaagaaggccaacgggcatcctggttgtgtcagcagcagtgcagccagcaggagcaggaggtgaccgtccccctgcactcagctctgctgaggccgcacctcagtgctgtgttcagcgttgggccctcactacaatacrgccgtggaggccctggagcgtgtgcagagaagggaacggagctgtgaggggtctggagctcagtggggtgcgatggggagcagctgagggagctgggattgttcagtctgcagaagaggagctcaggggagtcctcattgctctctacractccctgacaggaggctgtggtgaggtggagtaacagcaataagatgagggggaatggcctcaaattgctccaaaggaggttcaggttggacattaagaaaaacttctttctccacaggagtggtcgggcagtggcacaggctgcccaag

SEQ ID NO: 26700 - DNA, 600 bp, Chicken  19866894243137_2
tgcccaggtggccaagaaggccaacgggcatcctggttgtgtcagcagcagtgcagccagcaggagcaggaggtgaccgtccccctgcactcagctctgctgaggccgcacctcagtgctgtgttcagcgttgggccctcactacaatacrgccgtggaggccctggagcgtgtgcagagaagggaacggagctgtgaggggtctggagctcagtggggtgcgatggggagcagctgagggagctgggattgttcagtctgcagaagaggagctcaggggagtcctcattgctctctacractccctgacaggaggctgtggtgaggtggagtaacagcaataagatgagggggaatggcctcaaattgctccaaaggaggttcaggttggacattaagaaaaacttctttctccacaggagtggtcgggcagtggcacaggctgcccaaggaggtggtggagccactgtctctggaggtgttcaggaaccgtggagatgtggcactgagggacacggtaacactgatggtaggtggatggttggactgggtgatcttagaggtcttttccaaccttaatgattctgtgattctatgaca

SEQ ID NO: 26701 - DNA, 543 bp, Chicken  19866894243163_1
ctgagaagctgttcgtataatagatgaatgctccggctggacgtttttatttttattatgtttaattcactttatccactgctaatttccctttcgctgtgtgcctgtcaggaatccatgtctcagcagttcagtgagcagaacagcctgagcatatatcagccttcagaaatggcaccccagcggcccggctggctggcagagctgcagagcagcactgatctgcctctagaggcacagtgctgtgggtcacacaggggcatgggcttccagctgcactcctgcttgctcccaacatgyccttgctttcctcactgtgacacaggagctgctctgagcacatgatggagctgtgggtgtcctggaccaggtggcctttaagggtcccttccaactcaaaccattctacagctctgtgaagacacccccagcaaagatctgacagccccacttgtgctaggtgctgggtgaagrtttgctctgagagcctccctggggggggatggcagtagtatcacagatcatccagtgtgcaagtccaca

SEQ ID NO: 26702 - DNA, 369 bp, Chicken  19866894243163_2
gcaccccagcggcccggctggctggcagagctgcagagcagcactgatctgcctctagaggcacagtgctgtgggtcacacaggggcatgggcttccagctgcactcctgcttgctcccaacatgyccttgctttcctcactgtgacacaggagctgctctgagcacatgatggagctgtgggtgtcctggaccaggtggcctttaagggtcccttccaactcaaaccattctacagctctgtgaagacacccccagcaaagatctgacagccccacttgtgctaggtgctgggtgaagrtttgctctgagagcctccctggggggggatggcagtagtatcacagatcatccagtgtgcaagtccaca

SEQ ID NO: 26703 - DNA, 600 bp, Chicken  19866894243183_1
cctgctgggttcctaaaacaaaaagttcctatttgactctcaaaaccccacagctgatgaaaaattgaagaccttacttaatttccatgtgccataagaagtattaatttagctagtgggactggtgacagacaaccttagcttttcagtagaatcctctgaggtagaatctgggctgaaaaacgttgggaagtattttgatatgccaaactacaaagattaaactgctaagttgcaaagttttaagttataaaaagtaagattctaatacgctgcaggatgtttttttttttttttctrttacagaacacatcaaataatatccatttctaaaatagtaatgaaatggaaattaagtttgtaagaagaattaatgaagctgtatctgatgtcagctttctctaaatgacagtcacasttcaagcagcctgcaatctttctggttttacaggagcagaatcagtgacaaagaagaggctgacacaatggttcacaagattagagcgttgccacgatttcagttccttcagctccttcttttcctttcttttctttgaaaatggtatgaaatcttctattttatagacctcgagtctttct

SEQ ID NO: 26704 - DNA, 600 bp, Chicken  19866894243183_2
ggactggtgacagacaaccttagcttttcagtagaatcctctgaggtagaatctgggctgaaaaacgttgggaagtattttgatatgccaaactacaaagattaaactgctaagttgcaaagttttaagttataaaaagtaagattctaatacgctgcaggatgtttttttttttttttctrttacagaacacatcaaataatatccatttctaaaatagtaatgaaatggaaattaagtttgtaagaagaattaatgaagctgtatctgatgtcagctttctctaaatgacagtcacasttcaagcagcctgcaatctttctggttttacaggagcagaatcagtgacaaagaagaggctgacacaatggttcacaagattagagcgttgccacgatttcagttccttcagctccttcttttcctttcttttctttgaaaatggtatgaaatcttctattttatagacctcgagtctttctcccagaggtctgctgccttgttcatagtcaaaattctgcaaaaggctgacattatcagtactggtaaggacctaagggcaacaaatgcttgctcattccaaatattgttctctggaat

SEQ ID NO: 26705 - DNA, 600 bp, Chicken  19866894243184_1
ttgctctagctactgcatggacattatttatatgacacttgctatgtaattaaagagcaggttgctagcctggaggtactccgggaaatgaaaggatacctgaggagtgactaagaggaacgaacatttagtgctcagtgtatctgagaaatataggcgttctcctctttcacttcaggcaaagtcagaatcattttccatctgccctcatgaactgcctgactgaaaaccacatttctaccaactttaccttcaaggaccaagaaaactccataaggggtgtgctggatggaggcatcragggagcaacctcagcaccaccgacccctcttcacccaggagttacctccatccacctccatacacacamgtggaagatgtggaagatgtcacagctatgtctgttttattgtcttttatgcctcamtcaaaagcaatctgaggtgaggagcagcccggtggtctgtatccacgtggcacctgttacgtggaggtctttactcacacacagtgcagtgtctgtggtctgaaaatagtaaatgcaattcaacaggsagaaacacgtcgtctaaatttaacacctcgaaggaggaaagctta

SEQ ID NO: 26706 - DNA, 600 bp, Chicken  19866894243184_2
tggaggtactccgggaaatgaaaggatacctgaggagtgactaagaggaacgaacatttagtgctcagtgtatctgagaaatataggcgttctcctctttcacttcaggcaaagtcagaatcattttccatctgccctcatgaactgcctgactgaaaaccacatttctaccaactttaccttcaaggaccaagaaaactccataaggggtgtgctggatggaggcatcragggagcaacctcagcaccaccgacccctcttcacccaggagttacctccatccacctccatacacacamgtggaagatgtggaagatgtcacagctatgtctgttttattgtcttttatgcctcamtcaaaagcaatctgaggtgaggagcagcccggtggtctgtatccacgtggcacctgttacgtggaggtctttactcacacacagtgcagtgtctgtggtctgaaaatagtaaatgcaattcaacaggsagaaacacgtcgtctaaatttaacacctcgaaggaggaaagcttagtggcatttttatataaaagcaaaagaataaaaatgatttacaacaaataaataccatcagcccccttat

SEQ ID NO: 26707 - DNA, 600 bp, Chicken  19866894243184_3
ttagtgctcagtgtatctgagaaatataggcgttctcctctttcacttcaggcaaagtcagaatcattttccatctgccctcatgaactgcctgactgaaaaccacatttctaccaactttaccttcaaggaccaagaaaactccataaggggtgtgctggatggaggcatcragggagcaacctcagcaccaccgacccctcttcacccaggagttacctccatccacctccatacacacamgtggaagatgtggaagatgtcacagctatgtctgttttattgtcttttatgcctcamtcaaaagcaatctgaggtgaggagcagcccggtggtctgtatccacgtggcacctgttacgtggaggtctttactcacacacagtgcagtgtctgtggtctgaaaatagtaaatgcaattcaacaggsagaaacacgtcgtctaaatttaacacctcgaaggaggaaagcttagtggcatttttatataaaagcaaaagaataaaaatgatttacaacaaataaataccatcagcccccttatcttggtgctgattcaggaaggcatacaagtatgtcctttagtcatgacgactttaat

SEQ ID NO: 26708 - DNA, 600 bp, Chicken  19866894243184_4
aggaccaagaaaactccataaggggtgtgctggatggaggcatcragggagcaacctcagcaccaccgacccctcttcacccaggagttacctccatccacctccatacacacamgtggaagatgtggaagatgtcacagctatgtctgttttattgtcttttatgcctcamtcaaaagcaatctgaggtgaggagcagcccggtggtctgtatccacgtggcacctgttacgtggaggtctttactcacacacagtgcagtgtctgtggtctgaaaatagtaaatgcaattcaacaggsagaaacacgtcgtctaaatttaacacctcgaaggaggaaagcttagtggcatttttatataaaagcaaaagaataaaaatgatttacaacaaataaataccatcagcccccttatcttggtgctgattcaggaaggcatacaagtatgtcctttagtcatgacgactttaatagatgtcttggatggggacattttcctgactcagactctgatctggagccacacagcgcagcacaccattactcacagtattttagggtgaactttggaagaaaatagtgtttgttcagctccaagca

SEQ ID NO: 26709 - DNA, 484 bp, Chicken  19866894243184_5
gaaggaggaaagcttagtggcatttttatataaaagcaaaagaataaaaatgatttacaacaaataaataccatcagcccccttatcttggtgctgattcaggaaggcatacaagtatgtcctttagtcatgacgactttaatagatgtcttggatggggacattttcctgactcagactctgatctggagccacacagcgcagcacaccattactcacagtattttagggtgaactttggaagaaaatagtgtttgttcagctccaagcaagccagctgacatgacagtgcctcttccrttggaagggccgtgcattgggatgacytgtgatggttcccttggtcgtaaatgagaagttggagctgcagcagtcaatggggtctttctcacaagggcagtatgtcaggcacatgccagtcctccccttactctgtgcattatttctgtgtttgggtctattccccttgttgttttttccattt

SEQ ID NO: 26710 - DNA, 457 bp, Chicken  19866894243184_6
atataaaagcaaaagaataaaaatgatttacaacaaataaataccatcagcccccttatcttggtgctgattcaggaaggcatacaagtatgtcctttagtcatgacgactttaatagatgtcttggatggggacattttcctgactcagactctgatctggagccacacagcgcagcacaccattactcacagtattttagggtgaactttggaagaaaatagtgtttgttcagctccaagcaagccagctgacatgacagtgcctcttccrttggaagggccgtgcattgggatgacytgtgatggttcccttggtcgtaaatgagaagttggagctgcagcagtcaatggggtctttctcacaagggcagtatgtcaggcacatgccagtcctccccttactctgtgcattatttctgtgtttgggtctattccccttgttgttttttccattt

SEQ ID NO: 26711 - DNA, 600 bp, Chicken  19866894243188_1
tcaactggaaaccacttgactacttgacactatgttgagtccaggtaagcttcgcttaatggaaggaacagataacaacatacacagctaaagacctgtatgatgtaagcagtagaaatggttatcatagcactattccataccaaaaccctcccaaaccagcaatacatttcacaaagaattttcttgaacccctcaaagcttgatgctaaaaacctctaagtacactgttttgttcccagaaggctacaagacaggatgctagactcgatcatccagagtttatgttatggctgttayggggcaggtaagatgctcttgtatcccagtaggacaactgacagtgcttggcacagcctggcacaggcccaatggaagcccagcaggcacgccagcctgccaaggcacggctaaccacastctgggttggcacgtacgctgtgctccccatgraaattcaccattctgaaagcattaagaccagacaacccctaagcactcttcagggaggaggtctgtttgtggaccaggacgccttcccctcacctccgtggacggttacaatctcatacaagtgctgtgaaagcagcctactgagct

SEQ ID NO: 26712 - DNA, 600 bp, Chicken  19866894243188_2
gttatcatagcactattccataccaaaaccctcccaaaccagcaatacatttcacaaagaattttcttgaacccctcaaagcttgatgctaaaaacctctaagtacactgttttgttcccagaaggctacaagacaggatgctagactcgatcatccagagtttatgttatggctgttayggggcaggtaagatgctcttgtatcccagtaggacaactgacagtgcttggcacagcctggcacaggcccaatggaagcccagcaggcacgccagcctgccaaggcacggctaaccacastctgggttggcacgtacgctgtgctccccatgraaattcaccattctgaaagcattaagaccagacaacccctaagcactcttcagggaggaggtctgtttgtggaccaggacgccttcccctcacctccgtggacggttacaatctcatacaagtgctgtgaaagcagcctactgagcttaggtcagacccctgcagtagccacggtttaataacttgttttgtggggagccactgccatcctccagtaggtccctccagtaagttatctatccaaatgaaatcccacttcaattattc

SEQ ID NO: 26713 - DNA, 600 bp, Chicken  19866894243188_3
ccaaaccagcaatacatttcacaaagaattttcttgaacccctcaaagcttgatgctaaaaacctctaagtacactgttttgttcccagaaggctacaagacaggatgctagactcgatcatccagagtttatgttatggctgttayggggcaggtaagatgctcttgtatcccagtaggacaactgacagtgcttggcacagcctggcacaggcccaatggaagcccagcaggcacgccagcctgccaaggcacggctaaccacastctgggttggcacgtacgctgtgctccccatgraaattcaccattctgaaagcattaagaccagacaacccctaagcactcttcagggaggaggtctgtttgtggaccaggacgccttcccctcacctccgtggacggttacaatctcatacaagtgctgtgaaagcagcctactgagcttaggtcagacccctgcagtagccacggtttaataacttgttttgtggggagccactgccatcctccagtaggtccctccagtaagttatctatccaaatgaaatcccacttcaattattccaataaacagtttcagagatttgacaatgacct

SEQ ID NO: 26714 - DNA, 599 bp, Chicken  19866894243203_1
  misc_feature (1)..(186): n is any nucleotide
nnnnnnnnnnnnnnnnnnnnnnnnnnnnnnnnnnnnnnnnnnnnnnnnnnnnnnnnnnnnnnnnnnnnnnnnnnnnnnnnnnnnnnnnnnnnnnnnnnnnnnnnnnnnnnnnnnnnnnnnnnnnnnnnnnnnnnnnnnnnnnnnnnnnnnnnnnnnnnnnnnnnnnnnnnnnnnnnnnnnnnnnnnagggagcattgatctgcctgaggggagaaagggactacagagggatttggatagactggatcaatggacccggtgttaactgtatgagtttcaatagggccaagtgtcgagtcytgcattttggtcacaacaaccccaagcaaccctacagacttggggaggagtggctggaaagctgcctgrtggaaagggaccttggtgtactgatagacagtcagctgaatatgagccagcagtgtgcccaggtggccaagaaggccaatggcatcctggcttgtatcaggactggtgtgktgagcaggactagggaagtaatcctgcccatgtacttggcactggtgaggcctcacctcgaatactgtgttcggttttgggcacctcagtacagaaaggacattgaggtgctggagcag

SEQ ID NO: 26715 - DNA, 599 bp, Chicken  19866894243203_2
  misc_feature (1)..(117): n is any nucleotide
nnnnnnnnnnnnnnnnnnnnnnnnnnnnnnnnnnnnnnnnnnnnnnnnnnnnnnnnnnnnnnnnnnnnnnnnnnnnnnnnnnnnnnnnnnnnnnnnnnnnnnnnnnnnnnnnnnnnnagggagcattgatctgcctgaggggagaaagggactacagagggatttggatagactggatcaatggacccggtgttaactgtatgagtttcaatagggccaagtgtcgagtcytgcattttggtcacaacaaccccaagcaaccctacagacttggggaggagtggctggaaagctgcctgrtggaaagggaccttggtgtactgatagacagtcagctgaatatgagccagcagtgtgcccaggtggccaagaaggccaatggcatcctggcttgtatcaggactggtgtgktgagcaggactagggaagtaatcctgcccatgtacttggcactggtgaggcctcacctcgaatactgtgttcggttttgggcacctcagtacagaaaggacattgaggtgctggagcaggtccaaagaaggacaacaaggcctgtgaagggcttggagaatatgccctgtgaggagtgactgaaggaa

SEQ ID NO: 26716 - DNA, 599 bp, Chicken  19866894243203_3
  misc_feature (1)..(6): n is any nucleotide
nnnnnnagggagcattgatctgcctgaggggagaaagggactacagagggatttggatagactggatcaatggacccggtgttaactgtatgagtttcaatagggccaagtgtcgagtcytgcattttggtcacaacaaccccaagcaaccctacagacttggggaggagtggctggaaagctgcctgrtggaaagggaccttggtgtactgatagacagtcagctgaatatgagccagcagtgtgcccaggtggccaagaaggccaatggcatcctggcttgtatcaggactggtgtgktgagcaggactagggaagtaatcctgcccatgtacttggcactggtgaggcctcacctcgaatactgtgttcggttttgggcacctcagtacagaaaggacattgaggtgctggagcaggtccaaagaaggacaacaaggcctgtgaagggcttggagaatatgccctgtgaggagtgactgaaggaactggggctgcttagtctgggggaaaggaggctgaggggagaccttattgctctcttccaatatccaaaaggttcttacagcaagagcggtctcttctcactggtaacaggt

SEQ ID NO: 26717 - DNA, 600 bp, Chicken  19866894243204_1
ttaaaacagagcaattagagttattaacctagcaagaaattacacattaatgtgtcataatggcaacctgctagctagtaaaaaatgccaaagtaaaacaggcattagagaataatggaagatagttccagttttgaataagttaggcaattatgatactgtatggttaaaatacttcttaatctttttactctttgtgcttatagcatattaaagacaaacacggtgcagagaaaaatacctccataagagtagcggcgtggcgtcccaccagtgcgaaagcagaaattccaccaggtyggcatggatgaggggcttcttgtctttgtttgggggctgctaaaaatgaactattaaattagacctgaaggatttaagtttttagaaacactagcaatttttatctgcagacagagtggtggggggaacattgcrgtttttgaaatacctctaaatgggttgtagttgtaatctgtctagattaggagaggaagaatgttgcccagctgtataactgtttccatgtcatttgattgaatattcatcctgtatcagaaaacatatatggtggaaagaagagccttcctctgtcacatgcct

SEQ ID NO: 26718 - DNA, 600 bp, Chicken  19866894243204_2
gaataagttaggcaattatgatactgtatggttaaaatacttcttaatctttttactctttgtgcttatagcatattaaagacaaacacggtgcagagaaaaatacctccataagagtagcggcgtggcgtcccaccagtgcgaaagcagaaattccaccaggtyggcatggatgaggggcttcttgtctttgtttgggggctgctaaaaatgaactattaaattagacctgaaggatttaagtttttagaaacactagcaatttttatctgcagacagagtggtggggggaacattgcrgtttttgaaatacctctaaatgggttgtagttgtaatctgtctagattaggagaggaagaatgttgcccagctgtataactgtttccatgtcatttgattgaatattcatcctgtatcagaaaacatatatggtggaaagaagagccttcctctgtcacatgcctgaaagcataattaaaacctcacctgtctttgtttacaatttatactttttttttttaagtcacaacaattcagagatttattattagtttaatatatcatgtttttgttaatattcttctaagaagttgttccag

SEQ ID NO: 26719 - DNA, 600 bp, Chicken  19866894243205_1
tggcaggtggagtgcagtcagactgtacagacaaaatatatactgacaggagtacagtcagattgtcttgacattataagttctcaaagataataacaattgactctgagactactgtgataaattctttcttccttcaaacgaatttcattagacagtattttgaagcagtctagccattactatatcaacaccagtgtcagaactgaagggggaaaaattgcctctaacacttcatttgaatatttttgcatagctcttggataatcacaggagctatgaaacaaggtgagaatttgytacctcagaaggacattttcattcttcagtgagcactgaaggcatgagaaacttggggtcgctgtattcacagtgcagtaggagctgagagccagcattgggagcctctgagactaatgatgttgttcatcatccagcttgcctctggagtgcagtttcacaatcagcttcagtcagtctaaaccacagtgttgtgaaaagagataattcagccctgcccctgaatgtctcttgagagaaagagcaagacttctcttttattaaaaaaataaataataaaaaaaccctgatcttagattg

SEQ ID NO: 26720 - DNA, 600 bp, Chicken  19866894243209_1
cagcaaaatctgatttggccctgcttctgtgtgccctttaaagataaacagggcattattaaaaaaaaaaaaaaaaagctgtttaggtataagccaaatacagctttgtgaatgtgacatccactcttatttacacccaattaaatccagactgtatttgccctatacagttttaaaggctttctgctgtgttgaattaaattgattctgctaattgattagatgaaagggtacacattccttttcttattcatttttatgctcaatgacattaacttgctgtctgtgattgacgtcctragaaaatattctttcatattgtcttggttttgggcgggatgctttttggatttaggatgagaataaagtcgttaagacactgatgttacagttgttgctgagaagtgcgtatagagtcaagggctttgggcttctcatgctgcccagccagcacgctgggggtacacaaggagcgaggaggggacacagccaggacagctgacttaaactggcctccggattatcccgtatcatatggcagcatcatgctcagcaataaaactgaggaggttggctggggggcttctgccactcagggac

SEQ ID NO: 26721 - DNA, 599 bp, Chicken  19866894243214_1
  misc_feature (1)..(65): n is any nucleotide
nnnnnnnnnnnnnnnnnnnnnnnnnnnnnnnnnnnnnnnnnnnnnnnnnnnnnnnnnnnnnnnnntcaactgtgcattattttactgtgacagctccccaccttgacacgctgctgtaactaccccaaaagagcatgttacctaactatgtatgaacattcgccacgcgtgaaactatttatattctgcctcacatttaggcacgagggaggggcaggttaatctcctttatgcaatagctaagctgcctcatacttaccttgggtacaagcctggagagaagcaacagggtgagaagckactgaacattacaaaggaaagcctggcagcaacagccatatctaagatgattctctggttttaagcctcacaggatgaaaaattgtcatcttaggtgggagtaaatatggctgttgccaacaacagggattccaggtgcagaccagctaagacgacgatgctaggaaaagcaattcacctgttccataacttctggtgccatccagcaaggtgtgcctacaaatgttttcctgactttatttctggtaatgtcaccaccagtggccaaaaaagcactaacgccaaagtctgtaaagaaa

SEQ ID NO: 26722 - DNA, 449 bp, Chicken  19866894243214_2
tcacaggatgaaaaattgtcatcttaggtgggagtaaatatggctgttgccaacaacagggattccaggtgcagaccagctaagacgacgatgctaggaaaagcaattcacctgttccataacttctggtgccatccagcaaggtgtgcctacaaatgttttcctgactttatttctggtaatgtcaccaccagtggccaaaaaagcactaacgccaaagtctgtaaagaaagcaaaacaaactgcattaagatcacatccagagcaaagtgaagggctgtcccccttgtccccccacayctccagccccttattaagcagtagaacatacagttacacatgaggagtttgctaatgaatgaagaacgagcaacagttagagaagaatgctggtgcatgaatactctgtagtcaaccattcaattacttcagcgttcagtgctggccag

SEQ ID NO: 26723 - DNA, 600 bp, Chicken  19866894243220_1
tatattaaatgcataaaacaaacaaacttcaaagggaattccatgatattccatacttaatgcacacttcttccatcctttgattgaactagatctcaggtaacattggagcattttgacagacctgactaggagatgttttaagcttgactatggattgaaagtcacactcctaatgacacaaggaagtatccattgtcttctgatcttttagaggataaacattagacaaaggaaattatgatgcccttgtggtaatgaggccttaagtctgcgaggaactctgctgatgtaatgcaytcttttccttagagctctcatatgttgctgttcatcctgtcagtagactttgttcaaggtagtaatgaaatatgggaggaacacgatgcaggcttaagctccaagcacagcccgcatgcacgtgccaggctcgtcctctgagagtcaacaggtttgtatccatccatcyatccccttttctcctggccaaacgggtggtaatgacaatcttttagttgccctgtgggactttttttttttcagatatttcttgaaaaggaagaaggggtcagttcctggagtatatccattctgcataga

SEQ ID NO: 26724 - DNA, 600 bp, Chicken  19866894243220_2
atattaaatgcataaaacaaacaaacttcaaagggaattccatgatattccatacttaatgcacacttcttccatcctttgattgaactagatctcaggtaacattggagcattttgacagacctgactaggagatgttttaagcttgactatggattgaaagtcacactcctaatgacacaaggaagtatccattgtcttctgatcttttagaggataaacattagacaaaggaaattatgatgcccttgtggtaatgaggccttaagtctgcgaggaactctgctgatgtaatgcatycttttccttagagctctcatatgttgctgttcatcctgtcagtagactttgttcaaggtagtaatgaaatatgggaggaacacgatgcaggcttaagctccaagcacagcccgcatgcacgtgccaggctcgtcctctgagagtcaacaggtttgtatccatccatcyatccccttttctcctggccaaacgggtggtaatgacaatcttttagttgccctgtgggactttttttttttcagatatttcttgaaaaggaagaaggggtcagttcctggagtatatccattctgcatagat

SEQ ID NO: 26725 - DNA, 470 bp, Chicken  19866894243220_3
ctcctaatgacacaaggaagtatccattgtcttctgatcttttagaggataaacattagacaaaggaaattatgatgcccttgtggtaatgaggccttaagtctgcgaggaactctgctgatgtaatgcattcttttccttagagctctcatatgttgctgttcatcctgtcagtagactttgttcaaggtagtaatgaaatatgggaggaacacgatgcaggcttaagctccaagcacagcccgcatgcacgtgccaggctcgtcctctgagagtcaacaggtttgtatccatccatcyatccccttttctcctggccaaacgggtggtaatgacaatcttttagttgccctgtgggactttttttttttcagatatttcttgaaaaggaagaaggggtcagttcctggagtatatccattctgcatagatttggcaaacgttgatcatacctatcttgtgctttgcct

SEQ ID NO: 26726 - DNA, 600 bp, Chicken  19866894243223_1
aacctgccaagggatgcagctgtgctatttctcatcaactaatgaacaaacagctgcagcagtgcagctactcacactccttcccacattcaatcagagaacttcatccaaagagtgaggactcatatctgttactgtgctgagccaagaagtacagggcacacaactttatgagtgccgggggttgggcctgtaagcaaccagcatctagcacagagtaagaccttagaaacacctcttcactatcacgatacaccaggcagaatttggacagtcaaaaaataagcagtgggttacagkggcatggcctcattcaatcctccacagccagaggccagggatgacttggtttcttcttcccgctgcactgcccatcagttatgttgtgaatctcaaggtttcttcttttgaagtaaaaatttcattaacacattttttggtctttaggacctactctttatttatccagaatgttttcccttgaagttcatagtttcctggtccagaaacatgaggaaaaatctttatttctccctgtttgaaagaatgctttaagtatttcatctttgttataacaacaaggaaatgcacatctgttct

SEQ ID NO: 26727 - DNA, 600 bp, Chicken  19866894243227_1
ctccatctcttttatagctcccttttgtaagtgaaaggccatcaggtctcctcagagcctcctcttttcctaatggaacaaacccagctccctcatcctttcttcgtgggagaggtgctccagctctctgatctgtgtttcagagacatccagtgactctttgaacaggttgatctgacactagaatgtgtggcagttgcattaaggaattggccattatttcatgatgacaaaagactgtaaatggaatatagctaatcatatctgcatgttctgctaatgaagggaactgagaagaargcayattctactgttaggaatggacattcatatctaactggatagatttcttaaaataaagttttctagctcttctggagttttgaaataaggtattttgggaaaatttagatgtcctggggcaaagatctgcaaccacgtgcagttcactgaactaaatctcaaaaccaatttcattaaattctgaacctaatctgtaaagcaagtacccagagtttttttcctgcagcttccttcctttcctgttcaagtcacatagctgtaagtaaggctctcatatggaatactgcactggaacaa

SEQ ID NO: 26728 - DNA, 600 bp, Chicken  19866894243227_2
atctcttttatagctcccttttgtaagtgaaaggccatcaggtctcctcagagcctcctcttttcctaatggaacaaacccagctccctcatcctttcttcgtgggagaggtgctccagctctctgatctgtgtttcagagacatccagtgactctttgaacaggttgatctgacactagaatgtgtggcagttgcattaaggaattggccattatttcatgatgacaaaagactgtaaatggaatatagctaatcatatctgcatgttctgctaatgaagggaactgagaagaargcayattctactgttaggaatggacattcatatctaactggatagatttcttaaaataaagttttctagctcttctggagttttgaaataaggtattttgggaaaatttagatgtcctggggcaaagatctgcaaccacgtgcagttcactgaactaaatctcaaaaccaatttcattaaattctgaacctaatctgtaaagcaagtacccagagtttttttcctgcagcttccttcctttcctgttcaagtcacatagctgtaagtaaggctctcatatggaatactgcactggaacaagaaa

SEQ ID NO: 26729 - DNA, 600 bp, Chicken  19866894243227_3
ggagttttgaaataaggtattttgggaaaatttagatgtcctggggcaaagatctgcaaccacgtgcagttcactgaactaaatctcaaaaccaatttcattaaattctgaacctaatctgtaaagcaagtacccagagtttttttcctgcagcttccttcctttcctgttcaagtcacatagctgtaagtaaggctctcatatggaatactgcactggaacaagaaatctcctgaactacagatatgttcctcacttctacctgagtcccagcacttccactaaattttaagaaatgtyatgcaattaaagcaatataacatattattcaaatttatacaaattaaaggaggataatgtaggagctacagaggcatttcttgttcttttacaaaaaccaaatggcttctaacaattgtttgtctaaaacatatatttaattaactcctttcatcagtataattttaacttaattttgtcaacaataacatccttcattttgaaatacagaaagattaaccttcccagcatgcttccatgcagtacaaaaatcctctccctcatttgtgttaattatatgcttctgtaagaagtgyaaga

SEQ ID NO: 26730 - DNA, 600 bp, Chicken  19866894243227_4
tgtyatgcaattaaagcaatataacatattattcaaatttatacaaattaaaggaggataatgtaggagctacagaggcatttcttgttcttttacaaaaaccaaatggcttctaacaattgtttgtctaaaacatatatttaattaactcctttcatcagtataattttaacttaattttgtcaacaataacatccttcattttgaaatacagaaagattaaccttcccagcatgcttccatgcagtacaaaaatcctctccctcatttgtgttaattatatgcttctgtaagaagtgyaagaaatatccttctgtaagaaaggactacttctctgagacaatgatattctctagtacaactttccttattaagacaactcttttgattatcagctgattacataataacacatacaggtctacttgaatgtgtgtaagattttcagatttactcactgatttatttgttaaataataacataaacccctttacaagttagtgtttttaagtctaccaaattccagtggttttttttttcttgcacttcaattgcttaaaataaccttttgtaaaatgcaattctccaacagtcataaa

SEQ ID NO: 26731 - DNA, 600 bp, Chicken  19866894243232_1
caatctattatgtcaacagtactggctaggtgccatagtgcaattttttgcttggcacaacaggcattctactgtacagtttccttttctaaaggatttactgaaaatgtagagctgaaagtgtctgagctctcagaataagagctttcaagagtacttgggaatgcagagagtttatgattcttagaactgtatgaaacaaacataattaaaaagttagcagccaataccagtcaaaatctaaaatcaaaacaagtaaatgcattagaggatttgcaaactgttcagtagaaacagaartgtctccattttatggtataacacattaattgtaagcatagtgtacaattatttatttacttaccacagttggattctttgatgcatttttcttgggaaccttctttgcttcccacttctcctgtctctactttgcaaagaggataattagcactacattcatatagaggaaatacaactatagtgtaaacctaggtgattagaaaattagtggttttttatcacctaatattaggaggaaccatgcagctaaagtactcatgtcgttcttcacactgagaaaatattttaacaatcttc

SEQ ID NO: 26732 - DNA, 600 bp, Chicken  19866894243233_1
gaagctcaaggccaatttccaggtaaaaaactgttgctaacaatttcccattaataagctttttcaccacaagggtcttgcgtgtattttctataactgtggtcaaatgaaaactgcagtcttaagcacccactcagagtggtgcatctcatagatgagtaaattttgcagtaagagacagttcacatgccagcattatactctcacttatgagagtatatttaatgtgcttcttaagcaattgctgttcagttggggttgatgagctcaagataaattatagccttctgattcttatcrttttcatctaaattttctttcaacaaagtataagkagtttaaactggctgggtcttttcagcatcctgccccaatttcttttgccctacatgttagtcaggtattttaacaaagcctataatgtaaaaaatagaggtgctatgcacaatgcagcctcttatattattacatcctctttataggtaataaatgctgtcaggacctacagggtgttagatcctgtttctatacgctactttcatttccatgcctcttatactcttctggggctgcctgcatacccttccctgacagaagatg

SEQ ID NO: 26733 - DNA, 600 bp, Chicken  19866894243233_2
gctaacaatttcccattaataagctttttcaccacaagggtcttgcgtgtattttctataactgtggtcaaatgaaaactgcagtcttaagcacccactcagagtggtgcatctcatagatgagtaaattttgcagtaagagacagttcacatgccagcattatactctcacttatgagagtatatttaatgtgcttcttaagcaattgctgttcagttggggttgatgagctcaagataaattatagccttctgattcttatcrttttcatctaaattttctttcaacaaagtataagkagtttaaactggctgggtcttttcagcatcctgccccaatttcttttgccctacatgttagtcaggtattttaacaaagcctataatgtaaaaaatagaggtgctatgcacaatgcagcctcttatattattacatcctctttataggtaataaatgctgtcaggacctacagggtgttagatcctgtttctatacgctactttcatttccatgcctcttatactcttctggggctgcctgcatacccttccctgacagaagatgtgcttactgttctagctaagtgttactcagcacag

SEQ ID NO: 26734 - DNA, 599 bp, Chicken  19866894243237_1
  misc_feature (1)..(126): n is any nucleotide
nnnnnnnnnnnnnnnnnnnnnnnnnnnnnnnnnnnnnnnnnnnnnnnnnnnnnnnnnnnnnnnnnnnnnnnnnnnnnnnnnnnnnnnnnnnnnnnnnnnnnnnnnnnnnnnnnnnnnnnnnnnnnncagcagcagcagcagtccatgaaggcctggcccagcggtctgcagaggcacaggagcaggacgggcgtcaccgagcacttgaagaacagaaagaactggttgatgaggttgagcaggtccagggtctgcttggacatgtcgggggacatgtaggccaccacgatgttgcagacrttctcaggggtggtgcagagcccgtagatgatggtcagcccaatgatggtgcagttcaagtggctctcacactggctgtgtttggtccctcggcactcggccttcttctcggtgccgcggatcctgcgggtcaccagctggcagctcacggtgaagaggatgggcaggcagaagtagcagccgaagtaccaccacatccgagcgttctggtaggtgagcaccagcgagtagacggactcgggcaggttggacgaaggcttcatggtgcagtactccgtcaccacgccggacacgggcga

SEQ ID NO: 26735 - DNA, 512 bp, Chicken  19866894243246_1
gagatcaacattgagcccttcctgtgacgatggggcctcacccacggatgcccgctcccgtgtgctgcaccctctgctcctctttctctgtaggcaacatctgcttctgcttttacgtttcaataaactacaaaaacagagtcttgttccgcgggtagatgtgttccttacggtgtaggatggagctgcagtgagactgtgccgctggtatttgtagaggggtgaaaaagccaagctgggtaacagcccagtgttctacaagggcaacgtaatggcagggcatgtgattcatttacaaartcagaaatgttccacaggcgcagcttcatactgtaactgattatggctgcgtaacaggaatctcattcttttcttattgcatgaaataagataattgattagagcaaatgctgagtgaatgtgagcagaacgaaggagttgagcttttcttctgtacgggtgtcatgtgctcatcagtggctgggggaggaaaacaaacttatttcatgaaa

SEQ ID NO: 26736 - DNA, 600 bp, Chicken  19866894243254_1
catactcgaaggtaaggaatgcaggagtgccagcaagttcgcaagaaccatcgcttctgcaatgttgttaacacattcttggttacttgttactatgttcactacctgtaaaagtgaaaaagcaaggcttgattacattccagcttttcagacatcgttaagaaaaatgcagtgtatgatgaagcaacttactagccaatatacagcatttaatcctgacatcaaattgacttatgtcagagaaggggacaaggacataagctataacttgttcctcaaagcagctgcctgacagcttgraccccagactctgacatgttttagatgctactcttaagttacataatsaggttgatakatgctgattggttggggactttttgttgcttttttgtttgtttttacctccagagccaactgctgcacctggccagctccatgaacacgcagaagggagaatatcaacttaaagtggcctatacattcacactcagaacctggaagagatcaaaaatgattcacttcacatttgtccaaacattcactgaaaaccatcctgagtccgcatttgacttgcaaagaggtggtaaagactacatg

SEQ ID NO: 26737 - DNA, 600 bp, Chicken  19866894243254_2
catcgcttctgcaatgttgttaacacattcttggttacttgttactatgttcactacctgtaaaagtgaaaaagcaaggcttgattacattccagcttttcagacatcgttaagaaaaatgcagtgtatgatgaagcaacttactagccaatatacagcatttaatcctgacatcaaattgacttatgtcagagaaggggacaaggacataagctataacttgttcctcaaagcagctgcctgacagcttgraccccagactctgacatgttttagatgctactcttaagttacataatsaggttgatakatgctgattggttggggactttttgttgcttttttgtttgtttttacctccagagccaactgctgcacctggccagctccatgaacacgcagaagggagaatatcaacttaaagtggcctatacattcacactcagaacctggaagagatcaaaaatgattcacttcacatttgtccaaacattcactgaaaaccatcctgagtccgcatttgacttgcaaagaggtggtaaagactacatgcttatatatagtccagtaattacagtaattacatcagctcctmcaasa

SEQ ID NO: 26738 - DNA, 600 bp, Chicken  19866894243254_3
gcaatgttgttaacacattcttggttacttgttactatgttcactacctgtaaaagtgaaaaagcaaggcttgattacattccagcttttcagacatcgttaagaaaaatgcagtgtatgatgaagcaacttactagccaatatacagcatttaatcctgacatcaaattgacttatgtcagagaaggggacaaggacataagctataacttgttcctcaaagcagctgcctgacagcttgraccccagactctgacatgttttagatgctactcttaagttacataatsaggttgatakatgctgattggttggggactttttgttgcttttttgtttgtttttacctccagagccaactgctgcacctggccagctccatgaacacgcagaagggagaatatcaacttaaagtggcctatacattcacactcagaacctggaagagatcaaaaatgattcacttcacatttgtccaaacattcactgaaaaccatcctgagtccgcatttgacttgcaaagaggtggtaaagactacatgcttatatatagtccagtaattacagtaattacatcagctcctmcaasacagcaactac

SEQ ID NO: 26739 - DNA, 600 bp, Chicken  19866894243254_4
taatsaggttgatakatgctgattggttggggactttttgttgcttttttgtttgtttttacctccagagccaactgctgcacctggccagctccatgaacacgcagaagggagaatatcaacttaaagtggcctatacattcacactcagaacctggaagagatcaaaaatgattcacttcacatttgtccaaacattcactgaaaaccatcctgagtccgcatttgacttgcaaagaggtggtaaagactacatgcttatatatagtccagtaattacagtaattacatcagctcctmcaasacagcaactactgcagaattaaatctagcctccacaaaatctcaggtcaacagtatttcaaaagaataggatgcttcctctaaggcaagagacagcacytgtttttggattacctagttatatgcatttttacaagacaaataaggaagtttgcttatttgaagtatcactgattcaccagtatttcttgtacacctgtttgattcttgcagctcagtttcctgatctctgcaacagtaatagctaccttcacaatcagttgccagatacaggttattctcaggctgggttctcta

SEQ ID NO: 26740 - DNA, 600 bp, Chicken  19866894243254_5
saggttgatakatgctgattggttggggactttttgttgcttttttgtttgtttttacctccagagccaactgctgcacctggccagctccatgaacacgcagaagggagaatatcaacttaaagtggcctatacattcacactcagaacctggaagagatcaaaaatgattcacttcacatttgtccaaacattcactgaaaaccatcctgagtccgcatttgacttgcaaagaggtggtaaagactacatgcttatatatagtccagtaattacagtaattacatcagctcctmcaasacagcaactactgcagaattaaatctagcctccacaaaatctcaggtcaacagtatttcaaaagaataggatgcttcctctaaggcaagagacagcacytgtttttggattacctagttatatgcatttttacaagacaaataaggaagtttgcttatttgaagtatcactgattcaccagtatttcttgtacacctgtttgattcttgcagctcagtttcctgatctctgcaacagtaatagctaccttcacaatcagttgccagatacaggttattctcaggctgggttctctatcgc

SEQ ID NO: 26741 - DNA, 600 bp, Chicken  19866894243254_6
gcagaagggagaatatcaacttaaagtggcctatacattcacactcagaacctggaagagatcaaaaatgattcacttcacatttgtccaaacattcactgaaaaccatcctgagtccgcatttgacttgcaaagaggtggtaaagactacatgcttatatatagtccagtaattacagtaattacatcagctcctmcaasacagcaactactgcagaattaaatctagcctccacaaaatctcaggtcaacagtatttcaaaagaataggatgcttcctctaaggcaagagacagcacytgtttttggattacctagttatatgcatttttacaagacaaataaggaagtttgcttatttgaagtatcactgattcaccagtatttcttgtacacctgtttgattcttgcagctcagtttcctgatctctgcaacagtaatagctaccttcacaatcagttgccagatacaggttattctcaggctgggttctctatcgctagaagccataagcgtacaccaactgctgttacaaccaacaagaatgtcttcaatcatagcatctyagacttctccagtctgagttcctttgacatgta

SEQ ID NO: 26742 - DNA, 362 bp, Chicken  19866894243254_7
taggatgcttcctctaaggcaagagacagcacytgtttttggattacctagttatatgcatttttacaagacaaataaggaagtttgcttatttgaagtatcactgattcaccagtatttcttgtacacctgtttgattcttgcagctcagtttcctgatctctgcaacagtaatagctaccttcacaatcagttgccagatacaggttattctcaggctgggttctctatcgctagaagccataagcgtacaccaactgctgttacaaccaacaagaatgtcttcaatcatagcatctyagacttctccagtctgagttcctttgacatgtactcatagatgttttctgactgctctcaag

SEQ ID NO: 26743 - DNA, 600 bp, Chicken  19866894243260_1
tcagctgcctgggcttgcgcccagcatttgatttatacattatttaatttcctttagaaaattggaagcagaactttaggagtggaagtcagtccttttcatttgtttaaggatcttttagggctaatataatcatcgatagtagatgtcagcatgattagggtgacttaaggtgaagcaaggaacgctgaataccgggggaaattcttccataatggagagggtgccaagatttatggccatgcacaacatctgcaggtttggaactgcggcattaaaaaatgaaatggaaaattgtcrggtttttgagtgatgtgttcaggacacctgtgtccccttacygcatggcagactggggcaaggtttgtaaggtttgtgccctttaccttacatctgcgatcatttcttggactgcagtgctttctggaacttcatttcacaaactaactaattttgcagaaatttctcagtcagtcccggaggtttgcatttgggctgacgctgcattcacttctgcaattaggtctgcacatgccgtcaagtgactgccaagacaatttgaacatttctcatgcagtgaagtcaggaaattaaaaatta

SEQ ID NO: 26744 - DNA, 600 bp, Chicken  19866894243260_2
tttaatttcctttagaaaattggaagcagaactttaggagtggaagtcagtccttttcatttgtttaaggatcttttagggctaatataatcatcgatagtagatgtcagcatgattagggtgacttaaggtgaagcaaggaacgctgaataccgggggaaattcttccataatggagagggtgccaagatttatggccatgcacaacatctgcaggtttggaactgcggcattaaaaaatgaaatggaaaattgtcrggtttttgagtgatgtgttcaggacacctgtgtccccttacygcatggcagactggggcaaggtttgtaaggtttgtgccctttaccttacatctgcgatcatttcttggactgcagtgctttctggaacttcatttcacaaactaactaattttgcagaaatttctcagtcagtcccggaggtttgcatttgggctgacgctgcattcacttctgcaattaggtctgcacatgccgtcaagtgactgccaagacaatttgaacatttctcatgcagtgaagtcaggaaattaaaaattaactctggaaaggacatcatataatatttggcagcgtgctttg

SEQ ID NO: 26745 - DNA, 599 bp, Chicken  19866894243264_1
  misc_feature (1)..(277): n is any nucleotide
nnnnnnnnnnnnnnnnnnnnnnnnnnnnnnnnnnnnnnnnnnnnnnnnnnnnnnnnnnnnnnnnnnnnnnnnnnnnnnnnnnnnnnnnnnnnnnnnnnnnnnnnnnnnnnnnnnnnnnnnnnnnnnnnnnnnnnnnnnnnnnnnnnnnnnnnnnnnnnnnnnnnnnnnnnnnnnnnnnnnnnnnnnnnnnnnnnnnnnnnnnnnnnnnnnnnnnnnnnnnnnnnnnnnnnnnnnnnnnnnnnnnnnnnnnnnnnnnnnnnnnnnnnnnnnnnnnnnnacgcactacaggctctctttccyggccttaccacaaggtcacattgagaagcccacagtattgtcctaactctctttataggagcattttccaagtatgatgcttacaaaacgacagcctcagagccagccagcctgaacagggcctggctgctttaagctacggtgcagcagttgtgaggaaaccctcagggggattttatccaacaatcgcagagcacactgcaaggtttccaatgcaataccttcaattyacacacagattcctccaatgtggaaaaaatgacctcctgctgctgtcagggatcaataggacaccatgc

SEQ ID NO: 26746 - DNA, 599 bp, Chicken  19866894243264_2
  misc_feature (1)..(47): n is any nucleotide
nnnnnnnnnnnnnnnnnnnnnnnnnnnnnnnnnnnnnnnnnnnnnnnacgcactacaggctctctttccyggccttaccacaaggtcacattgagaagcccacagtattgtcctaactctctttataggagcattttccaagtatgatgcttacaaaacgacagcctcagagccagccagcctgaacagggcctggctgctttaagctacggtgcagcagttgtgaggaaaccctcagggggattttatccaacaatcgcagagcacactgcaaggtttccaatgcaataccttcaattyacacacagattcctccaatgtggaaaaaatgacctcctgctgctgtcagggatcaataggacaccatgctgctgtctccattgtgctgccattctgtatttctccctgagaagcagtgcccaacatgagcctcctgctgggtatggcctcttctgacaatgtcatccgatgcaccaagcagctgctcttgctgctagaacttctggaaagcagccccagggtgcttttaagttattcttgtcatgaaacttgtasaatgactgagaaattcactaggaactagtgtcaaatcagggaga

SEQ ID NO: 26747 - DNA, 600 bp, Chicken  19866894243264_3
atcgcagagcacactgcaaggtttccaatgcaataccttcaattyacacacagattcctccaatgtggaaaaaatgacctcctgctgctgtcagggatcaataggacaccatgctgctgtctccattgtgctgccattctgtatttctccctgagaagcagtgcccaacatgagcctcctgctgggtatggcctcttctgacaatgtcatccgatgcaccaagcagctgctcttgctgctagaacttctggaaagcagccccagggtgcttttaagttattcttgtcatgaaacttgtasaatgactgagaaattcactaggaactagtgtcaaatcagggagaaacaagtttattatttggtatcacggtatttcttgcttacagaattggaaacaggctcayctgcacactcaaaacaagccagagcaatcagaaagcaaagatastgcaatgccctccttctgctctccgcttagagtgcataacaacgtgatgcacccagcaccaagggcaatttctgctttggccgtatctgaaggaaggggaacaaagagcagccttgtaaccacaaagcctgactgaccgctctattcctgtg

SEQ ID NO: 26748 - DNA, 600 bp, Chicken  19866894243264_4
gacaccatgctgctgtctccattgtgctgccattctgtatttctccctgagaagcagtgcccaacatgagcctcctgctgggtatggcctcttctgacaatgtcatccgatgcaccaagcagctgctcttgctgctagaacttctggaaagcagccccagggtgcttttaagttattcttgtcatgaaacttgtasaatgactgagaaattcactaggaactagtgtcaaatcagggagaaacaagtttattatttggtatcacggtatttcttgcttacagaattggaaacaggctcayctgcacactcaaaacaagccagagcaatcagaaagcaaagatastgcaatgccctccttctgctctccgcttagagtgcataacaacgtgatgcacccagcaccaagggcaatttctgctttggccgtatctgaaggaaggggaacaaagagcagccttgtaaccacaaagcctgactgaccgctctattcctgtgctccaggcagaacagcagctaagagagggaacatcctgggcctaggaggcatcacccagacatacacaggttcagggagatctgccaaggctgggtactcactt

SEQ ID NO: 26749 - DNA, 600 bp, Chicken  19866894243264_5
ccctgagaagcagtgcccaacatgagcctcctgctgggtatggcctcttctgacaatgtcatccgatgcaccaagcagctgctcttgctgctagaacttctggaaagcagccccagggtgcttttaagttattcttgtcatgaaacttgtasaatgactgagaaattcactaggaactagtgtcaaatcagggagaaacaagtttattatttggtatcacggtatttcttgcttacagaattggaaacaggctcayctgcacactcaaaacaagccagagcaatcagaaagcaaagatastgcaatgccctccttctgctctccgcttagagtgcataacaacgtgatgcacccagcaccaagggcaatttctgctttggccgtatctgaaggaaggggaacaaagagcagccttgtaaccacaaagcctgactgaccgctctattcctgtgctccaggcagaacagcagctaagagagggaacatcctgggcctaggaggcatcacccagacatacacaggttcagggagatctgccaaggctgggtactcacttcccttaccttgacaggaagcagtctgaaatctccaagctgtctg

SEQ ID NO: 26750 - DNA, 581 bp, Chicken  19866894243264_6
aatcaaggccagtcagagtggatagtagcattaaagatatcagagtgtgcatacactggcctgaagccatggctgttttgaatgtgtttacagcttgtcagcctaagtactctagtttactaagcaggttggcactgcttgttgtattcaattacagcaaacctgagattcaccatctccaaggattagacaacttcagctcttcccaactctttttaaagagctcagaggcttgtggttgttatttaaattaacagcaataattgttttattgcaaatgttaaaagaatagagattaasaatctagaaaccaccatgtgtaagattcggccaagtggctgctgccggaacagctctgtaaagaaaaccagtgcttcaaagtgggcgtatgaaaggcactttaactttcagaccttcctttggtacagtgtgttcatatgttgtgcaatgaacgtgttcaaaggagaggtttcccgtaaggacagctcaggatctcacagacaagctaacaccctatgaaaaaaaaaaaaaacaacacattcatttcaaaagtttaaatatctttgaaagcatctgccaag

SEQ ID NO: 26751 - DNA, 599 bp, Chicken  19866894243265_1
  misc_feature (1)..(30): n is any nucleotide
nnnnnnnnnnnnnnnnnnnnnnnnnnnnnncagatgagatcataatgtacagtaaaactaaggagaagttggtcaggaaagttaccactggtgtggatacagctgagcactgatcaaaagatggtgacctattcacagttgtgacaaatgcatctggaaaactgtaagctctaagtaagtgccaacaaacttgtttacaaatccttttgagctttcaatttattagtgatatgtaaacaaccaggaggaaactttcctctggcagaacaaaagcatgtagaaaattcacaaattacaaawtcctaaatacagatagaaagctgacctttccacaagcagaatgtatttgttccttttgtggctaaacaagaagcttctgagaaatagtgaggaaactatttctactcttcaactcatataatgctgttaggtatatgcttgataaaaaggatggaatttaatcagatggtatgtataatttaagaagaaaacatgaagattaggtagactcagcacagatttacagtctaaagtctctgtgaatgagtttctgtacatatgatcttaatgattttatattatgttgataaatgtgcatc

SEQ ID NO: 26752 - DNA, 599 bp, Chicken  19866894243266_1
  misc_feature (1)..(113): n is any nucleotide
nnnnnnnnnnnnnnnnnnnnnnnnnnnnnnnnnnnnnnnnnnnnnnnnnnnnnnnnnnnnnnnnnnnnnnnnnnnnnnnnnnnnnnnnnnnnnnnnnnnnnnnnnnnnnnnnnctcttcttgagagctgatcttgcctggccctgcaccaggaggtgcaatggtgtaactgatgagcctgcagggggaattgttctttgttgctctcaacctggagaccttgagagagtgaaacagtggctgctgctctgaccattggaaaaaacagaaatcatagaatcaccatgtcaatcagtggcayatctccatggttcttgaacatctccaggggcagtgactgccccacctccctgggcagcctgtgctggtgcctcactgctcttcctaagaacaaatgcttcctgatacccaacctgaacctcccctggcacaatgtgaggctatcacctctcatcccgttgctgttacctgggagaagagtccaacccccatgtcgccacaacctcatttcagattgctgtagggagcgatgaggtctcctctgagatgtacctctgtcctcctggactacgaactctttcttatcctgtttctccaagt

SEQ ID NO: 26753 - DNA, 600 bp, Chicken  19866894243267_1
aaataaataattgaagtgcacattccaaatacctctgcactaaccaattttcccagagattgttctttcatctactccactggcaacagagcaggttgacaatctccatgactacgttgttgtcagtacatcccagctggtagctcagcatcacatcacagacttaaagcacacgagtcattattgttggatttttagaggcattggtgtggtacattcatcctattgatgaacttaaagatcttattggctaagcagtaagacattaatggacattaatatgctaacaaggcttttagmaaggtaaattaagataaatgtygtaggcttttatggatacagaaatacatcaggttttctgttgtttgagtgcatttgtgtctcaaggtgaatagaagactaaacttgtgtttcaaccagtaatcaggatgaaaaggcttctattttggaggtgttaaaagarcaggtactggagtctttcttcaccccagttcaatcttcttcaatctatctaccttaaccaaatgtatacaaagctagcatactaagttccagagggggaatggaattacatgtttttgttgtttggtttattttgaa

SEQ ID NO: 26754 - DNA, 600 bp, Chicken  19866894243267_2
ttccaaatacctctgcactaaccaattttcccagagattgttctttcatctactccactggcaacagagcaggttgacaatctccatgactacgttgttgtcagtacatcccagctggtagctcagcatcacatcacagacttaaagcacacgagtcattattgttggatttttagaggcattggtgtggtacattcatcctattgatgaacttaaagatcttattggctaagcagtaagacattaatggacattaatatgctaacaaggcttttagmaaggtaaattaagataaatgtygtaggcttttatggatacagaaatacatcaggttttctgttgtttgagtgcatttgtgtctcaaggtgaatagaagactaaacttgtgtttcaaccagtaatcaggatgaaaaggcttctattttggaggtgttaaaagarcaggtactggagtctttcttcaccccagttcaatcttcttcaatctatctaccttaaccaaatgtatacaaagctagcatactaagttccagagggggaatggaattacatgtttttgttgtttggtttattttgaaacaagtcatttgatggctgctt

SEQ ID NO: 26755 - DNA, 600 bp, Chicken  19866894243267_3
ttaaagcacacgagtcattattgttggatttttagaggcattggtgtggtacattcatcctattgatgaacttaaagatcttattggctaagcagtaagacattaatggacattaatatgctaacaaggcttttagmaaggtaaattaagataaatgtygtaggcttttatggatacagaaatacatcaggttttctgttgtttgagtgcatttgtgtctcaaggtgaatagaagactaaacttgtgtttcaaccagtaatcaggatgaaaaggcttctattttggaggtgttaaaagarcaggtactggagtctttcttcaccccagttcaatcttcttcaatctatctaccttaaccaaatgtatacaaagctagcatactaagttccagagggggaatggaattacatgtttttgttgtttggtttattttgaaacaagtcatttgatggctgctttattctttttgtattaattattttttgtgtccactggcagtrtaatttagtgtaaacttgcaaactgttcataaaagcaagctcttatcagatgtgtgtccaggatgtggaacaatggagttttaacacttgcttagggtg

SEQ ID NO: 26756 - DNA, 600 bp, Chicken  19866894243267_4
tttgagtgcatttgtgtctcaaggtgaatagaagactaaacttgtgtttcaaccagtaatcaggatgaaaaggcttctattttggaggtgttaaaagarcaggtactggagtctttcttcaccccagttcaatcttcttcaatctatctaccttaaccaaatgtatacaaagctagcatactaagttccagagggggaatggaattacatgtttttgttgtttggtttattttgaaacaagtcatttgatggctgctttattctttttgtattaattattttttgtgtccactggcagtrtaatttagtgtaaacttgcaaactgttcataaaagcaagctcttatcagatgtgtgtccaggatgtggaacaatggagttttaacacttgcttagggtgttttagtgccaatgtaagataataaagtagaatcagtagtacttttattttcttcacattctgcataggcaatatagagagctggcagggaaagtgttttgttttctggtgagctttaaaaatcagtttgaaaaagaaatcagcttggtttgaatgaagcacttcaatccaaagttaacctgatcattttgttgttgttat

SEQ ID NO: 26757 - DNA, 600 bp, Chicken  19866894243267_5
agatgtgtgtccaggatgtggaacaatggagttttaacacttgcttagggtgttttagtgccaatgtaagataataaagtagaatcagtagtacttttattttcttcacattctgcataggcaatatagagagctggcagggaaagtgttttgttttctggtgagctttaaaaatcagtttgaaaaagaaatcagcttggtttgaatgaagcacttcaatccaaagttaacctgatcattttgttgttgttataacaagtgaataagcaaggctttgaaataaatccaactataaataawacatcttgcgaaacctcaatacatggtatgttggcaaaatgaaagcttttattttagaacacttccaaactaggaggcttgagccattagcatttttggtctcctgtggctttttacccagcaaagcaatcattaatgcagttcacagaaagtcctatttaatgtttttgaggctttggatctttaagtaaaattttccactggtgtcaaagctggctcataggcagtctgttgaatcaaagaacataaggcctctaattactcgaagactgatgttgttacttaaatataaatcaacac

SEQ ID NO: 26758 - DNA, 600 bp, Chicken  19866894243267_6
ttggcaaaatgaaagcttttattttagaacacttccaaactaggaggcttgagccattagcatttttggtctcctgtggctttttacccagcaaagcaatcattaatgcagttcacagaaagtcctatttaatgtttttgaggctttggatctttaagtaaaattttccactggtgtcaaagctggctcataggcagtctgttgaatcaaagaacataaggcctctaattactcgaagactgatgttgttacttaaatataaatcaacaccattaatttaatatggagttgtgaactagraaagtgaaagccacgagctgcatcatttgtgggagttgctgaggcatgtgctgtagctgccgactgcttttgtgaactgtacatctacatttctgcagaacacctgtatctatttcagcagtttgggccacttcccactttctgtgcaaaacagctccckctgtggaagccttgtgatagcttcactttttwtcccaccttctttggtgatttgcacaaaatgcattgcctcattatgctcactgtgctcactctaagtgcacatttattttgtatttatgtatgtatgtgaaaatgaca

SEQ ID NO: 26759 - DNA, 600 bp, Chicken  19866894243267_7
aaattttccactggtgtcaaagctggctcataggcagtctgttgaatcaaagaacataaggcctctaattactcgaagactgatgttgttacttaaatataaatcaacaccattaatttaatatggagttgtgaactagraaagtgaaagccacgagctgcatcatttgtgggagttgctgaggcatgtgctgtagctgccgactgcttttgtgaactgtacatctacatttctgcagaacacctgtatctatttcagcagtttgggccacttcccactttctgtgcaaaacagctccckctgtggaagccttgtgatagcttcactttttwtcccaccttctttggtgatttgcacaaaatgcattgcctcattatgctcactgtgctcactctaagtgcacatttattttgtatttatgtatgtatgtgaaaatgacaagtgcttttccaaatcagtgcccatatgtacatgattcttctgtgcctgcagagcttacagggaaaggaaggaaaacagctgaagtttattggctgagaatctcttgggaactgtatttgtgaaaaaatagcctgggttcaccccactgagcacttgtga

SEQ ID NO: 26760 - DNA, 600 bp, Chicken  19866894243267_8
ggcagtctgttgaatcaaagaacataaggcctctaattactcgaagactgatgttgttacttaaatataaatcaacaccattaatttaatatggagttgtgaactagraaagtgaaagccacgagctgcatcatttgtgggagttgctgaggcatgtgctgtagctgccgactgcttttgtgaactgtacatctacatttctgcagaacacctgtatctatttcagcagtttgggccacttcccactttctgtgcaaaacagctccckctgtggaagccttgtgatagcttcactttttwtcccaccttctttggtgatttgcacaaaatgcattgcctcattatgctcactgtgctcactctaagtgcacatttattttgtatttatgtatgtatgtgaaaatgacaagtgcttttccaaatcagtgcccatatgtacatgattcttctgtgcctgcagagcttacagggaaaggaaggaaaacagctgaagtttattggctgagaatctcttgggaactgtatttgtgaaaaaatagcctgggttcaccccactgagcacttgtgattgtcaacttcatggtttttagtgatctattg

SEQ ID NO: 26761 - DNA, 600 bp, Chicken  19866894243268_1
tgtcccagaagagagctacacctcccagaaaactcttctctgttctgttaccatttccgcttagagggaaagataaaaaccgttcacagagcatgagacatctcttttccatcttccagctcatctctgttgtgggtgccatattgcctcagcttacttaaagtaaggccttaggttttcggacgctctctctcattttatttattaccttcaattccaattatatgatattatattgtattatagtgtgttatcttgcattctgatatcttatttagtaaatttgtttctcctcaaatygttgctgctgttttgtttttaggcccatctccctacccttccccccttttctcctttttcctttcctaggacatgggtctgtggttccccccaccctgctagtcacagaactgagccaaaccagcccataaaccattgacataggctcattaataatttactaaagaaaacatttgaataaaatctgtagaatttatagttatgctacctwaacaaatgatgtcatcatcttctctggcttgtaataggaatggaacaatgacacaactactaaaaagagtaaatgcaatgagggattta

SEQ ID NO: 26762 - DNA, 600 bp, Chicken  19866894243268_2
caattccaattatatgatattatattgtattatagtgtgttatcttgcattctgatatcttatttagtaaatttgtttctcctcaaatygttgctgctgttttgtttttaggcccatctccctacccttccccccttttctcctttttcctttcctaggacatgggtctgtggttccccccaccctgctagtcacagaactgagccaaaccagcccataaaccattgacataggctcattaataatttactaaagaaaacatttgaataaaatctgtagaatttatagttatgctacctwaacaaatgatgtcatcatcttctctggcttgtaataggaatggaacaatgacacaactactaaaaagagtaaatgcaatgagggatttatatgaaggatgtgtaatttgcaaatagatggcaatatcggtgtcagcaagacagaaaacacactgctatatgcttaggctatttttctgcagttgacagcaacactgactaactcatgttattcagatggtcacttcaaaaagtagatgtgcatcttgacttttttcatactatcgagcaatatctagagtcaaaccagggacaaatacag

SEQ ID NO: 26763 - DNA, 599 bp, Chicken  19866894243274_1
  misc_feature (1)..(209): n is any nucleotide
nnnnnnnnnnnnnnnnnnnnnnnnnnnnnnnnnnnnnnnnnnnnnnnnnnnnnnnnnnnnnnnnnnnnnnnnnnnnnnnnnnnnnnnnnnnnnnnnnnnnnnnnnnnnnnnnnnnnnnnnnnnnnnnnnnnnnnnnnnnnnnnnnnnnnnnnnnnnnnnnnnnnnnnnnnnnnnnnnnnnnnnnnnnnnnnnnnnnnnnnnnnnnnnnnttttccttactgccctgatgttgtttgtttcctttcactgctaaattcaaatgacacacagctctgccttcccctcagagctgatgattcyctccctgtgcacagctttccaggacgttcacgtgatgatctttgtgggcttcggcttcctcatgacattcctcaagcgttatggattcggagctgtgggattcaatttcctccttgctgcctttgggatccagtgggctctcctgatgcaaggctggttccactctttccagaatggaaagatccttattggagtggaaaagtaaggagagatatgggctctgggatgccacctcttgactgcgcagtggaagagctgggatgagagctagtgcttgtccctgtgttacgtgcagacta

SEQ ID NO: 26764 - DNA, 600 bp, Chicken  19866894243274_2
tgcctttgggatccagtgggctctcctgatgcaaggctggttccactctttccagaatggaaagatccttattggagtggaaaagtaaggagagatatgggctctgggatgccacctcttgactgcgcagtggaagagctgggatgagagctagtgcttgtccctgtgttacgtgcagactacagcctccaaaatgctgtcctccttctgcataaccccacttgctttccgccttttagtccacaggtacctgtatgatggtggtactgttacatgagaaatgtgagatgagtgccatcycttagtatccaagcagagcaccacagaccccaaggttaagaacacataagatccttcattctcattatttaaacaaattggatgaaagctccatacccagacaacatgtcaagttgagaggaaagtcaacgggaaacccagggctggctccttactgactatatgccttacagtgggatctcttagagttcggtgtgggtgagggtgagtaattttggaagagtatttccttataaaatcacaatgttccttcccctcttccagcctgatcaatgctgatttctgcgtgggttctgtgtg

SEQ ID NO: 26765 - DNA, 425 bp, Chicken  19866894243274_3
tgtagaccacacctcatctccagaataagcagtgactccagaaatgaacctctggtttcccatggctgcaggttaaggatgcgggtggctccatgaccattcacacctttggagcctactttggcctcactgtgacacgtttcctatacagacccaacctggagcagagtaaagacaaggaaggctctgtgtaccactctgacctctttgctatgatcggtgagtcagccataacctctgcagcattggtacatgtgtaccactcagttgcagagagctgttccctcccatgtctctggraaaaccagaccaaaacccagatctgggaccaagaagctctgcatcccagttttcaacaccatggaactacttatctcccccccactaatggttgggctgaggtgggctgggaagacaaggcagca

SEQ ID NO: 26766 - DNA, 600 bp, Chicken  19866894243277_1
actaggagtagtagagaatcgattgctgatatcagcagaggcaaggggcttttctcagaagagcctgcccaaggagaagggcaaagtagctggtatgctctgtagctccttggagggcaaaacagaagagaagaagccctccattgttgagggagttgctgtgtgccatgtgctagaggctgcatggagaatcttgtttcctgggccatggcagctcatcctagtatgtcaagtgctctctgcctctaagagaaagtatcccagtaacagtcttccagctcacatgaagagaccagatgktcttgtttcatgcgcccttaactattgcagaactcamatgcaagaacrcaaagttcagagtttttccttttagctttatatcttttcaggaccacaagctcaattcattggatctgcatttttgaatagctgctaatatgctattgttctctcttgggattagttagtgagatccttttttttcttctcatggtgcatggtcatatcctatggacaataaaaatgcttcagaattactttattcttatcctggcatgagagctgaggtcttgtaactgtgttgcattttttttttaagct

SEQ ID NO: 26767 - DNA, 600 bp, Chicken  19866894243277_2
gaggcaaggggcttttctcagaagagcctgcccaaggagaagggcaaagtagctggtatgctctgtagctccttggagggcaaaacagaagagaagaagccctccattgttgagggagttgctgtgtgccatgtgctagaggctgcatggagaatcttgtttcctgggccatggcagctcatcctagtatgtcaagtgctctctgcctctaagagaaagtatcccagtaacagtcttccagctcacatgaagagaccagatgktcttgtttcatgcgcccttaactattgcagaactcamatgcaagaacrcaaagttcagagtttttccttttagctttatatcttttcaggaccacaagctcaattcattggatctgcatttttgaatagctgctaatatgctattgttctctcttgggattagttagtgagatccttttttttcttctcatggtgcatggtcatatcctatggacaataaaaatgcttcagaattactttattcttatcctggcatgagagctgaggtcttgtaactgtgttgcattttttttttaagcttttcattgcatgttttttcagatacattgctattcct

SEQ ID NO: 26768 - DNA, 600 bp, Chicken  19866894243277_3
cttttctcagaagagcctgcccaaggagaagggcaaagtagctggtatgctctgtagctccttggagggcaaaacagaagagaagaagccctccattgttgagggagttgctgtgtgccatgtgctagaggctgcatggagaatcttgtttcctgggccatggcagctcatcctagtatgtcaagtgctctctgcctctaagagaaagtatcccagtaacagtcttccagctcacatgaagagaccagatgktcttgtttcatgcgcccttaactattgcagaactcamatgcaagaacrcaaagttcagagtttttccttttagctttatatcttttcaggaccacaagctcaattcattggatctgcatttttgaatagctgctaatatgctattgttctctcttgggattagttagtgagatccttttttttcttctcatggtgcatggtcatatcctatggacaataaaaatgcttcagaattactttattcttatcctggcatgagagctgaggtcttgtaactgtgttgcattttttttttaagcttttcattgcatgttttttcagatacattgctattcctctagcaaaagc

SEQ ID NO: 26769 - DNA, 600 bp, Chicken  19866894243277_4
ctcaagtaaggattctgcttcttttaaactagttttggttcttggaacatcacaggttttactgttttaataaaccatcaacaatgacatcatgggatgagttccatctgattgacagatgacttaatctatttgggtttatgttgctattctgctgacaagggtatatagcatccaaaccagaaaatatgtttaagatgtttaattttctggcatgctcttgtacgttagactgtaagaagtatttccaatgaagatcaatgcttgatcttctttaactcattctgcctggagaaaacrtcagctgatgtctgttgttgggaagtggtatcatatttattgcaagtagtaatactggaacactgggatggaagacctttgatccgttacattgctgcatacttaatcctagcttatgaaagaaagaggtaatgcataggttatttcttgctgtctatttctaaatttgaacaagtaaaagataaaagctgacatttaccatcccraaatatgaagcaacctgattgttgatgagaaacaggtaccttgctgtgattgcagtctcagaaagttcatttaattgactacaaatacaattgc

SEQ ID NO: 26770 - DNA, 600 bp, Chicken  19866894243277_5
tttctggcatgctcttgtacgttagactgtaagaagtatttccaatgaagatcaatgcttgatcttctttaactcattctgcctggagaaaacrtcagctgatgtctgttgttgggaagtggtatcatatttattgcaagtagtaatactggaacactgggatggaagacctttgatccgttacattgctgcatacttaatcctagcttatgaaagaaagaggtaatgcataggttatttcttgctgtctatttctaaatttgaacaagtaaaagataaaagctgacatttaccatcccraaatatgaagcaacctgattgttgatgagaaacaggtaccttgctgtgattgcagtctcagaaagttcatttaattgactacaaatacaattgcagcattcctacactggttttgaaaagaatgatgtgctcagctggttattaatacatggaactttgcattctatccttgactttgtctctctgtttttttggcctcattgtgaggagaagtattcatgttcacacgtgagctcttttctatctgggcaagtgtcttgatctctgcttcataacttcctcctgcatgaatgcagtttg

SEQ ID NO: 26771 - DNA, 600 bp, Chicken  19866894243278_1
aaaacaacctgaaaagaaaatggatgcaggctgttaggattgagccggctgccccagcacttctcacccatctgcctttcttcccacagtgcaaagtcatcatctgccagatgagcagcacacagccggagctgctgcactggttcctgttccccttggcactggtggtctacgcagccatctcagggctgctgggccgggcagaggaagccgtgctgggtgcattcacagcgctggtcacggctgcacacgtgcactacggcatctgtgtggtaaggggctggggggagctgtgcacaytgtgggggtgagggccttctggggctggcttctgtgctgcctgggtggggtgttgtcctggagtctgagtgttaagctatcggttcctcacatgctgtatgtagttgatcaacggggcatggatgccctcttatctttgttctttctcctcctgaggttatttgagtgaaaaaagcaggaaggtaaagtgggacgtaagatacgtcacattcttacaatcaggcggtgaacttcactttgaatccacaagcaaaacagctgctcaaatttcttgtcttttcacagccttctattagcatc

SEQ ID NO: 26772 - DNA, 600 bp, Chicken  19866894243281_1
caactttcaagttttcaagttcactaaaaatcagtaaggaaatatcaatatctatgatgttattgtttacaagagcaaagttaatcaatatgcaaaactgacaggtgtatgcaccttcttaacaagctacatttataaaggaaaaatctgcaaggaggaaataggataggtatttttattatcataaagtcattgaggttggaaaataccactaagatcatctagtccaaccatcaacccataaccaccacgcccactaaaccatgtccctcagtgcagtatctacccttttcttgaaakctctcagggacagcaatttcactcctccaatacctaaccactccttctgaaaggaatgttttctcacacccaacctgaacctcccckgacacacgttaaaaccattacytcctgtcctgttgctagttacctggaaaaagaggccaaactccaaagcatcatatatgaacatcatatattattcctgtgaaaaatgctcctttagcgatagttaagcattttcaaatttatgtcagttgggctgaaaattatcccaaaaataacttttggaacaggaaaaagtaaattcacttttaaaaa

SEQ ID NO: 26773 - DNA, 600 bp, Chicken  19866894243281_2
atatgcaaaactgacaggtgtatgcaccttcttaacaagctacatttataaaggaaaaatctgcaaggaggaaataggataggtatttttattatcataaagtcattgaggttggaaaataccactaagatcatctagtccaaccatcaacccataaccaccacgcccactaaaccatgtccctcagtgcagtatctacccttttcttgaaakctctcagggacagcaatttcactcctccaatacctaaccactccttctgaaaggaatgttttctcacacccaacctgaacctcccckgacacacgttaaaaccattacytcctgtcctgttgctagttacctggaaaaagaggccaaactccaaagcatcatatatgaacatcatatattattcctgtgaaaaatgctcctttagcgatagttaagcattttcaaatttatgtcagttgggctgaaaattatcccaaaaataacttttggaacaggaaaaagtaaattcacttttaaaaaatgatcaaaatgcgcagtcaatgatgttaaaaaccaaatgtttctttacaggggctcaacaaatgttttgttccctattactttttc

SEQ ID NO: 26774 - DNA, 600 bp, Chicken  19866894243281_3
tgcaccttcttaacaagctacatttataaaggaaaaatctgcaaggaggaaataggataggtatttttattatcataaagtcattgaggttggaaaataccactaagatcatctagtccaaccatcaacccataaccaccacgcccactaaaccatgtccctcagtgcagtatctacccttttcttgaaakctctcagggacagcaatttcactcctccaatacctaaccactccttctgaaaggaatgttttctcacacccaacctgaacctcccckgacacacgttaaaaccattacytcctgtcctgttgctagttacctggaaaaagaggccaaactccaaagcatcatatatgaacatcatatattattcctgtgaaaaatgctcctttagcgatagttaagcattttcaaatttatgtcagttgggctgaaaattatcccaaaaataacttttggaacaggaaaaagtaaattcacttttaaaaaatgatcaaaatgcgcagtcaatgatgttaaaaaccaaatgtttctttacaggggctcaacaaatgttttgttccctattactttttcttatttttccttcaactctacc

SEQ ID NO: 26775 - DNA, 600 bp, Chicken  19866894243282_1
tgcaaattcaggcattgctctgtaacacagcgtggttacaatcttgtcaacacaaaactggaaaatattttcaactcaaaataaactccacaagaatagtttccatgttatctcctattcagaggaaagctactgcacttcagtcctaaataaagattctggctgacttcagcactttgagaagcagcgctggttgtcttagatgtgaccattgccttaatgagtctgtctgtatgccttgcttttcatgcaaacctttgactgttgttgctgctgtgagcaggatgctgctgggggccyaggcagcgctcagccctgggtggcagcacgtggctttgggggcagcttgcccattttctaagcctgtcagtgtcctttattcctacttagccttgmtggataaagaaaaattaacctatgcccgaggaggcagggattgaccatacagtgaccacttgcgtgagctgttggcatcctttgaagcctgctttgtgctgttctcagatcccacaccaggtaagatggatcgtggagctgatgatccattggcaatggcaatcacgcagtggcaatttgtctttattttcattttttccttga

SEQ ID NO: 26776 - DNA, 600 bp, Chicken  19866894243282_2
tagtttccatgttatctcctattcagaggaaagctactgcacttcagtcctaaataaagattctggctgacttcagcactttgagaagcagcgctggttgtcttagatgtgaccattgccttaatgagtctgtctgtatgccttgcttttcatgcaaacctttgactgttgttgctgctgtgagcaggatgctgctgggggccyaggcagcgctcagccctgggtggcagcacgtggctttgggggcagcttgcccattttctaagcctgtcagtgtcctttattcctacttagccttgmtggataaagaaaaattaacctatgcccgaggaggcagggattgaccatacagtgaccacttgcgtgagctgttggcatcctttgaagcctgctttgtgctgttctcagatcccacaccaggtaagatggatcgtggagctgatgatccattggcaatggcaatcacgcagtggcaatttgtctttattttcattttttccttgattttccacgatggcttggtgccctgctcactcctgggagcgttaccaagctgcctcttgggagcagttgacttccagaacatgaaaacttcttagc

SEQ ID NO: 26777 - DNA, 600 bp, Chicken  19866894243282_3
ttgttttctttagcttttgagtagtgttagccttagctgtaacctctttcggtttgttatctttcatagggacttcctggagctctgatcctgcagtgaaatccatgcagatggattctttctgctctgaggtcttaggtcacagcaacgaggccagacacgctgcatggttgtgcttaggttagggttgccctggcaggagctgctctctgctgtgtttcctgtttgtaggatatgtaggtacagatctctgtaaaggcactgagtgtatggtgctgagctctgagcagtgggagttakcccacagtgcaaggtctggagcctcagtgcaggcagartgctacttcaaatggctacccagaaygtgactgcctgtgcattaaggtgtgtgaagactatccttaatctgaatgttcaagttaatgggaaatgaaccttctggttcaggctgtgaggtgttaacgggtagtccttggatggaaaagacagcgtgtgtgtactcctccaggtgagctagagctcatgggcaagcctttgccctgtgcattstatagatagacccaggggtttcctacgtggctcctgctccagctgattaca

SEQ ID NO: 26778 - DNA, 600 bp, Chicken  19866894243282_4
gtaacctctttcggtttgttatctttcatagggacttcctggagctctgatcctgcagtgaaatccatgcagatggattctttctgctctgaggtcttaggtcacagcaacgaggccagacacgctgcatggttgtgcttaggttagggttgccctggcaggagctgctctctgctgtgtttcctgtttgtaggatatgtaggtacagatctctgtaaaggcactgagtgtatggtgctgagctctgagcagtgggagttakcccacagtgcaaggtctggagcctcagtgcaggcagartgctacttcaaatggctacccagaaygtgactgcctgtgcattaaggtgtgtgaagactatccttaatctgaatgttcaagttaatgggaaatgaaccttctggttcaggctgtgaggtgttaacgggtagtccttggatggaaaagacagcgtgtgtgtactcctccaggtgagctagagctcatgggcaagcctttgccctgtgcattstatagatagacccaggggtttcctacgtggctcctgctccagctgattacatgtgtcactgcagctggcactgctggggacgtgacagc

SEQ ID NO: 26779 - DNA, 600 bp, Chicken  19866894243282_5
catagggacttcctggagctctgatcctgcagtgaaatccatgcagatggattctttctgctctgaggtcttaggtcacagcaacgaggccagacacgctgcatggttgtgcttaggttagggttgccctggcaggagctgctctctgctgtgtttcctgtttgtaggatatgtaggtacagatctctgtaaaggcactgagtgtatggtgctgagctctgagcagtgggagttakcccacagtgcaaggtctggagcctcagtgcaggcagartgctacttcaaatggctacccagaaygtgactgcctgtgcattaaggtgtgtgaagactatccttaatctgaatgttcaagttaatgggaaatgaaccttctggttcaggctgtgaggtgttaacgggtagtccttggatggaaaagacagcgtgtgtgtactcctccaggtgagctagagctcatgggcaagcctttgccctgtgcattstatagatagacccaggggtttcctacgtggctcctgctccagctgattacatgtgtcactgcagctggcactgctggggacgtgacagcaaagtgccatccagaactcgtgaaaa

SEQ ID NO: 26780 - DNA, 600 bp, Chicken  19866894243282_6
tctgtaaaggcactgagtgtatggtgctgagctctgagcagtgggagttakcccacagtgcaaggtctggagcctcagtgcaggcagartgctacttcaaatggctacccagaaygtgactgcctgtgcattaaggtgtgtgaagactatccttaatctgaatgttcaagttaatgggaaatgaaccttctggttcaggctgtgaggtgttaacgggtagtccttggatggaaaagacagcgtgtgtgtactcctccaggtgagctagagctcatgggcaagcctttgccctgtgcattstatagatagacccaggggtttcctacgtggctcctgctccagctgattacatgtgtcactgcagctggcactgctggggacgtgacagcaaagtgccatccagaactcgtgaaaaacaaacgcagggtttgtgtgattgattcactgtcattcaggattttggcttactaacaaaataaaagcagatctgtggaaatgcagaagttgaacttttaggctaatgaagctgttttgtgtctgacaaacgggcagctacgctggtaggaaaaggtgggggtgacttttgatgagaaagttaat

SEQ ID NO: 26781 - DNA, 600 bp, Chicken  19866894243291_1
gattcttaacttcggaataccttgtctaaggaacaccagaggtgagaaaccgagatgaaactttgtgaccacctgtgaaataatgtaattccatagtctctttctggtgatgaatttaagcaattcatgttcttgcaacttacctcctttactgaaaaggaaaggaggttctctactcagtgatattgcttttatgcagaattgtgtttttggtattacagctgtagtactgttcatccttaagactgctctgtaggctttctgttgttaatcattttgaccaaagtaaggttgctgtasaaaggtcacgacatcaaaaaacaattttaagatggagttaaaacatactcgaatcaaactgcaagcttaacaaagggaatttttagttcatctgtctgactctgagctgtaattaaagaattagtttaaaaacaggtaattgaaggaaaaaaaaatgcagttagccctcaagcatgtggttttaatacaagttataaatgacaatggtggatcagaacacaacatgtaatagaacataacatgctttcaacaaaaacagatcacactggactatctagctactggatttctaaacaagga

SEQ ID NO: 26782 - DNA, 600 bp, Chicken  19866894243292_1
cacatttctgatgagtgtccaaagcttatcttctgaggcaaactctggagcacttcacttcacatgctgcaagcttttgtagactgttcctaaggtagaagctaaagctatgaaaaatctactcctgcttttaacagttcatcatcacagactgccagacactacagcaagcaggaaggccaggacattaagaactcttggggctttgttatctgacattagcacagcaggcaagctacactgtctgcaaacaaattttctttcacgtatcattcaaattaccaaggcaacagaaacagraatttgtaagcaagcagcactcaaagtgggactcaaattcctcctctcttctacaccactgtaagggatacattccatacctaaatataagtatgtaattttaagcacatgttgccatgactaaaagcataaaccgtaacaaccaaaaaataccttatttgcaggtatggacgtaattcaaatctctcatccttctgcatttccacataggaaagtagcacacamttcaacagcaaaagttacagagaaatcacacattgttaaaaacctaatcaatacttaccattaaatttataaatt

SEQ ID NO: 26783 - DNA, 597 bp, Chicken  19866894243292_2
agcaggcaagctacactgtctgcaaacaaattttctttcacgtatcattcaaattaccaaggcaacagaaacagraatttgtaagcaagcagcactcaaagtgggactcaaattcctcctctcttctacaccactgtaagggatacattccatacctaaatataagtatgtaattttaagcacatgttgccatgactaaaagcataaaccgtaacaaccaaaaaataccttatttgcaggtatggacgtaattcaaatctctcatccttctgcatttccacataggaaagtagcacacamttcaacagcaaaagttacagagaaatcacacattgttaaaaacctaatcaatacttaccattaaatttataaattttctgttttctgtaatgtggaagtagccatctcttgtaaaaatcttgatatgtttcacttcgttattgtacctgtgggcaatgaataacttatgaatataaatgtgtttttaatcaggggcaatcaatagttacctgaaggcatgccccaaaaacattatacaaataaattcttaagacaaaatgcacatctacgtcaacacaaagttgacatctaattaag

SEQ ID NO: 26784 - DNA, 600 bp, Chicken  19866894243294_1
caaaatcatatcttaccacaggaattaaaacagtgcaaagataaatagaaaattgattttagaaatactgttcagcaaaaggctgaaggagataaacttctctgaaaattgcctcctgctgtcttacacattttataagccatgctggggcatatttgaatgaagtaatttgccatgcacagaccttttaactgctcaaatgcatgcaaaaagcattgtgtagaaatcacacaataatcagttcaaacattcatatctcaaaagcattaacagtttccattcatcaggaaaaatattttsttccctttatacatatctctgaattgtagaatggcttaggttggaggagaccctaagaaccacctgaccccaaccctctgccatggtaatgttgccatccaccagctcaggctgcccagggttccatccaacctggccacaagttcctccagggatggggcacccacagcctcactgggcaaacagtttggttgtgaaaacaatttgttaaatgggataaagcaccatgatctatgcttttaaacagaatgaaaacattttttgtagtagttgtacttacatatttagtttccatccaat

SEQ ID NO: 26785 - DNA, 600 bp, Chicken  19866894243295_1
gataaaatctcagcatcactgaaccatgtgtactccggttttcagagacagtcagatcaaatctctttctacttactctgcagtttccattaatgttagcaggcataattcttcttgcttctgtcagagacagcttgatacacatgtgggatcctttgataacctctttaaaatacacccttctgctttgtatgcactttagagctttagtgatctcaggatgtttctttgtgtccccatggccaaaatgttatctaatacttcttgtaaataatacaggagagctttctatgctatgartgaccctggactccagtctgtttgactacgctttgcccacaggggtgttttgctggagtcaggggaaggcatcagaagttgaagcagaaggggcattttcttgctttttcacagttctgaagcaactgtatctgttcagctgccaggcaagacaagaacagagagagaggaaggtgaagaggggagaagctggtgcagttatctttgctttccagttcattggtccaaagatatggagggtcaagtcatttcttctgaggagcctctgagccacactttgtgtgatggagattttttata

SEQ ID NO: 26786 - DNA, 600 bp, Chicken  19866894243297_1
gttgagtgtgggtgttattcacacatcactgttaaaaagaacagaatttgttttcttttcttttatggagctaattattccttaaagaaataattgagatgcctaaatggctgtgctcttaaacaatgggcaccaggaaacagcttcatccctctttgtaggcagttatgctgtaagcccacatgtggacgtcaccagaaagctggtttgtgtcctgcacggctgtaagacttgtgtacgacttgtatggtttttgccccactttgaaatgaagcagacggttcatttcctcccacaacrggcagaaaagagcagtgctgtgctcgccatccttctgggcgctccgcagtttgttattgctatgacaggacagcccagctagcacgttayaatgtaagcattccctctgtttgtttttttgttgtggtagacttgtacttgatcttccaagaacatcagaagagtggaagcaggatgatgtgatggtgtgcttctattgacagaacttccctacgtgtgcacagcgtgcctttgtgtgacgtgacctcagtaaagcactttattaaggactactcctgtaaaacatgctgtgctgtaata

SEQ ID NO: 26787 - DNA, 600 bp, Chicken  19866894243297_2; identical to SEQ ID NO: 26786

SEQ ID NO: 26788 - DNA, 600 bp, Chicken  19866894243297_3
taattgagatgcctaaatggctgtgctcttaaacaatgggcaccaggaaacagcttcatccctctttgtaggcagttatgctgtaagcccacatgtggacgtcaccagaaagctggtttgtgtcctgcacggctgtaagacttgtgtacgacttgtatggtttttgccccactttgaaatgaagcagacggttcatttcctcccacaacaggcagaaaagagcagtgctgtgctcgccatccttctgggcgctccgcagtttgttattgctatgacaggacagcccagctagcacgttayaatgtaagcattccctctgtttgtttttttgttgtggtagacttgtacttgatcttccaagaacatcagaagagtggaagcaggatgatgtgatggtgtgcttctattgacagaacttccctacgtgtgcacagcgtgcctttgtgtgacgtgacctcagtaaagcactttattaaggactactcctgtaaaacatgctgtgctgtaatagtggcacttggcagctttctgttacttcaatcatgacaattttaataacgttggtctgcagtttgcgttaatcatttaactaataacatc

SEQ ID NO: 26789 - DNA, 600 bp, Chicken  19866894243300_1
agagggcccgcatggtgacgctgcatggatacattgagagtgagtgcggggctgggggcgggggggcacagcttggccccacagagctcctcggcgttaccgccgctggccctcccgggctctgtcatggcgagcagcccgctcagggccgggtgtttcacacccccaggccatgacggaccgcctgcgagcggtgttacagcagaagggtgagcaggacggagcacctgggctctgtaagccctcaaagcttctcctcgccctcatggccccccccccgcctccagtgggtctgggccytgacgagccccagcctggtggtgtcccctcagagtccccctggccaggctgtactgtgggctggctgtgggcacagggctgaggcctttctcctccacaggtcargtacagtgtggacaagtgcactgtagacttccctacacggctcctccagtgcacctcaaagcagacatggaaggaccgctatcaaataggggtgagaaggtaattctggtgcttgctgctgctttggggccgacctccttccgtagcaatagtttttgtgtaatgtcagtgccatcccgcgctcytgtgagcagc

SEQ ID NO: 26790 - DNA, 600 bp, Chicken  19866894243300_2
ctggccctcccgggctctgtcatggcgagcagcccgctcagggccgggtgtttcacacccccaggccatgacggaccgcctgcgagcggtgttacagcagaagggtgagcaggacggagcacctgggctctgtaagccctcaaagcttctcctcgccctcatggccccccccccgcctccagtgggtctgggccytgacgagccccagcctggtggtgtcccctcagagtccccctggccaggctgtactgtgggctggctgtgggcacagggctgaggcctttctcctccacaggtcargtacagtgtggacaagtgcactgtagacttccctacacggctcctccagtgcacctcaaagcagacatggaaggaccgctatcaaataggggtgagaaggtaattctggtgcttgctgctgctttggggccgacctccttccgtagcaatagtttttgtgtaatgtcagtgccatcccgcgctcytgtgagcagcactctgtgatctggcagctgctggctctcaactgtgtttccttcattttggcggccttagaatgactgttggtaaatggcaccagtgtgttctgtgctgaatgct

SEQ ID NO: 26791 - DNA, 600 bp, Chicken  19866894243300_3
gtctgggccytgacgagccccagcctggtggtgtcccctcagagtccccctggccaggctgtactgtgggctggctgtgggcacagggctgaggcctttctcctccacaggtcargtacagtgtggacaagtgcactgtagacttccctacacggctcctccagtgcacctcaaagcagacatggaaggaccgctatcaaataggggtgagaaggtaattctggtgcttgctgctgctttggggccgacctccttccgtagcaatagtttttgtgtaatgtcagtgccatcccgcgctcytgtgagcagcactctgtgatctggcagctgctggctctcaactgtgtttccttcattttggcggccttagaatgactgttggtaaatggcaccagtgtgttctgtgctgaatgctccctggtgttgtggtgtgctgggatgctctggggtctcgtgtcctcctgcctgagctcccctgtgcctggttctcccttcccccagcgctgccaccgcgctgccggcgctcggcctgtgcagccttccatgagttaacaggaaaggttcatttcttgggaattccagaattgctcaaaaaataac

SEQ ID NO: 26792 - DNA, 600 bp, Chicken  19866894243306_1
aacaaacaaattcccttcattcttcatctgtcatatggaattaacagatagagctaaaaccaaagctactgatttcattaagcgtacactagggacgaagttctccctgcataccaagcatgtcattgtacgtgtttaaaactttcctctgaccacgtcttttcaattacttcccccatctccacacctccctaaactctttgagcaagcagctattaaactcctgagagcctcagactcactcttcaagcccctccatctggatttcctctcctcagctcctcatccagaaatcttacygggtatatttcctgactcgctgttgtcttctccctgaagccctgctgccacccgaggtgctgctgttcattcctttctgacagcttctctctgctggagctctcacagctcagaccttcattctgctctttttttcttttttttttttaacctaacctgcagaaaatcttcatgcacacacatggccccattccaggaactctgaaagaggtttcgctattctatggtctttattcttacatctctgaaccccaatacctcataagatggcagcccaccccaacattttctccactattt

SEQ ID NO: 26793 - DNA, 599 bp, Chicken  19866894243307_1
  misc_feature (1)..(96): n is any nucleotide
nnnnnnnnnnnnnnnnnnnnnnnnnnnnnnnnnnnnnnnnnnnnnnnnnnnnnnnnnnnnnnnnnnnnnnnnnnnnnnnnnnnnnnnnnnnnnnnntatgatggagagcggctttgcaaccacatcagccatttccttcaggaccccaggatgcgtgttgtctgaccccataggccgttcaatctcatgaggcagttttggccttgccctgctcttaaagtgggagggattttgctccctcagcccccaactagatattcagggacacatgaggcatgggaagcctgactgccagtgaasactgaggcaaagaactcactgagtgccttagccttctccatgtcttttgtagctagttctccctttacatttaccaaaggggatataccctcctttgcctttcttttctaaccaatgtacctgtagaatccctttttgttattttttgcatctgttgcccagttcagttccataagcacatttgcgttcctgatctcatctctacatgtcctaacagcacacctgtattcttcccaggccactcatcccagcttctactgcctacgtttttccttcttatccctcagtttgaccagcaa

SEQ ID NO: 26794 - DNA, 599 bp, Chicken  19866894243309_1
  misc_feature (1)..(73): n is any nucleotide
nnnnnnnnnnnnnnnnnnnnnnnnnnnnnnnnnnnnnnnnnnnnnnnnnnnnnnnnnnnnnnnnnnnnnnnnncatacttttcgtatccactgcacaggtaggaagactaccctgaattaactgaggggggaaaaagggtaaggaatgtgacagtatcacgagtgaagtggacgggatatgaaaaagcaaaatatccgtactggaaataatcacaaaataacgtaggctgccattgcatcaaggactcagtaggccttgtgcacagtaactgtgttatcatccagttccctctctctgcmcagcagccatgcagattggttctgcattgattactctgaattgcaggtacacaacaaactaccacagatcacacaaacagctcaggtctctaacatgctcctgctgatacacagccaggtgtcaaacacacactcacatctcagccaagaaacaaaacaaagcagacttcacaatcaagtgctgctatggttcccctccctttaaaactcattgctatttaaattaacagaagaaccagaagctttcttgagcaaagtcatgtacttaaatgtcatcaatcaatttcaattcaattctc

SEQ ID NO: 26795 - DNA, 600 bp, Chicken  19866894243309_2
actaccacagatcacacaaacagctcaggtctctaacatgctcctgctgatacacagccaggtgtcaaacacacactcacatctcagccaagaaacaaaacaaagcagacttcacaatcaagtgctgctatggttcccctccctttaaaactcattgctatttaaattaacagaagaaccagaagctttcttgagcaaagtcatgtacttaaatgtcatcaatcaatttcaattcaattctccaggaagaatgtaattgaaggggaactgtgcaagatactcacataagaacataacacrtrtagccctttgcttcctaggaaaaaaataaagccagcttagcttyagcaaagagaattattcatccctatatacacatcacaaaattcaggaagggttcaactgccatattccagtgcccttgccagaaatctgccaattcccaaggctctgggaggtgacaagaagatctgccctattctactttgggagggtggggaggaagaaagggaaaaataaagaaacatttctccaatataatttgggcacttgtagcctcactcaatcataatgtgggagaaagaagagaacccacagaag

SEQ ID NO: 26796 - DNA, 600 bp, Chicken  19866894243309_3
taccacagatcacacaaacagctcaggtctctaacatgctcctgctgatacacagccaggtgtcaaacacacactcacatctcagccaagaaacaaaacaaagcagacttcacaatcaagtgctgctatggttcccctccctttaaaactcattgctatttaaattaacagaagaaccagaagctttcttgagcaaagtcatgtacttaaatgtcatcaatcaatttcaattcaattctccaggaagaatgtaattgaaggggaactgtgcaagatactcacataagaacataacacrtrtagccctttgcttcctaggaaaaaaataaagccagcttagcttyagcaaagagaattattcatccctatatacacatcacaaaattcaggaagggttcaactgccatattccagtgcccttgccagaaatctgccaattcccaaggctctgggaggtgacaagaagatctgccctattctactttgggagggtggggaggaagaaagggaaaaataaagaaacatttctccaatataatttgggcacttgtagcctcactcaatcataatgtgggagaaagaagagaacccacagaagat

SEQ ID NO: 26797 - DNA, 600 bp, Chicken  19866894243309_4
ctgatacacagccaggtgtcaaacacacactcacatctcagccaagaaacaaaacaaagcagacttcacaatcaagtgctgctatggttcccctccctttaaaactcattgctatttaaattaacagaagaaccagaagctttcttgagcaaagtcatgtacttaaatgtcatcaatcaatttcaattcaattctccaggaagaatgtaattgaaggggaactgtgcaagatactcacataagaacataacacrtrtagccctttgcttcctaggaaaaaaataaagccagcttagcttyagcaaagagaattattcatccctatatacacatcacaaaattcaggaagggttcaactgccatattccagtgcccttgccagaaatctgccaattcccaaggctctgggaggtgacaagaagatctgccctattctactttgggagggtggggaggaagaaagggaaaaataaagaaacatttctccaatataatttgggcacttgtagcctcactcaatcataatgtgggagaaagaagagaacccacagaagatgcgggtagtttagctccatttaagcagaagtaagaccaggcaga

SEQ ID NO: 26798 - DNA, 600 bp, Chicken  19866894243311_1
attatcattctactgcgcattgcagaattagattttctgttggctttgcaaatgcacattcaatagtccctgaggtgagaatggtataataattgcagcattcaagtttccgtcacaaacaactctttttaagttggctttctcaaaatgatgctgaaattaaagtaggcatgatatcaaatctaaagaacgcgaaaagctcccagtttaagcagttgaaaatcattcttaaaaatggatgagtggaaaaaagaggaaattcctttacttaaaaagctgttatttgtgggattttttttycctctgtgtttgtgtgtgtgcgtgtgtgtgtgtgttttatcagcactacagttattaccagttatcccaagctgttttggcttggttttagtttaagggctaattgtaaaaacaatcttatttgcctcctacgattttctttttcattaataggttgcattctatgatgtgatgtaggttttcttgtgatgtagaaatattatccataaaatcatgaaactagtctagaaaatgttcatgaatgaacgaatgaaatgttttggtaatgttagattagcttccttgagttagaaatgtgtc

SEQ ID NO: 26799 - DNA, 600 bp, Chicken  19866894243313_1
tcttgtttgttaaactttagacagcaagtcccttcattaactcccagttcttcctcccaggtttgctttctgcgtggaggactcccagctgaccagcatatctcctggcaaagagctctggtttgtgaagtgcacagatgtatggaaaagaaggtaggggagtcagctgggggaaatcctgtgtgctgcgtgtgggcacttaggatgagtccaggatccttgcagtagtggaaggctgattagatgctgctattaaagactgctgccctataaagcagaggaacactgggggtggacaasataacctcaaagatcacctcagcctgagctgcagagaaatctcttggttaaatctggtctcagtgctcagaggcacagctgagggttactgtggtgttacagcactgactctcaccacttctgttgaggcactggcacaggctgcctagagatgtggttgatgccccaagcctggaggctttcaaggccagtctggatcagaccctgggcaacctgatctacctgtggtgtccctgtgcactgcagaggagttggacaacacgaccttcagaggtcccttccaaccctatagattctatg

SEQ ID NO: 26800 - DNA, 599 bp, Chicken  19866894243319_1
  misc_feature (1)..(90): n is any nucleotide
nnnnnnnnnnnnnnnnnnnnnnnnnnnnnnnnnnnnnnnnnnnnnnnnnnnnnnnnnnnnnnnnnnnnnnnnnnnnnnnnnnnnnnnnnnttggtttataaaacagagtgactggctctgcatgcaagcctttgatttggtttatattcaaagatccaaagtatagaaaaatgtcacacattcctgttcacagcacagaaatgctcagtgcaaggagaaagtgtttctttgtgatgcagttactggaaacgttggctacagctgagagttggccctctgttgggcacagcaagcttgctyacgtgcataggttcagatacatgcccaggtatgttgttgcctcagggctcatcgtcttgcaggacagagccttgaagaatggtatagaagggttaactgtctggtgaatttcagtggtatatgcataattaatgcaaatgaagtgggggggaaaaggggtcttagtggcagtgctagcctgcaggtgttctcagctttgcaaacagaaatgatggaatatgaccagcttttgaacaaacttgtggttttatacaggttttcattagcagaccatgtgcagagaaagcaaatagctgata

SEQ ID NO: 26801 - DNA, 600 bp, Chicken  19866894243320_1
agtcatgggaaagagcattagactctctcatatcaacatatggaaagtaagaatacaacagcagcaaacaagccaaggatctaactagagatgctggctataacaaagactaattaaataaaatgggaaactctgtgcattactacctagaacatattgacacccttgttctataattcataactcatgaagtagttctaagagatctggtcaagactttttctgcaaggttgtttgtttgttttttgttgttggatcatgacagctaatcaaagtatttttcagggccagaacagaaawcaaataacaggagaaagatcaggaaaagaataggtaaatattaccaccccactgcctatggactcacctaggatgtaaatcacctagtgcagagctggaaaagatccctgaaccagggtctgctttattctacatattttccttccccatcaagttgtacaaagtcatacagtctctctggaccactgaatatttcataagaagtagaatagccccaagcagaagacagaccgactctaaccccaaaagcaaaggcactggcttgatttatgtcaaatccaggttcaagactcagtcctg

SEQ ID NO: 26802 - DNA, 599 bp, Chicken  19866894243323_1
  misc_feature (1)..(179): n is any nucleotide
nnnnnnnnnnnnnnnnnnnnnnnnnnnnnnnnnnnnnnnnnnnnnnnnnnnnnnnnnnnnnnnnnnnnnnnnnnnnnnnnnnnnnnnnnnnnnnnnnnnnnnnnnnnnnnnnnnnnnnnnnnnnnnnnnnnnnnnnnnnnnnnnnnnnnnnnnnnnnnnnnnnnnnnnnnnnnnnnnnnctgtaattcggggtgtgactgtgaggactgcacgtcctcacatacctcatcctcaccgcactgaccttgctcataggtcccacacctgagcacggggctcagagccatctctcaaccaccragcaccaaagcaacatcacctcccacccagagcaaagcgaagggccgccaccgcttccacctgaaccacctcggcacaaggttgccgctggtttttggctttcacaatgcagccagtcaaggagagaagctgtaactttgacttctgagatacttggctgggctccacgtgaactgcttggctgtggtcctcctgcagtaaggacgcacgcatgcgtgccggtgtggtgcataggtaggtgygggcgctgccaagggctgggataaggctcctgaggacacaaagggccgatgcactgc

SEQ ID NO: 26803 - DNA, 600 bp, Chicken  19866894243323_2
accttgctcataggtcccacacctgagcacggggctcagagccatctctcaaccaccragcaccaaagcaacatcacctcccacccagagcaaagcgaagggccgccaccgcttccacctgaaccacctcggcacaaggttgccgctggtttttggctttcacaatgcagccagtcaaggagagaagctgtaactttgacttctgagatacttggctgggctccacgtgaactgcttggctgtggtcctcctgcagtaaggacgcacgcatgcgtgccggtgtggtgcataggtaggtgygggcgctgccaagggctgggataaggctcctgaggacacaaagggccgatgcactgcggcacacctggccctgctcgcctgcrgagaccttaggccagaacaggacgagatgaaaggaagtttgctgtttgatcacaactaatcacrggtatttaattacgcaggaacgtctttcatcaaacagccagagcaaacaaagcagggatcgagcctgcaaagagcggtgggggaggaggccaccagcagctggcaaagccattgcagggcgagatttatcacgtaggaaagggatgggaatgg

SEQ ID NO: 26804 - DNA, 586 bp, Chicken  19866894243323_3
cccagagcaaagcgaagggccgccaccgcttccacctgaaccacctcggcacaaggttgccgctggtttttggctttcacaatgcagccagtcaaggagagaagctgtaactttgacttctgagatacttggctgggctccacgtgaactgcttggctgtggtcctcctgcagtaaggacgcacgcatgcgtgccggtgtggtgcataggtaggtgygggcgctgccaagggctgggataaggctcctgaggacacaaagggccgatgcactgcggcacacctggccctgctcgcctgcrgagaccttaggccagaacaggacgagatgaaaggaagtttgctgtttgatcacaactaatcacrggtatttaattacgcaggaacgtctttcatcaaacagccagagcaaacaaagcagggatcgagcctgcaaagagcggtgggggaggaggccaccagcagctggcaaagccattgcagggcgagatttatcacgtaggaaagggatgggaatggaggagcctcctggcagctggaaccaaacaacgctgccagcgggactgcgagcacagcacgcctgtctgc

SEQ ID NO: 26805 - DNA, 522 bp, Chicken  19866894243323_4
ggtttttggctttcacaatgcagccagtcaaggagagaagctgtaactttgacttctgagatacttggctgggctccacgtgaactgcttggctgtggtcctcctgcagtaaggacgcacgcatgcgtgccggtgtggtgcataggtaggtgygggcgctgccaagggctgggataaggctcctgaggacacaaagggccgatgcactgcggcacacctggccctgctcgcctgcrgagaccttaggccagaacaggacgagatgaaaggaagtttgctgtttgatcacaactaatcacrggtatttaattacgcaggaacgtctttcatcaaacagccagagcaaacaaagcagggatcgagcctgcaaagagcggtgggggaggaggccaccagcagctggcaaagccattgcagggcgagatttatcacgtaggaaagggatgggaatggaggagcctcctggcagctggaaccaaacaacgctgccagcgggactgcgagcacagcacgcctgtctgc

SEQ ID NO: 26806 - DNA, 600 bp, Chicken  19866894243325_1
gtctaggtctggctttttctcctatacctgggagcactgccctatgcccactacatattgctcgagagaaataagtcccttctggctccccacttctttcaacttacgctctctgtcttttttggagttaccagataggatgacagatattacataaaaaacccaaaaacatggtagtgaacagggctggacaagggaagagattggtcattctatccctagtatgttggattcttgtaacctaaagccagacaattccttctccttctattcaaaatatgattttactttttttttttwaaaaaaaaaaaaaagaacgaggggaagtgattacagtactatccacacagtggtgctaaatggcatttttattatttctttagcagaagataataaaatgtattcwaattttaaaatatgtaaatagtgcaagagcagcagtaatcaagcttatattggatcatagcatgcaaataaatcagcaaaccagatgaatgatttaagatatgtaccttgcccagctgtagctggtcatgcctgttcagtgtgtgagacacagtaaataggctcttgtcaccaccaattcacataatgtactaa

SEQ ID NO: 26807 - DNA, 600 bp, Chicken  19866894243325_2
cgctctctgtcttttttggagttaccagataggatgacagatattacataaaaaacccaaaaacatggtagtgaacagggctggacaagggaagagattggtcattctatccctagtatgttggattcttgtaacctaaagccagacaattccttctccttctattcaaaatatgattttactttttttttttwaaaaaaaaaaaaaagaacgaggggaagtgattacagtactatccacacagtggtgctaaatggcatttttattatttctttagcagaagataataaaatgtattcwaattttaaaatatgtaaatagtgcaagagcagcagtaatcaagcttatattggatcatagcatgcaaataaatcagcaaaccagatgaatgatttaagatatgtaccttgcccagctgtagctggtcatgcctgttcagtgtgtgagacacagtaaataggctcttgtcaccaccaattcacataatgtactaaaaagaacaattaggcttttgcaatttttgtcagcaaatgttccttccaccaatacaaacatagtcctggaaggctactgctttcttgattttgatatagaaatggc

SEQ ID NO: 26808 - DNA, 600 bp, Chicken  19866894243331_1
agcccttcacaagccttgctgcccttctctggacctgctccagtacctccgtgtcttttctgtactaaggtgcccaatactgaacacagtacttgaggtgaggcctcaccagtgccaagtacaggggcaggattacttccctagtcttgctcaccacaccattcctgatacaagccaggatgccactggccttcttttcctcctgggcacactgctggctcgtattcagctgactgtccaacagtacaccaaggtccctttccatcaggcagctttccagccactcctccccaagcctgkagggttgcctggggttgttgtgaccaaaatgcaggacctgacacttggccctattgaaactcatacagttaaccttggcccattgatccagtctatccaggtycctctgtagtgcttttctcacctcaggcagatcaacamtccctcccagcttggtgtcatttgcaaatttactgagggtgcactcaatcccctcatcaagatcattaataaagatgttaaatagaagccgtcccagtaccaagccctgggggataccatatgtgaccagccgccaactggatttaactccattgacca

SEQ ID NO: 26809 - DNA, 600 bp, Chicken  19866894243331_2
cctcaccagtgccaagtacaggggcaggattacttccctagtcttgctcaccacaccattcctgatacaagccaggatgccactggccttcttttcctcctgggcacactgctggctcgtattcagctgactgtccaacagtacaccaaggtccctttccatcaggcagctttccagccactcctccccaagcctgkagggttgcctggggttgttgtgaccaaaatgcaggacctgacacttggccctattgaaactcatacagttaaccttggcccattgatccagtctatccaggtycctctgtagtgcttttctcacctcaggcagatcaacamtccctcccagcttggtgtcatttgcaaatttactgagggtgcactcaatcccctcatcaagatcattaataaagatgttaaatagaagccgtcccagtaccaagccctgggggataccatatgtgaccagccgccaactggatttaactccattgaccacaactcttcgggcctggccatccagacaatgtctaatacagagragcgtatgctgatccaacccaggaacaccttcgcttcaagaatgttgtgggggacaatg

SEQ ID NO: 26810 - DNA, 600 bp, Chicken  19866894243331_3
tagtcttgctcaccacaccattcctgatacaagccaggatgccactggccttcttttcctcctgggcacactgctggctcgtattcagctgactgtccaacagtacaccaaggtccctttccatcaggcagctttccagccactcctccccaagcctgkagggttgcctggggttgttgtgaccaaaatgcaggacctgacacttggccctattgaaactcatacagttaaccttggcccattgatccagtctatccaggtycctctgtagtgcttttctcacctcaggcagatcaacamtccctcccagcttggtgtcatttgcaaatttactgagggtgcactcaatcccctcatcaagatcattaataaagatgttaaatagaagccgtcccagtaccaagccctgggggataccatatgtgaccagccgccaactggatttaactccattgaccacaactcttcgggcctggccatccagacaatgtctaatacagagragcgtatgctgatccaacccaggaacaccttcgcttcaagaatgttgtgggggacaatgtcaaaggctttactgaagtccaggcagaccacatcaac

SEQ ID NO: 26811 - DNA, 600 bp, Chicken  19866894243331_4
ttggccctattgaaactcatacagttaaccttggcccattgatccagtctatccaggtycctctgtagtgcttttctcacctcaggcagatcaacamtccctcccagcttggtgtcatttgcaaatttactgagggtgcactcaatcccctcatcaagatcattaataaagatgttaaatagaagccgtcccagtaccaagccctgggggataccatatgtgaccagccgccaactggatttaactccattgaccacaactcttcgggcctggccatccagacaatgtctaatacagagragcgtatgctgatccaacccaggaacaccttcgcttcaagaatgttgtgggggacaatgtcaaaggctttactgaagtccaggcagaccacatcaacagccttaccttcayccaccaagcggatcaccttgtcatatgatgaaatcaggtttgtcaaacaggatctaccatttgtaaacccatggtgactgggcatgaacccctggttgacctttaactggtccatgatggctcctgagattatccattccgtaaccttccccggcaccgaggtgagactgataggtctgtagctactag

SEQ ID NO: 26812 - DNA, 592 bp, Chicken  19866894243331_5
gtgtcatttgcaaatttactgagggtgcactcaatcccctcatcaagatcattaataaagatgttaaatagaagccgtcccagtaccaagccctgggggataccatatgtgaccagccgccaactggatttaactccattgaccacaactcttcgggcctggccatccagacaatgtctaatacagagragcgtatgctgatccaacccaggaacaccttcgcttcaagaatgttgtgggggacaatgtcaaaggctttactgaagtccaggcagaccacatcaacagccttaccttcayccaccaagcggatcaccttgtcatatgatgaaatcaggtttgtcaaacaggatctaccatttgtaaacccatggtgactgggcatgaacccctggttgacctttaactggtccatgatggctcctgagattatccattccgtaaccttccccggcaccgaggtgagactgataggtctgtagctactaggatcacctttccagcctttctgaagatgggcatgacatttgccagcctccagtccgttgggacatccccagttagccaggactgctgaagaataacggagcat

SEQ ID NO: 26813 - DNA, 600 bp, Chicken  19866894243333_1
ccaagcggatcaccttgtcatatgatgaaatcaggtttgtcaaacaggatctaccatttgtaaaccccatggtgactgggcatgaacccctggttgacctttaactggtccatgatggctcctgagattatccattccgtaaccttccccggcaccgaggtgagactgataggtctgtagctactaggatcacctttccagcctttctgaagatgggcatgacatttgccagcctccagtccgttgggacatccccagttagccaggactgctgaagaataacggagcatggtgacgtgyggaaattagactctatagccagtaaggatatagagcaggtatgtttattggtgacgtgtgcacaccctggtgcaaaggggatcgttccacctaatttgcacaccgtccgaagaaatcgtgttatagatataggtcaaactaatacataatcaggaattcggatacatattcactacattcccgagagtccattagcatacagtccctaccccccttgcgcgtgcgtagtaggtcgtgttgatgaaggctcgtagtcttcctcgcgaaggctcatagtcttcctcgctgcaaacttctgac

SEQ ID NO: 26814 - DNA, 599 bp, Chicken  19866894243342_1
  misc_feature (1)..(49): n is any nucleotide
nnnnnnnnnnnnnnnnnnnnnnnnnnnnnnnnnnnnnnnnnnnnnnnnnagtgactgctgggtgccagggagagggaggtgctctgaggagaaagaagggctttttgggggcaggggaaggggagcagaggggacgtggtggcatggggaaggctcgtcccccttgggtgaggtgtgggttggcggtgctgcgggatgggtttgggttaggagaggagtaaagatgtgcaaagccaacgtgcaggtgagggggatgctgtccccagcccagagagggacatggggacacttcagggaccytctggctggcctgtgcacagcggggaggtccctgtgccagaggtgtggggtggggggaccctttgagcacaaagggatgaagaagccaaaccctcaaacaaagggcaaagccctcccttccccacgcaccgtcaccggagccatggggttatcaaatgccctgtagcgtccacttaatcatccttcccagggctctccggccgccttggtaatgtttgagacctggatctgactgtaatggagcagaattgatttcatctggctaattaggcagcgcaggctgkgccctggcagctcct

SEQ ID NO: 26815 - DNA, 600 bp, Chicken  19866894243342_2
gacacttcagggaccytctggctggcctgtgcacagcggggaggtccctgtgccagaggtgtggggtggggggaccctttgagcacaaagggatgaagaagccaaaccctcaaacaaagggcaaagccctcccttccccacgcaccgtcaccggagccatggggttatcaaatgccctgtagcgtccacttaatcatccttcccagggctctccggccgccttggtaatgtttgagacctggatctgactgtaatggagcagaattgatttcatctggctaattaggcagcgcaggctgkgccctggcagctcctttgttacccacagtgacctgagataaggagaaggaagaggagacctggggaaactgaggcacagtgcatcgctgtgccatggagcagtgctgtgccacagtgccttgctggggtgctgtactgtgctggatggctggggcagcacgcaacacagcaggagcagtaggaagccagagccatccccagcatccctggcacgtaacccagcccttgcaatgccctccctgcagagggcacagctctggctgccagcccaggggtgggatgtgtggccaacaaaatggg

SEQ ID NO: 26816 - DNA, 599 bp, Chicken  19866894243343_1
  misc_feature (1)..(104): n is any nucleotide
nnnnnnnnnnnnnnnnnnnnnnnnnnnnnnnnnnnnnnnnnnnnnnnnnnnnnnnnnnnnnnnnnnnnnnnnnnnnnnnnnnnnnnnnnnnnnnnnnnnnnnnnaaaaggattatcagcagagccagcaaggcaaacagcatggcacttctgcagtcacaccacctgctcggtagggatttcacagcacatcacacttttcgggacctctgcgccttctgctgggattttccctgagcttttccccctgctaaggattccccccaagaaaagcccagaccacagcagcagcatccttccmactgagcagaaaggccagcaaacatttctttccccatgggatgcccttctgcaaacttcctccagcccctgcacacccagactgcaagctgtagggaggtgccaagggcagcaccaagcccaggaaggacctgagccatcgctggtaatgaacatttacttccccttagtcctcttcagtctcaaggatcacaaagctatttctacccttctgtagcgtaacaatcagcatcttgtcagctgccatagcacttcatctgtgctattctcggtgcggccaggctggatggggctttgggc

SEQ ID NO: 26817 - DNA, 600 bp, Chicken  19866894243343_2
agcacttcatctgtgctattctcggtgcggccaggctggatggggctttgggcagtctgatctagtaggtgggcagagggctggaactgtatgatcttgaaggccccttccaacctaaacattctacagttctataatcacacaaggcactgaaatgcagtaggaaccaagagcagcgttcagctagggtcagagggaacttgtcacctgcatgtgaaccaactgccttagatctgactcagtcactgtgcactgcgatctaaccagcctgccttatcctctgcatgcatttgtttcttkcctatcctgtcctgttcccagcagctatggcaaagacattgatacgaattccagaagttaacaaaaagttgtgttactcctgcagtgcctgtgctaaatgtaactatgctgaatccaaagcagagaaaatcatgctaggaacaattcctgtgatacaagacataatatgaagatcctgaactccatgagcttgatgttatttaggcaaggggaaaaaaaaacaagagtagtgcctgccaaaataggggggaaaattgaagtgataacggcaattaatgccataaccatggcttcgagtac

SEQ ID NO: 26818 - DNA, 600 bp, Chicken  19866894243344_1
aaaaggatgttgtttttatcactgctgcaggtaaatactcccatatcagcaggctgagacattccttgggcaggagtcctagagcagctgggatcacatgagacccaaagtcacgagtaacgagtagatcttggaacatggggagatacaattttattgtgcaaacactcagaaaggcaagtagtgtggttcaggctctcatggactgatattttgacaacaccccccaggaaattaatgaaaagactgatggaggtttagtttgcaaaagttaaacacaaattatgtgttatggttggrctggttgatcctgtgggtcttttccaaccttagcgattctatgattctaaatgaaaagcagtcagcattttgtgagaaagggaatttatcaagcagttcatctcagcgtttgagtatattatcaactaaatttataaagttactgcatgatcttttkaaggtgtttgatttagtgccttacaacttttttaaaatacagaacatattaaataggttaaagatcagtcggctgccacgtctcacaaatcactcatcgtgggagaacctcacttcaatagggctctatttttaatgggattc

SEQ ID NO: 26819 - DNA, 600 bp, Chicken  19866894243344_2
tgtgcaaacactcagaaaggcaagtagtgtggttcaggctctcatggactgatattttgacaacaccccccaggaaattaatgaaaagactgatggaggtttagtttgcaaaagttaaacacaaattatgtgttatggttggrctggttgatcctgtgggtcttttccaaccttagcgattctatgattctaaatgaaaagcagtcagcattttgtgagaaagggaatttatcaagcagttcatctcagcgtttgagtatattatcaactaaatttataaagttactgcatgatcttttkaaggtgtttgatttagtgccttacaacttttttaaaatacagaacatattaaataggttaaagatcagtcggctgccacgtctcacaaatcactcatcgtgggagaacctcacttcaatagggctctatttttaatgggattcttttcacggtagtggatccaatgcaatcgctaatgatgatttgttggtgattaaaacatcactgttgagtggttgagaaaaatgtagagcggttagtcatacagcacaacccttgatctcttgactggctggatcagtttgcactatatgcatttca

SEQ ID NO: 26820 - DNA, 504 bp, Chicken  19866894243349_1
caggccaacaaaagaaatttgggcaccaaaggcaataaaaccacattattaatttgagacagctttgtggtccgacgtctgtttgtcatgcactgctgtactagagctcatttcattactgtaaaatgtagataacttctcccatattttctgaggtatgtcacaacacacgcagtgaggtgctgggcacagctcaaagcccataggagctagataagatcagagttttcaggacatgttttatatttacagctactaatggcttccgtatccttcctccttttttctttcttgtgtcckttttttttttcttccattttctctttttgtttcttgttttcccttrtggacttgtcctttaaagccacaagctgactcatgctgaccctcaggcttgcactcacctcccaacaaacctcaaagargtttctttggtgggagggagagcaagaaaacacctgtaccaaaaccttgttgcatttgccacttggtacgtttccactt

SEQ ID NO: 26821 - DNA, 458 bp, Chicken  19866894243349_2
tattaatttgagacagctttgtggtccgacgtctgtttgtcatgcactgctgtactagagctcatttcattactgtaaaatgtagataacttctcccatattttctgaggtatgtcacaacacacgcagtgaggtgctgggcacagctcaaagcccataggagctagataagatcagagttttcaggacatgttttatatttacagctactaatggcttccgtatccttcctccttttttctttcttgtgtcctttttttttttcttccattttctctttttgtttcttgttttcccttrtggacttgtcctttaaagccacaagctgactcatgctgaccctcaggcttgcactcacctcccaacaaacctcaaagargtttctttggtgggagggagagcaagaaaacacctgtaccaaaaccttgttgcatttgccacttggtacgtttccactt

SEQ ID NO: 26822 - DNA, 379 bp, Chicken  19866894243349_3
atgtagataacttctcccatattttctgaggtatgtcacaacacacgcagtgaggtgctgggcacagctcaaagcccataggagctagataagatcagagttttcaggacatgttttatatttacagctactaatggcttccgtatccttcctccttttttctttcttgtgtcctttttttttttcttccattttctctttttgtttcttgttttcccttrtggacttgtcctttaaagccacaagctgactcatgctgaccctcaggcttgcactcacctcccaacaaacctcaaagargtttctttggtgggagggagagcaagaaaacacctgtaccaaaaccttgttgcatttgccacttggtacgtttccactt

SEQ ID NO: 26823 - DNA, 600 bp, Chicken  19866894243351_1
tgtgatcgttctgtatccctgtttacttccacagacaaggggaagcgtctgtgggggtgtccgaatgctgctgggtcagaaaaccacagagccataagggctggaaggaacctgcggagctgccccagtccaaaccctccccccccccagcttcgatactttcctgcagcagcgccacaggagcgcacccgggcgcatttgaggcgcacctgacaaggagcccctccccctccgggcagctgtgactgggcgctccggccgtccaggcccgcacagccgccccacacctccaaagcggcrctcggccacggctgcaccagtgcgctgctaaccggccagggctgcgaggagggatcagggagggtgcgagcagcgctgaggccggtggtggcgactggttggatgtggccgtgctttcccttggcagaarggaattgcagaaccggttccaagactgatggaaaaatcatcaggtttttggtgtatgtgcggttccaaattcagtcgacagaaatrcaagacctgcagtacaaggtggtggggtggttccggggctccaggtgctgcaggagctgtgggcccagcctggcccagccgttc

SEQ ID NO: 26824 - DNA, 600 bp, Chicken  19866894243351_2
caaaccctccccccccccagcttcgatactttcctgcagcagcgccacaggagcgcacccgggcgcatttgaggcgcacctgacaaggagcccctccccctccgggcagctgtgactgggcgctccggccgtccaggcccgcacagccgccccacacctccaaagcggcrctcggccacggctgcaccagtgcgctgctaaccggccagggctgcgaggagggatcagggagggtgcgagcagcgctgaggccggtggtggcgactggttggatgtggccgtgctttcccttggcagaarggaattgcagaaccggttccaagactgatggaaaaatcatcaggtttttggtgtatgtgcggttccaaattcagtcgacagaaatrcaagacctgcagtacaaggtggtggggtggttccggggctccaggtgctgcaggagctgtgggcccagcctggcccagccgttctgccgctcgcagcactggggttcctttcttgttttgttgtgcttttgagggcggctgcatgcaggtggagcgctgccatctcggctctgctccgggtgtacttcaggcaccggacggataggtgcaggga

SEQ ID NO: 26825 - DNA, 600 bp, Chicken  19866894243351_3
ggagcccctccccctccgggcagctgtgactgggcgctccggccgtccaggcccgcacagccgccccacacctccaaagcggcrctcggccacggctgcaccagtgcgctgctaaccggccagggctgcgaggagggatcagggagggtgcgagcagcgctgaggccggtggtggcgactggttggatgtggccgtgctttcccttggcagaarggaattgcagaaccggttccaagactgatggaaaaatcatcaggtttttggtgtatgtgcggttccaaattcagtcgacagaaatrcaagacctgcagtacaaggtggtggggtggttccggggctccaggtgctgcaggagctgtgggcccagcctggcccagccgttctgccgctcgcagcactggggttcctttcttgttttgttgtgcttttgagggcggctgcatgcaggtggagcgctgccatctcggctctgctccgggtgtacttcaggcaccggacggataggtgcagggatccatcaagcagcacagagtgcagcacacgtgaaacaacgtcagctgagcaagcagtggcttgtatgttgttgtcagttgttttgc

SEQ ID NO: 26826 - DNA, 600 bp, Chicken  19866894243361_1
catttttgccactcaaatagagcacagctggaaacgtatcatcttcagctagggatgcaccctgggggcttatctgtgctctcaagcaagcaggaatcactggcttggagtttgtattgtgcaagctccagtgaaggctgaagtcccacgtgcttggacagtatcatccccacgggaagtggaagcagcccaaagacaatcacagctgcccagcccttgtcactcatgcaggactgccagcacagtccctgagctgggcaaagcttcagctgctcccttggaactcagcatggcacgagygggtctgagctgcatctccctgagaccagaccacagctcctggcaggatgctgtgtacaaatgccagagatctcgctgctgtctctgccctttcccatggaattaagtactaaatagcagtctcatgcataactatctaattttagggctctttcatgcctcctgacagccctttgtgccagcaaggcacagatacaactacactgctaagcctggatgaaaacaaggcaaagcttctgccattgctctctgcacccaacccagcgacaatcaaacagtgctgaaggcaggagcagtgct

SEQ ID NO: 26827 - DNA, 600 bp, Chicken  19866894243367_1
cctttgtctcagtgctctatttgtgtactttaatgatgaaggaagtcttggaatattcatggcttctcctgagatttttctgagggtggtgcatgatgggcctatgtaaattcacctttcttcagtaaacttgttacgcttcggatgattccttgtttctgtgtatctttcctcactttcttttgaggtcaacattgtctataattgggcattttctataatctgggcagtctggtctggtattagatatggaggttggtggtgctccctgcggcgggggattggagcttggtgatcctygaggtcccttccaacccaatacattccacggttctatgataactaatgctaattacagaaaataccttctggtctggtggcgtttcttgttggtttctgttactgctattcttcttctggcaacatttggaatatgtttctatcattgatagatgcagaaatagagtaagagtaatcctgtgtattccgtgaaatgcccttctcacacctctgttccactgtaggtgtgtttccttgtgattggttttaaaaagccgtagcttggtcctgttttccttaagtgcaaagtcatctcaagag

SEQ ID NO: 26828 - DNA, 476 bp, Chicken  19866894243369_1
gttccttagtcttgcaacctcatggaacagaagaaaaaaaaaactgtcaagcagatgaactagaaatattcgaattaggagcagctaacacatttccacagttcttctgctatatgtcctttgctatagtggagccctctgaatatcacccaaatcgtgtcccttgattcatgctacctgccttcttcctccatttatcttgttactctgtttctgtcattttctcttctctctccctttgctagttcattaagcaacaactaccataaaacataaaagaaaacttgttaaaaaaaaatyaaaaaaaaaaaaatatatatatatggtactgatggttcttgacaactatctctgttcttccagcatgtgtgagcaagtgttttccaatagtcttctttctggggcaaggacattgtaacttctccatattttgaagtacttagcagatggctcccttctcaagctttttttttttt

SEQ ID NO: 26829 - DNA, 600 bp, Chicken  19866894243370_1
agaaattcctgatgtgagagcaattttgttgctgacactgcaggttttatttgaaggtaaaataaagaaaagtgctttatttggagaatagctattatggaatgaaataatctgcatagaaaccagagggaagatttcttctcttaaccctggatgatttcatgagttggcttacagcactgtaagtctgtgttagaagagagacaggagagcaatctgtgggggtagaagcacatcaaccagtgaatgtgtgggtgggaacttcttaaactcaaattgctcttgatggaaaaatatctmgcagttatcctacaggggggtaggactgatatagctgaaaacctaggaagtacaagtcaaaatgaggggaattctacccattatttttttattgtggttgatcaaatagtagtcttaatcattaggtttcagcttgacacaatagcagagagarcagacctcaaatctgaagtgcaagtatttaccattgagaagtaaattcctctgtcactagctctggcaatagtatcactataattatgagtttaatatctgaaattcgttgatttcatatttgcatgcatgtatgctaactaaaat

SEQ ID NO: 26830 - DNA, 600 bp, Chicken  19866894243370_2
tgatttcatgagttggcttacagcactgtaagtctgtgttagaagagagacaggagagcaatctgtgggggtagaagcacatcaaccagtgaatgtgtgggtgggaacttcttaaactcaaattgctcttgatggaaaaatatctmgcagttatcctacaggggggtaggactgatatagctgaaaacctaggaagtacaagtcaaaatgaggggaattctacccattatttttttattgtggttgatcaaatagtagtcttaatcattaggtttcagcttgacacaatagcagagagarcagacctcaaatctgaagtgcaagtatttaccattgagaagtaaattcctctgtcactagctctggcaatagtatcactataattatgagtttaatatctgaaattcgttgatttcatatttgcatgcatgtatgctaactaaaattaattaattttaattgcatacaccaattacaacatcaggctcattttccaacatattattcctcgctgattacatatcctctaagattgctttaatttttcattttgtgctttaaagtcaaagaataatatgtatttctaattaagctcactta

SEQ ID NO: 26831 - DNA, 551 bp, Chicken  19866894243371_1
ctgtagccagcaggactggagaggtgatcattcccttgtactcagctctggtgaggctgcaccttgagcaatgtgttcagtttcgggcccctcagtataagacattgagtccttggactgtgtgcagacaagagcaacaaagctggtgaggaatctggagcacaaagcttaggaggagtgactgagggaactgggattgtttagtctggagaagaggaagttcaggggagaccttattactttctacaactacctgaaaggaggttgtggcaaagtggaggttagtctctttttccacakgactagcaatgggatgagagggaatggcctcaagttgcattggggaaggttcaggttggatattaggaaaaatttcttctccaaaagagtggtcaggcactagaatgagctgtccagggtgttgatggagtcacagttcctggaggtgttcaaaaaacatttagatgttgtactaagacacatggtttagtgggaaaatattggtggtaggtggatagttaactggatgaccttgaaggtcttttccaatt

SEQ ID NO: 26832 - DNA, 600 bp, Chicken  19866894243372_1
aacagattagagtcaatgagctcctcctcactcatcttctgatatacagacatacaggttgattttttttctaagttttgtctttatcttattcattcttcactccctgagccccaacgtgatttgagtacagccacagttctctccagtttattttactacattgagagagcaaattgaaccaaatgtgaacagagtagataaaagtattaactccagagagaaaagcaaacttatcaagttacctatccttgtgcttccataatagtagttacagttctctcccactccatctgctgkattttctatttctttatttcaaagcaaactccttatgatgagcagcattttttttaatcactgaagcttttatgctaggtagacagtatagttacttgatttgatcttaactgaagggaacacacgcaactgggaaggatccctgtaatccatcatggagatttatggaaatccagaagtcagtattaatctgcatgttaggagtaaatttttctgcactaaagtccaggcatggatctcatttctgaatgatgctctgctttgcagtctcacagaagttcacctgcagtgtaacagttg

SEQ ID NO: 26833 - DNA, 600 bp, Chicken  19866894243375_1
tgagaggcaggaaccattccagctgccactgaaacatcatcacctctggatgggtagttggggcagcaccatttgtggtttgtgaaggaaggatgaacatcattgagctgagactgctgggagctcaggaaggcaggatccttctgtgggaatgggactttgctcctggaaagtggaagttggtttggttttgattcataggattcaacatggcattgtgtgggctgagcacctaaaaaccaggcgcacgcgatgctggatttggcagtggcacaaaaagaatggaaagaaaacgtttgygttctgatgctctccagcttctcaaccagagaactgagggatcagagctctccatggagcttagggagaatcacttctccccagctcagcctccccctgtcctggatgcacagcaatgtccctccttgactgggggaaggcaacatactgctgttactgcttaacattgctaccttcagaaggctggcattgcctatcaccagctctgctgaaatcctgatcaaagcactgctttcacgctctttcctttgccccttcacccttcccagcacagcttctgctggcacttcactgcaggta

SEQ ID NO: 26834 - DNA, 600 bp, Chicken  19866894243383_1
gttatagtttgtctctacagtctcacttctgcgttttcctttttttggaaggagatacataatgtctgttctatttcattctagtttgctaatcctgattttatggaatccatttcggatgtagttgatgaagttatacagaactgtcccattgatgtccggcgtccattatataaggtatggcctttgtgttctaagattagctgaattcttttggaagataactgttatcgttatgttgcatttgtgtatggtacacttggctacgatttcccctactatgagaaatgtgaacttttkaatagaaataaagtttaagataaacaagatacagtttttctgaataaggaatgcttgttatttgctgcttttaattttaaacaaaagatggtgattagcagtggcttggmrtgcaggtaagtattgttcctaaggagctacttatatttgatatttgtaatataaactcttatgtgtgggagtccttggattttgcccattttaagggttgccttatggtctcttccccacatgggttttttttttttttcatagtctcaatgtgttcactgcagttttagccaggtgttgaacctcatg

SEQ ID NO: 26835 - DNA, 575 bp, Chicken  19866894243383_2
catttcggatgtagttgatgaagttatacagaactgtcccattgatgtccggcgtccattatataaggtatggcctttgtgttctaagattagctgaattcttttggaagataactgttatcgttatgttgcatttgtgtatggtacacttggctacgatttcccctactatgagaaatgtgaacttttkaatagaaataaagtttaagataaacaagatacagtttttctgaataaggaatgcttgttatttgctgcttttaattttaaacaaaagatggtgattagcagtggcttggmrtgcaggtaagtattgttcctaaggagctacttatatttgatatttgtaatataaactcttatgtgtgggagtccttggattttgcccattttaagggttgccttatggtctcttccccacatgggttttttttttttttcatagtctcaatgtgttcactgcagttttagccaggtgttgaacctcatgttaaagtacatgaaaacttagtcctttagaaggcaacaattaaggctgtttaaacttgtttagggcatataatccagagagtttt

SEQ ID NO: 26836 - DNA, 574 bp, Chicken  19866894243383_3
atttcggatgtagttgatgaagttatacagaactgtcccattgatgtccggcgtccattatataaggtatggcctttgtgttctaagattagctgaattcttttggaagataactgttatcgttatgttgcatttgtgtatggtacacttggctacgatttcccctactatgagaaatgtgaacttttkaatagaaataaagtttaagataaacaagatacagtttttctgaataaggaatgcttgttatttgctgcttttaattttaaacaaaagatggtgattagcagtggcttggmrtgcaggtaagtattgttcctaaggagctacttatatttgatatttgtaatataaactcttatgtgtgggagtccttggattttgcccattttaagggttgccttatggtctcttccccacatgggttttttttttttttcatagtctcaatgtgttcactgcagttttagccaggtgttgaacctcatgttaaagtacatgaaaacttagtcctttagaaggcaacaattaaggctgtttaaacttgtttagggcatataatccagagagtttt

SEQ ID NO: 26837 - DNA, 600 bp, Chicken  19866894243389_1
tctttttatatccagcaaacaaaactccttaaatcaatgtaaactctctgagtaataggaattttaagagtgccagtactgcaggataataaaaacctggcacagagacattgctgccatggggaaatgttaggttgttgcattaactaataacaatagacaaattaatcagtttgcttgctttttttttttttttttttgctgtcagcttggcagactgattaagttctctattactggctaggttaagggttttatttttgtcttattttcttataagactattttgttttggacaayaccatcctcattctatttgtaggtttccatggacatctcactgtaaggctaacacttgtgatgaagaacagcatcagaatagctggtcccccttgggatgcatttgctcattctttctatctggatcgcttaaaatcttcaaagaccagctgtacctgggtattaatgctctttcaggaccatatgttcctcttctgcattaaaatccatgtaagggggacgcttacataaaaatcttgctgcaaattattkycgcatgctccttctgtaagggataagggataagggacaagcaggagc

SEQ ID NO: 26838 - DNA, 491 bp, Chicken  19866894243389_2
ttttatttttgtcttattttcttataagactattttgttttggacaayaccatcctcattctatttgtaggtttccatggacatctcactgtaaggctaacacttgtgatgaagaacagcatcagaatagctggtcccccttgggatgcatttgctcattctttctatctggatcgcttaaaatcttcaaagaccagctgtacctgggtattaatgctctttcaggaccatatgttcctcttctgcattaaaatccatgtaagggggacgcttacataaaaatcttgctgcaaattattkycgcatgctccttctgtaagggataagggataagggacaagcaggagcaaatgattttaatcaacccatggtaggatacttgaacaaacatggatagctctttctcttgcctttctccagccctcccccaaagtaatggtaactgctgcctggaaataactctggtctatttagatgagtagaaggcagct

SEQ ID NO: 26839 - DNA, 490 bp, Chicken  19866894243389_3
tttatttttgtcttattttcttataagactattttgttttggacaayaccatcctcattctatttgtaggtttccatggacatctcactgtaaggctaacacttgtgatgaagaacagcatcagaatagctggtcccccttgggatgcatttgctcattctttctatctggatcgcttaaaatcttcaaagaccagctgtacctgggtattaatgctctttcaggaccatatgttcctcttctgcattaaaatccatgtaagggggacgcttacataaaaatcttgctgcaaattattkycgcatgctccttctgtaagggataagggataagggacaagcaggagcaaatgattttaatcaacccatggtaggatacttgaacaaacatggatagctctttctcttgcctttctccagccctcccccaaagtaatggtaactgctgcctggaaataactctggtctatttagatgagtagaaggcagct

SEQ ID NO: 26840 - DNA, 600 bp, Chicken  19866894243394_1
tgctgctcctcttgttgttgtctttgctgctgctcctcctcttctacaacccgattcatctgctcctcatctacttggcttgaggaagcattagctcgaagagatccaccagttcgtcgcctcttgctgcccacagagagcagttcctgattcatttccaaaagccagcttgctacttcttggaccttggctaggctatctgaagatgcaaatgctttcacattctaaagagacaaaaaaagaaaatgtgggaaatgttaagctgtgttttcgactatatcaagaggcatagaaaattaytacattatttccaaaaactwataawtccgagcagtaattttcattagtctgcacactaagtttttcctgttatgtatcaacttcgtatcaagacggtgcttcctactaccatacagtccaattatgagctctgtaagcawtagatttttcaagttcagatgtttttcaaaactacttgcccatctagaaaatccaccagaatcattaacagacagtggttaatttatcaaattatattatatcatttgctcaaaactggacaacgatcattttcaagtgtcattatatattccctctcat

SEQ ID NO: 26841 - DNA, 600 bp, Chicken  19866894243394_2
tctttgctgctgctcctcctcttctacaacccgattcatctgctcctcatctacttggcttgaggaagcattagctcgaagagatccaccagttcgtcgcctcttgctgcccacagagagcagttcctgattcatttccaaaagccagcttgctacttcttggaccttggctaggctatctgaagatgcaaatgctttcacattctaaagagacaaaaaaagaaaatgtgggaaatgttaagctgtgttttcgactatatcaagaggcatagaaaattaytacattatttccaaaaactwataawtccgagcagtaattttcattagtctgcacactaagtttttcctgttatgtatcaacttcgtatcaagacggtgcttcctactaccatacagtccaattatgagctctgtaagcawtagatttttcaagttcagatgtttttcaaaactacttgcccatctagaaaatccaccagaatcattaacagacagtggttaatttatcaaattatattatatcatttgctcaaaactggacaacgatcattttcaagtgtcattatatattccctctcatttaaccacagacttggcagt

SEQ ID NO: 26842 - DNA, 600 bp, Chicken  19866894243394_3
gctgctgctcctcctcttctacaacccgattcatctgctcctcatctacttggcttgaggaagcattagctcgaagagatccaccagttcgtcgcctcttgctgcccacagagagcagttcctgattcatttccaaaagccagcttgctacttcttggaccttggctaggctatctgaagatgcaaatgctttcacattctaaagagacaaaaaaagaaaatgtgggaaatgttaagctgtgttttcgactatatcaagaggcatagaaaattaytacattatttccaaaaactwataawtccgagcagtaattttcattagtctgcacactaagtttttcctgttatgtatcaacttcgtatcaagacggtgcttcctactaccatacagtccaattatgagctctgtaagcawtagatttttcaagttcagatgtttttcaaaactacttgcccatctagaaaatccaccagaatcattaacagacagtggttaatttatcaaattatattatatcatttgctcaaaactggacaacgatcattttcaagtgtcattatatattccctctcatttaaccacagacttggcagttgact

SEQ ID NO: 26843 - DNA, 600 bp, Chicken  19866894243394_4
cagttcctgattcatttccaaaagccagcttgctacttcttggaccttggctaggctatctgaagatgcaaatgctttcacattctaaagagacaaaaaaagaaaatgtgggaaatgttaagctgtgttttcgactatatcaagaggcatagaaaattaytacattatttccaaaaactwataawtccgagcagtaattttcattagtctgcacactaagtttttcctgttatgtatcaacttcgtatcaagacggtgcttcctactaccatacagtccaattatgagctctgtaagcawtagatttttcaagttcagatgtttttcaaaactacttgcccatctagaaaatccaccagaatcattaacagacagtggttaatttatcaaattatattatatcatttgctcaaaactggacaacgatcattttcaagtgtcattatatattccctctcatttaaccacagacttggcagttgactcagaattaatgacttggttttggtcttagatcataagaccagatcaggtataacctgaaagtttcctatcttcttactgcaattttgttttaaataaatccatggggaaaaaaaa

SEQ ID NO: 26844 - DNA, 600 bp, Chicken  19866894243403_1
cttgcagggaaattcattcatcactttttaaaatcagctgagaagcccctgatttgtcctacagatctgcagtatggtcagctgccagctgctagcaagcatcagcatgatgctgccaaggcagcaggtgaagaaactgcagtgaagaatgacctgcagtttgtatttcatgccccttgttggcttctaggtaagctcagaactgcatcaggggctcagaggagtgggagatgatgaactgaagaagatatggaggactaagtcctggagcaaagtgagagtaaaggagatgtaataatygcagagaatgggaaagggttggtaagaattttgaaataagtgtatatttaatcagtttcatagcttgcaaagtatgtgcagctcttcaggatagaartgagaatgcttcactgtgtgtaatacagatacagagataaaagtttaataagtgacccaataaccagctacttccattccatgtctgccttctttttccttctacaaaggcagagtttttacttgtgtgtatatggtagtaatgtttacaaacttgcttgtccagtgaggaagtctcaggtgtgtttctacttttaaatgact

SEQ ID NO: 26845 - DNA, 600 bp, Chicken  19866894243403_2
agcatcagcatgatgctgccaaggcagcaggtgaagaaactgcagtgaagaatgacctgcagtttgtatttcatgccccttgttggcttctaggtaagctcagaactgcatcaggggctcagaggagtgggagatgatgaactgaagaagatatggaggactaagtcctggagcaaagtgagagtaaaggagatgtaataatygcagagaatgggaaagggttggtaagaattttgaaataagtgtatatttaatcagtttcatagcttgcaaagtatgtgcagctcttcaggatagaartgagaatgcttcactgtgtgtaatacagatacagagataaaagtttaataagtgacccaataaccagctacttccattccatgtctgccttctttttccttctacaaaggcagagtttttacttgtgtgtatatggtagtaatgtttacaaacttgcttgtccagtgaggaagtctcaggtgtgtttctacttttaaatgactctgcacccaaaatttctgaatgatgcactccatgaagccaaattcccagggcatttcctgccctcatgggtaccaaagggagcaaacacagcaatca

SEQ ID NO: 26846 - DNA, 599 bp, Chicken  19866894243419_1
  misc_feature (1)..(77): n is any nucleotide
nnnnnnnnnnnnnnnnnnnnnnnnnnnnnnnnnnnnnnnnnnnnnnnnnnnnnnnnnnnnnnnnnnnnnnnnnnnnntcttatatgcacccaacagtcctggataaattaatcagtgagaaagtgcttaaggcggcagtggctcacacaagagccccgtaagtgcagtggagctacacctttggtggctgaccatcagggaaggactcaccagatactaacagagacactcctaacttataggttataatactaaagactacagttctgaaatgggatgactttttatgcctcaaaggcrcagactagcagaaagccagaacttccccagtgagcagatacctttaaactgctttcctgatgcttgctttgaaatatgcaaaactggccatgctatggctgcaatctatgcagagacaaaatgcagtgagactattactatgctgtgctgccttcttttgtaagggtcaccaaaaagagcttctgcatactacggagaggaatgggtaatttgacataggaaaggtctggtgcgtcaagcatgtgattaatttcttaggattagtttaggattatttttactgaaggcaggaggtaccc

SEQ ID NO: 26847 - DNA, 600 bp, Chicken  19866894243419_2
gccatgctatggctgcaatctatgcagagacaaaatgcagtgagactattactatgctgtgctgccttcttttgtaagggtcaccaaaaagagcttctgcatactacggagaggaatgggtaatttgacataggaaaggtctggtgcgtcaagcatgtgattaatttcttaggattagtttaggattatttttactgaaggcaggaggtacccttttacagagtattcaaatcctctattggagagatccgagctttgcagcattcctgcaaacacaaacattaggcaaaatttatagastgaatggttaaaaaataatttgcccagctctcttcaagagctcaaagacaatgtgttgacactacaaacagaggggtgaaagagaacaaaacataaccatttatacagtgtttctttactctgttggatcctccagactgtagaagctgttagaaaatgccagtttatttcaggggtgtgcagggatattcagcacagatagcaaataatttttgcataaagcttaaaagtcagtacacacagtgaggctaaatcccaagagtgcttctcagctttgaacagtgctgcttaggagaaaga

SEQ ID NO: 26848 - DNA, 600 bp, Chicken  19866894243423_1
cctggtcagctggacaatatgttgtgctcactcaagctcatgaaacctgcagagggtgtggggtggctgaagcataggaataggcttagagaagggactatcttttgggggatttggaagctgtgttgaaggggaagctgagggaagtgaaattaggtacacgtatcatattgctgcttaaagttgcttgtgttgtccgaggcaggtgaaatttgtaagatgtgggtagaccaaggtggaggcaaatgtggtgatgtgagggcggttgctgcagagcagaggaagaaggcaggcaagtcycggtcactgtaacacagcagggtgtgccttaaaaccagctgcagaagctctyctagtgcctacggccataccaccctggaaacgcccgatctcgtctgatctcggaagctaagcagggtcgggctcggttagtacttggatgggagactgcctgggaataccgagtgtcgtaggcgtctctttttgctttggcgctgctatctccacaaacgcgcggtggccctgcatttgtcttttctctttgcaccttttcagctggcaataccccccccaaagcaccggccgtctcgtgcccctcag

SEQ ID NO: 26849 - DNA, 600 bp, Chicken  19866894243423_2
agggtgtggggtggctgaagcataggaataggcttagagaagggactatcttttgggggatttggaagctgtgttgaaggggaagctgagggaagtgaaattaggtacacgtatcatattgctgcttaaagttgcttgtgttgtccgaggcaggtgaaatttgtaagatgtgggtagaccaaggtggaggcaaatgtggtgatgtgagggcggttgctgcagagcagaggaagaaggcaggcaagtcycggtcactgtaacacagcagggtgtgccttaaaaccagctgcagaagctctyctagtgcctacggccataccaccctggaaacgcccgatctcgtctgatctcggaagctaagcagggtcgggctcggttagtacttggatgggagactgcctgggaataccgagtgtcgtaggcgtctctttttgctttggcgctgctatctccacaaacgcgcggtggccctgcatttgtcttttctctttgcaccttttcagctggcaataccccccccaaagcaccggccgtctcgtgcccctcagccgcaccctccccaccgagccgcaacgggttgtagccgccccttcctttccc

SEQ ID NO: 26850 - DNA, 600 bp, Chicken  19866894243429_1
gtggcggcgaaagcgacatgtttggggacatctccttcctccaggggaaattccacctcctccccaggaccgagagcggcttccattccgacaaggacagccccgaggccgctcccttcgagttctccaggacggccaccatctccggccgccagcaggcgaccgaaacctcctctcccctcctcaaaaacgccatttcgttgcccgtcatcggggggccgcaagctttgacccttccttccgcccaagcacccccaaaacccccacggctccacctggatgacaaagccgccgccgccrccgctgccgtcccgcgtccctgcagcccacagaacggtttctcggaggagaagagcagccccgagcccttcctctcgcacgccggctccctcctctccctccacgtggatttggggccgtccatcctggaggacgtgctgcaggtgatggagaagcaccaaggggagaagacggcgcaggattcgggccggcaggagatcctgacatgaaggcgagcggaggtaaagcatgaaacggatccgttgttggatcaatccttcctcctcgcgggaggggggcccaaattcgcacccccggtcc

SEQ ID NO: 26851 - DNA, 568 bp, Chicken  19866894243435_1
tctgagaactatttctgctaggaaaaattgcactactgtactagcaggactttgtaggtaaacattttaagaagccttatgcccatacttactaccagatggcataaaaatggcatcagttattaatctctgtctttttcaattcaaccattactcatttggatggagggtcacagccaaattggcaaactatgacagatgcctggggacaagaacaagagatgtattttggggcccaaattgactgtttcaatgatggtacgaaggcaaaggtcccgggcctgatcagacaggatctgyagctaactttcaccaccttcctgacctgaagcggacagatgatctggatgagacctttagcttagattttgacatattttcatgctgcaagactgttgtaagccctgggttggttgttggcacttccaaacaggctctacaggccttaaatgtccattatgtcagaactgggtatgggcttcctggcagacttcatgcaacattaattcaaagattttcttttcaaaaagaatattttgctttaggatttcataagggaaagcaacag

SEQ ID NO: 26852 - DNA, 600 bp, Chicken  19866894243436_1
gtattagaagtattagttgtaatagaagtttatcatttaataaataccttactttatgacattaagctgtaaataaaggcttccaaactcatatccaaaatctttccatctccaaactgaaaaatgcttctctgagagtccatgtgcagataattaagtaggatgagaagtgaagagttacaagtaaattaaaggaattaatagatttatttgacaattcagtcaaaaatagcacgcaggatgaagctactggcttcaaatggaatgctgaacaacatgggacttcagtttaaattatamggsattcctgtttcagaggaagcagcaaacaagaattgtttaaagacagatctgggtcccaggaagccatcaaggataaggagctaacccaaatgaacaatttgcaatgaataatgtgttagtacytttttccttgcaatctgtgcatcaaagtaatgggcttttcagttctttctgatgagagaacactygtgacctcctcaccagacaagagcggcagatgcagtgtggcrtggtctgaatcatacactttgcatgggggggaaaaaaagtgacaacttctcatatcttctggccttc

SEQ ID NO: 26853 - DNA, 600 bp, Chicken  19866894243436_10
agtgcttagtaaaaaatatraagcagaagtaaacaatgtaatacaaggcaaataacaatggggtaaggaggaaactgccatcattgcggagtctacaaacaaaaggattaggacattgacaagacaatatgtaattttatcaaatatctttcggtgacatctttgagaagaaaatcttgtatacaataaaagcaaataaattgattccaagatctrctattttgaatgaaaagaaatgcacaaatggcactgtcataaaatctattaatcatattccacagttgaagaatggctgcaaawactctttatcctccatatcctgtggggcatgttaatgtaatcattttaggatggataggatacaaataaataaatcctactccttcttctaaagtgcaggaaaggccttggcagcagaacagatatgatttcactttgcatggatgagaccatatactgacctttgtattactgcttagcacatagatcagctgcctactgcagctctctgcaaagccaatgcaggagccagagaacatgtacctcttctaagccagttatacagtaggttttctggggaaaaaaaggaaggaggaaaaa

SEQ ID NO: 26854 - DNA, 600 bp, Chicken  19866894243436_2
ttagaagtattagttgtaatagaagtttatcatttaataaataccttactttatgacattaagctgtaaataaaggcttccaaactcatatccaaaatctttccatctccaaactgaaaaatgcttctctgagagtccatgtgcagataattaagtaggatgagaagtgaagagttacaagtaaattaaaggaattaatagatttatttgacaattcagtcaaaaatagcacgcaggatgaagctactggcttcaaatggaatgctgaacaacatgggacttcagtttaaattatamggsattcctgtttcagaggaagcagcaaacaagaattgtttaaagacagatctgggtcccaggaagccatcaaggataaggagctaacccaaatgaacaatttgcaatgaataatgtgttagtacytttttccttgcaatctgtgcatcaaagtaatgggcttttcagttctttctgatgagagaacactygtgacctcctcaccagacaagagcggcagatgcagtgtggcrtggtctgaatcatacactttgcatgggggggaaaaaaagtgacaacttctcatatcttctggccttctgc

SEQ ID NO: 26855 - DNA, 600 bp, Chicken  19866894243436_3
cttctctgagagtccatgtgcagataattaagtaggatgagaagtgaagagttacaagtaaattaaaggaattaatagatttatttgacaattcagtcaaaaatagcacgcaggatgaagctactggcttcaaatggaatgctgaacaacatgggacttcagtttaaattatamggsattcctgtttcagaggaagcagcaaacaagaattgtttaaagacagatctgggtcccaggaagccatcaaggataaggagctaacccaaatgaacaatttgcaatgaataatgtgttagtacytttttccttgcaatctgtgcatcaaagtaatgggcttttcagttctttctgatgagagaacactygtgacctcctcaccagacaagagcggcagatgcagtgtggcrtggtctgaatcatacactttgcatgggggggaaaaaaagtgacaacttctcatatcttctggccttctgcactctcagtgaagatgtgccaaggatacttcattgccctgagaccaaaagaacagagtaagaacccacacacaaacacacccaggtttcttggccatcagctctcttatttccttctcagcag

SEQ ID NO: 26856 - DNA, 600 bp, Chicken  19866894243436_4
aaggaattaatagatttatttgacaattcagtcaaaaatagcacgcaggatgaagctactggcttcaaatggaatgctgaacaacatgggacttcagtttaaattatamggsattcctgtttcagaggaagcagcaaacaagaattgtttaaagacagatctgggtcccaggaagccatcaaggataaggagctaacccaaatgaacaatttgcaatgaataatgtgttagtacytttttccttgcaatctgtgcatcaaagtaatgggcttttcagttctttctgatgagagaacactygtgacctcctcaccagacaagagcggcagatgcagtgtggcrtggtctgaatcatacactttgcatgggggggaaaaaaagtgacaacttctcatatcttctggccttctgcactctcagtgaagatgtgccaaggatacttcattgccctgagaccaaaagaacagagtaagaacccacacacaaacacacccaggtttcttggccatcagctctcttatttccttctcagcagggaagagctgtgctgtcacaaggattgcacactcttcaaagagatttgtattgtactgaactgag

SEQ ID NO: 26857 - DNA, 600 bp, Chicken  19866894243436_5
acgcaggatgaagctactggcttcaaatggaatgctgaacaacatgggacttcagtttaaattatamggsattcctgtttcagaggaagcagcaaacaagaattgtttaaagacagatctgggtcccaggaagccatcaaggataaggagctaacccaaatgaacaatttgcaatgaataatgtgttagtacytttttccttgcaatctgtgcatcaaagtaatgggcttttcagttctttctgatgagagaacactygtgacctcctcaccagacaagagcggcagatgcagtgtggcrtggtctgaatcatacactttgcatgggggggaaaaaaagtgacaacttctcatatcttctggccttctgcactctcagtgaagatgtgccaaggatacttcattgccctgagaccaaaagaacagagtaagaacccacacacaaacacacccaggtttcttggccatcagctctcttatttccttctcagcagggaagagctgtgctgtcacaaggattgcacactcttcaaagagatttgtattgtactgaactgagcttgttcataccgctggggctgcacagtgtagcacgaacaag

SEQ ID NO: 26858 - DNA, 600 bp, Chicken  19866894243436_6
tgctgaacaacatgggacttcagtttaaattatamggsattcctgtttcagaggaagcagcaaacaagaattgtttaaagacagatctgggtcccaggaagccatcaaggataaggagctaacccaaatgaacaatttgcaatgaataatgtgttagtacytttttccttgcaatctgtgcatcaaagtaatgggcttttcagttctttctgatgagagaacactygtgacctcctcaccagacaagagcggcagatgcagtgtggcrtggtctgaatcatacactttgcatgggggggraaaaaagtgacaacttctcatatcttctggccttctgcactctcagtgaagatgtgccaaggatacttcattgccctgagaccaaaagaacagagtaagaacccacacacaaacacacccaggtttcttggccatcagctctcttatttccttctcagcagggaagagctgtgctgtcacaaggattgcacactcttcaaagagatttgtattgtactgaactgagcttgttcataccgctggggctgcacagtgtagcacgaacaagcttctctgctttccatattgcactaggagtca

SEQ ID NO: 26859 - DNA, 600 bp, Chicken  19866894243436_7
ggagtcaatgtattgaatcatagcagtaaaagtgacaaatactttttctctttttttaattgcatttcaacatgaaaggaaaaaatcacacagcccttcagaacttggaatatccttgacctctagatgtctttccgaataaaatcattccaaatttcattacttgtttgcagattatcaggtgcattatgccttcattggttcatttaaatctctgcacattccacagagtcattttagtgtcagttgatttactagctgtaaaatttcaaataaagagaggaagacaaggacagctawgtttgctatacctgcaatataaaagaagctatagagaagttaaacaataattcaaaattatatctaaacagacaaacgtgaaatctcaaggtcttatcctccacttgtgaaaatctctatagtgcttagtaaaaaatatraagcagaagtaaacaatgtaatacaaggcaaataacaatggggtaaggaggaaactgccatcattgcggagtctacaaacaaaaggattaggacattgacaagacaatatgtaattttatcaaatatctttcggtgacatctttgagaagaaaatcttgt

SEQ ID NO: 26860 - DNA, 600 bp, Chicken  19866894243436_8
aaaatcattccaaatttcattacttgtttgcagattatcaggtgcattatgccttcattggttcatttaaatctctgcacattccacagagtcattttagtgtcagttgatttactagctgtaaaatttcaaataaagagaggaagacaaggacagctawgtttgctatacctgcaatataaaagaagctatagagaagttaaacaataattcaaaattatatctaaacagacaaacgtgaaatctcaaggtcttatcctccacttgtgaaaatctctatagtgcttagtaaaaaatatraagcagaagtaaacaatgtaatacaaggcaaataacaatggggtaaggaggaaactgccatcattgcggagtctacaaacaaaaggattaggacattgacaagacaatatgtaattttatcaaatatctttcggtgacatctttgagaagaaaatcttgtatacaataaaagcaaataaattgattccaagatctrctattttgaatgaaaagaaatgcacaaatggcactgtcataaaatctattaatcatattccacagttgaagaatggctgcaaawactctttatcctccatatcc

SEQ ID NO: 26861 - DNA, 600 bp, Chicken  19866894243436_9
aagttaaacaataattcaaaattatatctaaacagacaaacgtgaaatctcaaggtcttatcctccacttgtgaaaatctctatagtgcttagtaaaaaatatraagcagaagtaaacaatgtaatacaaggcaaataacaatggggtaaggaggaaactgccatcattgcggagtctacaaacaaaaggattaggacattgacaagacaatatgtaattttatcaaatatctttcggtgacatctttgagaagaaaatcttgtatacaataaaagcaaataaattgattccaagatctrctattttgaatgaaaagaaatgcacaaatggcactgtcataaaatctattaatcatattccacagttgaagaatggctgcaaawactctttatcctccatatcctgtggggcatgttaatgtaatcattttaggatggataggatacaaataaataaatcctactccttcttctaaagtgcaggaaaggccttggcagcagaacagatatgatttcactttgcatggatgagaccatatactgacctttgtattactgcttagcacatagatcagctgcctactgcagctctctgcaaag

SEQ ID NO: 26862 - DNA, 600 bp, Chicken  19866894243437_1
actgaggtgtatttgtaaccacatttccaataatgtgtttgtcaaacaacaatttacactgcagtctttattcttatcacttaaaatggcatagcacagaatttcatccaggcctcttacaaataaattccaaaatccttaaagaactgagaggcttcactaagagtctaactataaatgcttctaacaaaaaaaaaagccaagtgagtattactattatttatagaaacctattaatgtgagttgcatggtaatcagaaaaaaaacactcaggtttttgccttctgtctgcacctgtartataaatacaattcatataaaatacaagtatctttcatgtcttttttttctacctwggtagagtggctttccaatgtatttctttgttttatgttagaggycctgaggcctgcagcaaattatctwcaaaagggacagatcggaagcagaagcagctcagcctaatggtagtgcagatcaaagccttcagaattttagagggactcaaaccagcattaatgtctggtgaactctagaggctttggcacctgtyacggacaacagacctgcagggaagatcagctctatgcaaacgcttaa

SEQ ID NO: 26863 - DNA, 600 bp, Chicken  19866894243437_2
cactgcagtctttattcttatcacttaaaatggcatagcacagaatttcatccaggcctcttacaaataaattccaaaatccttaaagaactgagaggcttcactaagagtctaactataaatgcttctaacaaaaaaaaaagccaagtgagtattactattatttatagaaacctattaatgtgagttgcatggtaatcagaaaaaaaacactcaggtttttgccttctgtctgcacctgtartataaatacaattcatataaaatacaagtatctttcatgtcttttttttctacctwggtagagtggctttccaatgtatttctttgttttatgttagaggycctgaggcctgcagcaaattatctwcaaaagggacagatcggaagcagaagcagctcagcctaatggtagtgcagatcaaagccttcagaattttagagggactcaaaccagcattaatgtctggtgaactctagaggctttggcacctgtyacggacaacagacctgcagggaagatcagctctatgcaaacgcttaataggatgaaacattcagtaacttggtatcctagctaaaggctgattgctagaagag

SEQ ID NO: 26864 - DNA, 600 bp, Chicken  19866894243437_3
tttcatccaggcctcttacaaataaattccaaaatccttaaagaactgagaggcttcactaagagtctaactataaatgcttctaacaaaaaaaaaagccaagtgagtattactattatttatagaaacctattaatgtgagttgcatggtaatcagaaaaaaaacactcaggtttttgccttctgtctgcacctgtartataaatacaattcatataaaatacaagtatctttcatgtcttttttttctacctwggtagagtggctttccaatgtatttctttgttttatgttagaggycctgaggcctgcagcaaattatctwcaaaagggacagatcggaagcagaagcagctcagcctaatggtagtgcagatcaaagccttcagaattttagagggactcaaaccagcattaatgtctggtgaactctagaggctttggcacctgtyacggacaacagacctgcagggaagatcagctctatgcaaacgcttaataggatgaaacattcagtaacttggtatcctagctaaaggctgattgctagaagagggtaaggagagggcactacttcttaaaaataatttctagagatgc

SEQ ID NO: 26865 - DNA, 600 bp, Chicken  19866894243437_4
attccaaaatccttaaagaactgagaggcttcactaagagtctaactataaatgcttctaacaaaaaaaaaagccaagtgagtattactattatttatagaaacctattaatgtgagttgcatggtaatcagaaaaaaaacactcaggtttttgccttctgtctgcacctgtartataaatacaattcatataaaatacaagtatctttcatgtcttttttttctacctwggtagagtggctttccaatgtatttctttgttttatgttagaggycctgaggcctgcagcaaattatctwcaaaagggacagatcggaagcagaagcagctcagcctaatggtagtgcagatcaaagccttcagaattttagagggactcaaaccagcattaatgtctggtgaactctagaggctttggcacctgtyacggacaacagacctgcagggaagatcagctctatgcaaacgcttaataggatgaaacattcagtaacttggtatcctagctaaaggctgattgctagaagagggtaaggagagggcactacttcttaaaaataatttctagagatgccttgcttcccaagcacactcagatg

SEQ ID NO: 26866 - DNA, 600 bp, Chicken  19866894243437_5
atcagaaaaaaaacactcaggtttttgccttctgtctgcacctgtartataaatacaattcatataaaatacaagtatctttcatgtcttttttttctacctwggtagagtggctttccaatgtatttctttgttttatgttagaggycctgaggcctgcagcaaattatctwcaaaagggacagatcggaagcagaagcagctcagcctaatggtagtgcagatcaaagccttcagaattttagagggactcaaaccagcattaatgtctggtgaactctagaggctttggcacctgtyacggacaacagacctgcagggaagatcagctctatgcaaacgcttaataggatgaaacattcagtaacttggtatcctagctaaaggctgattgctagaagagggtaaggagagggcactacttcttaaaaataatttctagagatgccttgcttcccaagcacactcagatgagagtttcagtggtgtatcagcaacgtttatgkcagtttatggcagctaggtaggccagagttgatcrttttggaggacagcaccatgattgaccagtgatgtggctagaggaactaacaggagcag

SEQ ID NO: 26867 - DNA, 600 bp, Chicken  19866894243437_6
gcctaatggtagtgcagatcaaagccttcagaattttagagggactcaaaccagcattaatgtctggtgaactctagaggctttggcacctgtyacggacaacagacctgcagggaagatcagctctatgcaaacgcttaataggatgaaacattcagtaacttggtatcctagctaaaggctgattgctagaagagggtaaggagagggcactacttcttaaaaataatttctagagatgccttgcttcccaagcacactcagatgagagtttcagtggtgtatcagcaacgtttatgkcagtttatggcagctaggtaggccagagttgatcrttttggaggacagcaccatgattgaccagtgatgtggctagaggaactaacaggagcagagagcttgataggcataagtcagatagcaggaaaacttttttttatggcagtctgctaaaatattactgaaagaaacaaactcaatggaaagactttgtatagtgtattagaatggcgtgacagaatgaactgccgaactgtcctgtctaaagtcctacagctggggggagataccatatccacacttcacatggaagctacaacc

SEQ ID NO: 26868 - DNA, 600 bp, Chicken  19866894243437_7
ttagagggactcaaaccagcattaatgtctggtgaactctagaggctttggcacctgtyacggacaacagacctgcagggaagatcagctctatgcaaacgcttaataggatgaaacattcagtaacttggtatcctagctaaaggctgattgctagaagagggtaaggagagggcactacttcttaaaaataatttctagagatgccttgcttcccaagcacactcagatgagagtttcagtggtgtatcagcaacgtttatgkcagtttatggcagctaggtaggccagagttgatcrttttggaggacagcaccatgattgaccagtgatgtggctagaggaactaacaggagcagagagcttgataggcataagtcagatagcaggaaaacttttttttatggcagtctgctaaaatattactgaaagaaacaaactcaatggaaagactttgtatagtgtattagaatggcgtgacagaatgaactgccgaactgtcctgtctaaagtcctacagctggggggagataccatatccacacttcacatggaagctacaacctagacacatggtggcatcagaaaagcatggcagta

SEQ ID NO: 26869 - DNA, 600 bp, Chicken  19866894243438_1
gtgcttattcctgcgctgtgcgatcggatgaaaataaatcagtagcaattgcttggcagcaacctcctgcagtcatttgctctgaagaaactcagcccgcggtagcacgaagtgaaggaaggggtctggcgaggacacgaaacctttctttttttaatgttctcgtgggatctttcacttccacacaggcgagcgcccggctggccccgcacccgtgatgtaaccctgctgtccgaaggctggcccggctgcggggtgtcacaacctccgtttccttggcttaggtttgcagtctgaccrtatggttcagatgaaccacgacygccctcgctttaacgtgatgtatttggtttgaaaataccattgtgcgctccgagtttgagctcctaagcaaatgaagctgatttgcactgatgaatggggaacacttaccagcctgattaaagrtaaaaaacctgcaaggaaagctggcacaatttttaactcgttggtgccagtggaaatacttcattaacggaacctcataaagaaacacagaagatttttaagtaagaggggtgttcccgaagctgagtgtagctctgcaaacagtacttgtaa

SEQ ID NO: 26870 - DNA, 600 bp, Chicken  19866894243438_2
tcggatgaaaataaatcagtagcaattgcttggcagcaacctcctgcagtcatttgctctgaagaaactcagcccgcggtagcacgaagtgaaggaaggggtctggcgaggacacgaaacctttctttttttaatgttctcgtgggatctttcacttccacacaggcgagcgcccggctggccccgcacccgtgatgtaaccctgctgtccgaaggctggcccggctgcggggtgtcacaacctccgtttccttggcttaggtttgcagtctgaccrtatggttcagatgaaccacgacygccctcgctttaacgtgatgtatttggtttgaaaataccattgtgcgctccgagtttgagctcctaagcaaatgaagctgatttgcactgatgaatggggaacacttaccagcctgattaaagrtaaaaaacctgcaaggaaagctggcacaatttttaactcgttggtgccagtggaaatacttcattaacggaacctcataaagaaacacagaagatttttaagtaagaggggtgttcccgaagctgagtgtagctctgcaaacagtacttgtaagagcaattgcacgtgctcacrga

SEQ ID NO: 26871 - DNA, 600 bp, Chicken  19866894243438_3
ctttttttaatgttctcgtgggatctttcacttccacacaggcgagcgcccggctggccccgcacccgtgatgtaaccctgctgtccgaaggctggcccggctgcggggtgtcacaacctccgtttccttggcttaggtttgcagtctgaccrtatggttcagatgaaccacgacygccctcgctttaacgtgatgtatttggtttgaaaataccattgtgcgctccgagtttgagctcctaagcaaatgaagctgatttgcactgatgaatggggaacacttaccagcctgattaaagrtaaaaaacctgcaaggaaagctggcacaatttttaactcgttggtgccagtggaaatacttcattaacggaacctcataaagaaacacagaagatttttaagtaagaggggtgttcccgaagctgagtgtagctctgcaaacagtacttgtaagagcaattgcacgtgctcacrgaggtgctgctgcagacaggtttcagcacagaggctgaggagcagggctggctctgtgttcaaaatgtgatttcatgtgggctcctgttcttgtgcagcttacagacagccttctggatctgaagg

SEQ ID NO: 26872 - DNA, 600 bp, Chicken  19866894243438_4
cygccctcgctttaacgtgatgtatttggtttgaaaataccattgtgcgctccgagtttgagctcctaagcaaatgaagctgatttgcactgatgaatggggaacacttaccagcctgattaaagrtaaaaaacctgcaaggaaagctggcacaatttttaactcgttggtgccagtggaaatacttcattaacggaacctcataaagaaacacagaagatttttaagtaagaggggtgttcccgaagctgagtgtagctctgcaaacagtacttgtaagagcaattgcacgtgctcacrgaggtgctgctgcagacaggtttcagcacagaggctgaggagcagggctggctctgtgttcaaaatgtgatttcatgtgggctcctgttcttgtgcagcttacagacagccttctggatctgaaggaaagccaactggatttgtaaagatgcttatcatattccctggccctgttcaaatcaccagaaaatattaaggctgacaagcctggcttgaaacgcttctcagtatttttctgctagattacagtgtgcagagctcagcccaggcactggtttgcagtctctggagcagcaggct

SEQ ID NO: 26873 - DNA, 600 bp, Chicken  19866894243446_1
gcagctgaaatcagatttacccatgctacagcgcgcattggcattggaactagaccaccaacatctttttaactggaatgctaggaacaaaatagatttcaagccaagatttgactctgaaaaggggaaagagatcattatttactgtaggctgtagcttggttttgaaaacatttcttttatagtcagttttagctagtgcaggttgctgaagaaagaaaatatctccctcacaaaggaacacatgggaaataataagcttattaatagaatgcatgaaacctgctctccttttcatgraagaagggcctatgctacgctgaataaaagtttcccctctgcatgctgatgtattatccacatattggtgttactgcttcattaggaaacctagcatttgaagctgcattctggcagcggaatccctttcgtttaccgagattggtcttaggagtaacagagccagctgacttgtttgtgagaaggaaacagagaatctgaaaaagaccaaagctttcttaagctgaagccattttttgatggctgtgttttacagtgaaccttttatttcctgtgctaactttctctggtagatacagc

SEQ ID NO: 26874 - DNA, 600 bp, Chicken  19866894243448_1
aatgatgtccctactcctctgggaatgtaaactaaaactgcagaatgtgcttttatcaaatcatactcttaattaggtctttgcagaatgctttatagtcaaggttttgttgaataatttaattatgaagcagtacacctgatttttcaaactgagccaaattagagtgcacgaaataatcggacagcaggagcaactgctttttacatgcaagtgtatgtttttggggggagaaattcccatcgagtaaaaccctcccaccttcctcaccaagaacttcaccttccaagcaccatgggrtgtgctgggctaccatggtaaaatgtggcatctgaagccagggacagctcaggctggtggctgcaacaaatttttttagagcaacctcttctggatggkgaatgtcccttaaatggaggttatctttgataattcccactgccctgacatggggtcccagtgcctgccctctagcctgtatattgcttgcaactcaaaacccagcctctcgctgaaagctgatgctgctccaagtatggcttctgcagccggttatcaaagtgagaatagaagtggctttgtttagaaggctttttgaga

SEQ ID NO: 26875 - DNA, 562 bp, Chicken  19866894243448_2
caaggttttgttgaataatttaattatgaagcagtacacctgatttttcaaactgagccaaattagagtgcacgaaataatcggacagcaggagcaactgctttttacatgcaagtgtatgtttttggggggagaaattcccatcgagtaaaaccctcccaccttcctcaccaagaacttcaccttccaagcaccatgggrtgtgctgggctaccatggtaaaatgtggcatctgaagccagggacagctcaggctggtggctgcaacaaatttttttagagcaacctcttctggatggkgaatgtcccttaaatggaggttatctttgataattcccactgccctgacatggggtcccagtgcctgccctctagcctgtatattgcttgcaactcaaaacccagcctctcgctgaaagctgatgctgctccaagtatggcttctgcagccggttatcaaagtgagaatagaagtggctttgtttagaaggctttttgagactgactctgtgaggaactggagcatgtcagccccacaacatgctaacagaattcggtgttg

SEQ ID NO: 26876 - DNA, 600 bp, Chicken  19866894243453_1
tattgctctttatttgcccttgaaagataaattaataaattataagcacctaaacgcagaagtagtagcaagacataagcccaagcccacaagtacagaacaaatcaagtcaaataaggtaagaatgcacatccccagcaaaacctattggtgtcactaatgaagctttcagaatcaacaagtgaccaaagaacagcagatccggggcagattcactctgtggtatcatttgttctcttgtttccgaggtgttgtcttaagattgagaacagcaccttctctttacaactgttaatcttsttcaccaaagcaagttcctgtcatgcaatatggtgcaggacgttatcattttcagtgtttctgaatttagcctctactcagaggaatgctgtagtgtctctaaactgaggaggcacaaaggcaaccaatctgcagttttcagaaataacttcaggcacttccaattggatttgctgtctctgtcgcatggagttctgtgacaatgatacttggagaaaattagagctgtggttagaagctgctagaagttgagcaggatttctattgcaaatgtggtagctgcagtttctgagatgaggc

SEQ ID NO: 26877 - DNA, 600 bp, Chicken  19866894243455_1
tagcttgacaccctgggggctgcagggacgggtgcagcgtggcacaacccatccagctccaggctctgcagcctccccagctgatgggatggaaggcatccgagcttttctcagccacctgcaaaccctatcagacaataggggagaaagggctcctgccatcacctggcggccgtgcccatcgccccttggaaatgcccccagctctccccctgccacttttgttccacgggggctgcaggtggggatgctttgaaccgcgtgagaaaagctcactgcaaagaaaagctgctccctccrccgtgcgccctttcagygctgaatggggacggaggcgcctgaaaggcccgtgccccccaccatccccatcccctttgtctgcccctctgctcgccaccccctgccccatccgtcttgctaaggccccgcaaggcttcaatgccccctttcactcggtatttgttaccaaataaatatgggtgattaaaaagggatcaggagtccgtgtggtttgcggaggtgcctggaaggtggagtccctcccctgagtagcccatggcttttcgccctacatgagttaggaaaagcaatcacatagga

SEQ ID NO: 26878 - DNA, 600 bp, Chicken  19866894243455_2
ggctgcagggacgggtgcagcgtggcacaacccatccagctccaggctctgcagcctccccagctgatgggatggaaggcatccgagcttttctcagccacctgcaaaccctatcagacaataggggagaaagggctcctgccatcacctggcggccgtgcccatcgccccttggaaatgcccccagctctccccctgccacttttgttccacgggggctgcaggtggggatgctttgaaccgcgtgagaaaagctcactgcaaagaaaagctgctccctccrccgtgcgccctttcagygctgaatggggacggaggcgcctgaaaggcccgtgccccccaccatccccatcccctttgtctgcccctctgctcgccaccccctgccccatccgtcttgctaaggccccgcaaggcttcaatgccccctttcactcggtatttgttaccaaataaatatgggtgattaaaaagggatcaggagtccgtgtggtttgcggaggtgcctggaaggtggagtccctcccctgagtagcccatggcttttcgccctacatgagttaggaaaagcaatcacataggaataaaaagccatagacc

SEQ ID NO: 26879 - DNA, 600 bp, Chicken  19866894243456_1
aagcctctaaacttttgcaagggccttcacctgttttggattccagacggacaacacaaagcgttcacagctctccatgcattttgtctgacatcttaagatttccatctttcagaaaagatcctttaagcaataaaaggcctataacaactttatttaaggactctcaaaaacattccaacaagaaggcagaagaaaaattttcatctttatgaaaggcctcaaaagcagccaaaaccaaggtattactctacatgactcccagctgatcttctatatcagaagatcttctatgtctayagcataaaagaatagaataatttttaatctgtccttccttgcagaaaatgcacgaggtaatgtttcaaaagaataaacatctgctctgggtggggtacataggaaaagaaatcatgagccactctgcaaaaaaaamcccataagtgcatgaatttagaagagaccatgataaatgtatgttgattatttgcttaatacatttggaatatatttcctcatttatttaataggttttttctttccacaaagaaagatcttccactgggactcataaaggcagtaatattttggtaagttact

SEQ ID NO: 26880 - DNA, 600 bp, Chicken  19866894243456_2
aaggcctataacaactttatttaaggactctcaaaaacattccaacaagaaggcagaagaaaaattttcatctttatgaaaggcctcaaaagcagccaaaaccaaggtattactctacatgactcccagctgatcttctatatcagaagatcttctatgtctayagcataaaagaatagaataatttttaatctgtccttccttgcagaaaatgcacgaggtaatgtttcaaaagaataaacatctgctctgggtggggtacataggaaaagaaatcatgagccactctgcaaaaaaaamcccataagtgcatgaatttagaagagaccatgataaatgtatgttgattatttgcttaatacatttggaatatatttcctcatttatttaataggttttttctttccacaaagaaagatcttccactgggactcataaaggcagtaatattttggtaagttactattacactaagaatagtagagattgtctcacattttcttgttcacagctttataattaacaaagtagaaatgtaggctgttatgtttgaaggaagtttcccctgagagatcaaataatccaaagcagcaacagctt

SEQ ID NO: 26881 - DNA, 600 bp, Chicken  19866894243467_1
caaaagcctaataaatacagtaatcaacatagattccctgcctttggtgttctccggaattaatgagaccttcttccaccgttataatagcagacagcaagagacattctaccttcacagcctgggttgcactgaggcattactcaaaagagatcaatttttaccctgccaggcttatcaagttgggagcacaaaagtgtaccagcaatcagaagtttgaccactgtgctgccaagtcccttcatgctaaaagaaacaaaaaatagtagcactaagattggcattgctattccacactgygtcatggggaaaggtacgtgtgttagtgttagtacaagagagggcagagctctgaaaaaaaaggcatggttcacttttgcaaattaaatttaacctcagtgtggagcccrtttctggggtgaggtaactcatagaaccctcatttgtacaacagtttcctcttgacttcttcctgcacaagacctgyttttccctgcctttttgggtctgaatgactaagcttttctgcagtcctttctcaagataaccttttttcttccctacaaggaacagctggaataactaggcctttgtatttta

SEQ ID NO: 26882 - DNA, 600 bp, Chicken  19866894243467_2
accttcacagcctgggttgcactgaggcattactcaaaagagatcaatttttaccctgccaggcttatcaagttgggagcacaaaagtgtaccagcaatcagaagtttgaccactgtgctgccaagtcccttcatgctaaaagaaacaaaaaatagtagcactaagattggcattgctattccacactgygtcatggggaaaggtacgtgtgttagtgttagtacaagagagggcagagctctgaaaaaaaaggcatggttcacttttgcaaattaaatttaacctcagtgtggagcccrtttctggggtgaggtaactcatagaaccctcatttgtacaacagtttcctcttgacttcttcctgcacaagacctgyttttccctgcctttttgggtctgaatgactaagcttttctgcagtcctttctcaagataaccttttttcttccctacaaggaacagctggaataactaggcctttgtattttaagttattcattaaagttaaatggctttctcttcaagcttgtcctagggcaactattataaggttaacctttctatggctgtgaatccagataagttactcaattttctct

SEQ ID NO: 26883 - DNA, 600 bp, Chicken  19866894243467_3
agcacaaaagtgtaccagcaatcagaagtttgaccactgtgctgccaagtcccttcatgctaaaagaaacaaaaaatagtagcactaagattggcattgctattccacactgygtcatggggaaaggtacgtgtgttagtgttagtacaagagagggcagagctctgaaaaaaaaggcatggttcacttttgcaaattaaatttaacctcagtgtggagcccrtttctggggtgaggtaactcatagaaccctcatttgtacaacagtttcctcttgacttcttcctgcacaagacctgyttttccctgcctttttgggtctgaatgactaagcttttctgcagtcctttctcaagataaccttttttcttccctacaaggaacagctggaataactaggcctttgtattttaagttattcattaaagttaaatggctttctcttcaagcttgtcctagggcaactattataaggttaacctttctatggctgtgaatccagataagttactcaattttctctgcacccagccagacacaaatatgtatgaatacgccttttccatggttcatagctgttgcctcaatacctattccgat

SEQ ID NO: 26884 - DNA, 600 bp, Chicken  19866894243477_1
gtggtcagtgatataatgtagtcaaggggataatttaaaaaatactctggttttgctttttttgcatttcttatgctacttcttcattgtttcagctatggattgcagtaatgtagaaaccagggcaacaaatgctgaatgtttaaagagattggcactaaaaggatgcctgatgaagcagatttagtgacagtgtttccaagctcactggtattttacattgtagtgtggattaaatcttttttgccagaatatctcgtatgaacagcagtatttaaaaaaattaaataacagaggagrgaaaagtttgtttcacataacattactaatttaaaatatacctattctaccattactgattcagtattggttttatagggcagcagggtcgggcaatgctgaagcaagtactatggtttttgtacttctcagaaccagaggtctgataacaacagttctgttagaggatttatatgatttcagttaaaggctttctttacagattgaaatgggttagaacacaatcatagattatgtttttttaaaacgtatttatacataaatacagaaaatccttttacagaagcaatgatttacttg

SEQ ID NO: 26885 - DNA, 600 bp, Chicken  19866894243492_1
aaccagtttccccaccaaatatattttctctttcttgaaaaaactgtgggaaagacaataaatcctggctccactgcctagggaagaggatttcccagtaagctgcaaagttcacaaccttcaaaattcatctcttaggagagatacatgactcagaaataaagtatgtggaattaaggaatggaaataaatccaaacatgggcaagtctctcttttacattacttctctgaaaagaaaccgggaagctgaaaaacaacaacccaacaaccccaaggaactgtcaaggggcatcacacaygcacataagaataataattaacgaatgatctgtttagatatcctgtctcaacaagtcaaatygctacagaagagattcccaaagtctggtctgtttgattttcagatggaaagaagaaaggatagcaytgtggcttgacggtaaaacactgacattttaaggcaaagctaattccactgcagcttagcactggcagaacatcactttgccttttgtgctgtgaggtactgctctaaacccaaggagcgtgctggctgcctgataacaggctaggtgcaagctcctggccactggattctc

SEQ ID NO: 26886 - DNA, 600 bp, Chicken  19866894243492_2
tcctggctccactgcctagggaagaggatttcccagtaagctgcaaagttcacaaccttcaaaattcatctcttaggagagatacatgactcagaaataaagtatgtggaattaaggaatggaaataaatccaaacatgggcaagtctctcttttacattacttctctgaaaagaaaccgggaagctgaaaaacaacaacccaacaaccccaaggaactgtcaaggggcatcacacaygcacataagaataataattaacgaatgatctgtttagatatcctgtctcaacaagtcaaatygctacagaagagattcccaaagtctggtctgtttgattttcagatggaaagaagaaaggatagcaytgtggcttgacggtaaaacactgacattttaaggcaaagctaattccactgcagcttagcactggcagaacatcactttgccttttgtgctgtgaggtactgctctaaacccaaggagcgtgctggctgcctgataacaggctaggtgcaagctcctggccactggattctctcttgctgagctctaacacagtgacatgtacagcaatgagctttcattgattttacgtttgg

SEQ ID NO: 26887 - DNA, 600 bp, Chicken  19866894243492_3
catctcttaggagagatacatgactcagaaataaagtatgtggaattaaggaatggaaataaatccaaacatgggcaagtctctcttttacattacttctctgaaaagaaaccgggaagctgaaaaacaacaacccaacaaccccaaggaactgtcaaggggcatcacacaygcacataagaataataattaacgaatgatctgtttagatatcctgtctcaacaagtcaaatygctacagaagagattcccaaagtctggtctgtttgattttcagatggaaagaagaaaggatagcaytgtggcttgacggtaaaacactgacattttaaggcaaagctaattccactgcagcttagcactggcagaacatcactttgccttttgtgctgtgaggtactgctctaaacccaaggagcgtgctggctgcctgataacaggctaggtgcaagctcctggccactggattctctcttgctgagctctaacacagtgacatgtacagcaatgagctttcattgattttacgtttggacctggctcaaacactcaggctgtctgtctagagaaaaaagacccacatgatgtgagagcgcagga

SEQ ID NO: 26888 - DNA, 600 bp, Chicken  19866894243494_1
ggagggaaggcaggaacttgtctcagtttgactataaatgtcctcacttcagcccagcagaatgctgccagcactgtggggagggggttaggcctttagctgcaagtggcagaggctcatcctgagctgcatctgaggactgcacggtatatccaaagaggaagcatggtaacactttgtagtcactgtacatctctaccatagcagttactccacgcaaattaatgcaatccaaaagctgctttacttgccataatccttacaggcacaatatgttattattaggaggaatgacttcawgagccaaaggaagagtgaagatatgatactgaccctgaggtactcacccgaccagctaaattggcctggtagtttcctgaagtcaaccagtttggaacaacagaaggcctgaacctatgaactcttttccatcctcaaaacatgtagcttacttgtgcatttagaacagcactgatttcacgctgctcctgactatatgttttacacaacaagtaaattgttccccagaaatgtttatacttgtgaaccaatagggtcacgacctcaaaacaaaccagcaaaaatgcagctgtgtacctc

SEQ ID NO: 26889 - DNA, 599 bp, Chicken  19866894243498_1
  misc_feature (1)..(150): n is any nucleotide
nnnnnnnnnnnnnnnnnnnnnnnnnnnnnnnnnnnnnnnnnnnnnnnnnnnnnnnnnnnnnnnnnnnnnnnnnnnnnnnnnnnnnnnnnnnnnnnnnnnnnnnnnnnnnnnnnnnnnnnnnnnnnnnnnnnnnnnnnnnnnnnnnnnnnncatagtgcagagagtgcaataaaggctaatactattgttagtggactgaaggatctctcctatgaggaaagtctgagagatctggactgttcagcctaaaaaggagaaggcttaaggtagatgcgtctataaatatgtgaagagaagaamcaaagaggatggagccacgctctttcaagtgctgcctagtgccaggacaagaggcaatgttcacaaactggaaaacagcaaggtccatctgagtatcatrctttctctcattgtgagagtgactgagcactggcacaggtagcccagaatttatggagttttcttctctggaaatcttcaaaaaccatctgggagtggtttctggccaatagttctaattggcccttcttcagcaaggaattcaacargatgacttccagtggttctttccaagatccaccagtaatttgcaataattg

SEQ ID NO: 26890 - DNA, 599 bp, Chicken  19866894243498_2
  misc_feature (1)..(50): n is any nucleotide
nnnnnnnnnnnnnnnnnnnnnnnnnnnnnnnnnnnnnnnnnnnnnnnnnncatagtgcagagagtgcaataaaggctaatactattgttagtggactgaaggatctctcctatgaggaaagtctgagagatctggactgttcagcctaaaaaggagaaggcttaaggtagatgcgtctataaatatgtgaagagaagaamcaaagaggatggagccacgctctttcaagtgctgcctagtgccaggacaagaggcaatgttcacaaactggaaaacagcaaggtccatctgagtatcatrctttctctcattgtgagagtgactgagcactggcacaggtagcccagaatttatggagttttcttctctggaaatcttcaaaaaccatctgggagtggtttctggccaatagttctaattggcccttcttcagcaaggaattcaacargatgacttccagtggttctttccaagatccaccagtaatttgcaataattgtacttgtttatgatatcttctaggcaagtgccaattataatccaataagagaaaaatcagtaaatttcattttaaaagagtacctttggcaaaatgaaac

SEQ ID NO: 26891 - DNA, 600 bp, Chicken  19866894243498_3
aaaaggagaaggcttaaggtagatgcgtctataaatatgtgaagagaagaamcaaagaggatggagccacgctctttcaagtgctgcctagtgccaggacaagaggcaatgttcacaaactggaaaacagcaaggtccatctgagtatcatrctttctctcattgtgagagtgactgagcactggcacaggtagcccagaatttatggagttttcttctctggaaatcttcaaaaaccatctgggagtggtttctggccaatagttctaattggcccttcttcagcaaggaattcaacargatgacttccagtggttctttccaagatccaccagtaatttgcaataattgtacttgtttatgatatcttctaggcaagtgccaattataatccaataagagaaaaatcagtaaatttcattttaaaagagtacctttggcaaaatgaaactgccctgtgaaagaatctttaaaatattccctccaactttttccaaacactgttgcgggtctgattgaggaggtccttgtagcttatctttgcactttgttctgtgataatacaacaaaacaggatctgggtataatgtagaatttttt

SEQ ID NO: 26892 - DNA, 600 bp, Chicken  19866894243506_1
aaaaaatatcccaggcttaatattgttctttttgttgctagtttatcagtcatctattatgaaagtatcatttatgtgtggtctgagtttttcctgtactggagagaaatggagattaaaaatctattaattaaaaagcgagacagtccatgctaaagagaataaattcttatagcttggtgaaaaaaagctttatatgatgacatgggtctgtatttccccattcgtgacactgtgcaacatattaacaacaagaaagatatttctttaaaagaaaccatgagaatactttaggtaaamtcataactatccwaatttctcaattcagtgggagttttggtatgtgctaaacttgcagtaaaaatgagttatgaaaatagctgtcatacaggccattttcaaaacatgaataattcaaacaggttcctaatttttttcttcaaaaaatattgaactctgcagcttgtacaattaatacagctgaaatagtaagactttaaaagcaaatacttattctgtacaataacatttcattacaattttattgtgtttattttcatggattccagtagacaatatatcctgtgcaatgaaaaaaaa

SEQ ID NO: 26893 - DNA, 600 bp, Chicken  19866894243506_2
ggcttaatattgttctttttgttgctagtttatcagtcatctattatgaaagtatcatttatgtgtggtctgagtttttcctgtactggagagaaatggagattaaaaatctattaattaaaaagcgagacagtccatgctaaagagaataaattcttatagcttggtgaaaaaaagctttatatgatgacatgggtctgtatttccccattcgtgacactgtgcaacatattaacaacaagaaagatatttctttaaaagaaaccatgagaatactttaggtaaamtcataactatccwaatttctcaattcagtgggagttttggtatgtgctaaacttgcagtaaaaatgagttatgaaaatagctgtcatacaggccattttcaaaacatgaataattcaaacaggttcctaatttttttcttcaaaaaatattgaactctgcagcttgtacaattaatacagctgaaatagtaagactttaaaagcaaatacttattctgtacaataacatttcattacaattttattgtgtttattttcatggattccagtagacaatatatcctgtgcaatgaaaaaaaaaaatgtaatccgt

SEQ ID NO: 26894 - DNA, 600 bp, Chicken  19866894243506_3
tctgttagaaaacaaagcccaaatgaagttaaagtgaaaatatacaatgaataaatctaataagaaacacatgcctttgaaattaagaccatatctgccccagagtacatccatggctggaatgacaccaggagagactctctgccaggaacacccacaaggatacccttcccagctattctctccacaggcctatgtaaataaagagtcaggaatgatagatgctgcttataatactaaatatatactctctcctacattttttaaacattggaggcaaataattttagttcccttcargattaaatgaagaaactcaaacaaaatgcatatattgtttatgatgttcttcccgcaactacatttttagcaaaaacagaatttgcctggggaagagtctaaataacaacctgaattcacaaagaattatatgtatgcaggtcagaaatataaatactgacagatagattgaaaaaataatgaaaatatcataaacaaaaattgtcgaccaaatattcattttaagtgagcatcaggatttgagaaagattagattccctcctctgtcacaggcttctgaagaaatcctgctacatggct

SEQ ID NO: 26895 - DNA, 600 bp, Chicken  19866894243512_1
cttgctaagcatggttaaatgggggaaagtttccatccaggcactctgggccacagtgcagaggagaataatcagtctgttaagtcttgctgagttctgtttcttcttcctgtaagagtcgctgaaacaaacagaagaataatccaaagcacagcttctttttgccagctgaaggtctcgatcgctacagaaaggctccccttgtgctctatctctttttaatcaaagattcttgcattcttagtcctacactaagaaagcagcatgattcaggttggaaaaacagcttccactcagcayttactggggtatggtaggttggaaagaacagttgaaaccccttcaggctgaggaaggaatttatcctagtcacacacactctcagtatgtgttcgagccaattaggctgtaatacaaaagatgtgtataggtagactgtcacactactcccactgctttaaaaaggatgtggtcaaatctgcttcttgtgaacgattccctgtaagcaagcattagctgaaatctatttaatctgattaagctcctggaagttggaaggatgaatgcacactttctgaacccttattacactcaggggac

SEQ ID NO: 26896 - DNA, 600 bp, Chicken  19866894243513_1
tgaggctgcaagcagccaaagcacagctcttgatctgggagcacagaagcttacacgacagcttctccagaatactaatttctgctaagcatcccagtcacccttagttgtacaagaacactcaggggaaatgcaaatccagtccatcctctgagaaaaagagcaacttacaccgcaccagcaggttcactgtcttctttgctgggttccccacgttgtttatggctgtgcagttgtagtagcctgagtcctccacgcggatcctccagatggtgaggttgcctccttgcacaaggctgytggggggcaacgggccgggagaatgagaccaaagcacctctggctgtgggtcaccgcctgtcagagagcactgcatagtgacgttgtcaccagggttgaccaccagtgtttcattgaccgacagtttcagagcaggtggggctggaagaggacaaagagggacacttctcagcttgaaaaggacctgtccgctcacctgtgcacagcttcattgctttctaggatttcttcttgaagttagctggtttgagaaargagagctgtagggacccattaattcattacagataaaaaccatta

SEQ ID NO: 26897 - DNA, 600 bp, Chicken  19866894243513_2
acgttgtttatggctgtgcagttgtagtagcctgagtcctccacgcggatcctccagatggtgaggttgcctccttgcacaaggctgytggggggcaacgggccgggagaatgagaccaaagcacctctggctgtgggtcaccgcctgtcagagagcactgcatagtgacgttgtcaccagggttgaccaccagtgtttcattgaccgacagtttcagagcaggtggggctggaagaggacaaagagggacacttctcagcttgaaaaggacctgtccgctcacctgtgcacagcttcaytgctttctaggatttcttcttgaagttagctggtttgagaaargagagctgtagggacccattaattcattacagataaaaaccattatcgtttatgcacctttttgagttaaagcatccttctcttctatggttaggaaactgcaagcaggacctccagacaacccagaccagaggccatacttaaaacactgcacagctattgctcagaagagggacacagctaggtatagtattctaaggttgttcgctgcaggttctctaggcttaggactcagttcaggagaaaagcctgacaaa

SEQ ID NO: 26898 - DNA, 600 bp, Chicken  19866894243513_3
cgcggatcctccagatggtgaggttgcctccttgcacaaggctgytggggggcaacgggccgggagaatgagaccaaagcacctctggctgtgggtcaccgcctgtcagagagcactgcatagtgacgttgtcaccagggttgaccaccagtgtttcattgaccgacagtttcagagcaggtggggctggaagaggacaaagagggacacttctcagcttgaaaaggacctgtccgctcacctgtgcacagcttcattgctttctaggatttcttcttgaagttagctggtttgagaaargagagctgtagggacccattaattcattacagataaaaaccattatcgtttatgcacctttttgagttaaagcatccttctcttctatggttaggaaactgcaagcaggacctccagacaacccagaccagaggccatacttaaaacactgcacagctattgctcagaagagggacacagctaggtatagtattctaaggttgttcgctgcaggttctctaggcttaggactcagttcaggagaaaagcctgacaaactctccttgcacagataggaaagacagtaagacataatttggc

SEQ ID NO: 26899 - DNA, 600 bp, Chicken  19866894243519_1
ttgctgctctgagaaagcattctcccttttccaaataaagcctcccgacagcttcgtaaagggttaaggatcaaagaggaagaagaaaaatcccatttaagaatgcaccagtgcaagtgaaaccgaaagagactgagcatggaggatggctgagcagctacatgggaacttgccagcatggacagagagcgagaactctggcttagtgaacacggttactgcttcgtacaagatgtgctgggagtaaaaggagctttaattctctgcgatttacggatgctgaaaagctgaaatactacraaagacacccggctgtttcaggaatactatattctgcaattactcccaaacgacaaaaaaaagccacaccaaaaatagccccgctcgtttccaagtcaccccctcctcgcttccaaagaacagcctgcggtccgttttgtacaagcacaaagcaaacccagaagcccgtcggacgataggaggggagggaaggcggcgggcgcccaccgagcgcacccagcgctcccacagcacccagagctcccacagcacccagcgcggcgcacgccgcccgctcccagcacccagcgcgcaagcagg

SEQ ID NO: 26900 - DNA, 598 bp, Chicken  19866894243520_1
tgttatccttttcatctgactgttggactgtttttccctggaatagagattctctggataggacctgtgattctttttttggcaaaatggataaactcattcagtgggtgcaggaaaattaggaactcctctgccaggtttctgaatgggttcaggggaacccagacattaacatgagtcctcacaatcacattctaaagaaaaatctcacaaggatgttcaaggccaggttgaatggggccttgggaagcctgatctggtgcctgatttagtgactggcaaccctgacaatggcagggrgggtggaactatatgaacattgaggtcccttccaacccaagccattctgtgattctatcattgtatgatcatccacagctccatcctgccattggcttccccaccagggtgggtctgtgtttctccacggagtctcatcgctgaatgctcacctcattgtttggcttcacctgaaatactgctcaagaagcagtacgtaaatttccttcttctctagagttggaaacattgctcccaaagctcagggagaggatatacagagtaaattacatccaattacagggtcagacttcggagt

SEQ ID NO: 26901 - DNA, 581 bp, Chicken  19866894243534_1
ctggagggaatgggtcctaggccctacaatggctaaagatgggaatcataggagacaatgtgagctcgccttggccaaagctgcgccagaaacagctctaatgatttacaaatgcagtctatattccaatttcagttgatagtttacaaaaataaataaaatcagtgaggctgaagatggaaaaagcatctaggaaaggtgaggtagttggtaactaatgctttgagagcttttgcacagcttagtagaagacttctacaagttgggaatggaaggagactaaggaccagcagcctctaraagttcaacttgaycaaggctctgcatcaggaagatatcccataagaaatcttagtgcaatttatatgggctgaaaagggactgaagaaaataatttatgaaccagcagttcctttgtatggaacattgtgttttcagcgagactgaaactggggtcatagacagattttctactaattttccctgaaatttattttttggctcagctcaaaatgcagttgaacgaatcaaagatagtcatcatgcatctctcggtgttgccatttccagagcacttcctt

SEQ ID NO: 26902 - DNA, 567 bp, Chicken  19866894243534_2
tcctaggccctacaatggctaaagatgggaatcataggagacaatgtgagctcgccttggccaaagctgcgccagaaacagctctaatgatttacaaatgcagtctatattccaatttcagttgatagtttacaaaaataaataaaatcagtgaggctgaagatggaaaaagcatctaggaaaggtgaggtagttggtaactaatgctttgagagcttttgcacagcttagtagaagacttctacaagttgggaatggaaggagactaaggaccagcagcctctaraagttcaacttgaycaaggctctgcatcaggaagatatcccataagaaatcttagtgcaatttatatgggctgaaaagggactgaagaaaataatttatgaaccagcagttcctttgtatggaacattgtgttttcagcgagactgaaactggggtcatagacagattttctactaattttccctgaaatttattttttggctcagctcaaaatgcagttgaacgaatcaaagatagtcatcatgcatctctcggtgttgccatttccagagcacttcctt

SEQ ID NO: 26903 - DNA, 600 bp, Chicken  19866894243538_1
tggaatggagaagcccaatggggggtatttttggcttctccattgatgccgtccggcgcacaatccagctggcagaccagaaggtgaggacctgaacggaacggggaggttggtgccggcagaggctcgcaccgcctttgcctgggcccaaagagagccatcgcggcccttccaacgggctccaggacaaagtcccaccacagcagacgagcctcgtctgccaggcagctctgcagagtgcgaggcagcggtgcccacaccctgcgccctgcctggaggagtggggctggccgcagaggycccgagcccaccgctgatgggggctgctctgctctttccagcactgctttgtctgtggcgggaggggagcttccatcagctgcgcggagaccggctgtgagcgcagcttccacctgccctgcgccgaggacggggaatgcgtcactcaatactttgggcagcacaggtaagggckktcagcagcagcagccaagctgccgttcctccctcttcctcccggggaggactgcccgcagcgacacctcccagcatcctgccagagccagagcccaggcctggcgctcttccctggtcctctgc

SEQ ID NO: 26904 - DNA, 600 bp, Chicken  19866894243538_2
cgggctccaggacaaagtcccaccacagcagacgagcctcgtctgccaggcagctctgcagagtgcgaggcagcggtgcccacaccctgcgccctgcctggaggagtggggctggccgcagaggycccgagcccaccgctgatgggggctgctctgctctttccagcactgctttgtctgtggcgggaggggagcttccatcagctgcgcggagaccggctgtgagcgcagcttccacctgccctgcgccgaggacggggaatgcgtcactcaatactttgggcagcacaggtaagggckktcagcagcagcagccaagctgccgttcctccctcttcctcccggggaggactgcccgcagcgacacctcccagcatcctgccagagccagagcccaggcctggcgctcttccctggtcctctgccctccgcgcagcacttctccccatgctcacccgttctgccctcctgcccaggtccttctgctgggagcatcgccctcggcaggcagcggaggcagctccaacgcagaacaccgtctgcgtcatctgcctggagcccgtgggggacagcacgtcctaccacaccatggtgtgcccg

SEQ ID NO: 26905 - DNA, 600 bp, Chicken  19866894243538_3
gggctccaggacaaagtcccaccacagcagacgagcctcgtctgccaggcagctctgcagagtgcgaggcagcggtgcccacaccctgcgccctgcctggaggagtggggctggccgcagaggycccgagcccaccgctgatgggggctgctctgctctttccagcactgctttgtctgtggcgggaggggagcttccatcagctgcgcggagaccggctgtgagcgcagcttccacctgccctgcgccgaggacggggaatgcgtcactcaatactttgggcagcacaggtaagggckktcagcagcagcagccaagctgccgttcctccctcttcctcccggggaggactgcccgcagcgacacctcccagcatcctgccagagccagagcccaggcctggcgctcttccctggtcctctgccctccgcgcagcacttctccccatgctcacccgttctgccctcctgcccaggtccttctgctgggagcatcgccctcggcaggcagcggaggcagctccaacgcagaacaccgtctgcgtcatctgcctggagcccgtgggggacagcacgtcctaccacaccatggtgtgcccgg

SEQ ID NO: 26906 - DNA, 600 bp, Chicken  19866894243538_4
cagccccgctcacgctcacgcttgtgcttctcctgcagaaacatgccctgcacgctgccaccatgcgcttcttctgccccgtctgcggaggaagaaggcgattccgatccctaatgaccatgctggggatccaaattccagtcaggttggtgtccttctgcctggctctgaagacactcaggcactgcccccctcaggaactgcccccccccccgctcctccccacggcaggcccggtcccttgccgtccagcgagcactggtctcagcttggtggagaagctgggaatgagctcgtggyggatgagcagggatgccctggatctgcctcccgcccggggcaccgggactcatcacattccctctcttctctggcagacgaccatcgtggtgggacgacgcagcataccagccgctgcgagaaaggcacaggcgctgcgatgccagcatgtgcatctacctaggaggcagggagagggcacaggaagaggggtgagtgacctctgcagtcctctggggctctgcgtgggctctcagcctcagcacaggctgggggagcaaggagggagcaccagagccgtaccggctgctccccgccttg

SEQ ID NO: 26907 - DNA, 599 bp, Chicken  19866894243539_1
  misc_feature (1)..(135): n is any nucleotide
nnnnnnnnnnnnnnnnnnnnnnnnnnnnnnnnnnnnnnnnnnnnnnnnnnnnnnnnnnnnnnnnnnnnnnnnnnnnnnnnnnnnnnnnnnnnnnnnnnnnnnnnnnnnnnnnnnnnnnnnnnnnnnnnnnnnnnntggttcctatcctcacaattcattaactctggcacccacaaaaggacgtgctctcacacagactgccccaaaagcagtgtgtgctacagacttctgcctccggtccttctgggctcccccatcagcacagcacagcacagcacagcacgccctgccctgccaggygcaccctgaggctgcttctgaggccccatcggaacctctcctctcaaacacagccgcccactctccaaaccgcggcctcccggcagaagggctgagggtggacggttggtcccagagttgggygggcagatagacagacagacagagcctaatagcgtaagactaaaaataggatatggaactggctctaaattgcaagaaaacgcgtctacagaagacrtactgtgagaggaacgacccagaaactacatgactaccctcaagtaggagaaaaacccgcaacagctaacgattagaga

SEQ ID NO: 26908 - DNA, 599 bp, Chicken  19866894243539_2
  misc_feature (1)..(12): n is any nucleotide
nnnnnnnnnnnntggttcctatcctcacaattcattaactctggcacccacaaaaggacgtgctctcacacagactgccccaaaagcagtgtgtgctacagacttctgcctccggtccttctgggctcccccatcagcacagcacagcacagcacagcacgccctgccctgccaggygcaccctgaggctgcttctgaggccccatcggaacctctcctctcaaacacagccgcccactctccaaaccgcggcctcccggcagaagggctgagggtggacggttggtcccagagttgggygggcagatagacagacagacagagcctaatagcgtaagactaaaaataggatatggaactggctctaaattgcaagaaaacgcgtctacagaagacrtactgtgagaggaacgacccagaaactacatgactaccctcaagtaggagaaaaacccgcaacagctaacgattagagagycrccaggtgasaaagcagcagctcgcagttcgcaccccgtcctctgcgatcccgcacggggcgcccacgccgcaccccaacagctgctctcagcagagccccctgcggctgcgcagccccg

SEQ ID NO: 26909 - DNA, 600 bp, Chicken  19866894243539_3
acagacttctgcctccggtccttctgggctcccccatcagcacagcacagcacagcacagcacgccctgccctgccaggygcaccctgaggctgcttctgaggccccatcggaacctctcctctcaaacacagccgcccactctccaaaccgcggcctcccggcagaagggctgagggtggacggttggtcccagagttgggygggcagatagacagacagacagagcctaatagcgtaagactaaaaataggatatggaactggctctaaattgcaagaaaacgcgtctacagaagacrtactgtgagaggaacgacccagaaactacatgactaccctcaagtaggagaaaaacccgcaacagctaacgattagagagycrccaggtgasaaagcagcagctcgcagttcgcaccccgtcctctgcgatcccgcacggggcgcccacgccgcaccccaacagctgctctcagcagagccccctgcggctgcgcagccccgagcgcggcccgcccgcgagcagggaagccttcgggtcccatcgtgccccgcgccccgagcacagatgttcttaacgagtgcggtacggcctaaggcga

SEQ ID NO: 26910 - DNA, 550 bp, Chicken  19866894243539_4
caccctgaggctgcttctgaggccccatcggaacctctcctctcaaacacagccgcccactctccaaaccgcggcctcccggcagaagggctgagggtggacggttggtcccagagttgggygggcagatagacagacagacagagcctaatagcgtaagactaaaaataggatatggaactggctctaaattgcaagaaaacgcgtctacagaagacrtactgtgagaggaacgacccagaaactacatgactaccctcaagtaggagaaaaacccgcaacagctaacgattagagagycrccaggtgasaaagcagcagctcgcagttcgcaccccgtcctctgcgatcccgcacggggcgcccacgccgcaccccaacagctgctctcagcagagccccctgcggctgcgcagccccgagcgcggcccgcccgcgagcagggaagccttcgggtcccatcgtgccccgcgccccgagcacagatgttcttaacgagtgcggtacggcctaaggcgaacagaactcacctcgacccgaacttccgccg

SEQ ID NO: 26911 - DNA, 548 bp, Chicken  19866894243539_5
ccctgaggctgcttctgaggccccatcggaacctctcctctcaaacacagccgcccactctccaaaccgcggcctcccggcagaagggctgagggtggacggttggtcccagagttgggygggcagatagacagacagacagagcctaatagcgtaagactaaaaataggatatggaactggctctaaattgcaagaaaacgcgtctacagaagacrtactgtgagaggaacgacccagaaactacatgactaccctcaagtaggagaaaaacccgcaacagctaacgattagagagycrccaggtgasaaagcagcagctcgcagttcgcaccccgtcctctgcgatcccgcacggggcgcccacgccgcaccccaacagctgctctcagcagagccccctgcggctgcgcagccccgagcgcggcccgcccgcgagcagggaagccttcgggtcccatcgtgccccgcgccccgagcacagatgttcttaacgagtgcggtacggcctaaggcgaacagaactcacctcgacccgaacttccgccg

SEQ ID NO: 26912 - DNA, 539 bp, Chicken  19866894243539_6
tgcttctgaggccccatcggaacctctcctctcaaacacagccgcccactctccaaaccgcggcctcccggcagaagggctgagggtggacggttggtcccagagttgggygggcagatagacagacagacagagcctaatagcgtaagactaaaaataggatatggaactggctctaaattgcaagaaaacgcgtctacagaagacrtactgtgagaggaacgacccagaaactacatgactaccctcaagtaggagaaaaacccgcaacagctaacgattagagagycrccaggtgasaaagcagcagctcgcagttcgcaccccgtcctctgcgatcccgcacggggcgcccacgccgcaccccaacagctgctctcagcagagccccctgcggctgcgcagccccgagcgcggcccgcccgcgagcagggaagccttcgggtcccatcgtgccccgcgccccgagcacagatgttcttaacgagtgcggtacggcctaaggcgaacagaactcacctcgacccgaacttccgccg

SEQ ID NO: 26913 - DNA, 600 bp, Chicken  19866894243546_1
gttttaaatgtttgtacctttttctgtaatagcctgcttcatgtgcttggcataatatccctgagaaagcccctgggtgcagggagagtctttagagaggaacatctttaaggtcatagcttcccaagtggtactgagggttgctttagttctgctaacactgagggcagggagtgattcttttctttttaggctggatcagtcccccggtcccactcaccccactgctgtaggagtgtgtgtccagggagcgacgatacaaaggcaggcatagctaaaaccctccttgcaccatgttgyttgggcttacgagtgtttgtgctggtttaagagtggggagtggagtaaaaataagtgcccagagcaggtagaattactgaattgccttttttttttaaccatattcctttcagtgcattgaactgaagcttgaactcattgtgaaactgtgctgaaaacatgtatttgtcatgtataagcagcaggstttttgagagtcttaaattgcccaaagattagtatatatttttatcaggataacattagatctgttccttacttctgggctgtttgcttttccctgcaaagcttccttttggc

SEQ ID NO: 26914 - DNA, 600 bp, Chicken  19866894243546_2
tttaggctggatcagtcccccggtcccactcaccccactgctgtaggagtgtgtgtccagggagcgacgatacaaaggcaggcatagctaaaaccctccttgcaccatgttgyttgggcttacgagtgtttgtgctggtttaagagtggggagtggagtaaaaataagtgcccagagcaggtagaattactgaattgccttttttttttaaccatattcctttcagtgcattgaactgaagcttgaactcattgtgaaactgtgctgaaaacatgtatttgtcatgtataagcagcaggstttttgagagtcttaaattgcccaaagattagtatatatttttatcaggataacattagatctgttccttacttctgggctgtttgcttttccctgcaaagcttccttttggcaaatttcaaaactaagaagcaatggaagttcctaatggattgactgagaattttagtatactggtaaaccaagaggaaacggaacttctcctagttaacacattagttgaaaacaagaaaatccaaacaacaaaaaaawamctgctcctaaaatctgacattcaactttcatgcagaatggacaaag

SEQ ID NO: 26915 - DNA, 600 bp, Chicken  19866894243546_3
tgtgaaactgtgctgaaaacatgtatttgtcatgtataagcagcaggstttttgagagtcttaaattgcccaaagattagtatatatttttatcaggataacattagatctgttccttacttctgggctgtttgcttttccctgcaaagcttccttttggcaaatttcaaaactaagaagcaatggaagttcctaatggattgactgagaattttagtatactggtaaaccaagaggaaacggaacttctcctagttaacacattagttgaaaacaagaaaatccaaacaacaaaaaaawamctgctcctaaaatctgacattcaactttcatgcagaatggacaaagtatgactaaagctgaagtaaacaatcaaagcacaagcacacttagatgtagttgttactatcaacactgtatatttctgtatacggattgttgtgtagcacatgctaaatattaggaaaaggggataatgcagagggagcctgccggatgcagacagtagcaaaaataggtgctttcagacagagctaaaataacattagaaagggggataaagaaatggtgttccaggtaaaaggattgcagaggcgcatc

SEQ ID NO: 26916 - DNA, 600 bp, Chicken  19866894243546_4
tgaaactgtgctgaaaacatgtatttgtcatgtataagcagcaggstttttgagagtcttaaattgcccaaagattagtatatatttttatcaggataacattagatctgttccttacttctgggctgtttgcttttccctgcaaagcttccttttggcaaatttcaaaactaagaagcaatggaagttcctaatggattgactgagaattttagtatactggtaaaccaagaggaaacggaacttctcctagttaacacattagttgaaaacaagaaaatccaaacaacaaaaaaawamctgctcctaaaatctgacattcaactttcatgcagaatggacaaagtatgactaaagctgaagtaaacaatcaaagcacaagcacacttagatgtagttgttactatcaacactgtatatttctgtatacggattgttgtgtagcacatgctaaatattaggaaaaggggataatgcagagggagcctgccggatgcagacagtagcaaaaataggtgctttcagacagagctaaaataacattagaaagggggataaagaaatggtgttccaggtaaaaggattgcagaggcgcatctg

SEQ ID NO: 26917 - DNA, 600 bp, Chicken  19866894243548_1
atgtaactctgaataaattccttgttaacctttagagccatctggagggaaagtggctcctcgcaccatggcagagaagggagaggggcttctaatgatgggttttggagggctttgaagggtctggaggcaaagcaaagggtgcttggagacaagggtggcatctgggaaccccaaagatgcctgaacagatcccagcatggagatgttggaggctggagtgtgctggcggtgccaggaggttgttggtggcgatctgctgctggatcaggaacagcttccatctggttgtctcacatscaaatggagatggaaaacccctttctgaggagtccccagcccaggagtatgctggagctctccttttgccattggggtcacactgccccaggcctgcatgtcctcagccctactgaacagctggcctttggggcttatgtagttattcggttatgaaaggctgaaggtccagatctgctccagatgctcagggtccgtcgagtcatgggggcagagttggatcagacctgaaggtccatccactgtatcaggggggaaggggactgctcctctccagcatgttggggtggcaaggaatgg

SEQ ID NO: 26918 - DNA, 599 bp, Chicken  19866894243550_1
  misc_feature (1)..(50): n is any nucleotide
nnnnnnnnnnnnnnnnnnnnnnnnnnnnnnnnnnnnnnnnnnnnnnnnnncattctctgaaagatatccatcggtttgagtgcatgctgcatgagaatctaaagatcacacttgtgcccacagtagatccaaggagtcccaaatgtaacatacattttaacaagctacttcaaactactgttttgcagctctaatcactagaacacagatgtggagaagaaatagctgtaacccacaaatattcttccaggaagggagagagtgttgagagaactccttatttcagactatgttacagastgggagaaatgagtcactaacagaagacagtaagaaggtccagattccagtgattatgatagagaagtatggagacaggaaagtgcttctgtacttgggtaaaaagaaatattacattatgaatagggtggtaataaagcaacccatggacayagattaatcctgcataaaagttaaggtttcagaaatagataaagtgaaaaaatcatgctttctttttaatggtaggccaaattacacagatattcaaatattcagatttagtgtggagatttttatgtcctgaattattcatacct

SEQ ID NO: 26919 - DNA, 600 bp, Chicken  19866894243550_2
attttaacaagctacttcaaactactgttttgcagctctaatcactagaacacagatgtggagaagaaatagctgtaacccacaaatattcttccaggaagggagagagtgttgagagaactccttatttcagactatgttacagastgggagaaatgagtcactaacagaagacagtaagaaggtccagattccagtgattatgatagagaagtatggagacaggaaagtgcttctgtacttgggtaaaaagaaatattacattatgaatagggtggtaataaagcaacccatggacayagattaatcctgcataaaagttaaggtttcagaaatagataaagtgaaaaaatcatgctttctttttaatggtaggccaaattacacagatattcaaatattcagatttagtgtggagatttttatgtcctgaattattcatacctgttctgtcattttcctctgactccaacttgtkcttgtctctgacttcagactgacatttttttttctcgtttctcatcaagatgaaatttgtcttttccagttttatccttgtgattattttatctctgacattcttcatgttttactttacag

SEQ ID NO: 26920 - DNA, 600 bp, Chicken  19866894243550_3
aagaaggtccagattccagtgattatgatagagaagtatggagacaggaaagtgcttctgtacttgggtaaaaagaaatattacattatgaatagggtggtaataaagcaacccatggacayagattaatcctgcataaaagttaaggtttcagaaatagataaagtgaaaaaatcatgctttctttttaatggtaggccaaattacacagatattcaaatattcagatttagtgtggagatttttatgtcctgaattattcatacctgttctgtcattttcctctgactccaacttgtkcttgtctctgacttcagactgacatttttttttctcgtttctcatcaagatgaaatttgtcttttccagttttatccttgtgattattttatctctgacattcttcatgttttactttacagttgcacagaaggcatagtttactattctgagcttctttacagattcagtgtgtcaatcttttagcttgtcaggttaatctcaaaagctgccatttgactatattcccacagacggttcagtctgyagaaattgagctcatttaattgataccaatgaagaagcttttcactgaaatag

SEQ ID NO: 26921 - DNA, 600 bp, Chicken  19866894243550_4
tgtcctgaattattcatacctgttctgtcattttcctctgactccaacttgtkcttgtctctgacttcagactgacatttttttttctcgtttctcatcaagatgaaatttgtcttttccagttttatccttgtgattattttatctctgacattcttcatgttttactttacagttgcacagaaggcatagtttactattctgagcttctttacagattcagtgtgtcaatcttttagcttgtcaggttaatctcaaaagctgccatttgactatattcccacagacggttcagtctgyagaaattgagctcatttaattgataccaatgaagaagcttttcactgaaatagttattttaaaattttcagtaggaccttctctctcaagtgtgcatgcaggcagtcctcccattatcctaataggatgcatgatgacataccgataatttattgtgtaaaagataaaccatcttataaatgctgttccttcaaaagaaacatcagggttttaatgccttgtcaatatagcagtagaaagactagtctcatgccaagacagtgctaactaagataaccagcactattccattaatgcctg

SEQ ID NO: 26922 - DNA, 599 bp, Chicken  19866894243551_1
  misc_feature (1)..(19): n is any nucleotide
nnnnnnnnnnnnnnnnnnntttctgcttttaatcaaacctcactgaaggcaagctttgtctttcagatctaactacagtgagcactgcccaccagaccagcagagcacaacattttcaatatggaaaccaaggtcagtccacaaatgttagtttggttctcatatctttgcacagcacagtgtcacgccaacagcaattacaataaatcacacaaagattatgggtagattatcacttttatcaggggagcatctgcagcagggcaggagcatcctttctgtttatggtgggaatatcaygaggaagtgccaggaaagggatcactcacctccgtaatacagtcctgtggcagtgcacattcgccactgtccctgatacattcctgctgtgctggggctgcacatctgaacgctgacatctgcaatctcctggggctccagggacctgaccattaccatgtttacatggccaaactggtctcccccaacrtacttcagacaaactcctggaggccatacttctgtccctgggattaagcagagcaaaaaaagttagtgacagtgcaccaggaaaaggtgttgtgtccatttttatgaga

SEQ ID NO: 26923 - DNA, 600 bp, Chicken  19866894243551_2
acagcaattacaataaatcacacaaagattatgggtagattatcacttttatcaggggagcatctgcagcagggcaggagcatcctttctgtttatggtgggaatatcaygaggaagtgccaggaaagggatcactcacctccgtaatacagtcctgtggcagtgcacattcgccactgtccctgatacattcctgctgtgctggggctgcacatctgaacgctgacatctgcaatctcctggggctccagggacctgaccattaccatgtttacatggccaaactggtctcccccaacrtacttcagacaaactcctggaggccatacttctgtccctgggattaagcagagcaaaaaaagttagtgacagtgcaccaggaaaaggtgttgtgtccatttttatgagactggatgaaacacttattaaaacaattgygcaattgttcaacagttaaaggaataccaagatatatatatctatctcacagccagccagaagaatacagttttcagataaggtttaactggtttgtgaccagcagtcaagaatcacatttgtattgaaataatctctagctcttctttatgcaggaacatc

SEQ ID NO: 26924 - DNA, 600 bp, Chicken  19866894243551_3
cctccgtaatacagtcctgtggcagtgcacattcgccactgtccctgatacattcctgctgtgctggggctgcacatctgaacgctgacatctgcaatctcctggggctccagggacctgaccattaccatgtttacatggccaaactggtctcccccaacrtacttcagacaaactcctggaggccatacttctgtccctgggattaagcagagcaaaaaaagttagtgacagtgcaccaggaaaaggtgttgtgtccatttttatgagactggatgaaacacttattaaaacaattgygcaattgttcaacagttaaaggaataccaagatatatatatctatctcacagccagccagaagaatacagttttcagataaggtttaactggtttgtgaccagcagtcaagaatcacatttgtattgaaataatctctagctcttctttatgcaggaacatcctcaaagtcacagcgcaacagctggaaaagaaaaagaatcaacataactgacattcacttcatactacagacaaagaggtgagacgtcatttttcttttcctcatttctgcctccctacgtgtagctcctgaggtttt

SEQ ID NO: 26925 - DNA, 600 bp, Chicken  19866894243564_1
agatgctcagatgtatctgaagaaacattgccacatcaaaaatcttcatcatgtagagttaacagatagaacaaatattttcctgatctaagcagggcttagttttctatacagggagataggacttttgatgacctcactgcattcttctgtgaaagcataacacatgatgtccccatgtgatttaattttcattcattcagtattgttaaacgaaacttgcaaaatatgctggcttctatttctccacatatgaaaatgacatgaaatgagaaacttcctgggacttgagtttccctsttaacattgtactcttcattgcagacaaaactatgtatattaattttcgtaggctatgctaaagtttttttctctatctaatgaaaaaaatattggctaaagactgctgctttgctttagttctttaaaagcataaaatcggagtgttagaagaaatagaagctccttactttgtgaatggtctacaacatyctgtaccaaaagcagttgcagaagtaattcttataaagttgcatttgcaactgatggctgatccctggctctgatgttctgyrttagtacagcaaagcccccagtgat

SEQ ID NO: 26926 - DNA, 600 bp, Chicken  19866894243564_2
cattcattcagtattgttaaacgaaacttgcaaaatatgctggcttctatttctccacatatgaaaatgacatgaaatgagaaacttcctgggacttgagtttccctsttaacattgtactcttcattgcagacaaaactatgtatattaattttcgtaggctatgctaaagtttttttctctatctaatgaaaaaaatattggctaaagactgctgctttgctttagttctttaaaagcataaaatcggagtgttagaagaaatagaagctccttactttgtgaatggtctacaacatyctgtaccaaaagcagttgcagaagtaattcttataaagttgcatttgcaactgatggctgatccctggctctgatgttctgyrttagtacagcaaagcccccagtgatgttagttaactttactgtttctgaatttgttcttatatctgaatactcatatattgtatcttgttccaaggcaactgagcttggtgatggagagaatatgtctttaaaagaggaatgaaaggacactaaagaactaaaagcaattggcaaattagcaaaaactgactaaaccaaagctaaagcaaaatctgg

SEQ ID NO: 26927 - DNA, 600 bp, Chicken  19866894243564_3
aacttcctgggacttgagtttccctsttaacattgtactcttcattgcagacaaaactatgtatattaattttcgtaggctatgctaaagtttttttctctatctaatgaaaaaaatattggctaaagactgctgctttgctttagttctttaaaagcataaaatcggagtgttagaagaaatagaagctccttactttgtgaatggtctacaacatyctgtaccaaaagcagttgcagaagtaattcttataaagttgcatttgcaactgatggctgatccctggctctgatgttctgyrttagtacagcaaagcccccagtgatgttagttaactttactgtttctgaatttgttcttatatctgaatactcatatattgtatcttgttccaaggcaactgagcttggtgatggagagaatatgtctttaaaagaggaatgaaaggacactaaagaactaaaagcaattggcaaattagcaaaaactgactaaaccaaagctaaagcaaaatctggacctctgagcctaagtctgagaagtaagcaagcaaaatggtgtaaattaaatttgtatctgaaaatagtccatttatgtaaa

SEQ ID NO: 26928 - DNA, 600 bp, Chicken  19866894243564_4
acttcctgggacttgagtttccctsttaacattgtactcttcattgcagacaaaactatgtatattaattttcgtaggctatgctaaagtttttttctctatctaatgaaaaaaatattggctaaagactgctgctttgctttagttctttaaaagcataaaatcggagtgttagaagaaatagaagctccttactttgtgaatggtctacaacatyctgtaccaaaagcagttgcagaagtaattcttataaagttgcatttgcaactgatggctgatccctggctctgatgttctgyrttagtacagcaaagcccccagtgatgttagttaactttactgtttctgaatttgttcttatatctgaatactcatatattgtatcttgttccaaggcaactgagcttggtgatggagagaatatgtctttaaaagaggaatgaaaggacactaaagaactaaaagcaattggcaaattagcaaaaactgactaaaccaaagctaaagcaaaatctggacctctgagcctaagtctgagaagtaagcaagcaaaatggtgtaaattaaatttgtatctgaaaatagtccatttatgtaaaa

SEQ ID NO: 26929 - DNA, 600 bp, Chicken  19866894243564_5
tgtatcttgttccaaggcaactgagcttggtgatggagagaatatgtctttaaaagaggaatgaaaggacactaaagaactaaaagcaattggcaaattagcaaaaactgactaaaccaaagctaaagcaaaatctggacctctgagcctaagtctgagaagtaagcaagcaaaatggtgtaaattaaatttgtatctgaaaatagtccatttatgtaaaaagatcaaaccaggaaatatatttttcccattcatacttaaaatgaaaatgaactactctgaggatctcttcaagacctmtatttacataaaatattggagctgtcattgaaatgttattcagtagttttgaaagttaccaacaaattataaaacataattaagtaatgaatttgtacatttgcaaacaatgaaattaatgtgcacctgatagaaaatatcagcatttttcattatcactcatagaacaacaaaacgttttctttttggaatttctgaactgacacaaatgtctttaaacagggcaattagtggcaagtgactacgaagaaccctgtgttgagaagctgagcttaagcctcttgaagattctccatgtaa

SEQ ID NO: 26930 - DNA, 599 bp, Chicken  19866894243571_1
  misc_feature (1)..(1): n is any nucleotide
natctgcagggcttcgttttagaggagatacgatgagatgcatgtgtaggtgtgacgtggaactgctttcctttcaagtgcattccattcctgctccctttacccagccgtgttgtggcaggaaattcacgtgcacaccaaacacaacagctgtcatctcctgtgacagcactgccattcctgtaggacaacgtggctttacagtaccagagaagaggatgaatcagagtatgttatgatgacttgttgatttttcccataccaaaatagttttgtgcttaaaatacattccacacgaartgaagcatgagtgaggctgggattgctttccagcacccaaatggatctcaaacttgtttttgttgcctgcagaytttgtgtctttctgtcgggtcagctgtggggaaagaagtggctgtgagcaggagggagcgyggtgtgcgtctgctgctctgtggagggtcactaaaaatgtgcagactgctgtgaatggcagaacaggaggagacctgcctgcaggtggctgatccgggctccctgcgttgtctggctttcagtgttgcagccaacagttgttttattttgccttacccagtgct

SEQ ID NO: 26931 - DNA, 600 bp, Chicken  19866894243571_2
caagtgcattccattcctgctccctttacccagccgtgttgtggcaggaaattcacgtgcacaccaaacacaacagctgtcatctcctgtgacagcactgccattcctgtaggacaacgtggctttacagtaccagagaagaggatgaatcagagtatgttatgatgacttgttgatttttcccataccaaaatagttttgtgcttaaaatacattccacacgaartgaagcatgagtgaggctgggattgctttccagcacccaaatggatctcaaacttgtttttgttgcctgcagaytttgtgtctttctgtcgggtcagctgtggggaaagaagtggctgtgagcaggagggagcgyggtgtgcgtctgctgctctgtggagggtcactaaaaatgtgcagactgctgtgaatggcagaacaggaggagacctgcctgcaggtggctgatccgggctccctgcgttgtctggctttcagtgttgcagccaacagttgttttattttgccttacccagtgctgagctttccaccaggacggttgggcagccatccttcgatgactgcagagcaaactaatcccaatgcaggtcagaa

SEQ ID NO: 26932 - DNA, 600 bp, Chicken  19866894243571_3
caccaaacacaacagctgtcatctcctgtgacagcactgccattcctgtaggacaacgtggctttacagtaccagagaagaggatgaatcagagtatgttatgatgacttgttgatttttcccataccaaaatagttttgtgcttaaaatacattccacacgaartgaagcatgagtgaggctgggattgctttccagcacccaaatggatctcaaacttgtttttgttgcctgcagaytttgtgtctttctgtcgggtcagctgtggggaaagaagtggctgtgagcaggagggagcgyggtgtgcgtctgctgctctgtggagggtcactaaaaatgtgcagactgctgtgaatggcagaacaggaggagacctgcctgcaggtggctgatccgggctccctgcgttgtctggctttcagtgttgcagccaacagttgttttattttgccttacccagtgctgagctttccaccaggacggttgggcagccatccttcgatgactgcagagcaaactaatcccaatgcaggtcagaactgctgctcggccagacgtgcaatattgttttctttggggaattaatcctgtctggctgat

SEQ ID NO: 26933 - DNA, 599 bp, Chicken  19866894243573_1
  misc_feature (1)..(111): n is any nucleotide
nnnnnnnnnnnnnnnnnnnnnnnnnnnnnnnnnnnnnnnnnnnnnnnnnnnnnnnnnnnnnnnnnnnnnnnnnnnnnnnnnnnnnnnnnnnnnnnnnnnnnnnnnnnnnnnaatgcttaaaaggacgttgtgcttttagttgcttatcccatatgcccaccaagttgagctcaaagttggcattgtctctccacagaggaataaatctttagcatagtaattgctggggagcatacgggatcacaacctcttgcttctaagatgcatgttctcctctgctacctccctgcccaccaggcragggtctgcactgctgatctcttcaggagactgactgaagagctgctgcctaccttcagctctgcatctcgctcctttatgccctctctgacagctcctttagttgtgcacacaaaattggacatgtgcaatctgtggatcagggtctaaacaaagcacttwcccccagtccccccttttggtttgtttttttgggatagagcagttactgttttgaagccagaccctcagctgatgcatttgcagccatctccccttctcctggccctcccatcagtgcatagagctgagtgtgctga

SEQ ID NO: 26934 - DNA, 600 bp, Chicken  19866894243573_2
agttgagctcaaagttggcattgtctctccacagaggaataaatctttagcatagtaattgctggggagcatacgggatcacaacctcttgcttctaagatgcatgttctcctctgctacctccctgcccaccaggcragggtctgcactgctgatctcttcaggagactgactgaagagctgctgcctaccttcagctctgcatctcgctcctttatgccctctctgacagctcctttagttgtgcacacaaaattggacatgtgcaatctgtggatcagggtctaaacaaagcacttwcccccagtccccccttttggtttgtttttttgggatagagcagttactgttttgaagccagaccctcagctgatgcatttgcagccatctccccttctcctggccctcccatcagtgcatagagctgagtgtgctgagtggacaggcaggggtgtgtggatgcacagggagaaggcaggatctgtttacccggggttcaccaccagggaaaattacaacacggaactgcactctcagcagacaatttgattactggggccgtgctccaagcacatgatttatccacgtagctcaaaacag

SEQ ID NO: 26935 - DNA, 599 bp, Chicken  19866894243575_1
  misc_feature (1)..(180): n is any nucleotide
nnnnnnnnnnnnnnnnnnnnnnnnnnnnnnnnnnnnnnnnnnnnnnnnnnnnnnnnnnnnnnnnnnnnnnnnnnnnnnnnnnnnnnnnnnnnnnnnnnnnnnnnnnnnnnnnnnnnnnnnnnnnnnnnnnnnnnnnnnnnnnnnnnnnnnnnnnnnnnnnnnnnnnnnnnnnnnnnnnnnagctgcacggagccagagcagcacatgcatacatcagtacccagcgccacggcagctcctctgctatgggaacgagctgaggagctgggggtgttcggcccggagaagagaaggctctgrggagacttcactgcggccttccagtacttgaagggagcggataaacaggagagaagtcaactttttacatgggcaggcagkaataggacgagggggaggtggttttaaactaaaagaatggaactttagatattatggggaaattctaaagccagagggcagggaggtcacagcattgctgcccagagctgtggctgccccatccctggaggtgcccaggccaggctggatggagccctgtgcaacatgagctggtccctgatttagaggctggcagcccttccgtgctgcagrgggtc

SEQ ID NO: 26936 - DNA, 599 bp, Chicken  19866894243575_2
  misc_feature (1)..(99): n is any nucleotide
nnnnnnnnnnnnnnnnnnnnnnnnnnnnnnnnnnnnnnnnnnnnnnnnnnnnnnnnnnnnnnnnnnnnnnnnnnnnnnnnnnnnnnnnnnnnnnnnnnnagctgcacggagccagagcagcacatgcatacatcagtacccagcgccacggcagctcctctgctatgggaacgagctgaggagctgggggtgttcggcccggagaagagaaggctctgrggagacttcactgcggccttccagtacttgaagggagcggataaacaggagagaagtcaactttttacatgggcaggcagkaataggacgagggggaggtggttttaaactaaaagaatggaactttagatattatggggaaattctaaagccagagggcagggaggtcacagcattgctgcccagagctgtggctgccccatccctggaggtgcccaggccaggctggatggagccctgtgcaacatgagctggtccctgatttagaggctggcagcccttccgtgctgcagrgggtcagaactgaatgatctttaaggtcccttccaacccgagccattctgtgcttcaagtttcctctgcagcccgagagctttacc

SEQ ID NO: 26937 - DNA, 600 bp, Chicken  19866894243575_3
ctctgrggagacttcactgcggccttccagtacttgaagggagcggataaacaggagagaagtcaactttttacatgggcaggcagkaataggacgagggggaggtggttttaaactaaaagaatggaactttagatattatggggaaattctaaagccagagggcagggaggtcacagcattgctgcccagagctgtggctgccccatccctggaggtgcccaggccaggctggatggagccctgtgcaacatgagctggtccctgatttagaggctggcagcccttccgtgctgcagrgggtcagaactgaatgatctttaaggtcccttccaacccgagccattctgtgcttcaagtttcctctgcagcccgagagctttacccgtccccacacctgcaggaggaggcatcacacagcscacccccacagcaccgccaccctcctgttgggctccagcacagtgcagcagcacagagcaaagctccatccctgaggctccgtgccggcagtgagctcctcagcctctgccggaccactgcttccagttcttaacctttgacagcagctcatagggaacctgtgccttacagctctta

SEQ ID NO: 26938 - DNA, 600 bp, Chicken  19866894243575_4
aatggaactttagatattatggggaaattctaaagccagagggcagggaggtcacagcattgctgcccagagctgtggctgccccatccctggaggtgcccaggccaggctggatggagccctgtgcaacatgagctggtccctgatttagaggctggcagcccttccgtgctgcagrgggtcagaactgaatgatctttaaggtcccttccaacccgagccattctgtgcttcaagtttcctctgcagcccgagagctttacccgtccccacacctgcaggaggaggcatcacacagcscacccccacagcaccgccaccctcctgttgggctccagcacagtgcagcagcacagagcaaagctccatccctgaggctccgtgccggcagtgagctcctcagcctctgccggaccactgcttccagttcttaacctttgacagcagctcatagggaacctgtgccttacagctcttagatatggaaataacatggccaagctggaagaactccaagctgcaggcagccggtttttaagggagaacactcagcgtcacacttacaggaacttgttagtgccgaattcctttcaccaacct

SEQ ID NO: 26939 - DNA, 600 bp, Chicken  19866894243575_5
gtgccgaattcctttcaccaacctgagtaatggaaaaagagacgagcacacagaagacttcacataaaagaaagaattcttctgcaaatacgcttcagcattacttaatgggaaaaaaatgctgtttaaatataaaagtctacagccccgctctggtctgtgccatgcccccacccccaccggagtcacactgctttctaacacactgccattgcgatgctttaaggtgatcttttaaagcttctaatgcgtgttgagccaaaaggaggaatgaagcagatttcctgcactggtacagtycatcaaaatgagctttcggtagcctagggctacagactgccaagaagctgcaagctgctctgacactgatgctccaggagctcatcccatagacccacagcaagcacagatgtgaagacatgaaagcaaagcagatgagtgggacttgggatcacagtgctgggctgctacacagggacctgtgagagcaactaacgctatgggacacaaccactgagtttctctgtgttgtatatgcttatgtttggggtgtacacatggcacagaccccatcttcctttgctcatgcagagtttgcat

SEQ ID NO: 26940 - DNA, 599 bp, Chicken  19866894243580_1
  misc_feature (1)..(149): n is any nucleotide
nnnnnnnnnnnnnnnnnnnnnnnnnnnnnnnnnnnnnnnnnnnnnnnnnnnnnnnnnnnnnnnnnnnnnnnnnnnnnnnnnnnnnnnnnnnnnnnnnnnnnnnnnnnnnnnnnnnnnnnnnnnnnnnnnnnnnnnnnnnnnnnnnnnnncctttgatctacatgagttatcagcctgctttggtccagttttttgtaatccctgttgacaggcatcatctggtggagcaattgaaagttcacccctgagcagtctaagaagagcatgctgcactggataacgaagcagtgcatgccatayagaggagtgaaaccaaatgactatctttctgtttgcargtgtatcttggaaacctacgtgtgacaactgtacrttaccttttagtgttttggaaagatttggccttgttcgttcttcaattgaagctactgtctgaaaaaagtcaaaacatttcctgtcaaattcaggcaagtaaatttaaataraattaggtaacaaaattaagcgggttcggtttacctgtaaataaagagttttatttcccccgtacatggttgctgtgattgcaggagatttcatttgcctatataaaaaacatt

SEQ ID NO: 26941 - DNA, 599 bp, Chicken  19866894243580_2
  misc_feature (1)..(111): n is any nucleotide
nnnnnnnnnnnnnnnnnnnnnnnnnnnnnnnnnnnnnnnnnnnnnnnnnnnnnnnnnnnnnnnnnnnnnnnnnnnnnnnnnnnnnnnnnnnnnnnnnnnnnnnnnnnnnnncctttgatctacatgagttatcagcctgctttggtccagttttttgtaatccctgttgacaggcatcatctggtggagcaattgaaagttcacccctgagcagtctaagaagagcatgctgcactggataacgaagcagtgcatgccatayagaggagtgaaaccaaatgactatctttctgtttgcargtgtatcttggaaacctacgtgtgacaactgtacrttaccttttagtgttttggaaagatttggccttgttcgttcttcaattgaagctactgtctgaaaaaagtcaaaacatttcctgtcaaattcaggcaagtaaatttaaataraattaggtaacaaaattaagcgggttcggtttacctgtaaataaagagttttatttcccccgtacatggttgctgtgattgcaggagatttcatttgcctatataaaaaacatttaaaaaaaccaacagatatagacaaccaggtaaaaata

SEQ ID NO: 26942 - DNA, 599 bp, Chicken  19866894243580_3
  misc_feature (1)..(76): n is any nucleotide
nnnnnnnnnnnnnnnnnnnnnnnnnnnnnnnnnnnnnnnnnnnnnnnnnnnnnnnnnnnnnnnnnnnnnnnnnnnncctttgatctacatgagttatcagcctgctttggtccagttttttgtaatccctgttgacaggcatcatctggtggagcaattgaaagttcacccctgagcagtctaagaagagcatgctgcactggataacgaagcagtgcatgccatayagaggagtgaaaccaaatgactatctttctgtttgcargtgtatcttggaaacctacgtgtgacaactgtacrttaccttttagtgttttggaaagatttggccttgttcgttcttcaattgaagctactgtctgaaaaaagtcaaaacatttcctgtcaaattcaggcaagtaaatttaaataraattaggtaacaaaattaagcgggttcggtttacctgtaaataaagagttttatttcccccgtacatggttgctgtgattgcaggagatttcatttgcctatataaaaaacatttaaaaaaaccaacagatatagacaaccaggtaaaaatataaataaaaattacttaaaattatcaaataagtca

SEQ ID NO: 26943 - DNA, 600 bp, Chicken  19866894243580_4
cagttttttgtaatccctgttgacaggcatcatctggtggagcaattgaaagttcacccctgagcagtctaagaagagcatgctgcactggataacgaagcagtgcatgccatayagaggagtgaaaccaaatgactatctttctgtttgcargtgtatcttggaaacctacgtgtgacaactgtacrttaccttttagtgttttggaaagatttggccttgttcgttcttcaattgaagctactgtctgaaaaaagtcaaaacatttcctgtcaaattcaggcaagtaaatttaaataraattaggtaacaaaattaagcgggttcggtttacctgtaaataaagagttttatttcccccgtacatggttgctgtgattgcaggagatttcatttgcctatataaaaaacatttaaaaaaaccaacagatatagacaaccaggtaaaaatataaataaaaattacttaaaattatcaaataagtcagaatagttgcatacttacaatgaagcattatttgtcaagtaatccaagatctcctgcaatttagctgatggggaaatctcaatgttctgggggggaagttggctgcaagctga

SEQ ID NO: 26944 - DNA, 600 bp, Chicken  19866894243585_1
atgtttcagtgagaattttttaaaatatgtagttatactaaagtcaaaataaaataatatctccattttatgtaaatagctgtaccagattttagcccattttttaacctgtgttctacttctgttcagaggcaatcaaagacaaagcaaattccataaaatctactcaacagcagagaatacaggttttaccaaatcccatattgagagtttttctaggattgataacatctcattagacttcagtattgtagactatgaattcttttcttattcaaccatgacactgcaatcttaacrtayatctcaccctcttaacctattactttttaaactaaatgtgtaagtacgtttttgtagctcataaattctgttcccctaaactgcatgttttataatctgcatttggaaaaaaagcattgcaaaatactcaaacactgcccacttgctcccacttcttcagctaaattttaacagaaaagattcttctcagttaccatatcaattgacatcaaattatttgtgcacagttactagtccactttggagtattgtgctaaataaaactgagttgcagttgtaattaaataaataaaaaag

SEQ ID NO: 26945 - DNA, 600 bp, Chicken  19866894243585_2
tttcagtgagaattttttaaaatatgtagttatactaaagtcaaaataaaataatatctccattttatgtaaatagctgtaccagattttagcccattttttaacctgtgttctacttctgttcagaggcaatcaaagacaaagcaaattccataaaatctactcaacagcagagaatacaggttttaccaaatcccatattgagagtttttctaggattgataacatctcattagacttcagtattgtagactatgaattcttttcttattcaaccatgacactgcaatcttaacrtayatctcaccctcttaacctattactttttaaactaaatgtgtaagtacgtttttgtagctcataaattctgttcccctaaactgcatgttttataatctgcatttggaaaaaaagcattgcaaaatactcaaacactgcccacttgctcccacttcttcagctaaattttaacagaaaagattcttctcagttaccatatcaattgacatcaaattatttgtgcacagttactagtccactttggagtattgtgctaaataaaactgagttgcagttgtaattaaataaataaaaaagggt

SEQ ID NO: 26946 - DNA, 600 bp, Chicken  19866894243588_1
ttacatctacttaaaccagctgagaatttgatcaagtatttgaccacagcttcagatcacaccaggtgagggaccagggttcctggggaaatctgtagtattccaattatgccgagtattaaatttagacacacacttactttttaacagcattgaccaaattgcgttttccaaactgtaacaatctctcctccctgctgaagcctggctcctcacattagtctccacggtattttttgccaaagaacaggcaaaaaaggtcacagaataaacctttatttgtaaccattgtatttgaarggctttggtaccaaaatagaatgacattgcatatttttgtagggtttatgaagaatatagtatgtccataaagcttcctttcagccttcctggatgatataaggagccacttcttaatgctgagctgggcttcagggtaaactttttcctttcagcatctcctctgagtacaatgggcatgaaaacagatttaccctccagaagcgtgtacaactttttcctcctgagattaagcataaaacactgctttaaggtttcactaacagtaaggcagagtaagtagtgataatcaaaggagag

SEQ ID NO: 26947 - DNA, 600 bp, Chicken  19866894243590_1
ctggtgagtttgttttcaaagcaaccattccttcatatggttaaaatctaaactttaatatcaatgatagggttcacaattgtcctttgactttttaagtgtgctccttgatagatgctctgccgtaaagagttgaaagctttaatgattaaaagtaattgtaatgctttaccctgaactcatagcctactcttactgggtaccctcacattggaaaagaaatatggttagtgttatgtgaagttttaggatgaatttcagatagcactgatgtttgctgtcagttactaactgcagttytaattgtagcttctatgagtttctgtgagatatggttagtgatggtggtgatgggctgacaattggagtacatgatcttagtggtcttctccgactttaatggttccttgattctgtggtttattgcgtttttcaatgcacaacttggtcagacatgcaaggccaaagaaaaggagataagacaacagcatcagttttctaaactacattaatggcataatttatggaattgacttaattattttttccttgtcattttttgatggttggttttaaacaagtaaatattcatttaacctc

SEQ ID NO: 26948 - DNA, 599 bp, Chicken  19866894243592_1
  misc_feature (1)..(121): n is any nucleotide
nnnnnnnnnnnnnnnnnnnnnnnnnnnnnnnnnnnnnnnnnnnnnnnnnnnnnnnnnnnnnnnnnnnnnnnnnnnnnnnnnnnnnnnnnnnnnnnnnnnnnnnnnnnnnnnnnnnnnnnnncgttctactcatagcagatgctttcttttaattatctaattaaatgaggtattaaaaaaaccccaaaacaataaagcagttctatcttggaaacttgaactttgcgctgtggtgaccctgtcctgttggtagctattaagtacttctctatactctttccttgtgtactattctgcttrgtaagaattattcttcaaacagttccagctcctcaaaatgaggtttatgttacttctgtatggtcctgtgtttgttagcacgggatttmttgttaactttgactgctaggagctgctttttagaatcctgagtatttaattggctggctgctgtctcattggagcttygtgaagacagttgggttccaggatcgggggttagctcttctaagaggaaaatgtaagatgatgaaacatgaacgtgtgattctgatatcaatccagaggaaaaagtacagtgctcctaaaataaagttatg

SEQ ID NO: 26949 - DNA, 599 bp, Chicken  19866894243592_2
  misc_feature (1)..(32): n is any nucleotide
nnnnnnnnnnnnnnnnnnnnnnnnnnnnnnnncgttctactcatagcagatgctttcttttaattatctaattaaatgaggtattaaaaaaaccccaaaacaataaagcagttctatcttggaaacttgaactttgcgctgtggtgaccctgtcctgttggtagctattaagtacttctctatactctttccttgtgtactattctgcttrgtaagaattattcttcaaacagttccagctcctcaaaatgaggtttatgttacttctgtatggtcctgtgtttgttagcacgggatttmttgttaactttgactgctaggagctgctttttagaatcctgagtatttaattggctggctgctgtctcattggagcttygtgaagacagttgggttccaggatcgggggttagctcttctaagaggaaaatgtaagatgatgaaacatgaacgtgtgattctgatatcaatccagaggaaaaagtacagtgctcctaaaataaagttatgttagagctgaggcctaatgggaaagtcacttgggtaaaagtttaytatcaaaactgtaattaggtgattcagtggtgcacccatcacaa

SEQ ID NO: 26950 - DNA, 600 bp, Chicken  19866894243592_3
ggtattaaaaaaaccccaaaacaataaagcagttctatcttggaaacttgaactttgcgctgtggtgaccctgtcctgttggtagctattaagtacttctctatactctttccttgtgtactattctgcttrgtaagaattattcttcaaacagttccagctcctcaaaatgaggtttatgttacttctgtatggtcctgtgtttgttagcacgggatttmttgttaactttgactgctaggagctgctttttagaatcctgagtatttaattggctggctgctgtctcattggagcttygtgaagacagttgggttccaggatcgggggttagctcttctaagaggaaaatgtaagatgatgaaacatgaacgtgtgattctgatatcaatccagaggaaaaagtacagtgctcctaaaataaagttatgttagagctgaggcctaatgggaaagtcacttgggtaaaagtttaytatcaaaactgtaattaggtgattcagtggtgcacccatcacaaagatgatccacctcctcctgaggatgatgagaacaaggagaaaagaacggatgacatccctgtgtgggatcaagaatttc

SEQ ID NO: 26951 - DNA, 600 bp, Chicken  19866894243592_4
ttatgttacttctgtatggtcctgtgtttgttagcacgggatttmttgttaactttgactgctaggagctgctttttagaatcctgagtatttaattggctggctgctgtctcattggagcttygtgaagacagttgggttccaggatcgggggttagctcttctaagaggaaaatgtaagatgatgaaacatgaacgtgtgattctgatatcaatccagaggaaaaagtacagtgctcctaaaataaagttatgttagagctgaggcctaatgggaaagtcacttgggtaaaagtttaytatcaaaactgtaattaggtgattcagtggtgcacccatcacaaagatgatccacctcctcctgaggatgatgagaacaaggagaaaagaacggatgacatccctgtgtgggatcaagaatttctgaaagtagaccaaggaacactttttgaactcatcctggtaagtatgttctggaagcataaaggccgtgcctgcacactgacctctgtttgtgtgttttacaaatgagtcctgatgcttcttattcgaataacttcttaatgtagagaatatggggtgggcaaccagttccagcag

SEQ ID NO: 26952 - DNA, 600 bp, Chicken  19866894243594_1
ttgttttgaaggtctttaagatattatatttctttttgattcagaacaaagtgtatttaacttcagggaaaaatatgacatgccagaaaaaaaaaaatcctgtcctcttgtagtatttatagttgtcttgcatgacattttattcaccacagcagaacaactactactgtggatctgttggtattcaaatatatggaattacacaggtatgaaactgaatccactctaatgattaattaagcccactgaatttcagtgaaagccaaatctaagactatgaaaagaacttctgttcagaayttttggcaaaaacacatccaaagtgtagatgagtttcatcttcttccaaagattgttatttgaattgattgtgtcacgtgcacagaggagaaagcacttaaaatttcaggctattaataacaatgctcatgaggtgaagaatggtacacccagactgaaatacatttccrtccccatcagctcatgtacactgcttcttatggcatgttaaatgacagtgttctgaatattgccctttgtgctgccaagttgagaataaatttatccaagtagttagtctttgttataatgcctagatag

SEQ ID NO: 26953 - DNA, 600 bp, Chicken  19866894243594_2
ggatctgttggtattcaaatatatggaattacacaggtatgaaactgaatccactctaatgattaattaagcccactgaatttcagtgaaagccaaatctaagactatgaaaagaacttctgttcagaayttttggcaaaaacacatccaaagtgtagatgagtttcatcttcttccaaagattgttatttgaattgattgtgtcacgtgcacagaggagaaagcacttaaaatttcaggctattaataacaatgctcatgaggtgaagaatggtacacccagactgaaatacatttccrtccccatcagctcatgtacactgcttcttatggcatgttaaatgacagtgttctgaatattgccctttgtgctgccaagttgagaataaatttatccaagtagttagtctttgttataatgcctagatagccttttttttttccttttcagaactctgcratattcttaatttctctctgctaccaacagcagataattaccttctagcattcctattttattcactgaaaactgacacttccttctgttttagcatcaattcactgtgcagaattctttgtagtgctttaattaacctg

SEQ ID NO: 26954 - DNA, 600 bp, Chicken  19866894243594_3
gagtttcatcttcttccaaagattgttatttgaattgattgtgtcacgtgcacagaggagaaagcacttaaaatttcaggctattaataacaatgctcatgaggtgaagaatggtacacccagactgaaatacatttccrtccccatcagctcatgtacactgcttcttatggcatgttaaatgacagtgttctgaatattgccctttgtgctgccaagttgagaataaatttatccaagtagttagtctttgttataatgcctagatagccttttttttttccttttcagaactctgcratattcttaatttctctctgctaccaacagcagataattaccttctagcattcctattttattcactgaaaactgacacttccttctgttttagcatcaattcactgtgcagaattctttgtagtgctttaattaacctggcatgatgatttcagtacagaccacaaataaaattaacatcaaacactggtatggaattgttctatgagatatcttgggtgatgaacacatgccatatggtaatttttaaaaataaaatctgccaaatagcatatttaatgtgactataccagcatactc

SEQ ID NO: 26955 - DNA, 600 bp, Chicken  19866894243594_4
gcattcctattttattcactgaaaactgacacttccttctgttttagcatcaattcactgtgcagaattctttgtagtgctttaattaacctggcatgatgatttcagtacagaccacaaataaaattaacatcaaacactggtatggaattgttctatgagatatcttgggtgatgaacacatgccatatggtaatttttaaaaataaaatctgccaaatagcatatttaatgtgactataccagcatactcataaggactgtaaaaatcaaaaataattctgagtgctgctcacttcraaggatcccaaaatattttatacaaactatctatctgtctaaaatcatcttacctaccacttaaaagcagccacttctgcagtgaaatgtagcagccattgcagtaaagcacagcaaattggaacagcaattttagggcaggtaatgaagataaatggtataccttatttaaactgcaggggcagaaggtaattacccagatttggagctgcctgagataccaaacctaacatcttacttgcagaaaagtgtcagtcatgattttatgactgggtaatgttaaaatagaccatgatcaaa

SEQ ID NO: 26956 - DNA, 600 bp, Chicken  19866894243596_1
taagaattggataccttttctgctgtagattaatacctcaatcccagataaacatagcttttcagtggggaaggtaaacactgggtgttgaaatttgtggaacaagacactgtgctaaaaagtaaatatacgtgtaggtgttcttagtactggagactgtatatttcaagatctgtcctgtaatgttgatggaaatgtaaatctgtgatatgtggtgactaatcttcaattcctctcttgattgttgcagcatacaggtgagtaaattgatgcactggttagccaatgcaaatgaaataytctcagattaccattgaaacctaatcctaaaattacatttaaaatgagtactgggagcctgtttttttgtttttgttttcctagttctgtgagaacaaatagatagtttccatccttgtttcactgaaagcagatatactgttgtcttttctccgccttcttttctacacagctacttccaaggtacaatgaacgtgtaccacttcataacgctaatatttgtagctttgaattatacctttcaatcatgttagccatctgagacttctggctgaacatatgggagaataacctacaagg

SEQ ID NO: 26957 - DNA, 600 bp, Chicken  19866894243598_1
cttagttttttttgtttgtttgtttttgaagtgggggaactgagatgaagaaccacattgaaatccaagacgacaaagccagtgttggctcagcacttcaccagtcatacctttaaatcaagcaaattgatggttttaaccacaaaaccctccagaaacagacaggagtttggagttgcacgtcagagacttctgggaaagcacctactaaagtagaacagtggatttttattcagaagaaggaaccctgctaacagcacagcagtgtttcttaccatgggctcctgaacaacagactcyttctgagaatgcaagttctccctctcaatcattcctgcatctgcaaggaagagggatagctatcagtgcagtctctggattaaagacaaaaagcagtgatatagcctgatctggtaatcctaataatgcttataggatgcaagtcatcattcccagtgggattctcacagaagcctcagttcccaccttccmccccttctgcattcaagccctctgagtgcagcagcacacctcagcaatattctcagactggacttctgtacccaaaagcccatttgagctccctgctggctgggtagc

SEQ ID NO: 26958 - DNA, 600 bp, Chicken  19866894243598_2
ctgggaaagcacctactaaagtagaacagtggatttttattcagaagaaggaaccctgctaacagcacagcagtgtttcttaccatgggctcctgaacaacagactcyttctgagaatgcaagttctccctctcaatcattcctgcatctgcaaggaagagggatagctatcagtgcagtctctggattaaagacaaaaagcagtgatatagcctgatctggtaatcctaataatgcttataggatgcaagtcatcattcccagtgggattctcacagaagcctcagttcccaccttccmccccttctgcattcaagccctctgagtgcagcagcacacctcagcaatattctcagactggacttctgtacccaaaagcccatttgagctccctgctggctgggtagctgtaatatttaattgctttacccagacaacatcaagatctctgtggaagctacaagtcttcctttaagcacatgcagaaaggttttctagcttctagccttagctggcaatacattagcactgtacagcagaggattagggaaaccatacccatttcaagctcttcattatctgtcctttccttctcgcctt

SEQ ID NO: 26959 - DNA, 600 bp, Chicken  19866894243611_1
aagattcattatctaacattacaacttacagcaaaactatctggttacattttttttttttatgtgtgttacaactggcctattgtttgcaatcacttaggtttccacagctccagcacctttttgttgttccagtaatttccgcctttttggtgacccatatccctgcaatttggcaattgaaagccatatcgggtgtgtcactggttcctgtgggcaacctcatccccctcacagcaaactgctcttctcaccccttgcaacacaaaccaaacaggaaaatcccctttgcagaaaccmacctgtgtcatcttcacagctgggtaaacctgcgttttcttttaaggctggcattgagatcaccttagccatagcattcatagtaatttcctataatcagaagttgctgctgttactgcggcgaagaaaaggaaggcaggattttaaagcatagcaaggactgtaaacttcataatcggttgtgacccaaggctttaccgtcatttacagagcagagtggttaagagaacatgcagaagcacgtaaagaactaaaagcgggtcagtattaagacaatatatggtccccgaatattgcata

SEQ ID NO: 26960 - DNA, 600 bp, Chicken  19866894243614_1
tcctgactattggggtccaaccctgccatgtaccatcctctggatcatgtccaggagctgactgacagagtacttgttgcctcatgccagagctgagtagttactgctgttgcatggcagtgtttgtgcacctgtagccatgaaacaatgaagtaatgattgcatggaagcagtagcatttgtcaggaggctgaaattcctaaataagaagttgcacgtctaaaataaacaggctcagctctccaactcaacaaagaaactggtgaatgtcaggattgtttcttgcttttatttctcacyccagtgggccaggaccagagtctagcagataggtcttctctgtgcttgggaattaccgatatcactgacctacaagatcaacttcttgtactttttcttgcttgtcctgaatcttgttgtgtttgctatgccatcatcatttcaccaggaagagtggaaagtcactatctacatgctgaayagcctgatgtctgccacaggcttctgggagttgggggatgcagtcttcagtcccagaatgtaagaaggaaatgataaagatctttctcctggagcaaatgttctctttacacaaaggta

SEQ ID NO: 26961 - DNA, 600 bp, Chicken  19866894243614_2
gtcaggaggctgaaattcctaaataagaagttgcacgtctaaaataaacaggctcagctctccaactcaacaaagaaactggtgaatgtcaggattgtttcttgcttttatttctcacyccagtgggccaggaccagagtctagcagataggtcttctctgtgcttgggaattaccgatatcactgacctacaagatcaacttcttgtactttttcttgcttgtcctgaatcttgttgtgtttgctatgccatcatcatttcaccaggaagagtggaaagtcactatctacatgctgaayagcctgatgtctgccacaggcttctgggagttgggggatgcagtcttcagtcccagaatgtaagaaggaaatgataaagatctttctcctggagcaaatgttctctttacacaaaggtatcatacagaagagaaaggagaaaatagtagttgccaaatggagatactgtctagtccactaattgatggacagttcgtttggtaaacagtctggtacaaaactgtgcttcagccattgataacagctgttttttggttggtggttttggttggtggttcatttgttataatgccatgtttt

SEQ ID NO: 26962 - DNA, 600 bp, Chicken  19866894243615_1
taaaaagacattgctcagatgggaaagtcatttcttgtatcttgtatgcctttttttttttttttatcaaaaagaaatgccgaaggctttctgaacaacagaaaatgttcaatttctttcacaagcatacatctatgctttgttttcttattgttgttgacagagcccttcattatgcccttaaagaatcattttatgtttatttgtactgtctatacagatttggggagttgttttatgaattgccagagggcagtgtatttttttttaataaaagtttattacactttgattgatttytctgatattcattttttgtgcctgtgttacagttactcatttttgttctaaagccccaaattgctgttactaatgttccagaggagcactgtaactgttagcaattgacaatgcaaaatgtctctctgtgttacttttcaatgcagatgtttccatggaaaactcattgaaggctagtttgccagggctcttatttattaaaattttgcaagagtaagtcacgagtaagaagcacaaacatgagatagagctcaactacctgattacatcaccactaattaacaaatcactatatgtcat

SEQ ID NO: 26963 - DNA, 522 bp, Chicken  19866894243617_1
tgaatgactaagagctagtagcagagaagtaggaagttctgtttctgttactttcactgagaaatggcaacttggcaaatattccagcatcaaacaggaataaaaactagtgacagctttcaagacatttattagatatttttctcccactgattttgagtaaggagtatttttgtgtcaatatttccaattgcaatgatacacctgacaagaattaagatttattacggaatcaaaatacaccgattctgctaaaaggcagagtagcttttaaagattattttgaaatgataccaggtratctatgcaaagtaaataattttgaggtacatgtcttggtttcatctggtattaatagcacactgatggtttggttgttgctgagtgatgggagcgcacccaaggccaagaagagccagcacagcaaggacagtgcctgaattaggcaggggtggatattctgcagcacatgaaatcatgtggaagacctcaaagctgggggcatctggctgggggcagctg

SEQ ID NO: 26964 - DNA, 600 bp, Chicken  19866894243618_1
aaacacacacaaggatgtcttaaaccctccatatctcctgacgcttttcatttcactcaaataatattttctatgggttgttttttttatttctgttaggtagtgtgcaaatatattgagaatcctgtcctgtttcaccgcgaagacgtggggatggttaaatttgacatccgttacgttgtgttgctgcgctccgtaaaaccactcaagctgtacgtctatgatgtattttggctgcgcttttcaaataggtaattacgttcgctttccttgttagactgatgggacttcgcttccaasggatcagatttggttctaaggaattgtctttattccatagggcgttttccctcgatgacttggatgactacgagaagcatttcacggtcatgaattatgctcctggtgtaacattaaagcaggtaagcaaacagtccaaaatattcccctatcagtccaaaatattcccctatctttgtgctgttagagtatctttcagtgccttcttttgtgactattccccaataccctatttcgtacctagcaagcagttcaactgttcaaagtatcctaaccaaatatttttcccagatgttttgc

SEQ ID NO: 26965 - DNA, 599 bp, Chicken  19866894243620_1
  misc_feature (1)..(41): n is any nucleotide
nnnnnnnnnnnnnnnnnnnnnnnnnnnnnnnnnnnnnnnnncactgtatcagaaagccaggaacaggtaacaagcaaatgaggatttactaatccaggtttttctgctgctgctgaagaaactgtgaaacagtaccaacaggtacacgaggtgtttttcccagtcccaccctgagctgcactctggatgactttcaggtggtattcaaagcagaggtgtactttcattaatggtttgctcctgtaaatttatgttttctctgcctcccaggttctccctctctcctaggagacaaagccygaaaagcttcaagaagtgaaaacaaggaatcaccagattgagaacgctcatcctagcctggtggtgctgtgatctggtctttgcactggaggacaaacaaacagtacaatttgcttgtactgtgaatctgtgccagcactcagctctgctacaggtgcatgtgtcaacaccttaaaatgaaacacccatctggacggatcagtgcggactttctgcctaggccatggaaaggggttaccaaacaagtttacaccacagcaggcacagaactgcgttgttagtcagttgtcctggttatc

SEQ ID NO: 26966 - DNA, 600 bp, Chicken  19866894243621_1
gcagggctgctctcggtgagttctcccactctgtacttgtatctgggatagccatgatccatatgcactatcttgtatttggccttgttcaacatcatccagttctcataggcccacttttcaagcatgtctaggtccctctggacagcatcacttcctcctagtctatcaattgcagcactcagcttgatgtcatcaaacttgttgagggtacactcaatcccaccgttgatgctgttgataaaaacactgaagtgcaccaatcccaaaatggacccctgggggacaccactcatgacmggcctccacctgggcacagagcccttgaccacagctctctgtgtccatccwaccaactctttatccactgaatacttcagccttcaaatccatacgtctccagtttagagataaggaccatggtgcaggaccatgtcaaaggccttgcacaagcccmagtagaagacatcacttgcttttctttcatccactagtgccactggtccatcacagaaggccaccagacaggtcargyaaattgagygagatgaccagacaaaaccacgccatcccacttacaggtcacgtcacgagggttta

SEQ ID NO: 26967 - DNA, 600 bp, Chicken  19866894243621_2
ccatgatccatatgcactatcttgtatttggccttgttcaacatcatccagttctcataggcccacttttcaagcatgtctaggtccctctggacagcatcacttcctcctagtctatcaattgcagcactcagcttgatgtcatcaaacttgttgagggtacactcaatcccaccgttgatgctgttgataaaaacactgaagtgcaccaatcccaaaatggacccctgggggacaccactcatgacmggcctccacctgggcacagagcccttgaccacagctctctgtgtccatccwaccaactctttatccactgaatacttcagccttcaaatccatacgtctccagtttagagataaggaccatggtgcaggaccatgtcaaaggccttgcacaagcccmagtagaagacatcacttgcttttctttcatccactagtgccactggtccatcacagaaggccaccagacaggtcargyaaattgagygagatgaccagacaaaaccacgccatcccacttacaggtcacgtcacgagggtttagkgaaacatatacaggaaagtgacactgtctgttcctccagaatcttctgt

SEQ ID NO: 26968 - DNA, 600 bp, Chicken  19866894243621_3
ctcctagtctatcaattgcagcactcagcttgatgtcatcaaacttgttgagggtacactcaatcccaccgttgatgctgttgataaaaacactgaagtgcaccaatcccaaaatggacccctgggggacaccactcatgacmggcctccacctgggcacagagcccttgaccacagctctctgtgtccatccwaccaactctttatccactgaatacttcagccttcaaatccatacgtctccagtttagagataaggaccatggtgcaggaccatgtcaaaggccttgcacaagcccmagtagaagacatcacttgcttttctttcatccactagtgccactggtccatcacagaaggccaccagacaggtcargyaaattgagygagatgaccagacaaaaccacgccatcccacttacaggtcacgtcacgagggtttagkgaaacatatacaggaaagtgacactgtctgttcctccagaatcttctgtgcaagtaaacatatcatattttatcagaaaaatatacctgcagaatggcctttcaggcttgtatttctgtacaggatttatcacgtgcaaaattcagaaatttggc

SEQ ID NO: 26969 - DNA, 600 bp, Chicken  19866894243621_4
gctgttgataaaaacactgaagtgcaccaatcccaaaatggacccctgggggacaccactcatgacmggcctccacctgggcacagagcccttgaccacagctctctgtgtccatccwaccaactctttatccactgaatacttcagccttcaaatccatacgtctccagtttagagataaggaccatggtgcaggaccatgtcaaaggccttgcacaagcccmagtagaagacatcacttgcttttctttcatccactagtgccactggtccatcacagaaggccaccagacaggtcargyaaattgagygagatgaccagacaaaaccacgccatcccacttacaggtcacgtcacgagggtttagkgaaacatatacaggaaagtgacactgtctgttcctccagaatcttctgtgcaagtaaacatatcatattttatcagaaaaatatacctgcagaatggcctttcaggcttgtatttctgtacaggatttatcacgtgcaaaattcagaaatttggcccattttctgctgggaacctgaaaaaatctttacgaactgcagtagcagagcatcagaggccagcagagccgtaca

SEQ ID NO: 26970 - DNA, 600 bp, Chicken  19866894243621_5
tgttgataaaaacactgaagtgcaccaatcccaaaatggacccctgggggacaccactcatgacmggcctccacctgggcacagagcccttgaccacagctctctgtgtccatccwaccaactctttatccactgaatacttcagccttcaaatccatacgtctccagtttagagataaggaccatggtgcaggaccatgtcaaaggccttgcacaagcccmagtagaagacatcacttgcttttctttcatccactagtgccactggtccatcacagaaggccaccagacaggtcargyaaattgagygagatgaccagacaaaaccacgccatcccacttacaggtcacgtcacgagggtttagkgaaacatatacaggaaagtgacactgtctgttcctccagaatcttctgtgcaagtaaacatatcatattttatcagaaaaatatacctgcagaatggcctttcaggcttgtatttctgtacaggatttatcacgtgcaaaattcagaaatttggcccattttctgctgggaacctgaaaaaatctttacgaactgcagtagcagagcatcagaggccagcagagccgtacaca

SEQ ID NO: 26971 - DNA, 600 bp, Chicken  19866894243621_6
aaacactgaagtgcaccaatcccaaaatggacccctgggggacaccactcatgacmggcctccacctgggcacagagcccttgaccacagctctctgtgtccatccwaccaactctttatccactgaatacttcagccttcaaatccatacgtctccagtttagagataaggaccatggtgcaggaccatgtcaaaggccttgcacaagcccmagtagaagacatcacttgcttttctttcatccactagtgccactggtccatcacagaaggccaccagacaggtcargyaaattgagygagatgaccagacaaaaccacgccatcccacttacaggtcacgtcacgagggtttagkgaaacatatacaggaaagtgacactgtctgttcctccagaatcttctgtgcaagtaaacatatcatattttatcagaaaaatatacctgcagaatggcctttcaggcttgtatttctgtacaggatttatcacgtgcaaaattcagaaatttggcccattttctgctgggaacctgaaaaaatctttacgaactgcagtagcagagcatcagaggccagcagagccgtacacacgcggaccc

SEQ ID NO: 26972 - DNA, 600 bp, Chicken  19866894243621_7
cctccacctgggcacagagcccttgaccacagctctctgtgtccatccwaccaactctttatccactgaatacttcagccttcaaatccatacgtctccagtttagagataaggaccatggtgcaggaccatgtcaaaggccttgcacaagcccmagtagaagacatcacttgcttttctttcatccactagtgccactggtccatcacagaaggccaccagacaggtcargyaaattgagygagatgaccagacaaaaccacgccatcccacttacaggtcacgtcacgagggtttagkgaaacatatacaggaaagtgacactgtctgttcctccagaatcttctgtgcaagtaaacatatcatattttatcagaaaaatatacctgcagaatggcctttcaggcttgtatttctgtacaggatttatcacgtgcaaaattcagaaatttggcccattttctgctgggaacctgaaaaaatctttacgaactgcagtagcagagcatcagaggccagcagagccgtacacacgcggaccccgtgagcagctttgtgtcacaccccagctacgctcagccggcaaacctcaagcacagc

SEQ ID NO: 26973 - DNA, 599 bp, Chicken  19866894243623_1
  misc_feature (1)..(78): n is any nucleotide
nnnnnnnnnnnnnnnnnnnnnnnnnnnnnnnnnnnnnnnnnnnnnnnnnnnnnnnnnnnnnnnnnnnnnnnnnnnnnnaactttactgtgctctttggtgctttcaatatagagcagcattagtggatggtgttctgctttttgctattgcttttacaatgtgaacactacccataatcacaaattatgaagataaataatgtaaggggagattttttttcccaggtttatgtgatcattattaatagtaacagtagctttctctagcataatagaacccctcttggattagtgcattgyagcactatgtgtaatttttgtctagttgcacttaaatatttatatctgattgttttcattatatttttgaagtgtttctttttttagtttagatttttttttcaaagtattgggtttctgtgtgtgtatatttgtgacaggaggtaacggatatctaagttcagattgtcccggtaggctgttttgtttcttctgtagtgttatattaacatttgtgttgaaatgttcattttccaggtaaaacctgaatttcacagcttaaaaataatttatatttcttgtataatttgtataattag

SEQ ID NO: 26974 - DNA, 414 bp, Chicken  19866894243639_1
ctgcggagctgcaccgaggtttggcagcagccctcacatttcttagagttatctgctctgctgagcgcccgttccaagcagcgccgcgttaggatttccaccccattggctgcagcagcaattagcaggaagaaataacacctctggatttgcagcagtagcggcgtggcttccccctctgtgtctgatgctgtgctgaggctgagagcaacgcccccaggtatgcagcagctgccatcgctgggtgcaggttttgcagagggtgcacttacattttggtgctgcagaaggggcacaaaragctcccagcccttccaagaggggccctcctgcagcacggccgtctctgcagttcctccagcgctgccagctttctaacaaatcacgtctctgtttttttccctgggccgtatc

SEQ ID NO: 26975 - DNA, 599 bp, Chicken  19866894243641_1
  misc_feature (1)..(15): n is any nucleotide
nnnnnnnnnnnnnnncacactggagaagggtttctgccatcagatccctcaccacggcggacttgaggtttctgccttcagatccttctctacggacagtatgctgacggacttccctgggcctgctaccggagacctgctgcttcctcccagacttactctgcggcttcttcctggacccacccggtacctgcaccctctcgttgcccaagaccggcctcgctgctcctgcccttcggcctcggacagccggaacgtcgtgcaacgggactgctgccggatcctggtggtgactatccycgctttacacaattcttgcttctttctatcttttctatcgctcgccttcccttccccatcaccccaatccgtaatagtgtccgtcctcccctttcttcatctcccttattaacatttgtaaactggtcggaccaacatttgaaccgttgtttcttaatctcacgccgggcatacatatttcaaagaacctcctctccctcctgtaaattggagcgagacagcaaggcacattgctgatcttcattttagcttttgattgtttattctgctggttagaaatatctttagttgaggaaatg

SEQ ID NO: 26976 - DNA, 600 bp, Chicken  19866894243650_1
ataagtcacagattagggggggaataaaccccagagcacgactgaaggtaaagattttaattttttaattttttttgaaaatcatgtggagcagacaataagttacaatgatttgaaatgtagaagatatggattttaatatgttttacctagtgaattggaagagacaaggagaagagacaaaaagaggtgcaggaaaggcaggacaaattatgcaaagggtaaagaataagaactgtgccttgtagaaggaaaagtgaaggaagaattcaggagcaaagaaatggaacaattatgggsagggatgaggaaacaactaagagaaattcatgacctctgaaacaactcctaaacctataataagtatggaatattaagttgtgtgccttacttaaacaaactgtttgaagatcagtaatataactataaaagaatagagttcagtacaggatggtgatcctgaggaaacagtcatatactcacacaatcaggctgtgctaactacatcgttagcactcaaatcagctagttcaagtctgtttcagctgaaattagattacaggaarcataggatgttcatctatgtgacagtacagagga

SEQ ID NO: 26977 - DNA, 600 bp, Chicken  19866894243650_2
aattcaggagcaaagaaatggaacaattatgggsagggatgaggaaacaactaagagaaattcatgacctctgaaacaactcctaaacctataataagtatggaatattaagttgtgtgccttacttaaacaaactgtttgaagatcagtaatataactataaaagaatagagttcagtacaggatggtgatcctgaggaaacagtcatatactcacacaatcaggctgtgctaactacatcgttagcactcaaatcagctagttcaagtctgtttcagctgaaattagattacaggaarcataggatgttcatctatgtgacagtacagaggaactctttcccgtttgccttcatctcacacaggaatatgaatgactaaatagatgcttcttgaagcctgttatcatgtaattagtcctttttcccaccgtgcctttctaaaacgaaacctttgaaatccaatagcgttaactagctgaaatcttccagaaaccattttgactgtattttctttcctccagtgatgagtactcatcatttttatgatttccttgatttttcttttaaggcagcaggggttcttagagagaactgggcc

SEQ ID NO: 26978 - DNA, 600 bp, Chicken  19866894243653_1
tttaaaggaatacctctgcagtaccatggtgtgataaagacttcagtagcatgcaggagcacagtagcttacgggggaaaagcacttttccctgtctttcacatagggccatcagagttgtatattatctgtggctggtgagggggccacagtttaagtcagactgaaggaaggcagtctgaacataagctgtgactctgttcttaccagtgcaagttttggggctgagacttgcctcagctgacatgagttcctgacacttaactgcttcatgccttagttctatctctgcaaatgaaygaacacagcaatgatagctgtgttggaggcctgaaacrgatatggggyatctctcctttgctgtaggtggcactactaattgagcttacttaggcagcatgtacactggcaggttttttgacagtccacggttgggctgaggcctttggtgccagggagattaaagtacatgcatcattgttcattttcagctaccattcctttcctttgctgttaaaaatggagcatagtttcatagttcacatatacaaggtgccgggtgactcatatatagcactggccttgggactgggctattcc

SEQ ID NO: 26979 - DNA, 600 bp, Chicken  19866894243653_2
gacttcagtagcatgcaggagcacagtagcttacgggggaaaagcacttttccctgtctttcacatagggccatcagagttgtatattatctgtggctggtgagggggccacagtttaagtcagactgaaggaaggcagtctgaacataagctgtgactctgttcttaccagtgcaagttttggggctgagacttgcctcagctgacatgagttcctgacacttaactgcttcatgccttagttctatctctgcaaatgaaygaacacagcaatgatagctgtgttggaggcctgaaacrgatatggggyatctctcctttgctgtaggtggcactactaattgagcttacttaggcagcatgtacactggcaggttttttgacagtccacggttgggctgaggcctttggtgccagggagattaaagtacatgcatcattgttcattttcagctaccattcctttcctttgctgttaaaaatggagcatagtttcatagttcacatatacaaggtgccgggtgactcatatatagcactggccttgggactgggctattccctgccatcagacttggctgcagaggctaaagcattgtt

SEQ ID NO: 26980 - DNA, 600 bp, Chicken  19866894243653_3
gcatgcaggagcacagtagcttacgggggaaaagcacttttccctgtctttcacatagggccatcagagttgtatattatctgtggctggtgagggggccacagtttaagtcagactgaaggaaggcagtctgaacataagctgtgactctgttcttaccagtgcaagttttggggctgagacttgcctcagctgacatgagttcctgacacttaactgcttcatgccttagttctatctctgcaaatgaaygaacacagcaatgatagctgtgttggaggcctgaaacrgatatggggyatctctcctttgctgtaggtggcactactaattgagcttacttaggcagcatgtacactggcaggttttttgacagtccacggttgggctgaggcctttggtgccagggagattaaagtacatgcatcattgttcattttcagctaccattcctttcctttgctgttaaaaatggagcatagtttcatagttcacatatacaaggtgccgggtgactcatatatagcactggccttgggactgggctattccctgccatcagacttggctgcagaggctaaagcattgttctgctctgtg

SEQ ID NO: 26981 - DNA, 599 bp, Chicken  19866894243658_1
  misc_feature (1)..(187): n is any nucleotide
nnnnnnnnnnnnnnnnnnnnnnnnnnnnnnnnnnnnnnnnnnnnnnnnnnnnnnnnnnnnnnnnnnnnnnnnnnnnnnnnnnnnnnnnnnnnnnnnnnnnnnnnnnnnnnnnnnnnnnnnnnnnnnnnnnnnnnnnnnnnnnnnnnnnnnnnnnnnnnnnnnnnnnnnnnnnnnnnnnnnnnnnnnntttgcactgtaacacaaattgaaccactgagctactgctgagagttgacatcgcagcaggcatacagcaactaacagtgaagctagtgctgcaattaacaagtgtgaaggagraagacacttctgggaagttctgcaggttttgaagtctagggagagttttgtagaagtgtggagttttggacarggagcttttagtaacactgtgacgaaatgtggggtgaatgaattaccccatgcaaagacaacttcacgaatkaattatwttttccctgtttgtttacaaacaaattccacaggcaaaatggtctctactgcattagttcagcaacaatgttgctttggggagccatgtcctatgtaatactgacaaagaacttcatttctatctaaccggagtaacaattcataat

SEQ ID NO: 26982 - DNA, 599 bp, Chicken  19866894243658_2
  misc_feature (1)..(114): n is any nucleotide
nnnnnnnnnnnnnnnnnnnnnnnnnnnnnnnnnnnnnnnnnnnnnnnnnnnnnnnnnnnnnnnnnnnnnnnnnnnnnnnnnnnnnnnnnnnnnnnnnnnnnnnnnnnnnnnnnntttgcactgtaacacaaattgaaccactgagctactgctgagagttgacatcgcagcaggcatacagcaactaacagtgaagctagtgctgcaattaacaagtgtgaaggagraagacacttctgggaagttctgcaggttttgaagtctagggagagttttgtagaagtgtggagttttggacarggagcttttagtaacactgtgacgaaatgtggggtgaatgaattaccccatgcaaagacaacttcacgaatkaattatwttttccctgtttgtttacaaacaaattccacaggcaaaatggtctctactgcattagttcagcaacaatgttgctttggggagccatgtcctatgtaatactgacaaagaacttcatttctatctaaccggagtaacaattcataatgactctaatgtttgtaacaaacaccttttgtgcattccagctaaagctgccaaagaaattctgaagtacttat

SEQ ID NO: 26983 - DNA, 599 bp, Chicken  19866894243658_3
  misc_feature (1)..(42): n is any nucleotide
nnnnnnnnnnnnnnnnnnnnnnnnnnnnnnnnnnnnnnnnnntttgcactgtaacacaaattgaaccactgagctactgctgagagttgacatcgcagcaggcatacagcaactaacagtgaagctagtgctgcaattaacaagtgtgaaggagraagacacttctgggaagttctgcaggttttgaagtctagggagagttttgtagaagtgtggagttttggacarggagcttttagtaacactgtgacgaaatgtggggtgaatgaattaccccatgcaaagacaacttcacgaatkaattatwttttccctgtttgtttacaaacaaattccacaggcaaaatggtctctactgcattagttcagcaacaatgttgctttggggagccatgtcctatgtaatactgacaaagaacttcatttctatctaaccggagtaacaattcataatgactctaatgtttgtaacaaacaccttttgtgcattccagctaaagctgccaaagaaattctgaagtacttattgatttttaagattggtatgttacactttgtccagcagaagaatacagtgatgtaaagaagcagaaagttag

SEQ ID NO: 26984 - DNA, 599 bp, Chicken  19866894243658_4
  misc_feature (1)..(35): n is any nucleotide
nnnnnnnnnnnnnnnnnnnnnnnnnnnnnnnnnnntttgcactgtaacacaaattgaaccactgagctactgctgagagttgacatcgcagcaggcatacagcaactaacagtgaagctagtgctgcaattaacaagtgtgaaggagraagacacttctgggaagttctgcaggttttgaagtctagggagagttttgtagaagtgtggagttttggacarggagcttttagtaacactgtgacgaaatgtggggtgaatgaattaccccatgcaaagacaacttcacgaatkaattatwttttccctgtttgtttacaaacaaattccacaggcaaaatggtctctactgcattagttcagcaacaatgttgctttggggagccatgtcctatgtaatactgacaaagaacttcatttctatctaaccggagtaacaattcataatgactctaatgtttgtaacaaacaccttttgtgcattccagctaaagctgccaaagaaattctgaagtacttattgatttttaagattggtatgttacactttgtccagcagaagaatacagtgatgtaaagaagcagaaagttagttggagt

SEQ ID NO: 26985 - DNA, 600 bp, Chicken  19866894243660_1
attttaaagaccagcttagcaatggaatcttgttctcctttgtgtgatttattgaaaatcttactatggctgaaaacagagtacttctgaattgtcaagacctggcggtatcattgcccgtactgaaaatctgctccattttggttgttcctattttaacctttttgcaaagctcccaaatactgcagtaaacctgacaagtctgaaatagcccattgcctccttttgaaagaatatgaaatacccgattgaggtaatccaaaataataaaataaaaattgatggtagaaagggaaaatrttgtgggtatgtcagcaagtccatcgctgtactgtgtggaagaattatgcagaattgtacagaagagagacagctctgtgaccaagctacgcttcattatctgaacgtctctctttttttcttatttttttttcttcttcatcttcctgttttttgtttgtttgttttttttcctaggtctgtcatttcagtgtctatttttctttctccttaggaagttctccttcaaaggagatggctcaagccagctgtaaaaatggcaaaaaaggaaaattcaaacaccagaaacctcagagacgg

SEQ ID NO: 26986 - DNA, 599 bp, Chicken  19866894243662_1
  misc_feature (1)..(68): n is any nucleotide
nnnnnnnnnnnnnnnnnnnnnnnnnnnnnnnnnnnnnnnnnnnnnnnnnnnnnnnnnnnnnnnnnnnnactgcttaatgagttggacagaggaatacctcgactggttttattgcccttctctacactgcaccattgaaatactgttgcttttttccatggccataaaatcaagtgctatccatgattttagacagaaaaaatatcaacaacaaaaaatgcctccagatttttctaccatctgaagtacaaaataaatctaaataaaaccattaccgtaatacagagaaatatgtttttyctatcttaatagatatgttatgatcctacatccaattgcatacagtagattatctgcagatcacctctcttcaaaaaagtattatgaatctgataactcatcagttctcaagaggaaaaataagacaaataaacagaaagacatcaaacttccatattccaaacttccatttttctctttcttctttttcactgtgctttcattggagaatatttacactgaagttagaaagctagtgacccattatcctttatcagtcaaccgaagaaggaagattctcaaaataatgatataaaaac

SEQ ID NO: 26987 - DNA, 600 bp, Chicken  19866894243670_1
ttctgctttcaggtggggatacctttggacagttgcatcacagaatcacaggatactctgaattggaagggacccataaggaccactgagtccagcttgtggctctgcacaggacaacccaaaaattagaccatatgtctgaggatgttgcccagatgccccttgaactccagcgggcccgatgctgggagcactgccttggggagcccattccatgcctgcccaccctctggtgaagacccttttcctgatatccaacctgaccttcccctgggcagtctgtgttgcaaacagagcacrtgataggacactctcactagaaagttarcagagtttttcctttctgtgtgtcaggacagcaaaagggggccctggatagggcatttgcactagatgtgagctgtgtcactcttgggaacgcaggcagaataataggagactgcacaaatcaatactgttaatggggagcgttattgacttcaccacctgagatagccacataaaaatagatttaggagaaagcagtgggggaagaaaataagtgggttctgctgagaaagagagaggaaggagaagtgaaagaggaagaacccaggagaa

SEQ ID NO: 26988 - DNA, 600 bp, Chicken  19866894243670_2
acagttgcatcacagaatcacaggatactctgaattggaagggacccataaggaccactgagtccagcttgtggctctgcacaggacaacccaaaaattagaccatatgtctgaggatgttgcccagatgccccttgaactccagcgggcccgatgctgggagcactgccttggggagcccattccatgcctgcccaccctctggtgaagacccttttcctgatatccaacctgaccttcccctgggcagtctgtgttgcaaacagagcacrtgataggacactctcactagaaagttarcagagtttttcctttctgtgtgtcaggacagcaaaagggggccctggatagggcatttgcactagatgtgagctgtgtcactcttgggaacgcaggcagaataataggagactgcacaaatcaatactgttaatggggagcgttattgacttcaccacctgagatagccacataaaaatagatttaggagaaagcagtgggggaagaaaataagtgggttctgctgagaaagagagaggaaggagaagtgaaagaggaagaacccaggagaaggaaagtcatgagaaacggagggaggcg

SEQ ID NO: 26989 - DNA, 599 bp, Chicken  19866894243672_1
  misc_feature (1)..(146): n is any nucleotide
nnnnnnnnnnnnnnnnnnnnnnnnnnnnnnnnnnnnnnnnnnnnnnnnnnnnnnnnnnnnnnnnnnnnnnnnnnnnnnnnnnnnnnnnnnnnnnnnnnnnnnnnnnnnnnnnnnnnnnnnnnnnnnnnnnnnnnnnnnnnnnnnnntaaaacattaccagattaaagtggaagaaaggaaactgcagaggaggagggctcgctaacaggagatgtgaaggtaaataagagaacacacactgagatcagcgagggcaatttttgtcagcaataagaataccagtagtgcttgcatcacaayatactcacccctcagcacaatatggctgtgatttatcctgttcttccaagatgttagacacaagctcatataaatctgcttcactgccataatcattcctttcagtttgaattctgaaaacaaacagcattctggttagttcatttaaaacagttcattaagttaaacaaacaaaaaaatcccctaatccttcaatgtgaaygatcacccagtcaaaactgactacctggatttcacattcatctgaggagcagcgggctgcttattgtcatctccacacacagaccatggtgtgtaca

SEQ ID NO: 26990 - DNA, 600 bp, Chicken  19866894243672_2
taacaggagatgtgaaggtaaataagagaacacacactgagatcagcgagggcaatttttgtcagcaataagaataccagtagtgcttgcatcacaayatactcacccctcagcacaatatggctgtgatttatcctgttcttccaagatgttagacacaagctcatataaatctgcttcactgccataatcattcctttcagtttgaattctgaaaacaaacagcattctggttagttcatttaaaacagttcattaagttaaacaaacaaaaaaatcccctaatccttcaatgtgaaygatcacccagtcaaaactgactacctggatttcacattcatctgaggagcagcgggctgcttattgtcatctccacacacagaccatggtgtgtacaaaagggaagagtccacaggtgcagagtattcccggtgttgagagggaagaactgtaggtctgaggtgggtccacattttcttcaatctgcattttataaacaataaaaacattgatttcaatatgaaataatataaattmtaatactgaattaaattatcatttcctcattctgcaaggttataaattactttacccgtgaag

SEQ ID NO: 26991 - DNA, 600 bp, Chicken  19866894243672_3
ttcatttaaaacagttcattaagttaaacaaacaaaaaaatcccctaatccttcaatgtgaaygatcacccagtcaaaactgactacctggatttcacattcatctgaggagcagcgggctgcttattgtcatctccacacacagaccatggtgtgtacaaaagggaagagtccacaggtgcagagtattcccggtgttgagagggaagaactgtaggtctgaggtgggtccacattttcttcaatctgcattttataaacaataaaaacattgatttcaatatgaaataatataaattmtaatactgaattaaattatcatttcctcattctgcaaggttataaattactttacccgtgaagcaaccagctcaccagaaacaagcacaccacgtacttttgggcatagtgccacagggaacttctcctgttgactactcagggtgtattcctgaaggcactgagaaagggttttcatttcagacttctacctctgcaaaaagctacaactatgaaatgcaaaatgaaaagatttaatgtttttcactatcacagcgtttactactgtcagactaagcagctcctgctcagctgctttac

SEQ ID NO: 26992 - DNA, 411 bp, Chicken  19866894243673_1
tgtgaggaaagagaacttacgtggaaaatacatgctctgtgtcaggaataacagcaagaatgggagtccccgctcagtgcctttctaaataacttgtcttttcactccctctggtggtgtaaatgttttgtgaggaggtacgagttctgtaagtactcaacatgatctcagtaatgaattgagagtttgttggtataaaagagaacaggaaaaaaggaaaatctctagcaagtatacaagaggcttttgtttttcttttccactgaaggaaaaagaatttgcttgttttctcttatgcargagacaaacactaaataactgcctttggttgtaattatgctttatcacagaatcacaggcatttgaagggacctcaagagagcattaaatccaaaacccctgcaaagcagg

SEQ ID NO: 26993 - DNA, 600 bp, Chicken  19866894243674_1
ttcaggaataaggcttgtgaaaatatgtttattattaaattctttttcagtagagagctagttttattcacattcagctgcatcctgagaatgagatcattttctatgcaaaatggtaaattatattttgattttcaaatgtggcattaaaaatacacatattttcattttaatgaagatggaagcattccattttccattgtgtttaatgtgtattaatttctgctatgttaattgtacatatctgtaaaaagacattaaattattctaattcctttctactatgctatttcaacttamtgaaatgaagtatttgaagtctctgaagacgttctgttctgaaaggtatgttcacaggaaaattcaacacctgacctttccttttgattgaagatactttttttccccacagaaagaaatttcattttgtgagccaactctactaagaacagtaagtgaaaatttacacagaagctggactttcattagtacatgtgccatcttaataatctacatttagaatacctggcttcttttgtatgcaaataaatatatacatacatgatctcttcttaagagagcatgcaaacagttcagata

SEQ ID NO: 26994 - DNA, 600 bp, Chicken  19866894243682_1
gggcatcagaacaactggctaagtcagaatggactgaaggtaaaatgacttacgtacttcagaaaaagtaatccatgcaaacgtgaacctgttcatctgactttactagcatgtaaaacttcagaactatttttccaggagggaatactttagaggtataggtaaatggaaaatggcatgaaaatcaacatggataacttcctttgataagataactcattttcaagacactgtggcagagttcaactctggcaccagctcctgagccagatacaaacctggatggatgccgaaaaggaytgttagggtgaggatgggaatgggaagcacgttctgccaagggcactcaaagagtttgatgcagttctttttccaaaagaaaagcttgccttctgtaagagtgcaaacatcagagcggacgaaggtaacacaacatggagaccttgtccagcattatggaataaactacatgaagacagttctatgctagcactgggctggattcagtgttcagctctatgctcctatgtccaggtgggcaaatgaccttaccacttctctatcacccatatccacgtttgcacaaagtgtgcattttca

SEQ ID NO: 26995 - DNA, 600 bp, Chicken  19866894243682_2
tataaatcctccacaaaatgttctctcatttttgtatccttcccagtttttcagttaaaatatatataaatatattcaaaatggttactgattacagcacagctacgcggcctactttgataagaacgaacatcgcaaaatgtgggtcaaaaaatgccatgtttttctcaaattaattagtacttcggtttttttgtctaaattgaaaacaaaaaagaatggaaaatagccaataaaaagacaaaataatgctggcaatgttaaccatgctttaagactccatagcctggtgtctgtggrtgcttccagcactgtgaggggtctccatggtcatgaaaccacagaacaacactgaatttaagcttaagaccagatagcaactcacaaaatccagtaagtgacagaagtaaaccataagggcagccagcagaaatgacaaagggagcaaggatgatcaatattaggatttcgattccagctctagatagatagagagatcattccccaatgtcccctactggcaggcagcattagcagaagtgatgtcaaatcctgtygtttcatatccagaccactggcattaggatctcgtcctccaag

SEQ ID NO: 26996 - DNA, 600 bp, Chicken  19866894243682_3
atgttaaccatgctttaagactccatagcctggtgtctgtggrtgcttccagcactgtgaggggtctccatggtcatgaaaccacagaacaacactgaatttaagcttaagaccagatagcaactcacaaaatccagtaagtgacagaagtaaaccataagggcagccagcagaaatgacaaagggagcaaggatgatcaatattaggatttcgattccagctctagatagatagagagatcattccccaatgtcccctactggcaggcagcattagcagaagtgatgtcaaatcctgtygtttcatatccagaccactggcattaggatctcgtcctccaagcacagtcctgggtagacacaccgagccacacactgagcagccaaccccacaaccccacaggacagctctgtgcccrcctgcgcatcrtcaggctgctttgactcacttgtgctcacagtctgactcagtctagcggtccctacgcttcacaagggttatttatgacacatctcttttttttccttaagatactgtctttgagctatttttttactcttccaccattgatctctttcaaagaaccaaggaactgctga

SEQ ID NO: 26997 - DNA, 600 bp, Chicken  19866894243682_4
gcaactcacaaaatccagtaagtgacagaagtaaaccataagggcagccagcagaaatgacaaagggagcaaggatgatcaatattaggatttcgattccagctctagatagatagagagatcattccccaatgtcccctactggcaggcagcattagcagaagtgatgtcaaatcctgtygtttcatatccagaccactggcattaggatctcgtcctccaagcacagtcctgggtagacacaccgagccacacactgagcagccaaccccacaaccccacaggacagctctgtgcccrcctgcgcatcrtcaggctgctttgactcacttgtgctcacagtctgactcagtctagcggtccctacgcttcacaagggttatttatgacacatctcttttttttccttaagatactgtctttgagctatttttttactcttccaccattgatctctttcaaagaaccaaggaactgctgaaaagagagcaatcagtctcactggtcactccatggagcggggttcctgctggctagagaaggtttgtcacagggcaccccaacgatacaaccaggaaggaatcagccaccttctggcac

SEQ ID NO: 26998 - DNA, 600 bp, Chicken  19866894243682_5
aatccagtaagtgacagaagtaaaccataagggcagccagcagaaatgacaaagggagcaaggatgatcaatattaggatttcgattccagctctagatagatagagagatcattccccaatgtcccctactggcaggcagcattagcagaagtgatgtcaaatcctgtygtttcatatccagaccactggcattaggatctcgtcctccaagcacagtcctgggtagacacaccgagccacacactgagcagccaaccccacaaccccacaggacagctctgtgcccrcctgcgcatcrtcaggctgctttgactcacttgtgctcacagtctgactcagtctagcggtccctacgcttcacaagggttatttatgacacatctcttttttttccttaagatactgtctttgagctatttttttactcttccaccattgatctctttcaaagaaccaaggaactgctgaaaagagagcaatcagtctcactggtcactccatggagcggggttcctgctggctagagaaggtttgtcacagggcaccccaacgatacaaccaggaaggaatcagccaccttctggcacacctgcactga

SEQ ID NO: 26999 - DNA, 600 bp, Chicken  19866894243690_1
cagcagtgtttgagctgtgattcccctgttgtccattaatgtctcctcttctgctggaagactgtacaacttcctgggagtgcagagatcgcagcttgcctgggagtttgtttgctgagagtaggtctggcagtgataccagttgaatgggtcaaacactgtttcacctctttctttgtcagaaattttcagtttgagtactttcttgatctctggttgcacctgaaatccaaaattgctttagtggttgtggtagctacttcccagcttgactcagaggtacagattcccattgagttygccgggagtgggaaagtccacattccttaggctgcgctgaatatctccgcctggaagtgttgtttatcaaaacttctcttagatgaaccttgcggtaattctccattaatttatttcctccagttattacaatgagttctgctcaggggtatcctggaaaaccacttggaagcatcagcggagaaaaatgaagtgcggttggctgtaaggagcaccctatgccacatcataagactcgatcccttattttcccactgctttgatctattctgttctctgtgtagggcttaaacaaaagta

SEQ ID NO: 27000 - DNA, 600 bp, Chicken  19866894243697_1
ttctgagctcttcagaggagactggggtgcgtttgaccttgggatttctatccagattccctgctgctgagtgtgtttcagctgccagctcttctattctctggaagcaacagctgggagtatgtctcatggatgggtgttaagatgaaggattttgtcatctcggctgcttgctacagcagccgttgtcaggatgggaacacaagaggccctctagcccttctgaacagtagttgtagtcactggaacctttccttactggattgggctgcaatgctcacctgctgcggtggtggttgkgttgtgttcaggctctcccaagacagggagtgtgagacaggctctgctgtgggcagaaagactgtgaatgaacccgtggaggaagcatcagtttcttaggcttacaggggtaggagagagaaagacaggaagagattggaatcagctggttatccaggcagagatgtgacaggcttactagagaaccgttttcctgctgctgttgtgaagggagggagatctgtggtctgtcctaactggaggaggagatgtcctggccttggtcttacccagcttgcatggaggttgtgggaagagtct

SEQ ID NO: 27001 - DNA, 600 bp, Chicken  19866894243701_1
tccctgtagaacactttgatacagcacaggagagttgtgagtcacttctgaggagccaaaggcttggtacaggacagggactggagctgtgcaaaaggcagctgtatgttaggtactgtcagcaaagacatagggacggtgtgcctggtgaggttctactctcaaagccgtaagtgattattttttcattcccctttccatcaggtttaattaaatatacgtgccttattagagtctacagtagatgttcagcccacaaactcatagaaagagggaggagtgctgaggagaggagccacwcacctgctgctagggcacttcccctctgctccctgacccttcctgcttgcttgcagttacaatgtcacggcttctccagagccctcmgccagcaacagctgcctgaatgtgaaacaggagtgagaaaaaggaatagatacaaaaggccttgttagtcacacataagacaaagggcagtgtaagaaatgaaacagttacagctaagagagtggaattcaaggtgactgctaggaaaaacaagagaaacaaatcaaacaaatgaacagagaccaggtgacagtagatcaagatggtccattt

SEQ ID NO: 27002 - DNA, 600 bp, Chicken  19866894243701_2
tgtgcaaaaggcagctgtatgttaggtactgtcagcaaagacatagggacggtgtgcctggtgaggttctactctcaaagccgtaagtgattattttttcattcccctttccatcaggtttaattaaatatacgtgccttattagagtctacagtagatgttcagcccacaaactcatagaaagagggaggagtgctgaggagaggagccacwcacctgctgctagggcacttcccctctgctccctgacccttcctgcttgcttgcagttacaatgtcacggcttctccagagccctcmgccagcaacagctgcctgaatgtgaaacaggagtgagaaaaaggaatagatacaaaaggccttgttagtcacacataagacaaagggcagtgtaagaaatgaaacagttacagctaagagagtggaattcaaggtgactgctaggaaaaacaagagaaacaaatcaaacaaatgaacagagaccaggtgacagtagatcaagatggtccatttatgagatgtatgatacttagttcggatcaacgctgagagctgtgctaattgggctccattcttttgatccacagagcagattttctc

SEQ ID NO: 27003 - DNA, 600 bp, Chicken  19866894243701_3
tcaaacaaatgaacagagaccaggtgacagtagatcaagatggtccatttatgagatgtatgatacttagttcggatcaacgctgagagctgtgctaattgggctccattcttttgatccacagagcagattttctccatctcaatgttcttgagaattaaaaggcagaaaatacttaggggagctttatacaacttttaacacacaaataaagagaggaccatctgtagtctttcagctacaagagagaagaaagggagagggttaaacaggagcactgcatctattttgaagtcataracccacccagacatatggatttattcactacgcttcggcagcattaaattcttgatagaaacaaatgtttcttgctaattgtccgcaggagcaagctggcaaagcaaatcctcctcacagagtcataaggagcttcaggcctacgaaaccagtagcgattatcaagagactgctatttgcactgaactcttttccaacaaattgccttcagccctgtttgctaacacagcagacaaatactgtaaatgctgttttagcacaacgctgaaactcctgcacgccagcagagaccacttctta

SEQ ID NO: 27004 - DNA, 600 bp, Chicken  19866894243702_1
ttgtgtttcctgtttgggttgcaaaattctggcgttctttttcactgtaagaagtgaccagcctctacattcatgttcaatgtctagtttgcattttgtagtgggaaaaatgtagtgaatccatgtgacacaatgcaaatttagtctttggtgtctttcctaccaggctcctcttgcaaaaatcaattccatggtattttcagttccccagacttaccctgctttaatcaagtgtccttaaaaatgagtatttaagacacatcatactgccatccagtccttttctcctatcattttctycccaatcagttttgaatttcctgttcatttgtggccaaatctgtcagaatagtaggtgcaggctgagtgaaaataggcatgcatagccattgtgggaaaggctgcagcagatacccttcccaaacatcagaagatgcaaacagtggactcatggaatgaaggggagtgagaaagagtcattcagagaaaagtaaatgggaaacaagactccatgggctgtgctattatgtgcagtatggaatctgacctgtctagtctgctggtaagtgatgtacatgcttctcccctgtactttaccat

SEQ ID NO: 27005 - DNA, 600 bp, Chicken  19866894243702_2
atttgtggccaaatctgtcagaatagtaggtgcaggctgagtgaaaataggcatgcatagccattgtgggaaaggctgcagcagatacccttcccaaacatcagaagatgcaaacagtggactcatggaatgaaggggagtgagaaagagtcattcagagaaaagtaaatgggaaacaagactccatgggctgtgctattatgtgcagtatggaatctgacctgtctagtctgctggtaagtgatgtacatgcttctcccctgtactttaccattaggcattgttgctttggcttttctygtgacgttaaatgcaagtcacaagctgcagcgtggtgggtttatttatgcttaactagaaaatctgcccagaaccaagacttgcaatattccttttgaagggcttgtgaaatattgttaataaaggtaatttcagtaggttggtttgaaaaggctatgtgtaaccctaacacagggaccaaaagacggtataagtagtagcaattttacagaagaagttaagataaaaggtaaggccaagttaaaaaaaaaatcattaatctctacactaaatcgctgcactaaaggacagaagcagggc

SEQ ID NO: 27006 - DNA, 600 bp, Chicken  19866894243702_3
aggtaatttcagtaggttggtttgaaaaggctatgtgtaaccctaacacagggaccaaaagacggtataagtagtagcaattttacagaagaagttaagataaaaggtaaggccaagttaaaaaaaaaatcattaatctctacactaaatcgctgcactaaaggacagaagcagggccagacagattctgcttctttacatcctacagaaaagccaagctcaagctccatcagtatgtcctgtgtgaactggccctcaacagcactctctttcctctctccacagaatggtttaaaaggyaaaaaaaaaattagtgtccttttgatcttttggctccttgccttggcatgtcttatgacttcagccggaacctggaagaagcatcttcctaattaatagctcaggaattatttcagactgccacccaccaggactgtttagctggatggactacgtgacctttctgctgctttcctccagcctcatcccagcatgctgctgtgacctctttgcaacagtgcccaccaaactcctgtttgccccaggcagtctccatcctatagtgaccctaaaacagcctaaaagagcctgccactactc

SEQ ID NO: 27007 - DNA, 600 bp, Chicken  19866894243702_4
attgtaggaaggaagtggaaggtgctggacacaaatgtaggtcttggaaaacaggctgtgggacatgggtagcagaataaatgaacagagtacatactttttatggaaatatgattagtgatctgagtgcaagggcagtggaggaggctggagaaggggagtgaggaggagatacgcacaaggtatccctcctaatacaaaatattagtacagaaggatgaatctgggatggaagagttcagacctggagggacaaactgaaataacacactttcatgctatatggagttctgaaaactwcttcatatttcaggtcaaaactgacaacttgggtcacagcatataaaattttgggatacattactgtaccttcatgttatctgaagaagaaccagcattacatgaggatctaccaagtgtttaagctcattgaattttttccatttgtcattccatctaaaacacacatcatgagagttttgaatttgtagagttctttcaacagtgagataattctcaccttggccacaagtttaccaccttcagtaaagacaaacaaatgtatttgcagcgaatagtgttttttgttctatcaggaga

SEQ ID NO: 27008 - DNA, 599 bp, Chicken  19866894243705_1
  misc_feature (1)..(51): n is any nucleotide
nnnnnnnnnnnnnnnnnnnnnnnnnnnnnnnnnnnnnnnnnnnnnnnnnnntctgttgggcgagctgccgaacagtcactcccaaataatgacagttcacctatacagacgtgccataatgaacagctgcagtaatttcagcatcattaaaattcagtttcatttcctagtggggacgtaattgatttttattttactacggcattcatttcagtgataggtgtggttgcatctttgccttttatgcccactgaggtaaatcatacaaaggtgagaagtacaactggcacagagctcaaygtctcaccccgtctgtccggttgctgcagcgcaggcacagtggcaatgccaccaaagcatttctgcatgtttgtttgcaaagtatgaccagcaggtgacttagggagggtgacgttgcaatctactcctaagaaaatcctgcgkaagctgggatggtggaagaaggtgaccagcaaaccctcggtagcaatctccttcaacaacacctgcttcctcctacatctctgcttttctctagcccatctcagggcctgttcatcatttaaaagcacttctcccctgtcctgcacctcaaacca

SEQ ID NO: 27009 - DNA, 600 bp, Chicken  19866894243705_2
cattaaaattcagtttcatttcctagtggggacgtaattgatttttattttactacggcattcatttcagtgataggtgtggttgcatctttgccttttatgcccactgaggtaaatcatacaaaggtgagaagtacaactggcacagagctcaaygtctcaccccgtctgtccggttgctgcagcgcaggcacagtggcaatgccaccaaagcatttctgcatgtttgtttgcaaagtatgaccagcaggtgacttagggagggtgacgttgcaatctactcctaagaaaatcctgcgkaagctgggatggtggaagaaggtgaccagcaaaccctcggtagcaatctccttcaacaacacctgcttcctcctacatctctgcttttctctagcccatctcagggcctgttcatcatttaaaagcacttctcccctgtcctgcacctcaaaccaatgcttccatgtgtcgtcctgttgcagcttcatacattacccccacatcatcagtaggcacacaactcctgcccagcccttcatgctgtatcaggcagcacggctgggctgggcagttaccgcctgtccgtgcctctgggcaagc

SEQ ID NO: 27010 - DNA, 600 bp, Chicken  19866894243710_1
cgcatacacatttcctcataacaaacacttatatgataagcagctatttatgtttcaaggcaaaaaccgtgcagtgtaatggactctgttctgactatttgtccgtaaagaaatctcactgtttcatgggaaacaaggaaaaacattatactcggagacaatttctttctgttaaacccattctttacctttctccttagttctgctttagaggagacgtctgcagggctctgctgcctctgcaggagtgtctgcagtcgggacaggagaactgtgctgctgcgtagggctaaagaggargaagtgctcagctctgctccttgtctctccttccacaagattaatagccagagtggcagggacagagatttgtcctgtgcagggacttgtctctatggatgttgctctccgcaccgctctgaggcagatcctgcaaacatcaacatcacgcagaagaaatgagcttttctctggtggtgacacactgctcaaaagcactgatccagataacaagagagatgtctgtgtaatgaaggcaaatgacacatctggcaattttccacccaactgacagagataaacagttataaatataccccc

SEQ ID NO: 27011 - DNA, 600 bp, Chicken  19866894243725_1
aacttctttttttcacactgatgccgactttcagccaaagaggagcagaacattgtgtagttcagctgtacatccttcagcagttcaacttctgcgctctccttgagccccacagcagcaggcgccaaaggaatgcaaagtcacgctcctgtgagctgcccttcggcttcattatttactttacactcttctacctgaatgcatcagaaaagacttttttaaatctcttcccaacctgcctgcttttagcaggatcccgctgcgttgcagtgttactctaatttaagctagtgggagagyrtactcaatggttccaccaggtgctgggctcgagaggtctccttattgccatgttctgaaaagcttcattatttttccccctttttccaatgatctccacccattttaaacagcaattmtttaattgcagtcctggcttaactcaaattcttcctgaaagcatytgtagctggttccagagttgcttttcagctacaagggtggaatggtagtttcaacagcatatatgcatatatacaagtacatagatacatacatatatatggcttagtaaaataggcattgtaaaggaggtaagaa

SEQ ID NO: 27012 - DNA, 600 bp, Chicken  19866894243725_2
acttctttttttcacactgatgccgactttcagccaaagaggagcagaacattgtgtagttcagctgtacatccttcagcagttcaacttctgcgctctccttgagccccacagcagcaggcgccaaaggaatgcaaagtcacgctcctgtgagctgcccttcggcttcattatttactttacactcttctacctgaatgcatcagaaaagacttttttaaatctcttcccaacctgcctgcttttagcaggatcccgctgcgttgcagtgttactctaatttaagctagtgggagagyrtactcaatggttccaccaggtgctgggctcgagaggtctccttattgccatgttctgaaaagcttcattatttttccccctttttccaatgatctccacccattttaaacagcaattmtttaattgcagtcctggcttaactcaaattcttcctgaaagcatytgtagctggttccagagttgcttttcagctacaagggtggaatggtagtttcaacagcatatatgcatatatacaagtacatagatacatacatatatatggcttagtaaaataggcattgtaaaggaggtaagaaa

SEQ ID NO: 27013 - DNA, 600 bp, Chicken  19866894243725_3
aggcgccaaaggaatgcaaagtcacgctcctgtgagctgcccttcggcttcattatttactttacactcttctacctgaatgcatcagaaaagacttttttaaatctcttcccaacctgcctgcttttagcaggatcccgctgcgttgcagtgttactctaatttaagctagtgggagagyrtactcaatggttccaccaggtgctgggctcgagaggtctccttattgccatgttctgaaaagcttcattatttttccccctttttccaatgatctccacccattttaaacagcaattmtttaattgcagtcctggcttaactcaaattcttcctgaaagcatytgtagctggttccagagttgcttttcagctacaagggtggaatggtagtttcaacagcatatatgcatatatacaagtacatagatacatacatatatatggcttagtaaaataggcattgtaaaggaggtaagaaaggactttgttattctttcaaagatacactatamaacttcactttctgatgaagcaataggaatttttccagattaaaaaagagcctaattaattatttcagtaatggttaatatggag

SEQ ID NO: 27014 - DNA, 600 bp, Chicken  19866894243725_4
ggcttcattatttactttacactcttctacctgaatgcatcagaaaagacttttttaaatctcttcccaacctgcctgcttttagcaggatcccgctgcgttgcagtgttactctaatttaagctagtgggagagyrtactcaatggttccaccaggtgctgggctcgagaggtctccttattgccatgttctgaaaagcttcattatttttccccctttttccaatgatctccacccattttaaacagcaattmtttaattgcagtcctggcttaactcaaattcttcctgaaagcatytgtagctggttccagagttgcttttcagctacaagggtggaatggtagtttcaacagcatatatgcatatatacaagtacatagatacatacatatatatggcttagtaaaataggcattgtaaaggaggtaagaaaggactttgttattctttcaaagatacactatamaacttcactttctgatgaagcaataggaatttttccagattaaaaaagagcctaattaattatttcagtaatggttaatatggagaacaagaagtaatcatcaggaattaactcattataattttagcat

SEQ ID NO: 27015 - DNA, 600 bp, Chicken  19866894243725_5
aggtctccttattgccatgttctgaaaagcttcattatttttccccctttttccaatgatctccacccattttaaacagcaattmtttaattgcagtcctggcttaactcaaattcttcctgaaagcatytgtagctggttccagagttgcttttcagctacaagggtggaatggtagtttcaacagcatatatgcatatatacaagtacatagatacatacatatatatggcttagtaaaataggcattgtaaaggaggtaagaaaggactttgttattctttcaaagatacactatamaacttcactttctgatgaagcaataggaatttttccagattaaaaaagagcctaattaattatttcagtaatggttaatatggagaacaagaagtaatcatcaggaattaactcattataattttagcatgaggacattttggaggcttggaaagcaaacagcataaaaccagtctgaaacttatgtcagagctgccaaactttggaaagctggcccaagaactgaaacaaaaaccatgttggcattacgctctgctgataatgtccttccatcagttgtgtggccctgaaacaacctca

SEQ ID NO: 27016 - DNA, 600 bp, Chicken  19866894243728_1
attgcaagcttctgtgtccaataagttaccaattaattggctcctacaactgttgtatagtttacttcttgaatggctccctcttcagtaatttccttcccattgtgtgaccctttctgacaactcctgtataacgctatcagataatcactgtcttttctttttcgcctcacttttctgtatctctctaaatagtgtattattctgccttggtaccttttatggaggccagctcagtggcctgtcagttaaagggtaaggatacattaaaatcgtcattcactcaaaaggctttgcagyaagtgcccaggatattcatttgtgcacacatacaggtccaagcctgaagtgtgtagctctgaaaggaaaagccctatcttccctgaacaaactcttaatgattttacatttctctcagagcctgctctctaatgaatgttgacatttcacgcactgaaacacacaggaattctgtttgtggtcagcagctacaacatattcccaaggaaattaaattcaaaattgattgtgtgacagtcaaaaactggcccagaatttgaatgatttccttcaagcaaaatatagctgcctttcctactg

SEQ ID NO: 27017 - DNA, 600 bp, Chicken  19866894243728_2
cttaatgattttacatttctctcagagcctgctctctaatgaatgttgacatttcacgcactgaaacacacaggaattctgtttgtggtcagcagctacaacatattcccaaggaaattaaattcaaaattgattgtgtgacagtcaaaaactggcccagaatttgaatgatttccttcaagcaaaatatagctgcctttcctactgaaaaccagccaggttttagtaaaggcaaagcagaacgtgcaaatgtttttatggcttgctgcccctcgcaacagatagctgtaaaagcaaaaytgttcttctcctttccgacagaagaaatgccacaacatcaaaaactgtcagcaaacgggtagaaacagaccctccaaaatggcaacactccctgtgcaaagacctgacagaacggcaatgctgtgactctttccctccaccaagcaggagggactgccacgtatcagtgacttttttgtttaaattaagtcagacctacagccaaatcagctgcacatcattaagacttcatgccgtggattttatcatttctgggaggggatgaaggcaggaaagtgtttctgaaatccctgcaaagag

SEQ ID NO: 27018 - DNA, 599 bp, Chicken  19866894243734_1
  misc_feature (1)..(8): n is any nucleotide
nnnnnnnncccccacatacctaaaccacagacccaccctcagctcacacatcttggggacccccttggtagcaccccattctcctcctccatctccagagattccccacatacaaccaggatctgacctacgtcgagatgccagctgccatcaccgtgcccccagcctcccacttaccccactgccccccagtcccctgtcatctacaccacagtcagcactgatttaccgcgctgatgggcctccccaagtgtctcatttctggggtgtgtggaaggggacagacctcaaattccctgyttgggactccctgatgtcctgttctaaccacaaaccagataacctccccaaatctaacaatcccacattctcacgggtgcatcccaaatgcttcccagacacaccraatccctaaatgctcatctcttaccccaaagtccttctttatcccctcaaatctcttaacagtccctgagaccaccaaatcctctcccatccgctcccaaacaccaccaccattcctgtaagaacccctcatctgtcccagtctatccctcctctggagatccccagacaygtccctttgctccccttccatc

SEQ ID NO: 27019 - DNA, 600 bp, Chicken  19866894243734_2
cacatacaaccaggatctgacctacgtcgagatgccagctgccatcaccgtgcccccagcctcccacttaccccactgccccccagtcccctgtcatctacaccacagtcagcactgatttaccgcgctgatgggcctccccaagtgtctcatttctggggtgtgtggaaggggacagacctcaaattccctgyttgggactccctgatgtcctgttctaaccacaaaccagataacctccccaaatctaacaatcccacattctcacgggtgcatcccaaatgcttcccagacacaccraatccctaaatgctcatctcttaccccaaagtccttctttatcccctcaaatctcttaacagtccctgagaccaccaaatcctctcccatccgctcccaaacaccaccaccattcctgtaagaacccctcatctgtcccagtctatccctcctctggagatccccagacaygtccctttgctccccttccatctcccactgatgctcgatagatcccctatagattctccaaaatttcctgcccccttgtcatggaggaacaaaagcatgacactcctattctggtccagttttatcatt

SEQ ID NO: 27020 - DNA, 439 bp, Chicken  19866894243734_3
gggacagacctcaaattccctgyttgggactccctgatgtcctgttctaaccacaaaccagataacctccccaaatctaacaatcccacattctcacgggtgcatcccaaatgcttcccagacacaccraatccctaaatgctcatctcttaccccaaagtccttctttatcccctcaaatctcttaacagtccctgagaccaccaaatcctctcccatccgctcccaaacaccaccaccattcctgtaagaacccctcatctgtcccagtctatccctcctctggagatccccagacaygtccctttgctccccttccatctcccactgatgctcgatagatcccctatagattctccaaaatttcctgcccccttgtcatggaggaacaaaagcatgacactcctattctggtccagttttatcattggtcttttgg

SEQ ID NO: 27021 - DNA, 599 bp, Chicken  19866894243741_1
  misc_feature (1)..(6): n is any nucleotide
nnnnnnaggaattaaattccactcttgcttcatctgcacatccatgtcagatgccattttgtcagactacccatctgcaaccatctgtcacagcgaaatgctatggaatgtttgtgggaaggttcaactcctactgccatgccaccaacatccatctctgacgtcgtgggccaacacagtgaaataggaagcatctcttttgaagcagccctcgtatattttctccctgaaattggtggagaagggtatgacttcagaaatgcaatgtatggatgatgtaaaattcaatcctaccactaygaaaatgaaatgtgatgtcatcatattgttctttagatacttgaatgttaatgggtataagaggcccrgaagataaggtaaatatacacagtgaggtaaaagaaagacayaggctctggaaagatattttttctactttataacagggctgtttttctatttttcacatcaaaactcttaaatctgtgttgaccttgtatcctttcacaccttggagatctcagatgacgctgtcattcaggattgccatcttacatttgtgtcagtctgcctacttaatggtcctctcaaaatattat

SEQ ID NO: 27022 - DNA, 600 bp, Chicken  19866894243741_2
acccatctgcaaccatctgtcacagcgaaatgctatggaatgtttgtgggaaggttcaactcctactgccatgccaccaacatccatctctgacgtcgtgggccaacacagtgaaataggaagcatctcttttgaagcagccctcgtatattttctccctgaaattggtggagaagggtatgacttcagaaatgcaatgtatggatgatgtaaaattcaatcctaccactaygaaaatgaaatgtgatgtcatcatattgttctttagatacttgaatgttaatgggtataagaggcccrgaagataaggtaaatatacacagtgaggtaaaagaaagacayaggctctggaaagatattttttctactttataacagggctgtttttctatttttcacatcaaaactcttaaatctgtgttgaccttgtatcctttcacaccttggagatctcagatgacgctgtcattcaggattgccatcttacatttgtgtcagtctgcctacttaatggtcctctcaaaatattatttttaccattgcagttatcaaaaactccttatcagatcagaatacagccacctgctctatactgggcta

SEQ ID NO: 27023 - DNA, 600 bp, Chicken  19866894243741_3
tttgtgggaaggttcaactcctactgccatgccaccaacatccatctctgacgtcgtgggccaacacagtgaaataggaagcatctcttttgaagcagccctcgtatattttctccctgaaattggtggagaagggtatgacttcagaaatgcaatgtatggatgatgtaaaattcaatcctaccactaygaaaatgaaatgtgatgtcatcatattgttctttagatacttgaatgttaatgggtataagaggcccrgaagataaggtaaatatacacagtgaggtaaaagaaagacayaggctctggaaagatattttttctactttataacagggctgtttttctatttttcacatcaaaactcttaaatctgtgttgaccttgtatcctttcacaccttggagatctcagatgacgctgtcattcaggattgccatcttacatttgtgtcagtctgcctacttaatggtcctctcaaaatattatttttaccattgcagttatcaaaaactccttatcagatcagaatacagccacctgctctatactgggctaaccatgaaggccaagaagatgattcaactcatagaattcaga

SEQ ID NO: 27024 - DNA, 600 bp, Chicken  19866894243749_1
aatatatattatttggaaaactcctcaaatgtaccctttgactgtctgattctggtaaagtacgtgtgagttatttttcctactgtgattccctttgattttcccagcttccctttcctttctgaaggcttgacagactaaaagcctatgtccttcctgcttggctctttttctgctcatttccctcataccgttactttggtctttcctaaacaaatgccacatctcatggaaacaaactcaactcttacgtaaagggtttgaccattagcctcttgtcttcatgtcttctcagaagartgagttgagaactttgtccctcccaaagcatggaaaagagggagaggaaggtagttgatgtaaaggttgatgtaaacacaggagtttcaaaacttagttactagcgtggtgtwtgaaagtaatccatacatagtaagcatagttgaagctgtaactgcctgaaggtttataacataattgttaatggtaagattcatggggagtaatatttgtgtgagcaacttaagatttgcaatccacaacaaagtctacagatggagattagaaatttgcactgtggtgtatgtacattttcttaga

SEQ ID NO: 27025 - DNA, 600 bp, Chicken  19866894243749_2
tttcctttctgaaggcttgacagactaaaagcctatgtccttcctgcttggctctttttctgctcatttccctcataccgttactttggtctttcctaaacaaatgccacatctcatggaaacaaactcaactcttacgtaaagggtttgaccattagcctcttgtcttcatgtcttctcagaagartgagttgagaactttgtccctcccaaagcatggaaaagagggagaggaaggtagttgatgtaaaggttgatgtaaacacaggagtttcaaaacttagttactagcgtggtgtwtgaaagtaatccatacatagtaagcatagttgaagctgtaactgcctgaaggtttataacataattgttaatggtaagattcatggggagtaatatttgtgtgagcaacttaagatttgcaatccacaacaaagtctacagatggagattagaaatttgcactgtggtgtatgtacattttcttagactatatggtatatttttggtaaattggtgaagctgatggtcaaatactagtgacattttggattatgagttaagtcatgaatccatctttctgagaccatgactgttctcttt

SEQ ID NO: 27026 - DNA, 600 bp, Chicken  19866894243749_3
ggggagtaatatttgtgtgagcaacttaagatttgcaatccacaacaaagtctacagatggagattagaaatttgcactgtggtgtatgtacattttcttagactatatggtatatttttggtaaattggtgaagctgatggtcaaatactagtgacattttggattatgagttaagtcatgaatccatctttctgagaccatgactgttctctttttttccctctgcatagcttcctgccctctctttggtcttcacctaacttttctcctttttatgtatatttaatctgtgagtgcrttgcaggtgctctgtgttttaaccccatycttgttctttgtgcaagaacaggaattcaatcatcacctctctccagggaaacaataccttcaaggtagaaacatcttctggttctccaggagtcaaacaagtcttgtaaaatataggctctctctgtccacttctgaagggattttctatctgtaagcagatttgaaacagcaagcaacagccacaagatatactggatcttaattagaggagaaaagaaaagtaaaacatgcctttgtgtatatcgaatcagtagtgcagtggagtaag

SEQ ID NO: 27027 - DNA, 600 bp, Chicken  19866894243749_4
gatttgcaatccacaacaaagtctacagatggagattagaaatttgcactgtggtgtatgtacattttcttagactatatggtatatttttggtaaattggtgaagctgatggtcaaatactagtgacattttggattatgagttaagtcatgaatccatctttctgagaccatgactgttctctttttttccctctgcatagcttcctgccctctctttggtcttcacctaacttttctcctttttatgtatatttaatctgtgagtgcrttgcaggtgctctgtgttttaaccccatycttgttctttgtgcaagaacaggaattcaatcatcacctctctccagggaaacaataccttcaaggtagaaacatcttctggttctccaggagtcaaacaagtcttgtaaaatataggctctctctgtccacttctgaagggattttctatctgtaagcagatttgaaacagcaagcaacagccacaagatatactggatcttaattagaggagaaaagaaaagtaaaacatgcctttgtgtatatcgaatcagtagtgcagtggagtaagttgtcctccaaataaacatcttaaagtca

SEQ ID NO: 27028 - DNA, 469 bp, Chicken  19866894243749_5
ttcaaggtagaaacatcttctggttctccaggagtcaaacaagtcttgtaaaatataggctctctctgtccacttctgaagggattttctatctgtaagcagatttgaaacagcaagcaacagccacaagatatactggatcttaattagaggagaaaagaaaagtaaaacatgcctttgtgtatatcgaatcagtagtgcagtggagtaagttgtcctccaaataaacatcttaaagtcaagtaaggacagaaaagtccaatatagagcttgctgtctcagctgacacagatctctgcrttgtctgctgaggtggctgctgtatgtgttgactgagttgccatacttgcataattccaccactaagccttaatgggtgtcactgcaagtgtaaccctagatataaaaaagcagaatctaactttaagaatgagggtatgtgatttcaatatcatccagacttttattt

SEQ ID NO: 27029 - DNA, 600 bp, Chicken  19866894243751_1
acacccctcaccagctttgttgcccttctctgaacatgctccagggcctcaaagtctttcttgcagtgaggggcccaaaactggacacagtactcgaggtgcggcctcaccagttgcagagtacagggggacaattacttcccagttcctgctggcaacactgtttctgatgcaagccaggatgccattggccttcttggctacctgggcacaccgctggctcatgttcagtctagcgtcagtcaacaccgccaggtctgtttcctctacacagtcttccagccactctgccccaagccygtagcgttgcctggggttgttgtggccaaagtgcaggacccggcatttggtcttgttgaacctcatcccattggcttcagcccagctatccagcctgttcagatcccttgctaccatcaggcaggtcggcacttccagccaacttggtgtcatctgcaaacttacttactgagggtgcactcaatgccctcatccaggtcaccaataaagatattgaagatattgaataagtgttttcsttcttgttttgaattttttgcaactacagttttatcctataatatttcaagccaaaaagtc

SEQ ID NO: 27030 - DNA, 600 bp, Chicken  19866894243751_2
cagtcaacaccgccaggtctgtttcctctacacagtcttccagccactctgccccaagccygtagcgttgcctggggttgttgtggccaaagtgcaggacccggcatttggtcttgttgaacctcatcccattggcttcagcccagctatccagcctgttcagatcccttgctaccatcaggcaggtcggcacttccagccaacttggtgtcatctgcaaacttacttactgagggtgcactcaatgccctcatccaggtcaccaataaagatattgaagatattgaataagtgttttcsttcttgttttgaattttttgcaactacagttttatcctataatatttcaagccaaaaagtccaacctctatttccagttttgttctcttaatgtcattttcttgagaatttttaagaaaggacaaccatgtttcagcaaaatattagcaatgaagtatcccaaartttacatcaagggggaatgtaacatattcatgtcttcccaccagtgctttgagatatataattagtcatgttccaaaataaataaatagatagatagatggatagatagatagatagatagataaaatgcaggat

SEQ ID NO: 27031 - DNA, 600 bp, Chicken  19866894243751_3
cccttgctaccatcaggcaggtcggcacttccagccaacttggtgtcatctgcaaacttacttactgagggtgcactcaatgccctcatccaggtcaccaataaagatattgaagatattgaataagtgttttcsttcttgttttgaattttttgcaactacagttttatcctataatatttcaagccaaaaagtccaacctctatttccagttttgttctcttaatgtcattttcttgagaatttttaagaaaggacaaccatgtttcagcaaaatattagcaatgaagtatcccaaartttacatcaagggggaatgtaacatattcatgtcttcccaccagtgctttgagatatataattagtcatgttccaaaataaataaatagatagatagatggatagatagatagatagatagataaaatgcaggattgaaacaataaaacacaagaagtggagacagtatctacttctttgtccaaataaaagtcacacaagaaaaattaattcaatgtgagcctgtactgcctatgaaacagtaatgctaaagtcagatagcacagttgtatggaagtcattgatgcatgaaagaaaata

SEQ ID NO: 27032 - DNA, 446 bp, Chicken  19866894243765_1
ttagacaagacaaaatagcatttcttgccatgggagagcagctatcctcaagctcctcactagtgtgaagagcaatgcagctgtatgagttgtggtttagctgagaaatcccctggttaggataagtaatccttttctctaggaacacaaatgccttttcccgtggccctcctctgctttcctccatgcatcttcttacacacacacccagccccacctccaccaccagcactcaaacactgcagatgcaatcactttgcttcatcattaccatttttttccttatatgcatgaagaaarcgaggcacaaaaatacattaagatttgccaaaatcacatgctgtgtgtaaggaagaaataagcttacctcttgaccccaagcctgacagaaacttccttctaagagtttttcactctgaacttctttggaaagaggataaactaga

SEQ ID NO: 27033 - DNA, 599 bp, Chicken  19866894243766_1
  misc_feature (1)..(102): n is any nucleotide
nnnnnnnnnnnnnnnnnnnnnnnnnnnnnnnnnnnnnnnnnnnnnnnnnnnnnnnnnnnnnnnnnnnnnnnnnnnnnnnnnnnnnnnnnnnnnnnnnnnnnnttgcagctttcttacatccctcaagtcacaggtttcacatcttcctccactagctgcctgcaatgcactcgtcggctccagtcatctctgcagccaccgttcctctgatgtcctatgctcctacacccatagcagcctatggcacactggagatgcccatttctctccaccccccatgtagaaagcccggacatgcarcacagacaccactgcacgccgagaactccatcctgccccaaccacagcagcacagcacggcttaattcattacagcctgcaaaccgccttgagatcctcccctgctctgcaaccccagggctgctatttgcttaaccccgccgagcagacggggcaggcacccaaagccgcagcagcactggctgctccagccggccccacggagcagcagcagatgcattggctgctgcggaacaacaacttccttctttctttttgctcgagttagctggggtttaggctgagatttcggttacgtt

SEQ ID NO: 27034 - DNA, 600 bp, Chicken  19866894243770_1
ttgacaaaatctaattgaacacgattttaaagagaattatcacaagccaacaataccattcttatatttcctgctctgctttgttaaacttgttctcctacagtgaagatacactggatgtgggtgcgcatctccatgcgtttgcccgggctgcgtaaagaccatacgacctatttcgtatgacacgaagcaggataaaattagaatgaagaagggtcaaaagagggaccatttggcctcccagggcccttaaggggcagggggagaaactgagcagcacgagtctgtaactctggcccrctgccctggcggagttgcctgtgcccatgggctgtgcctgcatgcccgctgagggaggggagcctcactgtgttccacccacgttcccggctggagcggcgagcagcgggttcctttcggggataatggagccttttaactgccgtgcctcgcttgatgtatgaaggtagattcacgaggagttcccataacattttgctggtggtttaatcattaccgagagaaaaggctaaagaatgcagagaacaggacgctgcacttgtcctttttttcgggggtggtgttttcttctgtttttaa

SEQ ID NO: 27035 - DNA, 555 bp, Chicken  19866894243771_1
atctgagttggccagatcagtgttagctggagtcacggccaatatcaaacagttttctcgagagatgaactgcattatcatgtctctgatctgttgctcaatatctggaggctgatcccctactggcactttagtgattcccggcaagtcaataagagtcaggcttagtactgtatagagaacacagagtcacagcgctggttagcatgccagacacatctaaagagatctacacacgtatggctctagacagattttagtcacataaaatcttgtacaatgttgatacacttataaaascagttatcagtggttcaaataaaccacttgacagtctgaaaagtatacttgttaccatagttgcttccctattggtccttcatttggatttaagagtactaaatattttaaacattacaactggtataggcaaatgatacttatatggaataccactgaaggctcttaggcaaatgaatatggctttctgagctttttccatcaactgtagcacagttaacaggccattcatatttcatacttcaatccacagaa

SEQ ID NO: 27036 - DNA, 600 bp, Chicken  19866894243779_1
tgctggagggggccagcagtgtgccctgacagccatgagggcaagccacactttgaggtgtgataaacacagcatggctagctggtcaaaagtggtgatcctctcaatatatttagcactggtaaagcctcacgcttgatgttgagtgcagttctgagttccacaatataacaaggatgttaaagttcttgaaagcatccagagaagggcaccaaagctatgacagggctggaggaactgctgtgaaaagggactgagggcacctgggctgcctagtctgctggtgatctcactgctctmtgcagctcctgagcaggggacacagagagagctgccaggctctgttcctgggaaatgacggtagaatggaatgcagaggggagggtcaggctgaacatcaggaaacatttcttcaacacgagagaggtcaaatgctgggacaggcttcttagtgaggtgctggtgcctcatgcccatcagtgttcaagaaacatttgggcaatgctactaattacactttaacttttgattatccctgatgtgatcacgtggttggacttggtgatctttgtagatttcttccaactgaactattctatt

SEQ ID NO: 27037 - DNA, 600 bp, Chicken  19866894243780_1
tatgcatcttccagctttaacaaaactggcagttatcagcacttagttgttcactgacaacaggattactatttaaggaacatatctgagaacatgagtatacaatggatctatgaaagctttaagcaaaatccatatgatcagatttaaacataatcctggtaagattttcccacagtactgtcactgaatttacactgaatttaaatcagcagtgctacaaaatgactgtatcttccatggaactcagtattagttttctttcagtttaatcaatgtgaacatagaaactcttaaatrtactttagatttgttcataggacatgaaaggtcaaaggaaaattctgtgggataagggaaataaatctgaaaatatgttctttttgcatcacgaggcctgcttttgcagccctgaagatttagtattctgctatttgtcatgcaaacaacacggcacggcaatgtgcatttgagtaaaaaacagtaagcatagcaagcatgcagacatatcatgacaaaaaagcacatttggctatcactgtggataggacaaactgaacagaactcactgcagcattgctcaagtacagtctcaataat

SEQ ID NO: 27038 - DNA, 600 bp, Chicken  19866894243784_1
gctttcttgtcagccttaggagctggtatctctttgctttccttgtctctgattcaggcgcaggtaggtgcatggacttggattctactcccaacttgaccaaagtctattacttgacagagggattttgatatgctccctgagcagcattacagtgagaaaagcacatcagcatattgtaatccttcattttgttcccctgaagttctttgaccttagctgttccgtagcaaatgaagtactgaaaactttcgcatgcaattgagccaaactccttgactgaacttatttttttctaayagagaaaggaaggtaccagcagtttttataaaaaaatcaattgtgatttactccagtctttcttgctcctctacccatacattttcagtcacaaggcccatcagtttagatttccttctcgtgaggaaccataatattctgttagcagggcttagttttatttactcttcgagaaaggataaattaacgtgctttttcattctatgtacactaaaattttagctccaaagctgctttagcgtgccattcagctcacaattttgtctaagttacatttttcttaataatcatagaatcata

SEQ ID NO: 27039 - DNA, 600 bp, Chicken  19866894243795_1
cttgtactaaagccacatctattttaacacccttaccattcaactcatgaaatttatgatgggtatgcacatcctgcagaactcagatttcaactcagcccttcgaagataagactatttaaaaaccagtctgtgagaagattatgatgtcctagcaatggcatctggctctcttcagaagtgaaattttattccccttgattgctgaatattttctaatagtttggttaattctcctactgattaaagtgcatgtttctagaaaggaaataaaatgaattaactgacattagatgatgraaatctatcatataatgaaagttgtgtcatgagagcaaarcttttgaggcatcatctttctaatgagaagttatacattgcaacaagataactccctttctgatttgtcagtgtttacagatttggctccacctaactacctcatttgaaccaaaacttttaatattattttaagtgtttattcaaattaaaaccccataagtttcagctctgtatttcagaaagttgaatatcatacttaatggaatttatctctctggtggtacgcagaattcaatgtattctctcaaaaatcatagc

SEQ ID NO: 27040 - DNA, 600 bp, Chicken  19866894243795_2
caactcatgaaatttatgatgggtatgcacatcctgcagaactcagatttcaactcagcccttcgaagataagactatttaaaaaccagtctgtgagaagattatgatgtcctagcaatggcatctggctctcttcagaagtgaaattttattccccttgattgctgaatattttctaatagtttggttaattctcctactgattaaagtgcatgtttctagaaaggaaataaaatgaattaactgacattagatgatgraaatctatcatataatgaaagttgtgtcatgagagcaaarcttttgaggcatcatctttctaatgagaagttatacattgcaacaagataactccctttctgatttgtcagtgtttacagatttggctccacctaactacctcatttgaaccaaaacttttaatattattttaagtgtttattcaaattaaaaccccataagtttcagctctgtatttcagaaagttgaatatcatacttaatggaatttatctctctggtggtacgcagaattcaatgtattctctcaaaaatcatagcaacaactgtacagtgagtcagagtgtagaatttgcatatg

SEQ ID NO: 27041 - DNA, 600 bp, Chicken  19866894243796_1
tagaagaaaaaaaattatgtctttaggctgaaacctatatgccattcagatgcatttttattcttatgctattaaatcagtaggatagaatatttaggatgtaatgtctgtatttgaacagtggtattataattactctttgtggcgtgctttctagagtaaactcaataacttgttagagtagacttaatacattatgaaactaaggtaattccttaaacatatacaccttttaatttataattttgagtgagatgttaggacaacgactgtagcagttgttactgaataataatatcrcctgaaactgtattgtatttagtattttcaacagacaaaacaaggcgtagggtaatctaaaattagattttatgtttaatctagcttgtgtctggtttaagagattttgtctttaaaattaaaatatacatttaagctaaggcgtattttctccattttaatttccaaaagctaaaaatgtttacatttcttagatgaaattctcttatacttttctgaagattttagagaactctttttcaagttatgttctttattgctttgctcttagcaaaaatagaggttacattgatcattctg

SEQ ID NO: 27042 - DNA, 600 bp, Chicken  19866894243799_1
tgcagatttgcaaagagtttatttaaaactgaagaggcgacaatcacacgacaactaatttggttactgatgtgcgtgtgattctccggctggcgtttggtttcatgctgtgggtcagcaaggcgtgatgcaaagcagtggaggctgcttaagtcctaccgcagttaagcaatgttacagagcttattcagacagaagcgtgaaacagagagggaacaaaacctgaatgcacaatttgaatattgtactagctgatctttgcatatagtaagtaatgcaaaacaaaagcgttctgttgargaggtgaaatatgttgaaatactctcttcttaaaaaactatatttttggatgcttgggaaagtattttgacaattgtagtcttatctcgcattagatttttcaggtgtcaagaatgtcaggaagaaaatcttcctttcttccagcgttttgatttcttgtaggggttttgtgttaaataatgtcatgctgatgaggcttattgggagaacaaagaaaaaaaaaagatcttccttttccatttttaattaagacgttaagaatacaaaacagttgctgcttcactttcactccattgctgc

SEQ ID NO: 27043 - DNA, 600 bp, Chicken  19866894243799_2
ttagggtaaaggaggcacacagccgtttctagatttctcccactcttcccaattaaggaatgaaactggcaacctgccaagaatattgttcttccagtgtttccataaagcacaacccaagggttgtgctagaaaaatacaagaatcaaagtgcagaatcgagctctagtgtggcagttttgcacagggcctgtatccctggactacatatctccctgtgctgaggaggctgggaatgcactgcagtgtgcccctacctgctggctggagctctgccttccccgtttaatgcaggtgccwggtctaaagttccatgaattttccctgcatttcgtgcagtggtagctgcagccaaaagcttaaaccctgtgcacacagggcaggttctcagcaagcgtgaattgatgctgygtacycccatcaacagagctttgcctgctcatgcaaactgaggatgcaggcaataccttcagacagaagcatccttccctttttgctcactcagtttcaaaaaaaaccagctgatggcaggagtctcctcccaccctctgttggtagctcctggtaggcaagtgatgattaacatcagcagataagtgg

SEQ ID NO: 27044 - DNA, 600 bp, Chicken  19866894243799_3
acaacccaagggttgtgctagaaaaatacaagaatcaaagtgcagaatcgagctctagtgtggcagttttgcacagggcctgtatccctggactacatatctccctgtgctgaggaggctgggaatgcactgcagtgtgcccctacctgctggctggagctctgccttccccgtttaatgcaggtgccwggtctaaagttccatgaattttccctgcatttcgtgcagtggtagctgcagccaaaagcttaaaccctgtgcacacagggcaggttctcagcaagcgtgaattgatgctgygtacycccatcaacagagctttgcctgctcatgcaaactgaggatgcaggcaataccttcagacagaagcatccttccctttttgctcactcagtttcaaaaaaaaccagctgatggcaggagtctcctcccaccctctgttggtagctcctggtaggcaagtgatgattaacatcagcagataagtggttgtttagagaatatagggaattattcttcccaaaggcaacacgggtggtaattctgcgaaacagagaggagagaagagctgctagaaggctgctgcccagtgcttaaaca

SEQ ID NO: 27045 - DNA, 600 bp, Chicken  19866894243799_4
ccaagggttgtgctagaaaaatacaagaatcaaagtgcagaatcgagctctagtgtggcagttttgcacagggcctgtatccctggactacatatctccctgtgctgaggaggctgggaatgcactgcagtgtgcccctacctgctggctggagctctgccttccccgtttaatgcaggtgccwggtctaaagttccatgaattttccctgcatttcgtgcagtggtagctgcagccaaaagcttaaaccctgtgcacacagggcaggttctcagcaagcgtgaattgatgctgygtacycccatcaacagagctttgcctgctcatgcaaactgaggatgcaggcaataccttcagacagaagcatccttccctttttgctcactcagtttcaaaaaaaaccagctgatggcaggagtctcctcccaccctctgttggtagctcctggtaggcaagtgatgattaacatcagcagataagtggttgtttagagaatatagggaattattcttcccaaaggcaacacgggtggtaattctgcgaaacagagaggagagaagagctgctagaaggctgctgcccagtgcttaaacataggg

SEQ ID NO: 27046 - DNA, 600 bp, Chicken  19866894243799_5
gaagcatccttccctttttgctcactcagtttcaaaaaaaaccagctgatggcaggagtctcctcccaccctctgttggtagctcctggtaggcaagtgatgattaacatcagcagataagtggttgtttagagaatatagggaattattcttcccaaaggcaacacgggtggtaattctgcgaaacagagaggagagaagagctgctagaaggctgctgcccagtgcttaaacataggggaaattatttgaacttaaaatacagatgtgaaatgatggtggtagcaaacacacttaaawcggtgaatgaatgaaaaaaagaacacaacagttcctgtgatcggttgcacacgttccaaattgccgcttagttctcaccacttccccaartacacattgcctggggactratggtgaaccatccacacgacagaacaaaacacacagccatcccctttctgttccttcccattaaaatgtattttctgaagtttctctgtggacagttcttaagacttgatgttatcagtggatacgttttttttttttccattttaaacctattgtatcgttctgtttattatgttttctagtgtgagc

SEQ ID NO: 27047 - DNA, 600 bp, Chicken  19866894243799_6
aggcaagtgatgattaacatcagcagataagtggttgtttagagaatatagggaattattcttcccaaaggcaacacgggtggtaattctgcgaaacagagaggagagaagagctgctagaaggctgctgcccagtgcttaaacataggggaaattatttgaacttaaaatacagatgtgaaatgatggtggtagcaaacacacttaaawcggtgaatgaatgaaaaaaagaacacaacagttcctgtgatcggttgcacacgttccaaattgccgcttagttctcaccacttccccaartacacattgcctggggactratggtgaaccatccacacgacagaacaaaacacacagccatcccctttctgttccttcccattaaaatgtattttctgaagtttctctgtggacagttcttaagacttgatgttatcagtggatacgttttttttttttccattttaaacctattgtatcgttctgtttattatgttttctagtgtgagcagatcgtatttatttgagaaaaatgtttgctgtttaaaaaaccaataattgtattgccaaaaatagctgtaattacctgtgacatctgta

SEQ ID NO: 27048 - DNA, 600 bp, Chicken  19866894243799_7
cagcagataagtggttgtttagagaatatagggaattattcttcccaaaggcaacacgggtggtaattctgcgaaacagagaggagagaagagctgctagaaggctgctgcccagtgcttaaacataggggaaattatttgaacttaaaatacagatgtgaaatgatggtggtagcaaacacacttaaawcggtgaatgaatgaaaaaaagaacacaacagttcctgtgatcggttgcacacgttccaaattgccgcttagttctcaccacttccccaartacacattgcctggggactratggtgaaccatccacacgacagaacaaaacacacagccatcccctttctgttccttcccattaaaatgtattttctgaagtttctctgtggacagttcttaagacttgatgttatcagtggatacgttttttttttttccattttaaacctattgtatcgttctgtttattatgttttctagtgtgagcagatcgtatttatttgagaaaaatgtttgctgtttaaaaaaccaataattgtattgccaaaaatagctgtaattacctgtgacatctgtatttttttattttgggtggga

SEQ ID NO: 27049 - DNA, 600 bp, Chicken  19866894243803_1
agctgagcatgtatcctgcaccgtctgtccaccaaacagcactcagaaggacccgcagtgcagacatagtgtttctgggcagacgtgctacacttcatctgccacatctgctgcgttatttgcatttcaggcctctctcccggccctctattagtcagataagaaatgaaacatgcaatatattagaaatacacatcatacatttggttaacttgctcctcagctctctgagacttctaaaattcgcacaaataacgaagcaccagagctttttcctctttaaagcacttgctagagacrctgctaagcaccaggtgagaaggttctgcaggctgcagggaatcaggagcctcaggctgaaagaactggagattgttaagtagaagcctctaagaatcaaaacattttaatatttgcgtgctttaccgccttctgacttggcttgacagcctcatctacccgctgccatgggctacctttatcaatgattgatcttcatctcccttccgaccttgtggggaaagccggacagaatatagacttttattttatataacaacaaggctgcctgtaaaagaggctgccatgtgttgaacactc

SEQ ID NO: 27050 - DNA, 600 bp, Chicken  19866894243805_1
gagcattatccacattagcctctttcaatgattggttacagttaaacatgagtaccacactcctgtaaaagccagcaaatagcctaacttccagagctggattcttggcttactcatcatctccacagagccaaaagccaacaggagatgttaggttgcaattctgatcatcatctactgcttataattttcctgaccctcagagagaaaaatatcacacagcgcaggcagagagcaggagacaccaagatgcactgagctgttttatggtcacagtctctgcaggctcacccttgaaawtgcagcgtggttgggtacactggggactgacasawctccttaagatcacagctggmgcatcagttggatagttaagctatacccacctgagtagggtttatttggagcacaatgctcagaataaagacaataggtacccagcccctgccctgaagattgtttttcacacaaaaagaatacagtcaggttcttggctggttgaaatccatggttgtacctacacagtcctttctcaatactttctttttgatgtaaaaccctgatcttctaagaccaaggatccagatctacagcgtccct

SEQ ID NO: 27051 - DNA, 600 bp, Chicken  19866894243805_2
ggttacagttaaacatgagtaccacactcctgtaaaagccagcaaatagcctaacttccagagctggattcttggcttactcatcatctccacagagccaaaagccaacaggagatgttaggttgcaattctgatcatcatctactgcttataattttcctgaccctcagagagaaaaatatcacacagcgcaggcagagagcaggagacaccaagatgcactgagctgttttatggtcacagtctctgcaggctcacccttgaaawtgcagcgtggttgggtacactggggactgacasawctccttaagatcacagctggmgcatcagttggatagttaagctatacccacctgagtagggtttatttggagcacaatgctcagaataaagacaataggtacccagcccctgccctgaagattgtttttcacacaaaaagaatacagtcaggttcttggctggttgaaatccatggttgtacctacacagtcctttctcaatactttctttttgatgtaaaaccctgatcttctaagaccaaggatccagatctacagcgtccctataaaaagtccattgcacttcagtgcaatatgc

SEQ ID NO: 27052 - DNA, 600 bp, Chicken  19866894243805_3
ttacagttaaacatgagtaccacactcctgtaaaagccagcaaatagcctaacttccagagctggattcttggcttactcatcatctccacagagccaaaagccaacaggagatgttaggttgcaattctgatcatcatctactgcttataattttcctgaccctcagagagaaaaatatcacacagcgcaggcagagagcaggagacaccaagatgcactgagctgttttatggtcacagtctctgcaggctcacccttgaaawtgcagcgtggttgggtacactggggactgacasawctccttaagatcacagctggmgcatcagttggatagttaagctatacccacctgagtagggtttatttggagcacaatgctcagaataaagacaataggtacccagcccctgccctgaagattgtttttcacacaaaaagaatacagtcaggttcttggctggttgaaatccatggttgtacctacacagtcctttctcaatactttctttttgatgtaaaaccctgatcttctaagaccaaggatccagatctacagcgtccctataaaaagtccattgcacttcagtgcaatatgctg

SEQ ID NO: 27053 - DNA, 588 bp, Chicken  19866894243805_4
acactcctgtaaaagccagcaaatagcctaacttccagagctggattcttggcttactcatcatctccacagagccaaaagccaacaggagatgttaggttgcaattctgatcatcatctactgcttataattttcctgaccctcagagagaaaaatatcacacagcgcaggcagagagcaggagacaccaagatgcactgagctgttttatggtcacagtctctgcaggctcacccttgaaawtgcagcgtggttgggtacactggggactgacasawctccttaagatcacagctggmgcatcagttggatagttaagctatacccacctgagtagggtttatttggagcacaatgctcagaataaagacaataggtacccagcccctgccctgaagattgtttttcacacaaaaagaatacagtcaggttcttggctggttgaaatccatggttgtacctacacagtcctttctcaatactttctttttgatgtaaaaccctgatcttctaagaccaaggatccagatctacagcgtccctataaaaagtccattgcacttcagtgcaatatgctgatccacaaa

SEQ ID NO: 27054 - DNA, 600 bp, Chicken  19866894243807_1
agctcttagaagcatgttcatctgggctttggatggtgcaaagtaagggaaagggtcagcaggctgcagggcgggcccagcagtctgaacggcgctgtgacccctggtgctgtcctgggaggaagagggggctctgagctcctgctgggtgctgaggctgcagggcctgggagtgctgcccacacacaacactgtgttgcacacacagcagctggcagcagttgtcctgtattgaggaactgtttccttatgtctgtttgatttctacttcctctgtgcttcctctagcagaatgaaaaygtcatctggcacatctttgtgggagagttgctgcctgttgtgtcaattggtaaaagggggaaaggatagcaaagcagtccttgacctccttgggtcggagaggacattactccaccccgtatgtatgacagccagtggagcacagtctgccacccacttctgcatgagcttaaatggtttgcaagatcaatgtcttagaggccaaattttgcatttaaaagaaagtatcagaaaatgtcaaaatggtggtttcagttggctttggctttttgttcccctgtaataatgtgtgtacagtct

SEQ ID NO: 27055 - DNA, 599 bp, Chicken  19866894243813_1
  misc_feature (1)..(132): n is any nucleotide
nnnnnnnnnnnnnnnnnnnnnnnnnnnnnnnnnnnnnnnnnnnnnnnnnnnnnnnnnnnnnnnnnnnnnnnnnnnnnnnnnnnnnnnnnnnnnnnnnnnnnnnnnnnnnnnnnnnnnnnnnnnnnnnnnnnncctcctttgcctgcatgatcccgattctctcaatggagagcgagtgaatgttagtgtttaccaaggagtaaatactttattgtatcaatgtgtttacaagctcacgcagatttcaaggtaccagagaaggtcctggaggtccctctcactgtcgctgaagggaagaayggcaaggcagagggaagagagcaaaagatagaaaggaaaaaaaaaaaaaaaaaaagaattaagaagctaataacagagaaagctcactgcctgggctatgtctcttgctgtgtttgaatgatttttctttgtagacagctttgcacactactatttttagaatctctttaataattgagctgtagcgattgtgctcagcagttagaacaggcagggaaaatagcatctcaaagaaacagtgcgccagggtaataatttaaatcaaactgcattatactgcatcgccttctcccccttcc

SEQ ID NO: 27056 - DNA, 600 bp, Chicken  19866894243815_1
atccactatgggatggccttcagcaggagcttcctggatgcgcccatcaggaatgcgtcaggaaagagtggcaacgggctgctggcgatgaacctgcacaacaacgaggctgggaggcaggtacgtgttgctgctgggcatgggagccatggttagcttcgttctgtttgcagatggcatcaatcaagtgaggatggcccttgactgcaggtatgagtggcaagaactgggctgacacctccaaagtcaacacttacaaacccagaatcaagttgttcttacctcagtaactaaatttcktgggttcaaataaaatccacaaaayaygagttggttcaggagcgctgatcaaagtgcycacaaatagacagttggtactctattccatagcaaactttagtctcattatcagaatactacttgaagatttttwtcccttattatctgtaatattccattattgcttgggtttttaattctttctaatgatgaatgaacagactcactggagaccatcactcatttgggatccacagtctggggtcctcatctgtgggcaacagcctaggattaatgaggaaaaggagatttaaccttttc

SEQ ID NO: 27057 - DNA, 600 bp, Chicken  19866894243815_2
ggagcttcctggatgcgcccatcaggaatgcgtcaggaaagagtggcaacgggctgctggcgatgaacctgcacaacaacgaggctgggaggcaggtacgtgttgctgctgggcatgggagccatggttagcttcgttctgtttgcagatggcatcaatcaagtgaggatggcccttgactgcaggtatgagtggcaagaactgggctgacacctccaaagtcaacacttacaaacccagaatcaagttgttcttacctcagtaactaaatttcktgggttcaaataaaatccacaaaayaygagttggttcaggagcgctgatcaaagtgcycacaaatagacagttggtactctattccatagcaaactttagtctcattatcagaatactacttgaagatttttwtcccttattatctgtaatattccattattgcttgggtttttaattctttctaatgatgaatgaacagactcactggagaccatcactcatttgggatccacagtctggggtcctcatctgtgggcaacagcctaggattaatgaggaaaaggagatttaaccttttcttatgaaagatgagttggaaatgac

SEQ ID NO: 27058 - DNA, 600 bp, Chicken  19866894243815_3
agcttcctggatgcgcccatcaggaatgcgtcaggaaagagtggcaacgggctgctggcgatgaacctgcacaacaacgaggctgggaggcaggtacgtgttgctgctgggcatgggagccatggttagcttcgttctgtttgcagatggcatcaatcaagtgaggatggcccttgactgcaggtatgagtggcaagaactgggctgacacctccaaagtcaacacttacaaacccagaatcaagttgttcttacctcagtaactaaatttcktgggttcaaataaaatccacaaaayaygagttggttcaggagcgctgatcaaagtgcycacaaatagacagttggtactctattccatagcaaactttagtctcattatcagaatactacttgaagatttttwtcccttattatctgtaatattccattattgcttgggtttttaattctttctaatgatgaatgaacagactcactggagaccatcactcatttgggatccacagtctggggtcctcatctgtgggcaacagcctaggattaatgaggaaaaggagatttaaccttttcttatgaaagatgagttggaaatgacag

SEQ ID NO: 27059 - DNA, 600 bp, Chicken  19866894243815_4
caggaaagagtggcaacgggctgctggcgatgaacctgcacaacaacgaggctgggaggcaggtacgtgttgctgctgggcatgggagccatggttagcttcgttctgtttgcagatggcatcaatcaagtgaggatggcccttgactgcaggtatgagtggcaagaactgggctgacacctccaaagtcaacacttacaaacccagaatcaagttgttcttacctcagtaactaaatttcktgggttcaaataaaatccacaaaayaygagttggttcaggagcgctgatcaaagtgcycacaaatagacagttggtactctattccatagcaaactttagtctcattatcagaatactacttgaagatttttwtcccttattatctgtaatattccattattgcttgggtttttaattctttctaatgatgaatgaacagactcactggagaccatcactcatttgggatccacagtctggggtcctcatctgtgggcaacagcctaggattaatgaggaaaaggagatttaaccttttcttatgaaagatgagttggaaatgacagtcctaccttgaagcagcctgctggctagggc

SEQ ID NO: 27060 - DNA, 600 bp, Chicken  19866894243815_5
ctgggcatgggagccatggttagcttcgttctgtttgcagatggcatcaatcaagtgaggatggcccttgactgcaggtatgagtggcaagaactgggctgacacctccaaagtcaacacttacaaacccagaatcaagttgttcttacctcagtaactaaatttcktgggttcaaataaaatccacaaaayaygagttggttcaggagcgctgatcaaagtgcycacaaatagacagttggtactctattccatagcaaactttagtctcattatcagaatactacttgaagatttttwtcccttattatctgtaatattccattattgcttgggtttttaattctttctaatgatgaatgaacagactcactggagaccatcactcatttgggatccacagtctggggtcctcatctgtgggcaacagcctaggattaatgaggaaaaggagatttaaccttttcttatgaaagatgagttggaaatgacagtcctaccttgaagcagcctgctggctagggcactagccaaaacaaacagagaaggttggcttcaaacagatcttcttccacgtgaattcaaagccctggtagcaga

SEQ ID NO: 27061 - DNA, 599 bp, Chicken  19866894243816_1
  misc_feature (1)..(185): n is any nucleotide
nnnnnnnnnnnnnnnnnnnnnnnnnnnnnnnnnnnnnnnnnnnnnnnnnnnnnnnnnnnnnnnnnnnnnnnnnnnnnnnnnnnnnnnnnnnnnnnnnnnnnnnnnnnnnnnnnnnnnnnnnnnnnnnnnnnnnnnnnnnnnnnnnnnnnnnnnnnnnnnnnnnnnnnnnnnnnnnnnnnnnnnnnctgcttttttttggtctatttacagaatcattcttaagcatcaggttttttgacaactgaaacttgattttccttgaacttcttttcagtggtgaagatgcatgaagtagaaggraagacagatggatcttctccaactgagagggttattgctcaccaaacacgtttccaccagagagacatttatgttttctggctgagagttagaagcaaccataaatacatggtaagccagtcactgctgttcagcracgcttctgttaatttgcatagggcctatctaatgatgctggcctataaaacacaaagattacatctcctgaatcactctctgttctgaaaatgactcatagttccaaaagattggtttaaacttaaacaaaagcgagaaggtgcaagagaaatacaatgaac

SEQ ID NO: 27062 - DNA, 599 bp, Chicken  19866894243816_2
  misc_feature (1)..(49): n is any nucleotide
nnnnnnnnnnnnnnnnnnnnnnnnnnnnnnnnnnnnnnnnnnnnnnnnnctgcttttttttggtctatttacagaatcattcttaagcatcaggttttttgacaactgaaacttgattttccttgaacttcttttcagtggtgaagatgcatgaagtagaaggraagacagatggatcttctccaactgagagggttattgctcaccaaacacgtttccaccagagagacatttatgttttctggctgagagttagaagcaaccataaatacatggtaagccagtcactgctgttcagcracgcttctgttaatttgcatagggcctatctaatgatgctggcctataaaacacaaagattacatctcctgaatcactctctgttctgaaaatgactcatagttccaaaagattggtttaaacttaaacaaaagcgagaaggtgcaagagaaatacaatgaacctatctacattatgtttgcttttcgcaatgtatttatagtgaaacttttgttccagcaaagtcgcaggctgtccccggggctttgcacaaagccctgagtcttcattccttcattcctatgtttaagcttccagaa

SEQ ID NO: 27063 - DNA, 600 bp, Chicken  19866894243822_1
taatgtgtcagttctggcttaaactgtcaagcaggtaatatttctttttttgctaaaaaagtaattactagtgaggtaaaggatgggcttaggcatccagaggtttaaaatgacatgaagtatttggtgctgctattatgagtggtgatttatcccagcagatccagaaggctggtggaatgaaagtattcctggatgctgttactgcttaccatgcataaaatccctcaaagagaaatatctgaactgcactaaagaatagcactggaaagaaaccaagtatgggtggtttcttacaaygtatgagttcctcctttcattctgtttctgttttctccttgaggattccagtaaactatcattaatatttacagctgaaaaattgggttcactcagtttttagaactgtaaactgttgacctataattgaagtgtatgcgagattgtttggctggttgcacattttcacaatgacaggttttcttgttgagtgtgaaaactaaatgccagtgtttaagtcacaagtgcgcctcgccaacctttgcaggtagatgcacagagctctctttaaggcgatgtcagagccacatggcataaagc

SEQ ID NO: 27064 - DNA, 600 bp, Chicken  19866894243822_2
tttctccttgaggattccagtaaactatcattaatatttacagctgaaaaattgggttcactcagtttttagaactgtaaactgttgacctataattgaagtgtatgcgagattgtttggctggttgcacattttcacaatgacaggttttcttgttgagtgtgaaaactaaatgccagtgtttaagtcacaagtgcgcctcgccaacctttgcaggtagatgcacagagctctctttaaggcgatgtcagagccacatggcataaagcagtaattgatgtgactgatctgcacgtgaaytcttcatggtgtaagatgaatagcagtgaaattgcaaaagctacggtaatgaggcakgttgtattttaggccattttgctggatgtacactgctgcagattgccttgctttatgttatgatacatagtaaaaagtgtccagacataaactcaacattttatcttcagtttattttaaattggcttccaaactgttcagtattttggaacggggattttatcagaagtgcaagttgtcttttatgcacactgtactaagaaagggacataaacagatatgtatatatttatacacaaattg

SEQ ID NO: 27065 - DNA, 600 bp, Chicken  19866894243822_3
tcactcagtttttagaactgtaaactgttgacctataattgaagtgtatgcgagattgtttggctggttgcacattttcacaatgacaggttttcttgttgagtgtgaaaactaaatgccagtgtttaagtcacaagtgcgcctcgccaacctttgcaggtagatgcacagagctctctttaaggcgatgtcagagccacatggcataaagcagtaattgatgtgactgatctgcacgtgaaytcttcatggtgtaagatgaatagcagtgaaattgcaaaagctacggtaatgaggcakgttgtattttaggccattttgctggatgtacactgctgcagattgccttgctttatgttatgatacatagtaaaaagtgtccagacataaactcaacattttatcttcagtttattttaaattggcttccaaactgttcagtattttggaacggggattttatcagaagtgcaagttgtcttttatgcacactgtactaagaaagggacataaacagatatgtatatatttatacacaaattgtttatttatttgtttgtttactttttataaaacttgattctcaacaaaagttggtgg

SEQ ID NO: 27066 - DNA, 600 bp, Chicken  19866894243825_1
accctttttctatgtgtgactccattggcatcccttattgctttcttcctcaaggtgtggttgggctgttcttagcagatcttgctaaactcccgttctgtgttatctgtatgtacacacaccacaccataccaacctttccatttcattgttagctcgatgtttgtgaacttgtaggaagttgtgtgcaataggcacgatatatagatccagataagaggtgcatgggtgtaagtaggagttaaaggccaagtgttcagtagttaaatacatgttaactgcatgagtggagtaaaatcmtgagttcttttggaagtgggagaggctttatgcatcctctttaagtgttgtccactttatttgtcctgtttgtggggtaggtaggcaacctgctgttagaacctgctttaactatgtgtatgtgtagggtatttctaaatatacaaaagctgtggaaaaagggctgttaatttacttgcagttttgttctacttgtattggaaaagatcacattaaacttgtttttaatgagtaagggaagtgattaggcttcagatagagactgctagagcagttgtcgaagaaacttactattggcct

SEQ ID NO: 27067 - DNA, 599 bp, Chicken  19866894243832_1
  misc_feature (1)..(1): n is any nucleotide
ncctgtctgtccggtctcactgaatggcagctcagccttcctgtgcattggccgctcctcccactttcatataatcagcaaacttgctgagggtgcactctatccactcatccaggtcacggataaagatgctgaacaagacaagacccagtagctatgatgacagagagcagcttggcaatcacttctgccagctccctcagcactcttgggcacatcctgtcagagcccatggatttgtggacgtcacgcgtgcctaggcaaactctgaccagatcctccttgaccaagggtacgttytcccctccctaggccctctatttatctccagagtctggaattgctgagaggcagtcttagcaatgaagactgaagcaaggagggtgttcactaactcctccttctcagtgtcctccgttaccagggcacacactctgaaaatacttacaaacatatccaccrtgatatattacagggagccttgccagggactcggtatgagcacttgtctgtgagctgtgaaacataaatctaactaatttacctgaaagtaaacaagaagacaggattgaacgatcaaagaaaagcttttaggcaca

SEQ ID NO: 27068 - DNA, 600 bp, Chicken  19866894243832_2
acagagagcagcttggcaatcacttctgccagctccctcagcactcttgggcacatcctgtcagagcccatggatttgtggacgtcacgcgtgcctaggcaaactctgaccagatcctccttgaccaagggtacgttytcccctccctaggccctctatttatctccagagtctggaattgctgagaggcagtcttagcaatgaagactgaagcaaggagggtgttcactaactcctccttctcagtgtcctccgttaccagggcacacactctgaaaatacttacaaacatatccaccrtgatatattacagggagccttgccagggactcggtatgagcacttgtctgtgagctgtgaaacataaatctaactaatttacctgaaagtaaacaagaagacaggattgaacgatcaaagaaaagcttttaggcacaataaaatgagatgattggatcattttccgaaacaggggtataattaaattttaaaatctctgtgctgactgtcaattccatttgaaacttggatgcttctgagaaaaggagaaaggataactgaatacagtgtgcacatccctacttttatcctacctccatg

SEQ ID NO: 27069 - DNA, 599 bp, Chicken  19866894243833_1
  misc_feature (1)..(210): n is any nucleotide
nnnnnnnnnnnnnnnnnnnnnnnnnnnnnnnnnnnnnnnnnnnnnnnnnnnnnnnnnnnnnnnnnnnnnnnnnnnnnnnnnnnnnnnnnnnnnnnnnnnnnnnnnnnnnnnnnnnnnnnnnnnnnnnnnnnnnnnnnnnnnnnnnnnnnnnnnnnnnnnnnnnnnnnnnnnnnnnnnnnnnnnnnnnnnnnnnnnnnnnnnnnnnnnnnnttactatttgtggttagaattgaaatcttcagatgagtgtgtgaatggatgatcacattgtgcctcctatatgtcctgagtacactgagracttcaaataaaacttgtattttatgacagttttgaacagtcttatacatcacagaagataaagttttaccttaaatttgatctgaaacaccagcaatcatacaactataactttcatggttcaatttgttaccaaaaaagacctcagagtcacaacctctggtgaaggtttttccaggcaggggcattctgctgccgacaacagaggtggcaggtgggcaggagctgcactgtttcttttggctccggagggctcaggactttagcccaagatcatagtgagctctggtatctggtag

SEQ ID NO: 27070 - DNA, 567 bp, Chicken  19866894243833_2
taccaaaaaagacctcagagtcacaacctctggtgaaggtttttccaggcaggggcattctgctgccgacaacagaggtggcaggtgggcaggagctgcactgtttcttttggctccggagggctcaggactttagcccaagatcatagtgagctctggtatctggtagcctctgagggaagtcccaccacttccctttgtgccctgctgttcccctcctctgcctctgctcctgctcatcctgctctgcacagcctctgttactcacaacaaccttctgcaggccacttccagcagtayggcagagaactgtctgctttgcctttttgcaaggtcagttttgtgccggactagtgagctgccgcatcttatggcaattcagatgaataccagagctggcacgagctgaataatgaatgtaaatagctagggttgtgcaggaaagggattttgaaggggaaaaatgagatttccatctttcagcattggtggccagtaggattgaccttttatttccccttctcatgcaacttcatcacgcagctgcccaagatgcactgctgcagg

SEQ ID NO: 27071 - DNA, 600 bp, Chicken  19866894243849_1
agtacttccttaaggagtttatggaattactttttctagataactcttcccaaagtgattgtcagctgtaagtcaaattatatttgagctgcatttttttctgtctgaatcagaactaagtgacacagcactgatttagactgattacagcttaatccaactaccaagtcacaacacagaccctattcttaaagaaatgtatggtactgatttcttaagatggaaattgtagcacacagtaacagatgtttaaattgctctctgtgaggacctgcacattcagattaagtgctgaaaatktctatgtttctctttcatttgctcatctcccacttgccttaaacatttagaagaattttcagggctgatcctycaatgactatgcgtacaccataatcgagtagcattaagctattgctttcatcaacattgctgtggtttctgattactcacagaataaagaactttgcaattactctgggtagacagagaggcagagtcatggctaaaatctatttttttgtggctttgcaggtcattctcgatggactgatagccttcccaagttgatgacttcaaaacaataatgctgaactgcac

SEQ ID NO: 27072 - DNA, 600 bp, Chicken  19866894243849_2
caaattatatttgagctgcatttttttctgtctgaatcagaactaagtgacacagcactgatttagactgattacagcttaatccaactaccaagtcacaacacagaccctattcttaaagaaatgtatggtactgatttcttaagatggaaattgtagcacacagtaacagatgtttaaattgctctctgtgaggacctgcacattcagattaagtgctgaaaatktctatgtttctctttcatttgctcatctcccacttgccttaaacatttagaagaattttcagggctgatcctycaatgactatgcgtacaccataatcgagtagcattaagctattgctttcatcaacattgctgtggtttctgattactcacagaataaagaactttgcaattactctgggtagacagagaggcagagtcatggctaaaatctatttttttgtggctttgcaggtcattctcgatggactgatagccttcccaagttgatgacttcaaaacaataatgctgaactgcacgctatgaatcttgtgcaagtttcctctgactcatgctgttccataaatacttaacggacatttgattcagaaa

SEQ ID NO: 27073 - DNA, 600 bp, Chicken  19866894243852_1
aaattttttactcaaaaggtggtgaggtcctagcaaagggtgcccagagaagctgtagatgcctcatctctagaggcactcaatgacaggttggatggggcactgggcagcctgctctagaggctggcaactagaggttggaactatatgatctagaggttggaactatatgatcttgaaggtcctctccaagctaagtcattttatgattctaagattctataattgctggtctcactatcaagccctgaggaacaccacttgtcaatggtctctgcctgaacagtgagctgctgaccrtagctctttgagygtggccaactgacaagtggttcatccaataaatccaaatctgttcaatttggagacaatgatattgtgcagaacagtgttaaatactctgcacaagtcgaggtagatgacatcagttgctctcctgcctcatctgccaaagccacagcagagttttcaggaggatctgctccgtgatattgctgggcacaggggtgagaatgactggctgaaaaatgcatacaacaaacagcatcctcaactttagacacctgagtaaaaaatgttacagaatacttctacagaaaa

SEQ ID NO: 27074 - DNA, 600 bp, Chicken  19866894243852_2
aaaaggtggtgaggtcctagcaaagggtgcccagagaagctgtagatgcctcatctctagaggcactcaatgacaggttggatggggcactgggcagcctgctctagaggctggcaactagaggttggaactatatgatctagaggttggaactatatgatcttgaaggtcctctccaagctaagtcattttatgattctaagattctataattgctggtctcactatcaagccctgaggaacaccacttgtcaatggtctctgcctgaacagtgagctgctgaccrtagctctttgagygtggccaactgacaagtggttcatccaataaatccaaatctgttcaatttggagacaatgatattgtgcagaacagtgttaaatactctgcacaagtcgaggtagatgacatcagttgctctcctgcctcatctgccaaagccacagcagagttttcaggaggatctgctccgtgatattgctgggcacaggggtgagaatgactggctgaaaaatgcatacaacaaacagcatcctcaactttagacacctgagtaaaaaatgttacagaatacttctacagaaaattgtgtggtttct

SEQ ID NO: 27075 - DNA, 600 bp, Chicken  19866894243853_1
ctagttccttgctgcatataccttctgtgaagttcagaggttatttttgcattttgtgatagagctgtcaagtcctagacatcaaataacacacatagcactgatttttgccatcatattgagtaaggtagctggggtgcgagaggctcttgcaccctttaaaaacccttgcaggtggctcacatctatagtgtgcacgttgtgtgattcagcacttatggttagttggtaattgtacgagcattaagagcagggcaacagcctccactcactttgtttggggttgatgggcaatactgrtgtcgtgtgttaccatagaaagcgctagatatatgcttttaatagatttctggcatcttcagttatgagaaatatgaaacgctttctgtgagcaactaatatgagatggagattttttttgtgttgctgtagcttctcttgctgactttagaaattatctaaagcaaatcacatccttatgagctgctgcttagattaaacgtctttggagtatgcattatctgaacacttgcactgatacagtattaayaatcttaaagggcataaagatttgattgtgattctgtgaatgccaagatt

SEQ ID NO: 27076 - DNA, 600 bp, Chicken  19866894243853_2
cagggcaacagcctccactcactttgtttggggttgatgggcaatactgrtgtcgtgtgttaccatagaaagcgctagatatatgcttttaatagatttctggcatcttcagttatgagaaatatgaaacgctttctgtgagcaactaatatgagatggagattttttttgtgttgctgtagcttctcttgctgactttagaaattatctaaagcaaatcacatccttatgagctgctgcttagattaaacgtctttggagtatgcattatctgaacacttgcactgatacagtattaayaatcttaaagggcataaagatttgattgtgattctgtgaatgccaagattcatatgcatttccttttattttcaagactgtgtagaacttcatcctttattttgggatgatgctggtggaggaggaggaaataaattatattccgaatctgctgaaatgcgttttgaaactgggaaatgagaccaattaatctccacagtggtgtgtaggcaggagggactatttgttgtatgacagcctgctctcagaatgggaaacaaagtaggttgtttgtgtctttttatgtctttgtcccagttt

SEQ ID NO: 27077 - DNA, 600 bp, Chicken  19866894243853_3
ttcacgacgcttatttttgaactttatactggagacaatgttcacattccattcagtcttttaaagcaccaagaagggagaattagtcagctgttctttgtttttatttccctgactcttgaacagggtccaggcttgctcctgaggtttttcatctggatcagtctgagtaaaacagaacttcttgcgactgaaaaccctttatttgcaaaaggttatgataaccaaaagaagccaagctccccaatttcttgttttggaggtgagaagttgaaccagctttgtggagttcagttcacrttaaaggaggtttgtaggacgctaatttaaaaagtaaaacaaaaaaagaaagctatcatgttagtgccttagcagagcatgccaggatgctgttgctaagatgatgcatggtgattctggcataaatagttactggagcagacctaccctaaggagtcccaatcctttctctcctgtataggaacaaatcaattattctaaggaggcagtgttgtctctcgatgctgttgtgttgctttttgaaaacgttttgtaagttagtccttaagtgggataattgctttcagcatttgcaagtta

SEQ ID NO: 27078 - DNA, 600 bp, Chicken  19866894243853_4
ccaggatgctgttgctaagatgatgcatggtgattctggcataaatagttactggagcagacctaccctaaggagtcccaatcctttctctcctgtataggaacaaatcaattattctaaggaggcagtgttgtctctcgatgctgttgtgttgctttttgaaaacgttttgtaagttagtccttaagtgggataattgctttcagcatttgcaagttaaatgaagaaagctctaattagattttataaagtggcttagcatgttgagaaggcttttcataaagtatactgtgtatttgyttggcgttgcgcaactgaattttgtgaggcgctgacaaaactaaaagatcctgtttggccatggctgcttctaggcacttaaaagattgaaaccttgtcttaggtactcctagctatatgtactctgttcttttccctacatcctttgggttggttatttctatctagagtctggagcagttgcagtcaagactatgctgcttgaggactgtattgttaaagtagggaacagaagcttggtattctgcaccacttgaaaatggtgccatggcacacagtgtttgatctgtcttgattgtt

SEQ ID NO: 27079 - DNA, 600 bp, Chicken  19866894243853_5
acagcattggcataaatggagggactggccaaagcagcttaacacattgttagccatctgaataagaatttagcctggtcaaaagcttctttcacgtgtggtttctgcagtgtgtgtgccagaagcttcatggtgagaactggaaagtgttcccaaagccagtgtttattcagatcatttgggcactgttgcttgatatgacttactagagtctattttaactggctgtgctgtttggagagtaatgcctctgctaactcagttgattggttcttagaattatagaatcattaaggttgraaaaaacctctaagaccatctagtccaactgtcaacttattgccaccatgtccctaagttcaacatctactcatgaagcttaatttgcaaaagcatttatcacatgtgctaggaaccttggagataacagttcagtgaaactagacctaaaggaagtactacttaatggaaagtcctgcattgatctgcaatcacttgtgattaccccaagataaggtaaatgcaggctagccggaattttctttgacttttactctgctcagtaagacttgactttgcttaatcttctaggtttatcag

SEQ ID NO: 27080 - DNA, 445 bp, Chicken  19866894243853_6
atgtgctaggaaccttggagataacagttcagtgaaactagacctaaaggaagtactacttaatggaaagtcctgcattgatctgcaatcacttgtgattaccccaagataaggtaaatgcaggctagccggaattttctttgacttttactctgctcagtaagacttgactttgcttaatcttctaggtttatcagtgtgcaggtgaaactctttattatctccagatttttgggaatggtaggtagtatgttttgtgggctagcaggtaccaaaattaataattaataattaatgctrtcagtttatttttgatggtaaggcccagattttaacgagactgtagatatttctagtgcaacataccttatggcgttaastaatagatcatggaccagtctmcatctgagcaggaggagaaaaaagggttgttctgccctctctg

SEQ ID NO: 27081 - DNA, 365 bp, Chicken  19866894243853_7
atctgcaatcacttgtgattaccccaagataaggtaaatgcaggctagccggaattttctttgacttttactctgctcagtaagacttgactttgcttaatcttctaggtttatcagtgtgcaggtgaaactctttattatctccagatttttgggaatggtaggtagtatgttttgtgggctagcaggtaccaaaattaataattaataattaatgctrtcagtttatttttgatggtaaggcccagattttaacgagactgtagatatttctagtgcaacataccttatggcgttaastaatagatcatggaccagtctmcatctgagcaggaggagaaaaaagggttgttctgccctctctg

SEQ ID NO: 27082 - DNA, 343 bp, Chicken  19866894243853_8
cccaagataaggtaaatgcaggctagccggaattttctttgacttttactctgctcagtaagacttgactttgcttaatcttctaggtttatcagtgtgcaggtgaaactctttattatctccagatttttgggaatggtaggtagtatgttttgtgggctagcaggtaccaaaattaataattaataattaatgctrtcagtttatttttgatggtaaggcccagattttaacgagactgtagatatttctagtgcaacataccttatggcgttaastaatagatcatggaccagtctmcatctgagcaggaggagaaaaaagggttgttctgccctctctg

SEQ ID NO: 27083 - DNA, 600 bp, Chicken  19866894243856_1
ggtgtggcaagaagagcatacgttatgattctatacatcattttcgttcagcaaagaacataaatagacccagaaaagaagaacgcagaaaaagtactctacaaccgcaaagtttagtgttcaatcagacaaggacaaaattgcggtcaaaagaaaataaatttcaaaaaaaatttcaaaatcttacagtgtcttcatcaggactctcatgaagatgctgatacttccatttgtctcctatgtgcgtaacaaatagctttccctacaaataagcagggagatctactgccacccttactrccatgcagcatttttcttctgagacattttctctcaacattccctttttatcctacacacacccagtgagtcatgcaggccaacaactactaacttacagcttccactctcctgtcatggaggtgatgataagaagttcaaggttttactgtttgtcaaactaccttggctttctatacctccccgaaccaaacttctaatttatttacttggctacagagaagaataaattaaaagtaactgggtttgtcttatgctcaaatccctttacgctcagctacagttgttcgtaagcaggtg

SEQ ID NO: 27084 - DNA, 600 bp, Chicken  19866894243859_1
gaatctccacacaaacaagcagattgtagttaaactcattttttttggaaaaagaattctatttcatgcacattttcttgcagatgaggaaaaaacacaaataaaaataaagagttcctggcccagttccaaattagggtttaaaaattcatgcccgccataagaatttatataacttctgaataatttataggctgcgccaataacaagggacttaatatctgatagagattatttaatcaatagacaacagtgcagtgaaaaagctgtcaaagaattacgtgtcagtcagagctgggmagcttttaactctttccctgctatacatatgttgttacatatatacrcctgagagaacattttgcagagtgatagcatggaggaggagttgccagggtttgtttttttctaaagaattttctttggcagtttccttctggacagtcacttgctgaatcaccacagctttaaaatgtgatgagttttctagctcttagcagaaaggagtaggtattttctcatgaatcatctccagggaattttgggctacggtgagatgattcagacttcatcaggatgggtgatgatgcctascatatg

SEQ ID NO: 27085 - DNA, 600 bp, Chicken  19866894243859_2
gaaaaagaattctatttcatgcacattttcttgcagatgaggaaaaaacacaaataaaaataaagagttcctggcccagttccaaattagggtttaaaaattcatgcccgccataagaatttatataacttctgaataatttataggctgcgccaataacaagggacttaatatctgatagagattatttaatcaatagacaacagtgcagtgaaaaagctgtcaaagaattacgtgtcagtcagagctgggmagcttttaactctttccctgctatacatatgttgttacatatatacrcctgagagaacattttgcagagtgatagcatggaggaggagttgccagggtttgtttttttctaaagaattttctttggcagtttccttctggacagtcacttgctgaatcaccacagctttaaaatgtgatgagttttctagctcttagcagaaaggagtaggtattttctcatgaatcatctccagggaattttgggctacggtgagatgattcagacttcatcaggatgggtgatgatgcctascatatgtcatttgtggtacggcccctttggtttgtgtatgattttggggctgg

SEQ ID NO: 27086 - DNA, 532 bp, Chicken  19866894243859_3
ctgggmagcttttaactctttccctgctatacatatgttgttacatatatacrcctgagagaacattttgcagagtgatagcatggaggaggagttgccagggtttgtttttttctaaagaattttctttggcagtttccttctggacagtcacttgctgaatcaccacagctttaaaatgtgatgagttttctagctcttagcagaaaggagtaggtattttctcatgaatcatctccagggaattttgggctacggtgagatgattcagacttcatcaggatgggtgatgatgcctascatatgtcatttgtggtacggcccctttggtttgtgtatgattttggggctggactttgtgaaatagataaagaggtttttacatgtatgagcaccaatatatacgaagacaggaaaaaactaaagatgtatctgtttttataagggggattcctagctgacctatatcacttgcctcgataattgcttagatatctgtatcaactccaaattgtcttaatgcatgccccgt

SEQ ID NO: 27087 - DNA, 599 bp, Chicken  19866894243864_1
  misc_feature (1)..(51): n is any nucleotide
nnnnnnnnnnnnnnnnnnnnnnnnnnnnnnnnnnnnnnnnnnnnnnnnnnncctttttgtttgatcgctgtttgctttgcaaatctccctgctctcaccgttcccggctgccttcaaacaagcccgcacgtgcgggtagatgggagggaaatggggctctgtgtcattccttctgcaggaacaggaaaggtttgggtgttcccgaggccctggggtcagggtgaggggttggtggctgctgggaccgctgttgtccccattgctgtgcatccaagcgggatggcgctcagggagcaaacycgctcccgtctgagcacagttatctgcagagggagaaaagtccacccgtccactcacctaagaaataggttgtgtcagcaatttgcagggccgggctttaatctgctcttaaggcaccggcagacaggagcagaggggacgttgctttctcctcccttgcagacgcagcgctctgcagcagccgccctggggaccctttttggagcaggcggtgccatgcatgcgctgggcgctctggctgcgctctcagtgctgggctggaccaagggcagcaaacggcagagtgtggctctgcagag

SEQ ID NO: 27088 - DNA, 599 bp, Chicken  19866894243868_1
  misc_feature (1)..(40): n is any nucleotide
nnnnnnnnnnnnnnnnnnnnnnnnnnnnnnnnnnnnnnnngccttgtgttttgaggaaggagggtttcttttcttttcccaaattgtagaggcacttagctagtttctggcattctggcaatggcaaactgcacgttagcacttctatcttctgctaaggatctcaggttttgaatacttaaactgaatattcaacaaatagccaccgcagaagggaggtgttaaagaccacaacagcaacagaaatgaatggtgccatgaagaataggaagtagctgaatgtggctctgaggagtgatycaatacagtattctgtgtaaaatctttgttttgtttcaaatacaggtgtaaagcacaaatcctttttaacagctgaagattgctttgagctgggaaagattgcatacacrgaggccgattactaccacactgagctctggatggagcaagctctgaarcagctggatgagggagaagtgtcttctgcagataaagtctatattctggactacctgagttatgctgtgtatcagcagggggatctgagcaaagcaatgatgctcaccaagcgccttctcgaactgggtacgtacaggaga

SEQ ID NO: 27089 - DNA, 600 bp, Chicken  19866894243868_2
cattctggcaatggcaaactgcacgttagcacttctatcttctgctaaggatctcaggttttgaatacttaaactgaatattcaacaaatagccaccgcagaagggaggtgttaaagaccacaacagcaacagaaatgaatggtgccatgaagaataggaagtagctgaatgtggctctgaggagtgatycaatacagtattctgtgtaaaatctttgttttgtttcaaatacaggtgtaaagcacaaatcctttttaacagctgaagattgctttgagctgggaaagattgcatacacrgaggccgattactaccacactgagctctggatggagcaagctctgaarcagctggatgagggagaagtgtcttctgcagataaagtctatattctggactacctgagttatgctgtgtatcagcagggggatctgagcaaagcaatgatgctcaccaagcgccttctcgaactgggtacgtacaggagagagctgaggctcagcaagatgtagccctgtggttgagcaggtgttacccagggatttgttctgagaactcttggtcttactgatttcctgccttgtgtacaggttttttaa

SEQ ID NO: 27090 - DNA, 600 bp, Chicken  19866894243868_3
ggatctcaggttttgaatacttaaactgaatattcaacaaatagccaccgcagaagggaggtgttaaagaccacaacagcaacagaaatgaatggtgccatgaagaataggaagtagctgaatgtggctctgaggagtgatycaatacagtattctgtgtaaaatctttgttttgtttcaaatacaggtgtaaagcacaaatcctttttaacagctgaagattgctttgagctgggaaagattgcatacacrgaggccgattactaccacactgagctctggatggagcaagctctgaarcagctggatgagggagaagtgtcttctgcagataaagtctatattctggactacctgagttatgctgtgtatcagcagggggatctgagcaaagcaatgatgctcaccaagcgccttctcgaactgggtacgtacaggagagagctgaggctcagcaagatgtagccctgtggttgagcaggtgttacccagggatttgttctgagaactcttggtcttactgatttcctgccttgtgtacaggttttttaaaatgaaatgccaaaacaatctgtgctttcgtaaatatcccactgatgg

SEQ ID NO: 27091 - DNA, 600 bp, Chicken  19866894243868_4
acctgagttatgctgtgtatcagcagggggatctgagcaaagcaatgatgctcaccaagcgccttctcgaactgggtacgtacaggagagagctgaggctcagcaagatgtagccctgtggttgagcaggtgttacccagggatttgttctgagaactcttggtcttactgatttcctgccttgtgtacaggttttttaaaatgaaatgccaaaacaatctgtgctttcgtaaatatcccactgatggactgtgtgaagaacataaacataatctgtatatccaaggccagtgagaaccrtgtattagtgaactgaagctttaaatttatttttttttaaggttaatgattgccaaaacgttggtcactagaaatgttaattcccaagctgttaagcttaaagccagtcatgctgtcccagctctgcctgcccattgcaatttccttgtccctcctgctctgctcgggttggcccggaatggccaaaccctgcytattgtgcttggaaacctgcacgtactggaggatcctggcctcacagtaattgttttcttaactgtgaatgaattgagctttgctctggcagctcatgttattttc

SEQ ID NO: 27092 - DNA, 535 bp, Chicken  19866894243868_5
ttttaaaatgaaatgccaaaacaatctgtgctttcgtaaatatcccactgatggactgtgtgaagaacataaacataatctgtatatccaaggccagtgagaaccrtgtattagtgaactgaagctttaaatttatttttttttaaggttaatgattgccaaaacgttggtcactagaaatgttaattcccaagctgttaagcttaaagccagtcatgctgtcccagctctgcctgcccattgcaatttccttgtccctcctgctctgctcgggttggcccggaatggccaaaccctgcytattgtgcttggaaacctgcacgtactggaggatcctggcctcacagtaattgttttcttaactgtgaatgaattgagctttgctctggcagctcatgttattttctactggctatgctgcaggctagcattcttctaccctagttttggaggtttcagttactctgtgaatactctcagaccagaatagatggtttctgatttctgtttgagaagaaatgatgtgcatctgctg

SEQ ID NO: 27093 - DNA, 600 bp, Chicken  19866894243869_1
ggactgtcctagtgtcactgagtgaagcactgatattctttatttgaatataatcttttataatcttagacactgttcaattgaggggagagtaaagcatgagcaattgaaaaaatatatgcctggacttcaaaattaaatctgaaaactgtaattcttcagatggggatcatgtaactatcaagtctgcatttctgctctgctgagaagacctttgtacctatgaagagcctgcaaagcctaatgagaagatagatctaggtaggactcaatgtggttatgtttaatttttaataaaarattggcagttttgaattttgttacagactagtttttttaaatcaagtttggagatactgttagttttaaagcattatgttctgaattatcagaacagctttaatggaaattcaaattagtaatagaagaattccttggttttttttttttttttccttaggcatatagaatttagatcatatttagacagactggatttaaagctaagggaaattaaatagcatttttaaaaatccagaggatctggtataacatctattctcatatgcaggtgatcctcaaagaaaccagttgtactgt

SEQ ID NO: 27094 - DNA, 600 bp, Chicken  19866894243878_1
ggctcctacccagtgtgggactcaggttcctttccccaagagggctggctgtgaggctgccgttcttccctcgcatcccgctatttgagatgcaattttgttgtcatccacaatttcagtgcttttcagagcgctgcaaatcccttgttagaagagttgtcataaaagtcaattttactgggagcagtcataagagctcacaggcgtgttgctatttccatctgccgggatcaagtgggctcccaccgcagctgctttcattgtgctttcttcttaaaattcaggatcttgtgggggggraaaaaaaaaaaaagaaaaatatttatttttaaatttcagataggatgaaaagaaataaagggagagytggrtctgagcgtcctccctgggaagcagtgtaattttatctaaagccaaattgttctcatcaaaaatggatttaatgttggtttgctttctgaaggaccaaatgggtttgatgcctgtctgagcttagttgtgtccttctatacctccagccttcacctctgaccctgctgctcggtgtttcttcaccaagaaaccttcaatctcagctgctgcctacctcgctcacgttgt

SEQ ID NO: 27095 - DNA, 600 bp, Chicken  19866894243878_2
gctcctacccagtgtgggactcaggttcctttccccaagagggctggctgtgaggctgccgttcttccctcgcatcccgctatttgagatgcaattttgttgtcatccacaatttcagtgcttttcagagcgctgcaaatcccttgttagaagagttgtcataaaagtcaattttactgggagcagtcataagagctcacaggcgtgttgctatttccatctgccgggatcaagtgggctcccaccgcagctgctttcattgtgctttcttcttaaaattcaggatcttgtgggggggrraaaaaaaaaaaagaaaaatatttatttttaaatttcagataggatgaaaagaaataaagggagagytggrtctgagcgtcctccctgggaagcagtgtaattttatctaaagccaaattgttctcatcaaaaatggatttaatgttggtttgctttctgaaggaccaaatgggtttgatgcctgtctgagcttagttgtgtccttctatacctccagccttcacctctgaccctgctgctcggtgtttcttcaccaagaaaccttcaatctcagctgctgcctacctcgctcacgttgtt

SEQ ID NO: 27096 - DNA, 600 bp, Chicken  19866894243878_3
ccctcgcatcccgctatttgagatgcaattttgttgtcatccacaatttcagtgcttttcagagcgctgcaaatcccttgttagaagagttgtcataaaagtcaattttactgggagcagtcataagagctcacaggcgtgttgctatttccatctgccgggatcaagtgggctcccaccgcagctgctttcattgtgctttcttcttaaaattcaggatcttgtgggggggraaaaaaaaaaaaagaaaaatatttatttttaaatttcagataggatgaaaagaaataaagggagagytggrtctgagcgtcctccctgggaagcagtgtaattttatctaaagccaaattgttctcatcaaaaatggatttaatgttggtttgctttctgaaggaccaaatgggtttgatgcctgtctgagcttagttgtgtccttctatacctccagccttcacctctgaccctgctgctcggtgtttcttcaccaagaaaccttcaatctcagctgctgcctacctcgctcacgttgttttcaattctgatgttttagctttcaggataagccagtaaatcctagttccattttgctgttttctg

SEQ ID NO: 27097 - DNA, 600 bp, Chicken  19866894243878_4
cgcatcccgctatttgagatgcaattttgttgtcatccacaatttcagtgcttttcagagcgctgcaaatcccttgttagaagagttgtcataaaagtcaattttactgggagcagtcataagagctcacaggcgtgttgctatttccatctgccgggatcaagtgggctcccaccgcagctgctttcattgtgctttcttcttaaaattcaggatcttgtgggggggraaaaaaaaaaaaagaaaaatatttatttttaaatttcagataggatgaaaagaaataaagggagagytggrtctgagcgtcctccctgggaagcagtgtaattttatctaaagccaaattgttctcatcaaaaatggatttaatgttggtttgctttctgaaggaccaaatgggtttgatgcctgtctgagcttagttgtgtccttctatacctccagccttcacctctgaccctgctgctcggtgtttcttcaccaagaaaccttcaatctcagctgctgcctacctcgctcacgttgttttcaattctgatgttttagctttcaggataagccagtaaatcctagttccattttgctgttttctgctga

SEQ ID NO: 27098 - DNA, 600 bp, Chicken  19866894243882_1
acgagcattccaaatcttccatgctctgtgctttgcttctggacctcatcttcttcaccactctcacaagaggaatctcctttatctcctgcatttcagaaaggaacagacgaatgctgggcaggaaatacaagagggtctctctggacagactgagcagcaggaaaagacattaactccaaaaaaagccccaaagaaacacttgtacttttttctaggagaattcaaaatgcagtcactctctctccctcccaaagaactttgtgtactctgtttctttagcatgaattcagtcagcaktaaggatggtgttgtgctgctagcagggatctgagcatctgcagaggtaggggaagcaccagattcatgataactggataaaattcagacttgataacagattaaaaattatcatgataacagataaaattacaggaggacaccccctttagcaccctgtggggcaggttccttttgtctatggacctgaatgcatgggaggtcacctgcaaacacatgaagacaacccccactggtgtattccatgctgaccagtcaacagcaaagaaacaggaaataaaataaggtgcaaagcattca

SEQ ID NO: 27099 - DNA, 600 bp, Chicken  19866894243902_1
gtattttttacaagaacattaacccatcgcctgacgctgcagacctaccaaggctgccccaaaatcacaagctttattgaaccactatgaattgacaaaatatttacagtaaaataattttccataaaatacgctgtactgcagcatgataatgaagagatataggacaggctttaagatgcaatgtactttcatctgaaaagtctcctgaaattctttgaacgtttccaggggattaatgaggtattttgacaacacacaagaagtgtctggttttcaagaagccttataagagggaayattcacatccttggaaattaaactgtgtattttaagccactaaaaataacacaattattaaaaatttggcagctctgaagaaaaataccagaagatactagcaaacacatggaactactgaagagcgtcaaacttgagtacacatattttacagcctttcaacatgacttaaacaccaattttaacagcttaattgaatgtttcttattaaaagctatcacagatgaactaaaataaggagctaaactagctagagtgtaactaaatcaaacccattattccttgcaattgcagtggatt

SEQ ID NO: 27100 - DNA, 600 bp, Chicken  19866894243909_1
catcactcccctcgtgccgtcccaggcagcacacacgccccataacgtgcactcactggagttttctcaggcccatggaggtcatgtggaagatctgcatagcgcattccaaggcgtgggtgatctcgtgggccagcttttctccaggaaatccaaacacgcagaggaaggtgcagccctgcaaagaagaggtgcaatacatcttgttctacaataccgatggccagcagctgatgcattccaccgcaggcaccggggagaccagcggagcttcaggtcaacccacagatcccagcagcygggcagagcggcttcccattcccctgctgccaaacaggcagrggcaccccaggggtgcgatggctgtcacgcactcactttgtcaaacagaagagttttgttgatttcacccttgtgagggctgatgatgcctgaaatcgtgttgctgcagtcaccgaggctgctgctgagctcgattgcgttgatcctgtcagcaaacttcagctggacaaagaggctggtgacgggccgtagctcagagcacagctccagcggcacgtcatcacgaagctgcaagagcagagcacaacagctttgcca

SEQ ID NO: 27101 - DNA, 600 bp, Chicken  19866894243909_2
taacgtgcactcactggagttttctcaggcccatggaggtcatgtggaagatctgcatagcgcattccaaggcgtgggtgatctcgtgggccagcttttctccaggaaatccaaacacgcagaggaaggtgcagccctgcaaagaagaggtgcaatacatcttgttctacaataccgatggccagcagctgatgcattccaccgcaggcaccggggagaccagcggagcttcaggtcaacccacagatcccagcagcygggcagagcggcttcccattcccctgctgccaaacaggcagrggcaccccaggggtgcgatggctgtcacgcactcactttgtcaaacagaagagttttgttgatttcacccttgtgagggctgatgatgcctgaaatcgtgttgctgcagtcaccgaggctgctgctgagctcgattgcgttgatcctgtcagcaaacttcagctggacaaagaggctggtgacgggccgtagctcagagcacagctccagcggcacgtcatcacgaagctgcaagagcagagcacaacagctttgccagcctgctctcccagggacttctctgggcccacagcagacact

SEQ ID NO: 27102 - DNA, 600 bp, Chicken  19866894243918_1
aaggccggctgctgccagagcactggtgctggtgtaaaccagaacttgtttcaaaaaggcagaatcctctgaaagagacccacaaacagcttgttatcagagggattccacagagacagagctgctgggtgcctcctccatcctcgagatatactgtaggaggctgggaagcacagccccaccataccttcacagactgggggatgcctggtccagttccccgtggctgcacacctgagcatctccgctcccacccggataaatccttccttgcaggaaaaggtgcaagtggagttgaaygtgaagttcccgtgcagattaaagcagctgaggtggcygtggctggggacatccagcactggacagctgacggctgcaggtagaacacatcagcgacactgatgagacagatttgttggcagtggaatgagggcacaggggctagagagcctggggatgagctgccacragctggggcgctgagggaaaagggatcctggggagagcaatctgctagcacagagcagtgggcactgtcctggcagttctcagaagagctggagatttcagagggtctgcctcctcatggggctacatatc

SEQ ID NO: 27103 - DNA, 600 bp, Chicken  19866894243918_2
ccagaacttgtttcaaaaaggcagaatcctctgaaagagacccacaaacagcttgttatcagagggattccacagagacagagctgctgggtgcctcctccatcctcgagatatactgtaggaggctgggaagcacagccccaccataccttcacagactgggggatgcctggtccagttccccgtggctgcacacctgagcatctccgctcccacccggataaatccttccttgcaggaaaaggtgcaagtggagttgaaygtgaagttcccgtgcagattaaagcagctgaggtggcygtggctggggacatccagcactggacagctgacggctgcaggtagaacacatcagcgacactgatgagacagatttgttggcagtggaatgagggcacaggggctagagagcctggggatgagctgccacragctggggcgctgagggaaaagggatcctggggagagcaatctgctagcacagagcagtgggcactgtcctggcagttctcagaagagctggagatttcagagggtctgcctcctcatggggctacatatccactgtgcatagccctactggggtggcagaaagcatca

SEQ ID NO: 27104 - DNA, 600 bp, Chicken  19866894243918_3
agcacagccccaccataccttcacagactgggggatgcctggtccagttccccgtggctgcacacctgagcatctccgctcccacccggataaatccttccttgcaggaaaaggtgcaagtggagttgaaygtgaagttcccgtgcagattaaagcagctgaggtggcygtggctggggacatccagcactggacagctgacggctgcaggtagaacacatcagcgacactgatgagacagatttgttggcagtggaatgagggcacaggggctagagagcctggggatgagctgccacragctggggcgctgagggaaaagggatcctggggagagcaatctgctagcacagagcagtgggcactgtcctggcagttctcagaagagctggagatttcagagggtctgcctcctcatggggctacatatccactgtgcatagccctactggggtggcagaaagcatcaggataaaggcagccatggggggctccattactgcatccttgcacagctccattccacttgcgccgcttgagcacacgtggctcagctcctctatctcacagagggagactggggacagatcttgaggaagg

SEQ ID NO: 27105 - DNA, 600 bp, Chicken  19866894243919_1
taagccattcctctggactaatgatctgcatggcctctatcccaaatgcaggtagagtaaactgttcgtgtgacaccatgcacacaaggaagtctgaaaagcaattatttccaccatcatcacctctattccatgcagaacagtcagcaacacagagaggctagactcagcaaccaccttcctccatcgggtatgtagcaaccaagctagcaaaactcagtgtaggatcacagaaacagggaaggtgatttttgttttcaaaactgatttcacccctctccttcttgcatattcacatastcattagcagcaatatgygtgtccaaatggtccagttgagactgcctacagtgaaaragaagataaggaatgttgtctatcaaatcctcatgcctttgcagctcagactgagtggtgaagacaccagatggtagtttagagccttcataagctctcaayacaggcagctctggttcttttcaagttgcatcactctgttgtttctccacatctgcactgtgttgtcacctgtgggatagcctttgctaccaccagcactccagccagcaattggtccttctgttattacactttccacat

SEQ ID NO: 27106 - DNA, 600 bp, Chicken  19866894243919_2
taatgatctgcatggcctctatcccaaatgcaggtagagtaaactgttcgtgtgacaccatgcacacaaggaagtctgaaaagcaattatttccaccatcatcacctctattccatgcagaacagtcagcaacacagagaggctagactcagcaaccaccttcctccatcgggtatgtagcaaccaagctagcaaaactcagtgtaggatcacagaaacagggaaggtgatttttgttttcaaaactgatttcacccctctccttcttgcatattcacatastcattagcagcaatatgygtgtccaaatggtccagttgagactgcctacagtgaaaragaagataaggaatgttgtctatcaaatcctcatgcctttgcagctcagactgagtggtgaagacaccagatggtagtttagagccttcataagctctcaayacaggcagctctggttcttttcaagttgcatcactctgttgtttctccacatctgcactgtgttgtcacctgtgggatagcctttgctaccaccagcactccagccagcaattggtccttctgttattacactttccacattcctcttagtggtctcag

SEQ ID NO: 27107 - DNA, 591 bp, Chicken  19866894243919_3
taaactgttcgtgtgacaccatgcacacaaggaagtctgaaaagcaattatttccaccatcatcacctctattccatgcagaacagtcagcaacacagagaggctagactcagcaaccaccttcctccatcgggtatgtagcaaccaagctagcaaaactcagtgtaggatcacagaaacagggaaggtgatttttgttttcaaaactgatttcacccctctccttcttgcatattcacatastcattagcagcaatatgygtgtccaaatggtccagttgagactgcctacagtgaaaragaagataaggaatgttgtctatcaaatcctcatgcctttgcagctcagactgagtggtgaagacaccagatggtagtttagagccttcataagctctcaayacaggcagctctggttcttttcaagttgcatcactctgttgtttctccacatctgcactgtgttgtcacctgtgggatagcctttgctaccaccagcactccagccagcaattggtccttctgttattacactttccacattcctcttagtggtctcagcctcttaaattgcctcacatacaccattca

SEQ ID NO: 27108 - DNA, 489 bp, Chicken  19866894243919_4
gctagactcagcaaccaccttcctccatcgggtatgtagcaaccaagctagcaaaactcagtgtaggatcacagaaacagggaaggtgatttttgttttcaaaactgatttcacccctctccttcttgcatattcacatastcattagcagcaatatgygtgtccaaatggtccagttgagactgcctacagtgaaaragaagataaggaatgttgtctatcaaatcctcatgcctttgcagctcagactgagtggtgaagacaccagatggtagtttagagccttcataagctctcaayacaggcagctctggttcttttcaagttgcatcactctgttgtttctccacatctgcactgtgttgtcacctgtgggatagcctttgctaccaccagcactccagccagcaattggtccttctgttattacactttccacattcctcttagtggtctcagcctcttaaattgcctcacatacaccattca

SEQ ID NO: 27109 - DNA, 600 bp, Chicken  19866894243930_1
atgcttcaatccagaaactctgaaggaaacctgctcattgctctctttatatgcaccccgaattttggctttaaggtcattttgtacttgcagagcttccagaaagccaggcttcatcccggtcacaaagcgctgaatggagatcagagtcccagcttcaattccctgttctcagcagagtaaattaatgcactcattgcagactggggaagtgcttaacaacaaatgtgcaactctttaatagttatgcaagatctttgccatcacctgaatttgagctgtcagcctcctctgctaaaygtctctggccgtccttcacagcatactcaaagcccacacagactgggggacatggggcagctgaatttttgtttgccaaattatctgtgttttcagctttgtttgccaaattatctggttttcaaactccatgcatataaatctggaacactgcaaacacaaaattgtactttcaccrtgtgttactgtcagctcgactcacagaagcacaccacgctacacctaaagcaccattatgctctagagcaatgtcctagattcattttggcttgaagatttactccttcaggttgaaatgca

SEQ ID NO: 27110 - DNA, 600 bp, Chicken  19866894243930_2
agtaaattaatgcactcattgcagactggggaagtgcttaacaacaaatgtgcaactctttaatagttatgcaagatctttgccatcacctgaatttgagctgtcagcctcctctgctaaaygtctctggccgtccttcacagcatactcaaagcccacacagactgggggacatggggcagctgaatttttgtttgccaaattatctgtgttttcagctttgtttgccaaattatctggttttcaaactccatgcatataaatctggaacactgcaaacacaaaattgtactttcaccrtgtgttactgtcagctcgactcacagaagcacaccacgctacacctaaagcaccattatgctctagagcaatgtcctagattcattttggcttgaagatttactccttcaggttgaaatgcatggcaagtggagttggtaaagccacagaaatttcaattgtttaaatatgtgtcctgccaaaagaaaatattagctgacgtgagagtgacttaaggtgtctaatgacaacgaatgtccttcaatgtccttcacccttttcctctaatctcaggcagatgtttgtagacgcctatggaca

SEQ ID NO: 27111 - DNA, 599 bp, Chicken  19866894243943_1
  misc_feature (1)..(122): n is any nucleotide
nnnnnnnnnnnnnnnnnnnnnnnnnnnnnnnnnnnnnnnnnnnnnnnnnnnnnnnnnnnnnnnnnnnnnnnnnnnnnnnnnnnnnnnnnnnnnnnnnnnnnnnnnnnnnnnnnnnnnnnnnncaaagacttcacaggcttcaaagcctgacctctgtctttgtgcaagttctggacatgttatcattctgcagatacccatcactgtccctcacacccttccctaagtgagtgccatggctcactcaccttgcaggtgggactgtcagtccccttttcaagctgaaaacacactgctgcyagcactggaacggatataacattggtgtcttcttttctttcctaggactatcacctttgcatactgtggtcttcaggrctcttttagtatgaactgaatgtaaagacagacttttccactggcctaatgtttcctacaggatctacttactctttgctgctagaacaaagcccttgctgaggcttaccgaacagctggtgacagcaaatgtctacaaaggaggatggcaggagcattgggaaatgcagcccagagacacgaataagtgtgcttggcaagattcaaggcactgctctgta

SEQ ID NO: 27112 - DNA, 599 bp, Chicken  19866894243943_2
  misc_feature (1)..(44): n is any nucleotide
nnnnnnnnnnnnnnnnnnnnnnnnnnnnnnnnnnnnnnnnnnnncaaagacttcacaggcttcaaagcctgacctctgtctttgtgcaagttctggacatgttatcattctgcagatacccatcactgtccctcacacccttccctaagtgagtgccatggctcactcaccttgcaggtgggactgtcagtccccttttcaagctgaaaacacactgctgcyagcactggaacggatataacattggtgtcttcttttctttcctaggactatcacctttgcatactgtggtcttcaggrctcttttagtatgaactgaatgtaaagacagacttttccactggcctaatgtttcctacaggatctacttactctttgctgctagaacaaagcccttgctgaggcttaccgaacagctggtgacagcaaatgtctacaaaggaggatggcaggagcattgggaaatgcagcccagagacacgaataagtgtgcttggcaagattcaaggcactgctctgtacttcaggagaagagtcagacgctaccaacagcaattccttgggcatcaccccgccaaatacacttgtaagtcacaaga

SEQ ID NO: 27113 - DNA, 600 bp, Chicken  19866894243946_1
gacaatcagaggctgattgcagaggaaaatggcgcactgcaacacaaggaattagaagaagcgagtgaactctccatgctcagttcaggtacattgagcagtttcagcaaagagagtggcagaaccatctcaggaatgtgccaaaagcctgctctgaagtcagacacttcatcagtttggatgcatcaccatatttcctctacaaaatacccgccaacttgccacaagttagacttttatcctttccctaataaaaaagcacccagaatttcagaagcagcaaggaggcttggattataygtctcacagtgaagacactctgcaataaataaagttcagtcaaaaatttgagtaaaacttaaaacagcaaaatagcattccttgttactgtgatcaacctgtctcctattagccaaggaagatcttcacaaaataagttgttgctgtacagtacagtctaaagtgagttgtaaggaagatgttggactgcaacagaagctcacttttattattccagatattggagcaatttttctgggccgtttcccctctattttcaggttacttatttagaaacaaagactgagtcacaacaacaat

SEQ ID NO: 27114 - DNA, 600 bp, Chicken  19866894243973_1
acccactacagtatcacacagttcgctaaatactgcaggaatcttccctctcaatgcagcaagaatgcttctgcttgtcaaccatccttaaagcctgaaacttcattcagccgtgtaaagtcatcaattgagtgattttccgctatcttctaaaagcagaaaaataaaaactgctgcacagatttggtcctgtcttactgcttgagcagtcatttgatgagtggaagtgagaaagctgataatggctgagtttgaaaacttcaatggcaagggaggaaactttgaaatagactaaacccyggatcactggattcctatttgagactgatttcatggggcatcaaataaaactacccagacaatgacttaaacaaaacgaaataattttaacaccatatgccattgagctgaaacagtatgccacaggacttctgaacaccagaaatttacactgcctcaaaaaaaaaaaaaaagagtaggcaaacttacaggtggaaaacttaccaagaatttttaaatgcaacaacatccatactggttcattaagcaactgaccacacattttcttctactgagacagactgttgaagaagtatcatc

SEQ ID NO: 27115 - DNA, 585 bp, Chicken  19866894243977_1
catggtcaatgtggtcttatgttctccatgagagtcccttgggttgggtaagcaaagaggcatttgcagtcccttagcttatgtaaatgtgctggcgcaaaccacagtctgtatggggtcagtggctctgaaaacgtgcaagtcaagtatgtgccaatgtaatactggttagctcaatttcctttctgtcttccctgctgtattcaaaagggaaacaaatgagtgaatcttttctgcagtgctctgaatgcacacagaactgcttgaggattatttgtttattggatgttgaaataccargaggagagaaagcttttctcacttttcctctgagtctgaactgaaccaggaagcctgagaaacctctcaagcgagcctgagcttttcagctcaactttccacccttcaggggtttggcaaaaaaacttcttttgagcagaacatcacatctaaaacgagctgaaaagcccaagtgagaaaggtggctgcatatgaggcactcatcccttttcaggcagactttcaagggtaaaatcctgtcatgggctctgcactgcctggtacgtaccccgtgtcaaaaaggaa

SEQ ID NO: 27116 - DNA, 600 bp, Chicken  19866894243980_1
tgcaagatttcagtggtcttaccctcacgtcagaaatgaaaatctctattgcagtctccatatcgtagctgtgtagtggtagttaaatactgggaaatactttctaagagtaaggtaagtggaactctgcagtagcttgcctggaggagacgtgcagtttctgttagccatctaagaaaaggttggagaaacaggcaaacgctgttctttcagtgttcagtgtgttccatcacagaaacaaagcgtgtgcctctgtttaagtgacttggtattagacaaattctcaaatctgaaacagakyagcaacatcatcagctggcataagtctggtgactatcttatgtccctcaaattttagataagcccrttcttaatggcaatttacctgtctgctygttgcagttgtattcacaaaccttagaccatctacaratctcatatttcacagtgtgtgtttatatagaaaatatataaccaggaaaaaagcaaagcgamataatagaaattgtgttttggggaaaagcagagtggatttgtcagagaaccagaataggaagaaaacagcctgcgtctttcatgtaatttcatttgacttgctgc

SEQ ID NO: 27117 - DNA, 600 bp, Chicken  19866894243980_2
gcaagatttcagtggtcttaccctcacgtcagaaatgaaaatctctattgcagtctccatatcgtagctgtgtagtggtagttaaatactgggaaatactttctaagagtaaggtaagtggaactctgcagtagcttgcctggaggagacgtgcagtttctgttagccatctaagaaaaggttggagaaacaggcaaacgctgttctttcagtgttcagtgtgttccatcacagaaacaaagcgtgtgcctctgtttaagtgacttggtattagacaaattctcaaatctgaaacagakyagcaacatcatcagctggcataagtctggtgactatcttatgtccctcaaattttagataagcccrttcttaatggcaatttacctgtctgctygttgcagttgtattcacaaaccttagaccatctacaratctcatatttcacagtgtgtgtttatatagaaaatatataaccaggaaaaaagcaaagcgamataatagaaattgtgttttggggaaaagcagagtggatttgtcagagaaccagaataggaagaaaacagcctgcgtctttcatgtaatttcatttgacttgctgca

SEQ ID NO: 27118 - DNA, 600 bp, Chicken  19866894243980_3
gctgtgtagtggtagttaaatactgggaaatactttctaagagtaaggtaagtggaactctgcagtagcttgcctggaggagacgtgcagtttctgttagccatctaagaaaaggttggagaaacaggcaaacgctgttctttcagtgttcagtgtgttccatcacagaaacaaagcgtgtgcctctgtttaagtgacttggtattagacaaattctcaaatctgaaacagakyagcaacatcatcagctggcataagtctggtgactatcttatgtccctcaaattttagataagcccrttcttaatggcaatttacctgtctgctygttgcagttgtattcacaaaccttagaccatctacaratctcatatttcacagtgtgtgtttatatagaaaatatataaccaggaaaaaagcaaagcgamataatagaaattgtgttttggggaaaagcagagtggatttgtcagagaaccagaataggaagaaaacagcctgcgtctttcatgtaatttcatttgacttgctgcatgatgtcaggtaaaccactgtaactcttctattctgctcccattcctactctttctcttgtctgtt

SEQ ID NO: 27119 - DNA, 600 bp, Chicken  19866894243980_4
aatactttctaagagtaaggtaagtggaactctgcagtagcttgcctggaggagacgtgcagtttctgttagccatctaagaaaaggttggagaaacaggcaaacgctgttctttcagtgttcagtgtgttccatcacagaaacaaagcgtgtgcctctgtttaagtgacttggtattagacaaattctcaaatctgaaacagakyagcaacatcatcagctggcataagtctggtgactatcttatgtccctcaaattttagataagcccrttcttaatggcaatttacctgtctgctygttgcagttgtattcacaaaccttagaccatctacaratctcatatttcacagtgtgtgtttatatagaaaatatataaccaggaaaaaagcaaagcgamataatagaaattgtgttttggggaaaagcagagtggatttgtcagagaaccagaataggaagaaaacagcctgcgtctttcatgtaatttcatttgacttgctgcatgatgtcaggtaaaccactgtaactcttctattctgctcccattcctactctttctcttgtctgtttrcagtattacctgggagcctttatggt

SEQ ID NO: 27120 - DNA, 600 bp, Chicken  19866894243980_5
tagcttgcctggaggagacgtgcagtttctgttagccatctaagaaaaggttggagaaacaggcaaacgctgttctttcagtgttcagtgtgttccatcacagaaacaaagcgtgtgcctctgtttaagtgacttggtattagacaaattctcaaatctgaaacagakyagcaacatcatcagctggcataagtctggtgactatcttatgtccctcaaattttagataagcccrttcttaatggcaatttacctgtctgctygttgcagttgtattcacaaaccttagaccatctacaratctcatatttcacagtgtgtgtttatatagaaaatatataaccaggaaaaaagcaaagcgamataatagaaattgtgttttggggaaaagcagagtggatttgtcagagaaccagaataggaagaaaacagcctgcgtctttcatgtaatttcatttgacttgctgcatgatgtcaggtaaaccactgtaactcttctattctgctcccattcctactctttctcttgtctgtttrcagtattacctgggagcctttatggtctttgcactgcactgtagctggacctcccargtttca

SEQ ID NO: 27121 - DNA, 600 bp, Chicken  19866894243980_6
caaacgctgttctttcagtgttcagtgtgttccatcacagaaacaaagcgtgtgcctctgtttaagtgacttggtattagacaaattctcaaatctgaaacagakyagcaacatcatcagctggcataagtctggtgactatcttatgtccctcaaattttagataagcccrttcttaatggcaatttacctgtctgctygttgcagttgtattcacaaaccttagaccatctacaratctcatatttcacagtgtgtgtttatatagaaaatatataaccaggaaaaaagcaaagcgamataatagaaattgtgttttggggaaaagcagagtggatttgtcagagaaccagaataggaagaaaacagcctgcgtctttcatgtaatttcatttgacttgctgcatgatgtcaggtaaaccactgtaactcttctattctgctcccattcctactctttctcttgtctgtttrcagtattacctgggagcctttatggtctttgcactgcactgtagctggacctcccargtttcactkaaaatgatcagtaatctcatttgtggtgagggcaatgtcttgctgtgcacatacatagtg

SEQ ID NO: 27122 - DNA, 600 bp, Chicken  19866894243980_7
cttaatggcaatttacctgtctgctygttgcagttgtattcacaaaccttagaccatctacaratctcatatttcacagtgtgtgtttatatagaaaatatataaccaggaaaaaagcaaagcgamataatagaaattgtgttttggggaaaagcagagtggatttgtcagagaaccagaataggaagaaaacagcctgcgtctttcatgtaatttcatttgacttgctgcatgatgtcaggtaaaccactgtaactcttctattctgctcccattcctactctttctcttgtctgtttrcagtattacctgggagcctttatggtctttgcactgcactgtagctggacctcccargtttcactkaaaatgatcagtaatctcatttgtggtgagggcaatgtcttgctgtgcacatacatagtgccaagtaaaaggtgacacgttaggctgaagaaatgcttaaattttaaaacacaaagtgttggattttccattccaaaaaccaatattctccaagcaatgtattccatcagggaagcatttacacagaagtcatgccatggtttttgcttacgtgcttcgtcagattacttgcta

SEQ ID NO: 27123 - DNA, 600 bp, Chicken  19866894243980_8
ctacaratctcatatttcacagtgtgtgtttatatagaaaatatataaccaggaaaaaagcaaagcgamataatagaaattgtgttttggggaaaagcagagtggatttgtcagagaaccagaataggaagaaaacagcctgcgtctttcatgtaatttcatttgacttgctgcatgatgtcaggtaaaccactgtaactcttctattctgctcccattcctactctttctcttgtctgtttrcagtattacctgggagcctttatggtctttgcactgcactgtagctggacctcccargtttcactkaaaatgatcagtaatctcatttgtggtgagggcaatgtcttgctgtgcacatacatagtgccaagtaaaaggtgacacgttaggctgaagaaatgcttaaattttaaaacacaaagtgttggattttccattccaaaaaccaatattctccaagcaatgtattccatcagggaagcatttacacagaagtcatgccatggtttttgcttacgtgcttcgtcagattacttgctaagatttaatttcataggagaaaactcgtcttgcaagtttgatggtgcactgaatggg

SEQ ID NO: 27124 - DNA, 600 bp, Chicken  19866894243980_9
tcatatttcacagtgtgtgtttatatagaaaatatataaccaggaaaaaagcaaagcgamataatagaaattgtgttttggggaaaagcagagtggatttgtcagagaaccagaataggaagaaaacagcctgcgtctttcatgtaatttcatttgacttgctgcatgatgtcaggtaaaccactgtaactcttctattctgctcccattcctactctttctcttgtctgtttrcagtattacctgggagcctttatggtctttgcactgcactgtagctggacctcccargtttcactkaaaatgatcagtaatctcatttgtggtgagggcaatgtcttgctgtgcacatacatagtgccaagtaaaaggtgacacgttaggctgaagaaatgcttaaattttaaaacacaaagtgttggattttccattccaaaaaccaatattctccaagcaatgtattccatcagggaagcatttacacagaagtcatgccatggtttttgcttacgtgcttcgtcagattacttgctaagatttaatttcataggagaaaactcgtcttgcaagtttgatggtgcactgaatggggagagtgct

SEQ ID NO: 27125 - DNA, 600 bp, Chicken  19866894243983_1
ctttttaaatcaccgctataacataaaacatcgttgctttctactttagaataaggcttgttttgaagccagtaagtaactgcacatagttttaggctttttcaggcacactttgaatttgcttttccagttgagctgaggcaacgaaggtatgaaaactttatgacagacaggactgggtgtcagaagacttggtattgctgctgaccaagcaaatccactcaggttaggtccaggcaagacctgactcacgaggcaacctgtcctcatgacacaatctaaatttcaccagtgtgcctytaaagtcagacccacagtggttatctatgctttgcctgcagcacgtgggcatgagaacgcaccttgaggtaaaggcagctaaaaggctgagctgccttcactcttgtcctctccatcgtacaaagagcaaccagtgccaggtccagcactgtggacaaccttctctaaggagcagaagaatttaacagaattcaacatctctacctctgaagattgtgtgcttcttatgaggcttttggcaccagtcaaacttgcagctttctaaccgtatgcactaactatgaggcaaaagggttgcta

SEQ ID NO: 27126 - DNA, 600 bp, Chicken  19866894243988_1
atcattagactcattaatataggaaatgaagcctgagattacatgctaatataaaattcaagaaaaaaactattgaatctaaatttttctggtaattctgttggaaactttgattttatacacagtagtttttctgctaatgttagtgcaagagatattgaattgacattataaccatctgttccatttcctgcagccttgccacatgactacactggttttctgcaatcttgtctttaagtgaaaaaaaaaccatagtaatttggtagtttcatttacctagtttgctagacataaggrcaatgtctgtgtcagtctcctcatctagccaggatccatcctgcctctctgagatgaaagatcatttctgtgttcccacagtttgtgattagagagtgaaggaggagtagatgtttctagaggaaaatctggcagtgggaataaacttaagattaatttgtattgcaataaaatgaggtttaatattcaccaaatctgagtcagaaatgatgaactgctttaaaaaaaaaagacagaacactgcatttgtctctattttggaaaacatctgcagttcctaaaactttgtgaaaagtgatt

SEQ ID NO: 27127 - DNA, 600 bp, Chicken  19866894243989_1
tgatcactttggtacgttctcagtgcccaaactgttaaatgttccaaggcaccaaactcacactgaaactgaaagctgattctaacactgcccggtgacaggttaggtctgcaggtggtgatgctgtaatcccacaggtctgaccatgcgaagccctcccaaaccccctctgggttcagcagcgcactgcagagctcaggacagaaacaccagggctggctgcacatgtgggcacggctccacatctgtcaccgcagacccaaggcagggccgtgcagaacggatagaactcatagagcrtcccaagcaggaggggaccgccagggattcggtccacccttggctccactccaaacccaaaccctgtgcctgagagcggggtcccaacgctccttgagccctggcggcgtggggccgcgcccacagcccaaggggttcgagccgcccctcctcagaggcgcgcggcaggaaggcgtctaccccgggccgtgctggacagcggtgctgggccaaagcgtgcctcgggacgggagcctggggacagcactagcccaaggcacgctcacacagggctgcacgagtgaggggacaacgggccac

SEQ ID NO: 27128 - DNA, 600 bp, Chicken  19866894243990_1
tttctgaagatatccgcacatagaagttggggtcatttatacggtgcacattttctactgctccagttaaatgataaatactcaaagaagagctgtcagaaaacgtatgagatcttctccacaagcaaacattatggtaatatttcaataaaccaatttctagttgttctataattattactctgagcagtcctgaagttcctatggttcataagcaatttatgatatcattgcttcagtattaggggaatctggttctcattttatagtaggtgaacatgttttaatcttactgtagcyttgtacatgttacatacaaattaggcagcagttcacgtggagactttgtgctaygttattattacaccgtaagtttgtattctggtttattctgtggtaataaggaaattgctatgtactcaagccctgtataacttgaggaacagaaagtcctctttgtaaggttatacgcattgtctgtgtcgactgcaagagaatttagcatagcctttagcagaaatgacaataaaaatacagcaaagctaatgagagaatcgctaatagttgtttccgttccagaagcatacctttaggaagaca

SEQ ID NO: 27129 - DNA, 600 bp, Chicken  19866894243990_2
ctactgctccagttaaatgataaatactcaaagaagagctgtcagaaaacgtatgagatcttctccacaagcaaacattatggtaatatttcaataaaccaatttctagttgttctataattattactctgagcagtcctgaagttcctatggttcataagcaatttatgatatcattgcttcagtattaggggaatctggttctcattttatagtaggtgaacatgttttaatcttactgtagcyttgtacatgttacatacaaattaggcagcagttcacgtggagactttgtgctaygttattattacaccgtaagtttgtattctggtttattctgtggtaataaggaaattgctatgtactcaagccctgtataacttgaggaacagaaagtcctctttgtaaggttatacgcattgtctgtgtcgactgcaagagaatttagcatagcctttagcagaaatgacaataaaaatacagcaaagctaatgagagaatcgctaatagttgtttccgttccagaagcatacctttaggaagacagagagtagagttctgttatatttgttttttttwttttttwttattattatttgt

SEQ ID NO: 27130 - DNA, 600 bp, Chicken  19866894243990_3
cacgtggagactttgtgctaygttattattacaccgtaagtttgtattctggtttattctgtggtaataaggaaattgctatgtactcaagccctgtataacttgaggaacagaaagtcctctttgtaaggttatacgcattgtctgtgtcgactgcaagagaatttagcatagcctttagcagaaatgacaataaaaatacagcaaagctaatgagagaatcgctaatagttgtttccgttccagaagcatacctttaggaagacagagagtagagttctgttatatttgttttttttwttttttwttattattatttgtggctctaatgagacaagaaatrgatctgttgcctggagcacttacattgcctaaagaaggggaagctgtacacaaaaatgtaatcagttggcagtagagcacaggcagagttggcatgtcttgcattattactaatccttaccaacacctgaggcttcataacagatgtcaccatttatactcatctataacttgtctacatctaaatcatttgatatttctgtgctggatttctgaccttaaaaatggtttggaaaacaggtttcagagctgaaagtt

SEQ ID NO: 27131 - DNA, 600 bp, Chicken  19866894243990_4
agactttgtgctaygttattattacaccgtaagtttgtattctggtttattctgtggtaataaggaaattgctatgtactcaagccctgtataacttgaggaacagaaagtcctctttgtaaggttatacgcattgtctgtgtcgactgcaagagaatttagcatagcctttagcagaaatgacaataaaaatacagcaaagctaatgagagaatcgctaatagttgtttccgttccagaagcatacctttaggaagacagagagtagagttctgttatatttgttttttttwttttttwttattattatttgtggctctaatgagacaagaaatrgatctgttgcctggagcacttacattgcctaaagaaggggaagctgtacacaaaaatgtaatcagttggcagtagagcacaggcagagttggcatgtcttgcattattactaatccttaccaacacctgaggcttcataacagatgtcaccatttatactcatctataacttgtctacatctaaatcatttgatatttctgtgctggatttctgaccttaaaaatggtttggaaaacaggtttcagagctgaaagttcacaatt

SEQ ID NO: 27132 - DNA, 600 bp, Chicken  19866894243990_5
gtattctggtttattctgtggtaataaggaaattgctatgtactcaagccctgtataacttgaggaacagaaagtcctctttgtaaggttatacgcattgtctgtgtcgactgcaagagaatttagcatagcctttagcagaaatgacaataaaaatacagcaaagctaatgagagaatcgctaatagttgtttccgttccagaagcatacctttaggaagacagagagtagagttctgttatatttgttttttttwttttttwttattattatttgtggctctaatgagacaagaaatrgatctgttgcctggagcacttacattgcctaaagaaggggaagctgtacacaaaaatgtaatcagttggcagtagagcacaggcagagttggcatgtcttgcattattactaatccttaccaacacctgaggcttcataacagatgtcaccatttatactcatctataacttgtctacatctaaatcatttgatatttctgtgctggatttctgaccttaaaaatggtttggaaaacaggtttcagagctgaaagttcacaatttatgtagaaattccctatgttcctgcctgggataag

SEQ ID NO: 27133 - DNA, 600 bp, Chicken  19866894244000_1
ggagtccccatccctggaggtgtcccagagttgtggggatgtggcactgagggacgtggacagtgggcacggtgggggtgggccggggttggacttggatctgagaggtctttcccaacctttatgattctacaatgaactcaaactcttccttggcaatatcacagttgttaggctacagctaccacatggatagcacaatgtgtggtgtgggtccaggccttgtggatgtcactgacattagggttgagatgcagccatgcgaatgcacattttgcctctgaaggaccctgtgcccaragccaagagacgtggtggatgttggttggagttacccgcatctctgttgctgctgatggctgggctgctgtgctaacctgtgctccgtgggaagtgagggatatcctcatagggaaagaccatcttgtgctccagcatatctgccaggtctcccagcccggatccrcagacgatggcaatctttgggcactgagcagtgcgggcacgcaaccagtctgctgtttccttgtacacctcatagctgttcctgcaggagaagaggagatcagtgaacctgtaaccccatccaaagaataarct

SEQ ID NO: 27134 - DNA, 600 bp, Chicken  19866894244000_2
gttgttaggctacagctaccacatggatagcacaatgtgtggtgtgggtccaggccttgtggatgtcactgacattagggttgagatgcagccatgcgaatgcacattttgcctctgaaggaccctgtgcccaragccaagagacgtggtggatgttggttggagttacccgcatctctgttgctgctgatggctgggctgctgtgctaacctgtgctccgtgggaagtgagggatatcctcatagggaaagaccatcttgtgctccagcatatctgccaggtctcccagcccggatccrcagacgatggcaatctttgggcactgagcagtgcgggcacgcaaccagtctgctgtttccttgtacacctcatagctgttcctgcaggagaagaggagatcagtgaacctgtaaccccatccaaagaataarcttcaaaagataacagtcctgaaaaggcrcagaggaaaaaaagatttattaagactaaaacggtaggaacttcactgctattacagaagatgtttctctatagcaatcacttttaatctcattttacccctggccacaggcaagttatttgaatcctctctgccagac

SEQ ID NO: 27135 - DNA, 600 bp, Chicken  19866894244000_3
aragccaagagacgtggtggatgttggttggagttacccgcatctctgttgctgctgatggctgggctgctgtgctaacctgtgctccgtgggaagtgagggatatcctcatagggaaagaccatcttgtgctccagcatatctgccaggtctcccagcccggatccrcagacgatggcaatctttgggcactgagcagtgcgggcacgcaaccagtctgctgtttccttgtacacctcatagctgttcctgcaggagaagaggagatcagtgaacctgtaaccccatccaaagaataarcttcaaaagataacagtcctgaaaaggcrcagaggaaaaaaagatttattaagactaaaacggtaggaacttcactgctattacagaagatgtttctctatagcaatcacttttaatctcattttacccctggccacaggcaagttatttgaatcctctctgccagacttattttatagtggaaagtggctaatgatacccatatcacccagatgtcacaaggcataacagctcatgcttctgatgtccacgagttatggaaggaatggaaaagcagttagtctgaaaaactgcaacctg

SEQ ID NO: 27136 - DNA, 600 bp, Chicken  19866894244000_4
ggagttacccgcatctctgttgctgctgatggctgggctgctgtgctaacctgtgctccgtgggaagtgagggatatcctcatagggaaagaccatcttgtgctccagcatatctgccaggtctcccagcccggatccrcagacgatggcaatctttgggcactgagcagtgcgggcacgcaaccagtctgctgtttccttgtacacctcatagctgttcctgcaggagaagaggagatcagtgaacctgtaaccccatccaaagaataarcttcaaaagataacagtcctgaaaaggcrcagaggaaaaaaagatttattaagactaaaacggtaggaacttcactgctattacagaagatgtttctctatagcaatcacttttaatctcattttacccctggccacaggcaagttatttgaatcctctctgccagacttattttatagtggaaagtggctaatgatacccatatcacccagatgtcacaaggcataacagctcatgcttctgatgtccacgagttatggaaggaatggaaaagcagttagtctgaaaaactgcaacctgtgcacgtacatgaggatatccaacctgag

SEQ ID NO: 27137 - DNA, 600 bp, Chicken  19866894244001_1
tatctaatattaatttttctcttttgtttgtttgttttgaaaatgtaggaattggcagctaaagtaaaaagacttagtgctaatatactaaataagttatttctatagtaaaaacccttgtacacatttaggagctctgcagtgacttttaaaatacatttcatttttacttgttctactccacagatttccacgtgatgttcaccactggccacacttcatcaggagaaactcccacattagagatgtgtcctttgggtggaagctgaacaaataagagggctctgtgtccaacagtgygctgctttgcaggtcagaaggcctgagctttgtctgaaacttccttggagatgcagaaacagtaagagccatttscccataaagttctgtaatrtgactcccatcttctctctgtgctcccttctcatctgtttatgtgagcatgtacataactgtacagatatacctastccgatgaaagtctgcatcagctttggtcctattgagttttctgaagtgattttttcaatgtgatgtattttagcattaaagtgaatgaatgaatgaagcagtatacttcagcagcgttggtaagaggra

SEQ ID NO: 27138 - DNA, 600 bp, Chicken  19866894244001_2
agtgctaatatactaaataagttatttctatagtaaaaacccttgtacacatttaggagctctgcagtgacttttaaaatacatttcatttttacttgttctactccacagatttccacgtgatgttcaccactggccacacttcatcaggagaaactcccacattagagatgtgtcctttgggtggaagctgaacaaataagagggctctgtgtccaacagtgygctgctttgcaggtcagaaggcctgagctttgtctgaaacttccttggagatgcagaaacagtaagagccatttscccataaagttctgtaatrtgactcccatcttctctctgtgctcccttctcatctgtttatgtgagcatgtacataactgtacagatatacctastccgatgaaagtctgcatcagctttggtcctattgagttttctgaagtgattttttcaatgtgatgtattttagcattaaagtgaatgaatgaatgaagcagtatacttcagcagcgttggtaagaggraagggagtgaaaggggtgtttgagcaaggtaaagtgcacatgaaactggataaagtcacctgctgctccccatcat

SEQ ID NO: 27139 - DNA, 600 bp, Chicken  19866894244001_3
agttatttctatagtaaaaacccttgtacacatttaggagctctgcagtgacttttaaaatacatttcatttttacttgttctactccacagatttccacgtgatgttcaccactggccacacttcatcaggagaaactcccacattagagatgtgtcctttgggtggaagctgaacaaataagagggctctgtgtccaacagtgygctgctttgcaggtcagaaggcctgagctttgtctgaaacttccttggagatgcagaaacagtaagagccatttscccataaagttctgtaatrtgactcccatcttctctctgtgctcccttctcatctgtttatgtgagcatgtacataactgtacagatatacctastccgatgaaagtctgcatcagctttggtcctattgagttttctgaagtgattttttcaatgtgatgtattttagcattaaagtgaatgaatgaatgaagcagtatacttcagcagcgttggtaagaggraagggagtgaaaggggtgtttgagcaaggtaaagtgcacatgaaactggataaagtcacctgctgctccccatcatgcaacctaagaaatgtata

SEQ ID NO: 27140 - DNA, 600 bp, Chicken  19866894244001_4
ttgttctactccacagatttccacgtgatgttcaccactggccacacttcatcaggagaaactcccacattagagatgtgtcctttgggtggaagctgaacaaataagagggctctgtgtccaacagtgygctgctttgcaggtcagaaggcctgagctttgtctgaaacttccttggagatgcagaaacagtaagagccatttscccataaagttctgtaatrtgactcccatcttctctctgtgctcccttctcatctgtttatgtgagcatgtacataactgtacagatatacctastccgatgaaagtctgcatcagctttggtcctattgagttttctgaagtgattttttcaatgtgatgtattttagcattaaagtgaatgaatgaatgaagcagtatacttcagcagcgttggtaagaggraagggagtgaaaggggtgtttgagcaaggtaaagtgcacatgaaactggataaagtcacctgctgctccccatcatgcaacctaagaaatgtataggaatttacaatgtacaaatgttctgctttgtaactactgaatttcatggttgcatatttgccacttgtgaatttg

SEQ ID NO: 27141 - DNA, 600 bp, Chicken  19866894244001_5
ygctgctttgcaggtcagaaggcctgagctttgtctgaaacttccttggagatgcagaaacagtaagagccatttscccataaagttctgtaatrtgactcccatcttctctctgtgctcccttctcatctgtttatgtgagcatgtacataactgtacagatatacctastccgatgaaagtctgcatcagctttggtcctattgagttttctgaagtgattttttcaatgtgatgtattttagcattaaagtgaatgaatgaatgaagcagtatacttcagcagcgttggtaagaggraagggagtgaaaggggtgtttgagcaaggtaaagtgcacatgaaactggataaagtcacctgctgctccccatcatgcaacctaagaaatgtataggaatttacaatgtacaaatgttctgctttgtaactactgaatttcatggttgcatatttgccacttgtgaatttgtaactggatattagcaattttcaaatagcttgggatgttacacatacagtacttataaaatatatggtaaatatatgagacaacccatttattcactgtagagggcacaaaaggaaacagaaatactga

SEQ ID NO: 27142 - DNA, 600 bp, Chicken  19866894244002_1
gtggatgtcccacccttggagatgtttaaggccaggttggatgggtccctgggcaatctgatctagtacttgatctactggctggcaaccctgcttgtggtgaaggggttggaacttgatgacccttgaggtcccttccaccccaagcctctctatgattctatgatatatattttcattatatttatgccatacttacatatgatttatgttactgtaagctatgagaatttatacacggtgctcatgtcatctatgtaaattacctcttttgccagcctgttccaagagaactgcacmattacatctcaagcagctcctccagctcactttccctcctcctcaggagaaaggcgtgaggaggtcatctgcaattgaatgtggaactgggaaaggctagatggtgttcctaaagaggtaagtactgtgccaaactaccatttcctcacacaaaaagatgctgtgagacaaagctgttatgcagatactgagtatttttaaggaaagaaccagcagccaatacattgtgtttgccaccaggattatttaacaccttcccattaatatgaatatatgataaacagtaacattgctgataaa

SEQ ID NO: 27143 - DNA, 600 bp, Chicken  19866894244003_1
ttttaattcagatttatgtaatagcatgaaaagcagtaattgaacggatgctgttactcaaaatcacatttgaaaatggacaaccaaattggttgtcactgtcctaaatgataacacaataataaatagcctagtcctttttatgtcaagatgccagcagttcacagccatatataattatttcacttaccactgaagtgctcaatcctgtggggtgaaaagaaacatttggatggagaaacgtttaccacaaaatggaaagcagcataaactctattcttttgtaagaggagatgagaktcaaacagtaggtgggattggagatgataagtattacataaagcaaatctcctaaggatctcaaggcaatttacaaatgtactttgagcaagcttcatggaaagtattgccactccatcctgtttcacagataagatacaattaaaattaagttagttagctgagactgagtccttatctcctagttacccactcctgggattttttttttttttcccttttcccacttccagctgattacaaagctacctacttacactgatggcttccagcactgctgtaaggaggctcctccactgg

SEQ ID NO: 27144 - DNA, 600 bp, Chicken  19866894244008_1
ccagggtaaaaaaaagtaaattaatcttggtcttcagttcaaaaaataatcaatttctacaacatgaactaaaggacaagttttcttccttactgacagcattgtttctgatttggcaaagtggacagcagtaactgctgagctttacattgactttgcctttcataattcttccctttcatgaataaccagaggagaaaatgcaaatacatgaaattaccaaaatattaatgcccactagtatacaattttgactgcaaaattcttgaatgttagaaataaaataaaaatactgagcarttcaggaaaaaaaaaaaaaaaagctgctctaatgatgacaagtgtaaaaacttgtactattttaagaaacataaaaatgagttgagattcagataattaaaaaaaagaaaaggagaagagattaaaaagcaatttgcacatgcctagaggaatctgtagaaaatattgcagtggaaagaccattcacaggaaaaaaggaagctaacaggaagatgaaactaaattaattaagagttaacagatttttcaacagccaggtctgttaatcactatgtgtagtttcctatataaatgatataa

SEQ ID NO: 27145 - DNA, 599 bp, Chicken  19866894244014_1
  misc_feature (1)..(27): n is any nucleotide
nnnnnnnnnnnnnnnnnnnnnnnnnnnccaccaactggattcaactccattgaccacaactctttgagcccagccatccagccagtgcttcacccagcagagcgtacacccatccagaccatgggcagccagcttctccacaagaatgttgtgggggacagtgtcaaaggccttagtgaagtccaggtagaccacatcaacaccctgaccctcatccactaagcgggtcagcttgtcatagaatgagatcaggtttgtcagacaggatctacccattcgtaaacccatgctgactgggcmtgatcccctggttgacctttaattggtccatgatggttcccragattattttgttccataaccttcccggacaccgagggtgagactgataggcctgtagctaccaggatctttctttaagatggttcattgctttttccttttattttttccaagtgaaatatttgtttggcaacagttactgagcttccccartattaatctttgatcgatggtcaattctctaaaggaaactggtcagtaagatgctaaccacagaagttcagaaaacagaaccaagattattccacttgttggaa

SEQ ID NO: 27146 - DNA, 600 bp, Chicken  19866894244014_2
aactccattgaccacaactctttgagcccagccatccagccagtgcttcacccagcagagcgtacacccatccagaccatgggcagccagcttctccacaagaatgttgtgggggacagtgtcaaaggccttagtgaagtccaggtagaccacatcaacaccctgaccctcatccactaagcgggtcagcttgtcatagaatgagatcaggtttgtcagacaggatctacccattcgtaaacccatgctgactgggcmtgatcccctggttgacctttaattggtccatgatggttcccragattattttgttccataaccttcccggacaccgagggtgagactgataggcctgtagctaccaggatctttctttaagatggttcattgctttttccttttattttttccaagtgaaatatttgtttggcaacagttactgagcttccccartattaatctttgatcgatggtcaattctctaaaggaaactggtcagtaagatgctaaccacagaagttcagaaaacagaaccaagattattccacttgttggaaaacttcacctatggcgatttrctgcttttcccgctgcaaaatc

SEQ ID NO: 27147 - DNA, 600 bp, Chicken  19866894244014_3
atcaacaccctgaccctcatccactaagcgggtcagcttgtcatagaatgagatcaggtttgtcagacaggatctacccattcgtaaacccatgctgactgggcmtgatcccctggttgacctttaattggtccatgatggttcccragattattttgttccataaccttcccggacaccgagggtgagactgataggcctgtagctaccaggatctttctttaagatggttcattgctttttccttttattttttccaagtgaaatatttgtttggcaacagttactgagcttccccartattaatctttgatcgatggtcaattctctaaaggaaactggtcagtaagatgctaaccacagaagttcagaaaacagaaccaagattattccacttgttggaaaacttcacctatggcgatttrctgcttttcccgctgcaaaatccaacagcacaagccaccggagtttcactggctggctgtgtgaactgcagagagagatttaatcacagaaccagttacggtagcaacaaaaggacgtttgtctttcaacatagaaggaaaacctgcacccggaggayttgttagcagctcaaac

SEQ ID NO: 27148 - DNA, 600 bp, Chicken  19866894244014_4
aattggtccatgatggttcccragattattttgttccataaccttcccggacaccgagggtgagactgataggcctgtagctaccaggatctttctttaagatggttcattgctttttccttttattttttccaagtgaaatatttgtttggcaacagttactgagcttccccartattaatctttgatcgatggtcaattctctaaaggaaactggtcagtaagatgctaaccacagaagttcagaaaacagaaccaagattattccacttgttggaaaacttcacctatggcgatttrctgcttttcccgctgcaaaatccaacagcacaagccaccggagtttcactggctggctgtgtgaactgcagagagagatttaatcacagaaccagttacggtagcaacaaaaggacgtttgtctttcaacatagaaggaaaacctgcacccggaggayttgttagcagctcaaactctatacactcagctgggaaaaatcaccaaacaaagcacaaggtacttccccgcaaggagaaacctacctcgttggctggctcctcgcttctgcgggatttctcctggagctcccgaggtaataa

SEQ ID NO: 27149 - DNA, 600 bp, Chicken  19866894244014_5
ttactgagcttccccartattaatctttgatcgatggtcaattctctaaaggaaactggtcagtaagatgctaaccacagaagttcagaaaacagaaccaagattattccacttgttggaaaacttcacctatggcgatttrctgcttttcccgctgcaaaatccaacagcacaagccaccggagtttcactggctggctgtgtgaactgcagagagagatttaatcacagaaccagttacggtagcaacaaaaggacgtttgtctttcaacatagaaggaaaacctgcacccggaggayttgttagcagctcaaactctatacactcagctgggaaaaatcaccaaacaaagcacaaggtacttccccgcaaggagaaacctacctcgttggctggctcctcgcttctgcgggatttctcctggagctcccgaggtaataataaatactaacttcatcaacgtcttgccaacagtcaggaactctcaccatcacctgactaccaggcagcagcccagtccccctggacgtggctctgagcactcagatcgagctgtaatgtgtccytgttaattgcaagggagttggactaggtggctt

SEQ ID NO: 27150 - DNA, 600 bp, Chicken  19866894244014_6
tcaacatagaaggaaaacctgcacccggaggayttgttagcagctcaaactctatacactcagctgggaaaaatcaccaaacaaagcacaaggtacttccccgcaaggagaaacctacctcgttggctggctcctcgcttctgcgggatttctcctggagctcccgaggtaataataaatactaacttcatcaacgtcttgccaacagtcaggaactctcaccatcacctgactaccaggcagcagcccagtccccctggacgtggctctgagcactcagatcgagctgtaatgtgtccytgttaattgcaagggagttggactaggtggctttaagggtcccttccaactcaaacgaggctatggttctaagtagaaaacagcctcattttgcagtacttaaaggttctcggtaaggaagatgtaaaagaatagaagataacaggctgacgttttccttttcttaagtgctcggtgggcaatagttcacaacaaagagaaactgcctaaattagcacctcttcaacactttttcgaaaccgtgtaattaaaaattaatgaggatcagcgaagggaaaatgtttttttttttcctcctaa

SEQ ID NO: 27151 - DNA, 600 bp, Chicken  19866894244014_7
ttccttttcttaagtgctcggtgggcaatagttcacaacaaagagaaactgcctaaattagcacctcttcaacactttttcgaaaccgtgtaattaaaaattaatgaggatcagcgaagggaaaatgtttttttttttcctcctaatttagtaccagttgtttattggcaggatgcagatgccagcactggggcgaggggctggctgccttaacacactttgctgtccctctgcaccaacacccgggcagctgcatcgggtcctggttacctggtgttcacatattgccaagtagggccwttggggaaattcagttaatttacagcaactgacagatataatgattatgccacccctaaactgctgactgctatccctcataaaataatctcgttccaaactccaaaaaataaggcaattcatttatttatttttttctgatgcccaktgctcacttctggaagtaaaatcagtcaaacacttttaatgcaatgttctggtcacagtyggtgaaggtgatggaattgagtaaatctgaggattaattgaggatttactgttaatctggggatcattttaacaaagatgcataggttgaat

SEQ ID NO: 27152 - DNA, 600 bp, Chicken  19866894244014_8
tagtaccagttgtttattggcaggatgcagatgccagcactggggcgaggggctggctgccttaacacactttgctgtccctctgcaccaacacccgggcagctgcatcgggtcctggttacctggtgttcacatattgccaagtagggccwttggggaaattcagttaatttacagcaactgacagatataatgattatgccacccctaaactgctgactgctatccctcataaaataatctcgttccaaactccaaaaaataaggcaattcatttatttatttttttctgatgcccaktgctcacttctggaagtaaaatcagtcaaacacttttaatgcaatgttctggtcacagtyggtgaaggtgatggaattgagtaaatctgaggattaattgaggatttactgttaatctggggatcattttaacaaagatgcataggttgaatctcacatttaaaccagcaagaactgtatgtttacctgcctttgtgggtcagacacatatcttgatgatcttggttgcagtgtgcataaaagcctcttaaaaacagtctggctcccactctcaagggaaaggttgaaccttgaaaatac

SEQ ID NO: 27153 - DNA, 600 bp, Chicken  19866894244014_9
cttaacacactttgctgtccctctgcaccaacacccgggcagctgcatcgggtcctggttacctggtgttcacatattgccaagtagggccwttggggaaattcagttaatttacagcaactgacagatataatgattatgccacccctaaactgctgactgctatccctcataaaataatctcgttccaaactccaaaaaataaggcaattcatttatttatttttttctgatgcccaktgctcacttctggaagtaaaatcagtcaaacacttttaatgcaatgttctggtcacagtyggtgaaggtgatggaattgagtaaatctgaggattaattgaggatttactgttaatctggggatcattttaacaaagatgcataggttgaatctcacatttaaaccagcaagaactgtatgtttacctgcctttgtgggtcagacacatatcttgatgatcttggttgcagtgtgcataaaagcctcttaaaaacagtctggctcccactctcaagggaaaggttgaaccttgaaaatacctagagctaaaaatggaaactcattctgctcaaagttgctggatattatgcctgagttca

SEQ ID NO: 27154 - DNA, 600 bp, Chicken  19866894244019_1
gatggagagggacgttggtgtactgttggacagtcaactgaatatgagccagcagtgtgctcaggtggccaagaaggccaatggcatcctggcttgtatcaggaatggtgtggtgagcaggactagggaagtcatcctgccctgtactcagcattggtgaggcctcacctcgagtactgtgttcagttttgggcacctcaatacaagaaggacatggaagtgctggagcaggtctagagaagggcaacgaggctagtgaagggcttggaaaatcagccctatgagaagaggctgagggarctggggctgtttagtctgrggaagaggaggctgagaggagacgttattactttcttccagtacctgaaaggtgtttacagtgagagcagggtaggtctcttctccctggtgacaggtgacaagatgaggggaaatggcctcaagttgtgccaaggcaagtttaggttggacattaggaaacacttctttacagaaagggtggttaaacactggaataggctccccagggaggtggttgagtcaccatccctggatgtgtttaagagccgtttggatgtggtgctcagagatatgatttag

SEQ ID NO: 27155 - DNA, 600 bp, Chicken  19866894244019_2
gtactgttggacagtcaactgaatatgagccagcagtgtgctcaggtggccaagaaggccaatggcatcctggcttgtatcaggaatggtgtggtgagcaggactagggaagtcatcctgccctgtactcagcattggtgaggcctcacctcgagtactgtgttcagttttgggcacctcaatacaagaaggacatggaagtgctggagcaggtctagagaagggcaacgaggctagtgaagggcttggaaaatcagccctatgagaagaggctgagggarctggggctgtttagtctgrggaagaggaggctgagaggagacgttattactttcttccagtacctgaaaggtgtttacagtgagagcagggtaggtctcttctccctggtgacaggtgacaagatgaggggaaatggcctcaagttgtgccaaggcaagtttaggttggacattaggaaacacttctttacagaaagggtggttaaacactggaataggctccccagggaggtggttgagtcaccatccctggatgtgtttaagagccgtttggatgtggtgctcagagatatgatttagcagagggttgttagaatta

SEQ ID NO: 27156 - DNA, 599 bp, Chicken  19866894244024_1
  misc_feature (1)..(20): n is any nucleotide
nnnnnnnnnnnnnnnnnnnnctggaaaatgagcagtgttttgtcaaggaaccttttgtggctcaggattcacatggacagggatgctttttaggtatgagtgtgcgtaggcttcctgtaggtacttcttgagattatgaattctctcaggagagctgtggccacacatacaacctttagttacagctgtatgccaagcgcatcccatgtatgcaaagcacagttttgttgtataatttcagatatgtctgcaggtttgcctttttcttgataatatcctttttatccagctgtcttgackctgactttctaaagttcaagaaaatgatggatcatctactgggctagctgttacaagaggtttattgtggctgtgaaagtgtcttgcacaacttaagcatatccagagcaaattgtatttcaaacattgcctttgctctggactccagtggactccaactgttccgctgaacgtttttttttaatcattttcctggaaggcagcgtagaagtgttgagactacagattcttttatctagtataaattttcaaagagcttcattgttgatttttttttttacattgctcaacttattctc

SEQ ID NO: 27157 - DNA, 600 bp, Chicken  19866894244032_1
gctcagtgttgcagagctgaggagcaagctgccctcctcttagcagggatgctgagcgagtctcattaagccaggacaccttgctggaaggtgccgttgcattacattgaagtaaaaaacaattctagcttggtaaataaaatccacttctggattgtgccatctgtgtagctgtttgctggttgaagagatttcaagtgcataataattacagcaggcatctaaattgccaattaaaacgacttcttggcaattttttgtagatgttttagatccactgttgtcggtaacctaatttcrtgagtcaattaagattcatccttgctgaagctttcattcagagatgaaacactgcagtctgatgctttcaggagatatatacggagcaaaagcgcatgaatatttatcttctggttcaagctatttatttctgtcccttgaagtacagcagctatgttttatttcagccggcaacttgagaagaggtgggctcggctcttacttcaccagtcatgttttwagagggttgggagcttgtttgtttgttcgtttgtagcgtcggtatgagggctgtatgtatttgatctggcagtggttcct

SEQ ID NO: 27158 - DNA, 600 bp, Chicken  19866894244032_2
tctaaattgccaattaaaacgacttcttggcaattttttgtagatgttttagatccactgttgtcggtaacctaatttcrtgagtcaattaagattcatccttgctgaagctttcattcagagatgaaacactgcagtctgatgctttcaggagatatatacggagcaaaagcgcatgaatatttatcttctggttcaagctatttatttctgtcccttgaagtacagcagctatgttttatttcagccggcaacttgagaagaggtgggctcggctcttacttcaccagtcatgttttwagagggttgggagcttgtttgtttgttcgtttgtagcgtcggtatgagggctgtatgtatttgatctggcagtggttcctcagcagcctgtttctggacagaagctgcccaggagatgcactaatggaaacactgctttttatttacatttgttgttaggtgcattaagcaggccatgggattaattttcctctgtaccaagctgactttacattctgaccaagctggtttctgttcagttgagcttctgtccattaaagacatgcacgcatctgataacagagggtcctttcagagctc

SEQ ID NO: 27159 - DNA, 600 bp, Chicken  19866894244033_1
agggaaggttccctgagtagcctggatagtgatacttctccagcagtcagatttcctcattgtgcctcatgcagtggctttcttttcaccccatgagttattggaaaaggtgggcacagagatataaaaggtagtcctgggctgctaggaaattcctctgctaacacgttcctacagattctttcattttgactcagaaaagcaggcaggtgaagcacagagtgaactctatgcaactatttggtcatttctcttctactttcatttcctaacctcctcagattgactttcgtgggcttytgtggyaggtgatggcagaggcattgctctctgcccctgccatcccacagtcccagccccagcaaagccctctttgtctcaagaagttttttcggggaaagttttatccaactgcttggctgggcacacagccaacaaaggcagcccctctgggctcatcagaagagaccttgtactacattttccactatacttatctaatcttggcttgcgtccatccagtgtttgtgcagtaattacctcactaggcaaaacagttccactgcctaattgtcttcacttgcaggaaattgtgcctaa

SEQ ID NO: 27160 - DNA, 600 bp, Chicken  19866894244033_2
ggttccctgagtagcctggatagtgatacttctccagcagtcagatttcctcattgtgcctcatgcagtggctttcttttcaccccatgagttattggaaaaggtgggcacagagatataaaaggtagtcctgggctgctaggaaattcctctgctaacacgttcctacagattctttcattttgactcagaaaagcaggcaggtgaagcacagagtgaactctatgcaactatttggtcatttctcttctactttcatttcctaacctcctcagattgactttcgtgggcttytgtggyaggtgatggcagaggcattgctctctgcccctgccatcccacagtcccagccccagcaaagccctctttgtctcaagaagttttttcggggaaagttttatccaactgcttggctgggcacacagccaacaaaggcagcccctctgggctcatcagaagagaccttgtactacattttccactatacttatctaatcttggcttgcgtccatccagtgtttgtgcagtaattacctcactaggcaaaacagttccactgcctaattgtcttcacttgcaggaaattgtgcctaatagcca

SEQ ID NO: 27161 - DNA, 599 bp, Chicken  19866894244038_1
  misc_feature (1)..(180): n is any nucleotide
nnnnnnnnnnnnnnnnnnnnnnnnnnnnnnnnnnnnnnnnnnnnnnnnnnnnnnnnnnnnnnnnnnnnnnnnnnnnnnnnnnnnnnnnnnnnnnnnnnnnnnnnnnnnnnnnnnnnnnnnnnnnnnnnnnnnnnnnnnnnnnnnnnnnnnnnnnnnnnnnnnnnnnnnnnnnnnnnnnnnaaaacaaggaagtaccaattgtttcctctacttaccagcggtggtcactaaaattaatgaggtttatttttatggcttcattctctgtttctcttttgacctctttctactatatatatrtgtgtatatatagtatatatgcatatttcacgttcagaaagatgaacaccttgaaagaatttgtctgaaacagtcctgtactataatagtgggagagattacatctagagctctgcttgcttgatttctcctgcaaacaccacctgtgtcacacaagaagatcagttttcttcccagytgaacagttacgtttaagtacatacagctaacttcagggcacttagcgatgtcctgtttctgtgaaaaataggggaaccagctaaacaatggggaagctcaggtagaatggggctctctat

SEQ ID NO: 27162 - DNA, 599 bp, Chicken  19866894244038_2
  misc_feature (1)..(2): n is any nucleotide
nnaaaacaaggaagtaccaattgtttcctctacttaccagcggtggtcactaaaattaatgaggtttatttttatggcttcattctctgtttctcttttgacctctttctactatatatatrtgtgtatatatagtatatatgcatatttcacgttcagaaagatgaacaccttgaaagaatttgtctgaaacagtcctgtactataatagtgggagagattacatctagagctctgcttgcttgatttctcctgcaaacaccacctgtgtcacacaagaagatcagttttcttcccagytgaacagttacgtttaagtacatacagctaacttcagggcacttagcgatgtcctgtttctgtgaaaaataggggaaccagctaaacaatggggaagctcaggtagaatggggctctctatttgggccccccccaaaaaaaagattaatattttatttctgggagcagatataacttagtgaaaatctaggtaatattctcagaggaggaaaaaaaaaagcaagcaagggaggcatccgatgcattgtctgatggatgcactgctgcaaaactggagttcgtgagatgcctgtgaaaca

SEQ ID NO: 27163 - DNA, 600 bp, Chicken  19866894244040_1
ctgcacaggacaccgagaatgcatggaggttcttctggctcatggggttgacattgaccaagaagatctgcaatatgggaccctgctgtatgttgcttgcatgtaccagaggacagactgtgtaaagaagctgttggaacttggtacgtccagagaaggagctggggaaaagctggggtagtgtaagctaccacaattctgtccaagttacccctctgccataaacattttgaagtatttctgcaagagatgtttggacagcctggatctgtgagataattaaaatttcacttgtatttsttaagaatacatgcccatgaggtggtgtagtcaccatccctgaagatgttgaagaaccatatagatgtggtgctgaggggcatggttagtgggcatggtggggatgggctgacagttggatttgatgattttagtgggtttctccaatctttgtgattctatgtaattagaatctccctactgaaaaattctaattacagagatctacttgagaccatttgaatgaggaagtaaaccagaattttagttttctaaaacaatggcaggaaacaaaatgtcagctaatattgatgaccaaaa

SEQ ID NO: 27164 - DNA, 600 bp, Chicken  19866894244046_1
gaaaatctttgctgaaaatgttacccatccctaattgaaaaagtgatattctttttctaaatatgtctattctgtcaggtagcctcctgagctaattgggtttccagtggttcacagcactgagcccattcaagctatttcaaagggtacacttgcataactgggactgttctatacaccaaacatattggcctatttctgagctgaatgactaatacttaaaggagagtggcactgacagtgcttaaagaaagaaaccttgaggaatctttatttaaaagaaattaaaaaaacgtagarcccacactctttgggagatcagttttgcttatggatgcaattttcttctgcaattcacaagtcagctctgattacttgggaaaattgagcttaaaaaacaagcaagcaaatccaactggacacaacagagataatacatgatttgaagtgtgagaatagaaccctgcatgccttataytgcactccttttcctaagcagctttgcacagagcaagcacagatctgacactgcttgtattgagctgagctgagctctagaagagctgctgacccctgaagataatgtctgttgtccatcac

SEQ ID NO: 27165 - DNA, 600 bp, Chicken  19866894244046_2
ccaaacatattggcctatttctgagctgaatgactaatacttaaaggagagtggcactgacagtgcttaaagaaagaaaccttgaggaatctttatttaaaagaaattaaaaaaacgtagarcccacactctttgggagatcagttttgcttatggatgcaattttcttctgcaattcacaagtcagctctgattacttgggaaaattgagcttaaaaaacaagcaagcaaatccaactggacacaacagagataatacatgatttgaagtgtgagaatagaaccctgcatgccttataytgcactccttttcctaagcagctttgcacagagcaagcacagatctgacactgcttgtattgagctgagctgagctctagaagagctgctgacccctgaagataatgtctgttgtccatcacatactgagagacctttgcttgaggacatagtctgactaaattagctgtcatgaaccaggagttaaggtagaagacacctgaaggagtcatgagtcctcatgactaacagcctttcacttctgattagcaccagctgagcaagacctggtggggcccaggaaactgctgctagaaatag

SEQ ID NO: 27166 - DNA, 600 bp, Chicken  19866894244046_3
ttgtattgagctgagctgagctctagaagagctgctgacccctgaagataatgtctgttgtccatcacatactgagagacctttgcttgaggacatagtctgactaaattagctgtcatgaaccaggagttaaggtagaagacacctgaaggagtcatgagtcctcatgactaacagcctttcacttctgattagcaccagctgagcaagacctggtggggcccaggaaactgctgctagaaatagtaccgaggtgctgagatcccagtcctggttccacagtcctttcactcatgcttycactatgtcagagcaccaaagcttttgaaccacatcttggcctgatcaatctaaagtcagcacagaccctcactgagaagtctgagcttcacacctggattaggtactgaaaaattgcttattaactgaggaaccaaattcaaattagaataggtctggtccttagcctgacatttctagccagcctccaagttccagtataagttaattgattccagtataaatgaatcttctgctggatatcacttttcctggagaagttcactttcagtatctaaatgggggctataagaaggaagt

SEQ ID NO: 27167 - DNA, 600 bp, Chicken  19866894244051_1
caagctatgcttcaaacacacaacacactgggatcctacaataacacagtctggcagcaaacgatgactgccaacttggaaggaagagctaaaagcagatggatgcatctgcattaactcaggacaatgcaaatctgtttttctaggaaaagtctggaaggaaagctggctttctatggggaaagatcattagtgatatccatattttgtgtcaaactgcttcagttggacacttgctggagtgctgcagcgattcccaatctgtctcaggcagtgcccgaagatacagtgctcagtaayaccacctgccccaatcccatccttctcttctgcttttcactctcatccacaattcacgcagcattgctcctcagctgcactggacacwgagttgggcaagagcacctcttgttgatgggacttaggacagggccttaggtctgtctcacatctaaagaaacgggaccacaagctttgctgtgtctctggacactcagcatcctcactcaagctgttaggatactgtaagcgctgcagggcaccactaacggccaaggctctgcagtaacacaggcaattaataattaacaagtgccatca

SEQ ID NO: 27168 - DNA, 600 bp, Chicken  19866894244051_2
ctaaaagcagatggatgcatctgcattaactcaggacaatgcaaatctgtttttctaggaaaagtctggaaggaaagctggctttctatggggaaagatcattagtgatatccatattttgtgtcaaactgcttcagttggacacttgctggagtgctgcagcgattcccaatctgtctcaggcagtgcccgaagatacagtgctcagtaayaccacctgccccaatcccatccttctcttctgcttttcactctcatccacaattcacgcagcattgctcctcagctgcactggacacwgagttgggcaagagcacctcttgttgatgggacttaggacagggccttaggtctgtctcacatctaaagaaacgggaccacaagctttgctgtgtctctggacactcagcatcctcactcaagctgttaggatactgtaagcgctgcagggcaccactaacggccaaggctctgcagtaacacaggcaattaataattaacaagtgccatcaggaacccaaccacatccaccttgctgtcctgcagccctttgcaagctgctgacctaattatcatatctattcttagctgcctcccagg

SEQ ID NO: 27169 - DNA, 600 bp, Chicken  19866894244053_1
attgcaccctcagcacactcctaccaaagctgtggctttgtctgacctctcaacgccttatatttgtacctgacaagggttgggcagcttaccaggccctgcaaaaacagcgctgtctctgtacagccaaaaacaggccaagcaaagatagcagtccatttcagcagtgcatttatacagcatgaagctttgtttcgagccctcggggacaactaattcactaaattggagctaagctttcatacagctaacgcacttaaaggaaaggaaatgagtctgacccccccaggcctcagcackgggctcctccagcacagcttctggagagggcctcgcagacacccatctctgtamcctttcagacagttgatatcatcccatttaattccagcttctacaacgatgctcctcaagtcactgaaggcattaccaccttcccaaagcatctacgttaacacarctgcaaacaaactgctttcaggatggactttccagaactactttatttgctattggaaagcacatcctcaggattagcacaaggaaaacgccagtaacaaccccgtgtccttcccatgtaatctgctacttcctggtcaa

SEQ ID NO: 27170 - DNA, 600 bp, Chicken  19866894244053_2
gccttatatttgtacctgacaagggttgggcagcttaccaggccctgcaaaaacagcgctgtctctgtacagccaaaaacaggccaagcaaagatagcagtccatttcagcagtgcatttatacagcatgaagctttgtttcgagccctcggggacaactaattcactaaattggagctaagctttcatacagctaacgcacttaaaggaaaggaaatgagtctgacccccccaggcctcagcackgggctcctccagcacagcttctggagagggcctcgcagacacccatctctgtamcctttcagacagttgatatcatcccatttaattccagcttctacaacgatgctcctcaagtcactgaaggcattaccaccttcccaaagcatctacgttaacacarctgcaaacaaactgctttcaggatggactttccagaactactttatttgctattggaaagcacatcctcaggattagcacaaggaaaacgccagtaacaaccccgtgtccttcccatgtaatctgctacttcctggtcaagatttttgtttcaaggctttagaaagtgaagcacaccttgtcctgtgctgggac

SEQ ID NO: 27171 - DNA, 600 bp, Chicken  19866894244053_3
tcagcagtgcatttatacagcatgaagctttgtttcgagccctcggggacaactaattcactaaattggagctaagctttcatacagctaacgcacttaaaggaaaggaaatgagtctgacccccccaggcctcagcackgggctcctccagcacagcttctggagagggcctcgcagacacccatctctgtamcctttcagacagttgatatcatcccatttaattccagcttctacaacgatgctcctcaagtcactgaaggcattaccaccttcccaaagcatctacgttaacacarctgcaaacaaactgctttcaggatggactttccagaactactttatttgctattggaaagcacatcctcaggattagcacaaggaaaacgccagtaacaaccccgtgtccttcccatgtaatctgctacttcctggtcaagatttttgtttcaaggctttagaaagtgaagcacaccttgtcctgtgctgggacatctggacgctgtttctgatctgtacattatgatgtacaagaaggccctgtcaagaagggagaaaaagaagatccagggaactacaggccaggcccggccctactg

SEQ ID NO: 27172 - DNA, 600 bp, Chicken  19866894244057_1
aggatgttgactgaggtctcgtaagatctgttgcatgaagcattcttagtatgaactctgtcaagtcctggtcagaattggcaagtaatggtcccaggccatttgctggttgtctatttttgaacttacaagtgcttgaacatagaacagtttaggttggaaagggtctctgtagatcatctagtccaacctttaacctcacctttgaagaggaagaataatcacttgtttaaactttcagtgataaccacttgcagttgtttaactatatatgcctttgggcacctgtattaaatgttkaatgtgcatgctcgatatatcagttccttaaaggcaaattaaggaccaaactaatggattccatactagactagacacacataggcattgtaggtacttggttatataatcgagaccaaatttataagcatgtgaatataatttctatggtgattttgataacgtgctgtactgaatagcaaattctacttatggttcttgacactccctgttaaccagaggagagcaaccttccccttgtatttttggatattttgttttctggtctgtgatttgtaacctaggagaaatagatgattc

SEQ ID NO: 27173 - DNA, 600 bp, Chicken  19866894244061_1
agtttggtttctgaaaaatacatgcttggtatttctgcaaatggagaagggtttagtgaagtgctgcaaatggaaacacccttaattagcagaagataatacattgggttttaatggtatctagcacatatgtcagcactatcaccagggcctggctactgaaacttttgtgggctatgacaaggacatgctgctcagaaaatgttgaaaactgtggaatttgaatagagtgaaacaacacaaaactaaggtttgtactctctttcttgtcatttatcttgggagtatcagatgggactstgcatatgctctctagacacatgttctgcaatccccagcttcaacaaacctttgctgaacttgcagaaataatacaactgggaagaaatcaataccgtttatttttccctttacctaaatcagcccttctgcagctgaatgagtccgggggatgcaggaagcctggggctgctgccagcagagctcagcctgcggcgtgccgcgctgtgaggtgccaactgagccatttgctctgttcccaaacatcacttttctgatgtgaaatcaggctgggtgtaagaacttaattaagagggaaat

SEQ ID NO: 27174 - DNA, 600 bp, Chicken  19866894244061_2
caggtgacattctccacacaggcagcagagcttcagggatactggggtaaccccaggcaggtgggcactcagctcagctggaaatggttagagaaggggaaagcatacagaggaatcagctgctgggctttgtgaaagctttggcctttcctcttccttcctgatagtgccacagctttgccagctggtaagggacttttccatgtctccaccttggagagaagagtgtggtgtgctctgatttgaatgaagaaacaggatcattgtggtctgttttccccatcctttgagccatcccartgcaggaaccaagagaagaaatctcattctttctcttctgcccttgaaaaaggtaagttttgtgacaaggacattgtttggctcagtacagctggtggggaactaaaggaaaattcagagcacgctacttattcttttcaaattctgctgaatcaagtgtaaacagctcactaatatagctatttttgaagacaaacagttttttactttattggaaaagctttttttttttttatattgtatatgccttggagagccaatgttaaaagtgtgttttaacagattaattgccttccaagt

SEQ ID NO: 27175 - DNA, 600 bp, Chicken  19866894244064_1
ctctatgactaattcaggctcttactgagaaaaaaaaccaaacagtaacatttatctacatgtacaatattattgcttgattcaaactttaaattcagaaatgagtgactatttcagcatcctaaaagaaagtgttacctggacacttgatctggggtttctagcctagaattattccttcagataagtgatactataaaaaaatctaagaattacttgcaagtgacaacctcatttgtgatgctatagggtgttacacagagaaaccatccttaggatacgctacatacagagaaattyaaataacagtagcagtcttctagaacaacagtgcagccagaagctcatggagagccacacaaactgaaagcaggaacatgatataaaacaaaattatttttaaatcaaaccaattaataaaaaaaaaggtcacaaacctcaaaaggaggaacagtggcttttaattttcacagtagttctctacttttttgctccatgctgccacaatagcaatatcagagtgaattcagcagtaatatcagatagatcagggaagagcacataatagaaaacaaaaaaaaaaaaaaaaagaaggctgtt

SEQ ID NO: 27176 - DNA, 600 bp, Chicken  19866894244066_1
gatgctctgggaaaaagattgtggaaacttggcatgcagccgttacgtgattaaaagtcaggcactggagacatgctggtgaacagcagctgttctaaattctgcagtgtagctatatggcctgaaaagtgaggctgtaaaagttctacgtcttccagtgctctgcatttattctccatcagtgacttccagatcacacttgttgagttttacgagtcgaatcaaagtcctttttgcctaacttccagtcgtgcaaattcagcctgatccaacctgtgcagccaaaacgcttttctgtgygatgggtgtttttttttaacgttagcccaatgtcagaaatcatcacgtagccataaagctgtattcagctggcttctgattggaaataaaacgtttctataagtacttttctcccatcctggctggctgctaaaagcctktggtggatggattsctgtagctgtctgcagcagagctgcggggccaccagtctgcactatgccatttcattttgccctgacgctgtttgcaggattaggctgttctccgtgatgctgtgtcacaggaagcactgggcttgcaatgggagctgagagctgc

SEQ ID NO: 27177 - DNA, 600 bp, Chicken  19866894244066_2
aagttctacgtcttccagtgctctgcatttattctccatcagtgacttccagatcacacttgttgagttttacgagtcgaatcaaagtcctttttgcctaacttccagtcgtgcaaattcagcctgatccaacctgtgcagccaaaacgcttttctgtgygatgggtgtttttttttaacgttagcccaatgtcagaaatcatcacgtagccataaagctgtattcagctggcttctgattggaaataaaacgtttctataagtacttttctcccatcctggctggctgctaaaagcctktggtggatggattsctgtagctgtctgcagcagagctgcggggccaccagtctgcactatgccatttcattttgccctgacgctgtttgcaggattaggctgttctccgtgatgctgtgtcacaggaagcactgggcttgcaatgggagctgagagctgcagctytggtgtagcagaaccagctgtaattccacctctatcagtgagtgccttctaagatgtggttgcaagacctttgcacatgaagtactttttgtaaggttctcagagttttgatttccctccttcccttcatttctt

SEQ ID NO: 27178 - DNA, 600 bp, Chicken  19866894244066_3
ccagtgctctgcatttattctccatcagtgacttccagatcacacttgttgagttttacgagtcgaatcaaagtcctttttgcctaacttccagtcgtgcaaattcagcctgatccaacctgtgcagccaaaacgcttttctgtgygatgggtgtttttttttaacgttagcccaatgtcagaaatcatcacgtagccataaagctgtattcagctggcttctgattggaaataaaacgtttctataagtacttttctcccatcctggctggctgctaaaagcctktggtggatggattsctgtagctgtctgcagcagagctgcggggccaccagtctgcactatgccatttcattttgccctgacgctgtttgcaggattaggctgttctccgtgatgctgtgtcacaggaagcactgggcttgcaatgggagctgagagctgcagctytggtgtagcagaaccagctgtaattccacctctatcagtgagtgccttctaagatgtggttgcaagacctttgcacatgaagtactttttgtaaggttctcagagttttgatttccctccttcccttcatttcttcaatgctataccag

SEQ ID NO: 27179 - DNA, 600 bp, Chicken  19866894244066_4
gtgtttttttttaacgttagcccaatgtcagaaatcatcacgtagccataaagctgtattcagctggcttctgattggaaataaaacgtttctataagtacttttctcccatcctggctggctgctaaaagcctktggtggatggattsctgtagctgtctgcagcagagctgcggggccaccagtctgcactatgccatttcattttgccctgacgctgtttgcaggattaggctgttctccgtgatgctgtgtcacaggaagcactgggcttgcaatgggagctgagagctgcagctytggtgtagcagaaccagctgtaattccacctctatcagtgagtgccttctaagatgtggttgcaagacctttgcacatgaagtactttttgtaaggttctcagagttttgatttccctccttcccttcatttcttcaatgctataccagtcccagaagctggagttcacagaaaatcaaggtatttcatccccttacattttaaatccccttcagcagggtccacaaatctgcacctgggacctgctatccacttagcatgcccagcccatggccagagctctggcctgtgctgtaggca

SEQ ID NO: 27180 - DNA, 600 bp, Chicken  19866894244066_5
tgcccagcccatggccagagctctggcctgtgctgtaggcagggcagccccaagcagaaccagtgctgggtgcctgcaagtgggctctgtctgccctcagcatcccttaaccacgtggaaaaaaaaggagcagctcaaaaaggaagctgaacttgcccagatagatagagcttggaagcaatgactaacagcaagtattgtcactgaggaagtaacccaggggcataatttttatcagctgaattaacagagcgctgatgaggtcggacagtgcctgtgtgcagtggaggtgattccacrctgaggatgcccagcagcatcaggactggggggggtacctgtcagcaggatgtgttttccaaaggcatcacagcagctgggtttgtatctctcatacagaagcctttggccccagatgtcagtgtgctttgcttagctgctctggaggaatcttccctgttgctgcggtaggcaaagttgagttttccttttagcgaatggtttggctgcagtgccactgatgcttgaaatgctattagtgggattgcggagcggaggtgtttaaatttcacagctgtcgacttctcccaggtagggata

SEQ ID NO: 27181 - DNA, 600 bp, Chicken  19866894244075_1
atttgaaggctgtaatgtgttctgttcacctcctcttctacagaatgaacaagcccagctccttcagcctgccttcatatgagagttgctccagttctctgctcacctttgtggccctcctctggacccactccaatagctcaacatctttcctgtgttggggtccccaaacttggacacagtgctccagatggggcctcacagtttgagagcagagggggacacccacctcccttgccctgccggccatccctcctctgatgcagcccaggatacttctggcttcatgggcttcaagcrcacrctgctggtttatgttaaatttttcatctatcaggacccctaagtccttcttagcaaggctattctctattaacttctagaaaagaatagttttaacaagctttgtctggagattttctactaggaaaacattctaaagggacagaaatattgatgaattctaacagtaaattttagtgacatcccacaaggctacgtggttgtgccaggtgctaaccagccttcagactccctctcacttggcctccctggattatcatataagagctgaatctgctgacatttatcacttttagt

SEQ ID NO: 27182 - DNA, 600 bp, Chicken  19866894244075_2
gaaggctgtaatgtgttctgttcacctcctcttctacagaatgaacaagcccagctccttcagcctgccttcatatgagagttgctccagttctctgctcacctttgtggccctcctctggacccactccaatagctcaacatctttcctgtgttggggtccccaaacttggacacagtgctccagatggggcctcacagtttgagagcagagggggacacccacctcccttgccctgccggccatccctcctctgatgcagcccaggatacttctggcttcatgggcttcaagcrcacrctgctggtttatgttaaatttttcatctatcaggacccctaagtccttcttagcaaggctattctctattaacttctagaaaagaatagttttaacaagctttgtctggagattttctactaggaaaacattctaaagggacagaaatattgatgaattctaacagtaaattttagtgacatcccacaaggctacgtggttgtgccaggtgctaaccagccttcagactccctctcacttggcctccctggattatcatataagagctgaatctgctgacatttatcacttttagttact

SEQ ID NO: 27183 - DNA, 600 bp, Chicken  19866894244075_3
tttcatctatcaggacccctaagtccttcttagcaaggctattctctattaacttctagaaaagaatagttttaacaagctttgtctggagattttctactaggaaaacattctaaagggacagaaatattgatgaattctaacagtaaattttagtgacatcccacaaggctacgtggttgtgccaggtgctaaccagccttcagactccctctcacttggcctccctggattatcatataagagctgaatctgctgacatttatcacttttagttactttccccattaagctacttcyatttttcttagtctctaaaaaacaacagggaataagctacagctgctgttgctgcccatgtgcatcttcacagtttcaactctcgatcagttcccacagtaacagtaagtttccagtttaacattttcaacattttgaggtagtctagatcaaaggagtgtctgagaactggcactttggctctgcgttgcaactcatgcaacaaatttcaaaggtatctgctatcaacagaacaggtaaatagaagttagtattaattaggctggagggaagtttgccattctgaatgcaaattactca

SEQ ID NO: 27184 - DNA, 600 bp, Chicken  19866894244075_4
ccattctgaatgcaaattactcatttcaacaacagcatgtggaatgtcagatctcctattaacacatcagaaaacagaacattatttgctagacaaatccattgctgaggtccaaaatgaagcacattatagaagatctagtggctctgtgctaggcaaggtaatgtattttggaacacacactctctgttgactctgtagggactggaagcaggaatgggttacctgtgaggaccacaaagaagttgtctgagcaaccacggatcaggttaggaaagctaaaacccagatggaattaartctagccagggacgtgaaaggaaacaagaagaaattcttcatgtgtatcagtaataaaaagagagacaggccagggaatatgtcggccctttccwgaggtgattggtgttaactgacatagtttcaccaagggcaagtctgacaaacttggtggccttttatgatggagtaacagcgtcagtggataaaggaagagcaactgaagtcatctacctggacttgtgcaaagcatttggtgctgtcctgcacaacatcctggtcacgaaattggggaaaaatttagatttaatggatggacca

SEQ ID NO: 27185 - DNA, 600 bp, Chicken  19866894244075_5
aatccattgctgaggtccaaaatgaagcacattatagaagatctagtggctctgtgctaggcaaggtaatgtattttggaacacacactctctgttgactctgtagggactggaagcaggaatgggttacctgtgaggaccacaaagaagttgtctgagcaaccacggatcaggttaggaaagctaaaacccagatggaattaartctagccagggacgtgaaaggaaacaagaagaaattcttcatgtgtatcagtaataaaaagagagacaggccagggaatatgtcggccctttccwgaggtgattggtgttaactgacatagtttcaccaagggcaagtctgacaaacttggtggccttttatgatggagtaacagcgtcagtggataaaggaagagcaactgaagtcatctacctggacttgtgcaaagcatttggtgctgtcctgcacaacatcctggtcacgaaattggggaaaaatttagatttaatggatggaccactygctggataagaaaatggctggatgattgcactcagagggttgcagtcaattgctcagtgtccaagtggagaccagcgacaagttgtgttcct

SEQ ID NO: 27186 - DNA, 600 bp, Chicken  19866894244075_6
agccagggacgtgaaaggaaacaagaagaaattcttcatgtgtatcagtaataaaaagagagacaggccagggaatatgtcggccctttccwgaggtgattggtgttaactgacatagtttcaccaagggcaagtctgacaaacttggtggccttttatgatggagtaacagcgtcagtggataaaggaagagcaactgaagtcatctacctggacttgtgcaaagcatttggtgctgtcctgcacaacatcctggtcacgaaattggggaaaaatttagatttaatggatggaccactygctggataagaaaatggctggatgattgcactcagagggttgcagtcaattgctcagtgtccaagtggagaccagcgacaagttgtgttcctcagagatcaactcagggactggtgtcatttaacatctttgtaggtgacatggacagtgggatcaaatgcactttcagcaagtttgcaaacaacaccaagatgagtggtgcagtggacacagggaagggatgctatccagagggacctagacttggcttgggagatgggcccacgccaacctcatgaagctcaataagaccaagtacaa

SEQ ID NO: 27187 - DNA, 599 bp, Chicken  19866894244080_1
  misc_feature (1)..(15): n is any nucleotide
nnnnnnnnnnnnnnntttctacctccattcctaaaatctgtgcgtctacagctgaaattaattgcagtttattacttgtctataaatgattccatatttaccaacttcttgctgtatgttcaaatctgtttccacaagaaaagtgttttctttccatcacataaaaaatagaaatgaatataacaaagtcaacaagctttagaagctggagatagggtttgaagattgaccattatgcaattatgaaccatgtatgccaatgttgttgaatatctcagcatgcaatacttttctcaaatkttaacccttcagtaactcaaggaatcacagaattataaaatagaagagggtgggaaggacttctggaggttgccttctctaaggccaactttaaagtaaaattactggacctcatctcagttgagtttggatatgtcckatgtggattctaaaacttctctgagtaatatctcttactgtttgagtgctctcagcgtgaataatktttttccttatatctaaacacaatctcccttgctgcaatctgcattcattccttctgtccctttcatctccaaaaaaatactgtctctatcatc

SEQ ID NO: 27188 - DNA, 600 bp, Chicken  19866894244080_2
aaagtgttttctttccatcacataaaaaatagaaatgaatataacaaagtcaacaagctttagaagctggagatagggtttgaagattgaccattatgcaattatgaaccatgtatgccaatgttgttgaatatctcagcatgcaatacttttctcaaatkttaacccttcagtaactcaaggaatcacagaattataaaatagaagagggtgggaaggacttctggaggttgccttctctaaggccaactttaaagtaaaattactggacctcatctcagttgagtttggatatgtcckatgtggattctaaaacttctctgagtaatatctcttactgtttgagtgctctcagcgtgaataatktttttccttatatctaaacacaatctcccttgctgcaatctgcattcattccttctgtccctttcatctccaaaaaaatactgtctctatcatctacaccctctcactagacagtcttcctacctagagtctcamcatagctttctcttctccacgctgaatagatcttgctttctcggcctctccttgcacatcatatgctccagacctctaaccatcttggtggtcttccag

SEQ ID NO: 27189 - DNA, 600 bp, Chicken  19866894244080_3
ctggagatagggtttgaagattgaccattatgcaattatgaaccatgtatgccaatgttgttgaatatctcagcatgcaatacttttctcaaatkttaacccttcagtaactcaaggaatcacagaattataaaatagaagagggtgggaaggacttctggaggttgccttctctaaggccaactttaaagtaaaattactggacctcatctcagttgagtttggatatgtcckatgtggattctaaaacttctctgagtaatatctcttactgtttgagtgctctcagcgtgaataatktttttccttatatctaaacacaatctcccttgctgcaatctgcattcattccttctgtccctttcatctccaaaaaaatactgtctctatcatctacaccctctcactagacagtcttcctacctagagtctcamcatagctttctcttctccacgctgaatagatcttgctttctcggcctctccttgcacatcatatgctccagacctctaaccatcttggtggtcttccagggactgatctactttatcttagtgtttcattagctataaggtgttctaagtttattgctttgtcaa

SEQ ID NO: 27190 - DNA, 600 bp, Chicken  19866894244080_4
tagaagagggtgggaaggacttctggaggttgccttctctaaggccaactttaaagtaaaattactggacctcatctcagttgagtttggatatgtcckatgtggattctaaaacttctctgagtaatatctcttactgtttgagtgctctcagcgtgaataatktttttccttatatctaaacacaatctcccttgctgcaatctgcattcattccttctgtccctttcatctccaaaaaaatactgtctctatcatctacaccctctcactagacagtcttcctacctagagtctcamcatagctttctcttctccacgctgaatagatcttgctttctcggcctctccttgcacatcatatgctccagacctctaaccatcttggtggtcttccagggactgatctactttatcttagtgtttcattagctataaggtgttctaagtttattgctttgtcaataacttcatgaatgtcaatgacaatagaagaccacataatagaaagcagattgtgaaaacatgcaaataacattgggtcgatgaaagtgtcctcttttctgttttttgtctcccttggagaatatgatgtaattc

SEQ ID NO: 27191 - DNA, 599 bp, Chicken  19866894244084_1
  misc_feature (1)..(48): n is any nucleotide
nnnnnnnnnnnnnnnnnnnnnnnnnnnnnnnnnnnnnnnnnnnnnnnngaggcagtgggttaattggcctgataatcagcctgtttcactaatcagtccctgtagaggggttctgtttattttatcaggcttataaatccagcgttcctggtgatttatttaagaggctgatttctgattttgctctctggcgtttattttaagcaattattattatttttttttctttcatagcaaacacagaatctgctaagatatttcccctaggaattgtattgattcggcaggtctattcccaaygtgagyccttctctcagacaattccctgtacttgtggagccaccttagagatgctccgagcccttaccaaagcgcacaactcactagtgggcatcctgagcatggggcacgtggacttcagcctaaggaacaccctgagatgtcagtatgttgaaaacaacatggcttaaaagaaccatagaatcattaggctggaaagataactaagaccacccagcccaaccatccctcgtgcctgtgacgtgccttcctttggaggaacacgttgcctttgagtggcaccgaacactgtgggagcc

SEQ ID NO: 27192 - DNA, 599 bp, Chicken  19866894244084_2
  misc_feature (1)..(42): n is any nucleotide
nnnnnnnnnnnnnnnnnnnnnnnnnnnnnnnnnnnnnnnnnngaggcagtgggttaattggcctgataatcagcctgtttcactaatcagtccctgtagaggggttctgtttattttatcaggcttataaatccagcgttcctggtgatttatttaagaggctgatttctgattttgctctctggcgtttattttaagcaattattattatttttttttctttcatagcaaacacagaatctgctaagatatttcccctaggaattgtattgattcggcaggtctattcccaaygtgagyccttctctcagacaattccctgtacttgtggagccaccttagagatgctccgagcccttaccaaagcgcacaactcactagtgggcatcctgagcatggggcacgtggacttcagcctaaggaacaccctgagatgtcagtatgttgaaaacaacatggcttaaaagaaccatagaatcattaggctggaaagataactaagaccacccagcccaaccatccctcgtgcctgtgacgtgccttcctttggaggaacacgttgcctttgagtggcaccgaacactgtgggagcccaaacc

SEQ ID NO: 27193 - DNA, 600 bp, Chicken  19866894244092_1
cctgcccccagagtgatcctgttttcaggggattatgctgtatttagagcctgcagacattagtagtatttaggaaaacagctatgattctcttgaaaatgtcttgcttagtaaatgataaagatagttaaacaaaaaaacacaagcaagacaatcaccaccatcaccaaaacaaaactaagcaaaacaaaaagagcatgcatacctttcatttttcttacttttcttaaagtgaatagtttttactatgatcagtggaagttactcagtgtctgctaactggtattgcgatagaagtamgaattcagacccagctgaagttaatgagaaggctcccaatgacttcagtcaaaccatgagtttaagtatttcccgagacaaaagagtggaggtccctgtgaaatggcttacttaatcagagtaagggatacaaaaaggaaaaagttttctggatgtgcaatttaacttgtattcattttgttacacatggcaattcagttttttctagagttgcctgagtgttgaaagaatttttatatgtccattctgaaatttgggtttattggtaaactttactacgacaatatttaattcctaccc

SEQ ID NO: 27194 - DNA, 600 bp, Chicken  19866894244092_2
aagttgtgtgcaaaaactgctagagccatatattgctgggatttcagagtagcttaaatcttcagtaggatttgggtgcttggtttaacgttccatttaatgtctctctaagctatgtattacagaaggaaagtattatcaattctacagatttgtagagcttcacttagtgaagcagtttgcacttcttagggatatgcattatggtgaaagttcatgaggcggtggcatggagagtaacttcgttttatcattcatgtattagttgacattatgaaatattctatgaccaattgattwtttttttttgtgctatcagcactgcagtgcagtcatctctgattaatggaaaatggttgtataaggagaaaggtgctcactgtaaagctataatgggcctcctttgaagaagaattaaggggtgaatttactatttaaccaatgatatgagtagcatataagttgcattgtctttggatgccgcacagggtctgtgatctcttcattcggtcatagtttttatggatcagttctcctttagtgctgtattcttccatgatgtggaagccacagtgctcaggcatctgaacgcagattaat

SEQ ID NO: 27195 - DNA, 599 bp, Chicken  19866894244096_1
  misc_feature (1)..(240): n is any nucleotide
nnnnnnnnnnnnnnnnnnnnnnnnnnnnnnnnnnnnnnnnnnnnnnnnnnnnnnnnnnnnnnnnnnnnnnnnnnnnnnnnnnnnnnnnnnnnnnnnnnnnnnnnnnnnnnnnnnnnnnnnnnnnnnnnnnnnnnnnnnnnnnnnnnnnnnnnnnnnnnnnnnnnnnnnnnnnnnnnnnnnnnnnnnnnnnnnnnnnnnnnnnnnnnnnnnnnnnnnnnnnnnnnnnnnnnnnnnnnnnnnggcgagagggaaccgatgagcctgctgtgcttcccatgccacccagcctgcttattttgyaagggccggcatctgttgcaacaatcacaagtcaaatgcaaaatctgatttctactttttctcgtctaaaacctcaaaacgctgagcatcactgcaagacaagaacgttcctgcagctcaggcttacaacagaaagatccagtgcaaaaaaaamaacgagggaggcccttaaatctgttacatgctcacctttgcagcatagctccacatttcaatacgatcattaaggcgtttcttgcattcaggctgcagcctcacacgcttgtcctccaaagcttccattaagcatgacatttcta

SEQ ID NO: 27196 - DNA, 599 bp, Chicken  19866894244096_2
  misc_feature (1)..(86): n is any nucleotide
nnnnnnnnnnnnnnnnnnnnnnnnnnnnnnnnnnnnnnnnnnnnnnnnnnnnnnnnnnnnnnnnnnnnnnnnnnnnnnnnnnnnnnggcgagagggaaccgatgagcctgctgtgcttcccatgccacccagcctgcttattttgyaagggccggcatctgttgcaacaatcacaagtcaaatgcaaaatctgatttctactttttctcgtctaaaacctcaaaacgctgagcatcactgcaagacaagaacgttcctgcagctcaggcttacaacagaaagatccagtgcaaaaaaaamaacgagggaggcccttaaatctgttacatgctcacctttgcagcatagctccacatttcaatacgatcattaaggcgtttcttgcattcaggctgcagcctcacacgcttgtcctccaaagcttccattaagcatgacatttctataacaaacaggatggtgttacaacatcaaaacggtgccttcaacaacgcactgtggaaaggctgctggaaagggatatttcagttctatgcgaggctgatggttgctcaactttctgagcagaacagctagactgatgaacagcacacaaagcc

SEQ ID NO: 27197 - DNA, 513 bp, Chicken  19866894244096_3
atctgttacatgctcacctttgcagcatagctccacatttcaatacgatcattaaggcgtttcttgcattcaggctgcagcctcacacgcttgtcctccaaagcttccattaagcatgacatttctataacaaacaggatggtgttacaacatcaaaacggtgccttcaacaacgcactgtggaaaggctgctggaaagggatatttcagttctatgcgaggctgatggttgctcaactttctgagcagaacagctagactgatgaacagcacacaaagccctgtcttccctttgaaggraattaattttacctgtcaaacgtactgaaacaaaaagccaaccacgggcaaayactgacaggaacaaataaggatcagaaggactggctaagagtaaatgttgtgaaactgaagtgctttgcttctktaagagaagcagcctagtcccagggaagcctttggtacagcctactatagcacggccctaagttggagctgcacaaagctgatata

SEQ ID NO: 27198 - DNA, 460 bp, Chicken  19866894244096_4
aaggcgtttcttgcattcaggctgcagcctcacacgcttgtcctccaaagcttccattaagcatgacatttctataacaaacaggatggtgttacaacatcaaaacggtgccttcaacaacgcactgtggaaaggctgctggaaagggatatttcagttctatgcgaggctgatggttgctcaactttctgagcagaacagctagactgatgaacagcacacaaagccctgtcttccctttgaaggraattaattttacctgtcaaacgtactgaaacaaaaagccaaccacgggcaaayactgacaggaacaaataaggatcagaaggactggctaagagtaaatgttgtgaaactgaagtgctttgcttctktaagagaagcagcctagtcccagggaagcctttggtacagcctactatagcacggccctaagttggagctgcacaaagctgatata

SEQ ID NO: 27199 - DNA, 386 bp, Chicken  19866894244096_5
taacaaacaggatggtgttacaacatcaaaacggtgccttcaacaacgcactgtggaaaggctgctggaaagggatatttcagttctatgcgaggctgatggttgctcaactttctgagcagaacagctagactgatgaacagcacacaaagccctgtcttccctttgaaggraattaattttacctgtcaaacgtactgaaacaaaaagccaaccacgggcaaayactgacaggaacaaataaggatcagaaggactggctaagagtaaatgttgtgaaactgaagtgctttgcttctktaagagaagcagcctagtcccagggaagcctttggtacagcctactatagcacggccctaagttggagctgcacaaagctgatata

SEQ ID NO: 27200 - DNA, 600 bp, Chicken  19866894244104_1
ttacttaatgagctgttatggtctgagctggacaagatagtctcggatttagtgtctgcatgaggtaaaggtgaagtaggtttgtttaatgaagtagttcttatggggaaaaatgccgtctgttttaatgttagctttttaatatttgtttaacaacatgtggaaaataagtggatacatatacagcttactcatcttgaaaatcaatgaacaatgaaaaaatagattcagatatcttccttttatttatcatttttctgatgttattggtaatgttgttgtcactgcagtttttatccycccccctcccccatgaaaaaacctccaaaaaaccgaaatgctattaattctttgagatcctttatttcctacatatctaatttacaattcagatttaggtttttccatcagaaaatagcctgcgttttagtatgcttgtctctaacyagcagtgtaagtatgccattctgctttaccttatatacagttaagaaatcttcaaatcattcttacttgtaaacagtgtgcacatccttttgttggctgtagttcagatgtttttttttcacatttggcaaagtacaagtaataaattgctga

SEQ ID NO: 27201 - DNA, 600 bp, Chicken  19866894244104_2
gtttaacaacatgtggaaaataagtggatacatatacagcttactcatcttgaaaatcaatgaacaatgaaaaaatagattcagatatcttccttttatttatcatttttctgatgttattggtaatgttgttgtcactgcagtttttatccycccccctcccccatgaaaaaacctccaaaaaaccgaaatgctattaattctttgagatcctttatttcctacatatctaatttacaattcagatttaggtttttccatcagaaaatagcctgcgttttagtatgcttgtctctaacyagcagtgtaagtatgccattctgctttaccttatatacagttaagaaatcttcaaatcattcttacttgtaaacagtgtgcacatccttttgttggctgtagttcagatgtttttttttcacatttggcaaagtacaagtaataaattgctgaaaaactggaagatcctctggaagcagattattcatctgattcagtattgtcttttattttgccacaagaaatctttccaatctatgagatcatggattagctggttggaaaatttaaagagcagcacagagaacattgcctttttct

SEQ ID NO: 27202 - DNA, 600 bp, Chicken  19866894244123_1
taatgccttaaaaatagctttccattattccaggcccagtcctgtcatcaagactgtaggagcacattaatacaatccattaactattgcttattcactgttaactctgtggtggggtgttatttcatattcgattactcctatggaatacataaaagagctctaaattgacactcaggttttttcccctattcaaatagcactgtgagtatgaaaatacagatgggattccactctgtcagtttgcagatattctgtatttaccctgtgtgaataaaggacaccaatcccagatgctgwtctctgtggttaagctcaagatggagttgagcaggtgcttttacagatcctcttagctcacatgcttggccaacagctgagcctggcaggacccttctctttccacctctaaagatcttgtatagctctaccagatggagaacagaagtttaaaatgaagaggaaagtaggtatgattagttcttcaaaccacattttttcttatgaccaaaatccttccagtcttttcaaagctgagattcagttgttagtaatttcttttttattcccacttaagagagcaggaaaaaggacctacca

SEQ ID NO: 27203 - DNA, 600 bp, Chicken  19866894244125_1
tcatcatctgcctgaaccacttctttttccccaataatagggagagatgccaagtaccctacatgcctgctgcctgcaagatagaactgaaacagcaccagcacataaaccaaaaggaacgtgcaggagttccagaggtatcacatctgccaaaactaatagcattagaaaaacattatccatagcatcttacctttccaaaaccaaagctatagatgttcttggctgcattaactccatctttcagaaatctacccaaaggactgtcagcatttctaagtatcaaaaacatacaaacarcacgagtaactagtatgttgaggctaagacagagcacagaaacaaagcagcagccatgtatttcaaacatcatgcctgcctggtcccacatagcaagtgtaatgcaactgctgaaatcccaaactattgtgcaagtaattaaaaccttacaaaatagactgtttttataggcatttgtttaaagcaaggtggccagtaatgatatatatatatatatatagacattttgcaccactttctcttcacaggtatgtatttttcctaacgtctgacataaaagctcatgagtggttggaaaca

SEQ ID NO: 27204 - DNA, 600 bp, Chicken  19866894244128_1
ggtgatatttaatcacaggttgtaaataccttttacgaacttccctatctgcatctgctgctatgcgtggcacaacatcaagttagtcagctttgtttatgtctttggtaagggggagcttggaacatgatgtctcaagtttagagccaataaagctacatgtttgcactgggaaaagcgaggaatgaagctacagaagatttaccaagtgtacacagccaacttctgaggaagcctatgctctgctctgtagggctgcagagctcaaccacagcagcagagagggctggagaggaggayggctctcccgrttcctgccagatcagacaaccagcagcaggcaggggggtgagcagcaagaagtgtaacagaagttgttactgggaggacatcgcgtctcacaagcagcattctgagtttcagcaagtcaccttgaaagagaaccggaaacctcactgccagataaacaagcacattcctaatgatcaccagctctcctgaattgtttctttcttgtcttgcctcaaagtattttagctggcacaacaggtttaactctgcagtctttacgcttgaaaatgtgacaaattttctggttcg

SEQ ID NO: 27205 - DNA, 600 bp, Chicken  19866894244128_2
atcacaggttgtaaataccttttacgaacttccctatctgcatctgctgctatgcgtggcacaacatcaagttagtcagctttgtttatgtctttggtaagggggagcttggaacatgatgtctcaagtttagagccaataaagctacatgtttgcactgggaaaagcgaggaatgaagctacagaagatttaccaagtgtacacagccaacttctgaggaagcctatgctctgctctgtagggctgcagagctcaaccacagcagcagagagggctggagaggaggayggctctcccgrttcctgccagatcagacaaccagcagcaggcaggggggtgagcagcaagaagtgtaacagaagttgttactgggaggacatcgcgtctcacaagcagcattctgagtttcagcaagtcaccttgaaagagaaccggaaacctcactgccagataaacaagcacattcctaatgatcaccagctctcctgaattgtttctttcttgtcttgcctcaaagtattttagctggcacaacaggtttaactctgcagtctttacgcttgaaaatgtgacaaattttctggttcgttccaatcagc

SEQ ID NO: 27206 - DNA, 600 bp, Chicken  19866894244128_3
ggccaggacttgtttttcttctttttatccctttcatccagtggaaaaagtttcccgctgctctgcctactgatattcgatattctgtctccgacggctgtacatctttaagttttaaagaacagcacatcagagagctctgttaattatcactcattttgagttgttgttgggttgttttgtctttttttcccctgcattttggaggtgatgcttctcaggggaatgttttttcctgatccaattcatatttgtataataacaaagcactttctcatatttctcatgtttcgtaacagygtatttaatctgcagaattaaaagaatgcttgcaataagcaaagcagcaaagcagcagcttttgcagaatgtattttacaagtaatattgcaacacaaaaaaaagtagagagatctggggagtttctcttggaatagtttacattctaatagattttcctggtaggtatcttcctgcctatgctttatgagcatctttctggaaacaacatcaaatacctacattggaaaggatccagtgggaagccgttactgtgcagttattgatcatttaatcagacatactacttacggccatttt

SEQ ID NO: 27207 - DNA, 599 bp, Chicken  19866894244130_1
  misc_feature (1)..(187): n is any nucleotide
nnnnnnnnnnnnnnnnnnnnnnnnnnnnnnnnnnnnnnnnnnnnnnnnnnnnnnnnnnnnnnnnnnnnnnnnnnnnnnnnnnnnnnnnnnnnnnnnnnnnnnnnnnnnnnnnnnnnnnnnnnnnnnnnnnnnnnnnnnnnnnnnnnnnnnnnnnnnnnnnnnnnnnnnnnnnnnnnnnnnnnnnnnncatacacctttgcttgttgataaatagtatctgaatagctgagcaattgttattactcataatgttttaccccgggttgctggatctccagtgcttggctgcagcctgtgccyctggacctgcccccgtccagaagaaaagctcactgcaggcgtgtgcgtgccaccgcctagatgaggatttctggctttttccactcagaacaatcacttccaaccaacccagcatttctctggggtacggggcagagtagcccagcagtgcatggccacgttcagaggcagctgcattcctccaccatggtaagcccccagcatgcagctcctccatggcatttcacaagcaccaaaatccccctttgccatgtggcactcctaggactaattttttttacttggatgcaaaaaactgc

SEQ ID NO: 27208 - DNA, 427 bp, Chicken  19866894244130_2
tttctggctttttccactcagaacaatcacttccaaccaacccagcatttctctggggtacggggcagagtagcccagcagtgcatggccacgttcagaggcagctgcattcctccaccatggtaagcccccagcatgcagctcctccatggcatttcacaagcaccaaaatccccctttgccatgtggcactcctaggactaattttttttacttggatgcaaaaaactgcaggctttcagaaggcaaggctcttgcatataatttggttgacactttgaaaggagaaaggggggaagmaaactgacaccaaaaccttgggaggaaatttgctcgtgaattaaaaaaaaaaaaacacacaatactaaaatagaattgagttagatatttacagcttgatgctttttaagtcagcagaacaaaaact

SEQ ID NO: 27209 - DNA, 599 bp, Chicken  19866894244133_1
  misc_feature (1)..(160): n is any nucleotide
nnnnnnnnnnnnnnnnnnnnnnnnnnnnnnnnnnnnnnnnnnnnnnnnnnnnnnnnnnnnnnnnnnnnnnnnnnnnnnnnnnnnnnnnnnnnnnnnnnnnnnnnnnnnnnnnnnnnnnnnnnnnnnnnnnnnnnnnnnnnnnnnnnnnnnnnnnnnnnnncttgcaaggcccagctttttgttctgaaggggaaaagggagagaaagatgatgagaaataacaggagaaagaaacaaattattttcagtgctgatgaattcagttcctccacagtgaagataaccacaggaagctgttamtaagaaatcatttactctgggagctctagaagctccaacttctcttgctaatgatcactcagaatgctaccagcaaggtcatttccatacttgaagatctgatcacattgcccttgaagaggaacacacgttgattgctcttctttttaattgacacaacaaacctcatttttccacaactttagattagggtgttctagttagagctatgccatgcataagagcattcaattattcccttcacatcctattgaccatagatgtattacatgagtacttaagctaaggttactcatata

SEQ ID NO: 27210 - DNA, 599 bp, Chicken  19866894244141_1
  misc_feature (1)..(13): n is any nucleotide
nnnnnnnnnnnnncgtccagaattttgtccatcaggacctccaaggatcacaccagtatagccaagcagaagcatctgtctgaacagccctctgcagactcaaagccattgtatgaggtgagggtagcctggacgagaacagttggcaggctgcaggtagctactaggtaatgtttgatgggtctggaagtgttccacagcctacacaagcagtgcctaggctttaaacaaaatcagaaagtctctatgtgggtaattccctgcatctagcgttcacttttgagcgttagtcacagaagratttttcgtgacggagaaatcagcctcaaggtaagcaagggaaagatatacaagcaagatattaaagttacaccaaccttctttaaaaaaggaaacgcrgctttctgaagcggctggaagaacagttaagccatacctaaaccataggcctcaaagctagaagaggtacctccattatgtcctgaagtaccttccttgggggraagcagatgtcaacaattgttcacaatacaactgatgcagtaaaagaagaaaccttagctattgccaaaactcctcatattttcttctgctaaatc

SEQ ID NO: 27211 - DNA, 600 bp, Chicken  19866894244141_2
tcaaagccattgtatgaggtgagggtagcctggacgagaacagttggcaggctgcaggtagctactaggtaatgtttgatgggtctggaagtgttccacagcctacacaagcagtgcctaggctttaaacaaaatcagaaagtctctatgtgggtaattccctgcatctagcgttcacttttgagcgttagtcacagaagratttttcgtgacggagaaatcagcctcaaggtaagcaagggaaagatatacaagcaagatattaaagttacaccaaccttctttaaaaaaggaaacgcrgctttctgaagcggctggaagaacagttaagccatacctaaaccataggcctcaaagctagaagaggtacctccattatgtcctgaagtaccttccttgggggraagcagatgtcaacaattgttcacaatacaactgatgcagtaaaagaagaaaccttagctattgccaaaactcctcatattttcttctgctaaatcagtctgatcctgctggggtcactgggttgaaacagtactgtcctttacatagtcacatttctgtagcccttggttgctgtattttctactggtccttcag

SEQ ID NO: 27212 - DNA, 600 bp, Chicken  19866894244141_3
acacaagcagtgcctaggctttaaacaaaatcagaaagtctctatgtgggtaattccctgcatctagcgttcacttttgagcgttagtcacagaagratttttcgtgacggagaaatcagcctcaaggtaagcaagggaaagatatacaagcaagatattaaagttacaccaaccttctttaaaaaaggaaacgcrgctttctgaagcggctggaagaacagttaagccatacctaaaccataggcctcaaagctagaagaggtacctccattatgtcctgaagtaccttccttgggggraagcagatgtcaacaattgttcacaatacaactgatgcagtaaaagaagaaaccttagctattgccaaaactcctcatattttcttctgctaaatcagtctgatcctgctggggtcactgggttgaaacagtactgtcctttacatagtcacatttctgtagcccttggttgctgtattttctactggtccttcagrgcacccaatctaaaagagaaagggtaggccttgtccaaccttttttaatttgaatttattatactcagtactgtcctttaccactgcatagctagggggaagg

SEQ ID NO: 27213 - DNA, 600 bp, Chicken  19866894244141_4
ctttctgaagcggctggaagaacagttaagccatacctaaaccataggcctcaaagctagaagaggtacctccattatgtcctgaagtaccttccttgggggraagcagatgtcaacaattgttcacaatacaactgatgcagtaaaagaagaaaccttagctattgccaaaactcctcatattttcttctgctaaatcagtctgatcctgctggggtcactgggttgaaacagtactgtcctttacatagtcacatttctgtagcccttggttgctgtattttctactggtccttcagrgcacccaatctaaaagagaaagggtaggccttgtccaaccttttttaatttgaatttattatactcagtactgtcctttaccactgcatagctagggggaagggaagagagctgagccttcagctgggggatttcagtaaccttggtgtttaaacacacaaacaatgcacagtaagtgtctgctttgcctgtaatgtactttttccygtaacgctaaatgaactcattttcttaaaactgagatctttccaatgccaggttgttttttagatacaaactcaacrttatgaatcatgtcac

SEQ ID NO: 27214 - DNA, 600 bp, Chicken  19866894244141_5
cctgctggggtcactgggttgaaacagtactgtcctttacatagtcacatttctgtagcccttggttgctgtattttctactggtccttcagrgcacccaatctaaaagagaaagggtaggccttgtccaaccttttttaatttgaatttattatactcagtactgtcctttaccactgcatagctagggggaagggaagagagctgagccttcagctgggggatttcagtaaccttggtgtttaaacacacaaacaatgcacagtaagtgtctgctttgcctgtaatgtactttttccygtaacgctaaatgaactcattttcttaaaactgagatctttccaatgccaggttgttttttagatacaaactcaacrttatgaatcatgtcacatckcatcttaatctagcaggttataaaaatagaagccatcaacarctgaatgttttctgggtgcttaaacagatacatttcctgagcccaaatagtagctgtgttattaataagtagagcaatacagtccaaacattgccaagcccacatcagctcagatatgttagaaagctttggaatgaaataacacaggttgattatctagt

SEQ ID NO: 27215 - DNA, 600 bp, Chicken  19866894244141_6
ctactggtccttcagrgcacccaatctaaaagagaaagggtaggccttgtccaaccttttttaatttgaatttattatactcagtactgtcctttaccactgcatagctagggggaagggaagagagctgagccttcagctgggggatttcagtaaccttggtgtttaaacacacaaacaatgcacagtaagtgtctgctttgcctgtaatgtactttttccygtaacgctaaatgaactcattttcttaaaactgagatctttccaatgccaggttgttttttagatacaaactcaacrttatgaatcatgtcacatckcatcttaatctagcaggttataaaaatagaagccatcaacarctgaatgttttctgggtgcttaaacagatacatttcctgagcccaaatagtagctgtgttattaataagtagagcaatacagtccaaacattgccaagcccacatcagctcagatatgttagaaagctttggaatgaaataacacaggttgattatctagtttttgcagtaaatgagattttaaaagcgaggaatgcatcttcgagtaatatggagggaaaaaatgttaagaaacagt

SEQ ID NO: 27216 - DNA, 600 bp, Chicken  19866894244141_7
ccaatctaaaagagaaagggtaggccttgtccaaccttttttaatttgaatttattatactcagtactgtcctttaccactgcatagctagggggaagggaagagagctgagccttcagctgggggatttcagtaaccttggtgtttaaacacacaaacaatgcacagtaagtgtctgctttgcctgtaatgtactttttccygtaacgctaaatgaactcattttcttaaaactgagatctttccaatgccaggttgttttttagatacaaactcaacrttatgaatcatgtcacatckcatcttaatctagcaggttataaaaatagaagccatcaacarctgaatgttttctgggtgcttaaacagatacatttcctgagcccaaatagtagctgtgttattaataagtagagcaatacagtccaaacattgccaagcccacatcagctcagatatgttagaaagctttggaatgaaataacacaggttgattatctagtttttgcagtaaatgagattttaaaagcgaggaatgcatcttcgagtaatatggagggaaaaaatgttaagaaacagttgattagtaggagaattata

SEQ ID NO: 27217 - DNA, 600 bp, Chicken  19866894244141_8
aatttgaatttattatactcagtactgtcctttaccactgcatagctagggggaagggaagagagctgagccttcagctgggggatttcagtaaccttggtgtttaaacacacaaacaatgcacagtaagtgtctgctttgcctgtaatgtactttttccygtaacgctaaatgaactcattttcttaaaactgagatctttccaatgccaggttgttttttagatacaaactcaacrttatgaatcatgtcacatckcatcttaatctagcaggttataaaaatagaagccatcaacarctgaatgttttctgggtgcttaaacagatacatttcctgagcccaaatagtagctgtgttattaataagtagagcaatacagtccaaacattgccaagcccacatcagctcagatatgttagaaagctttggaatgaaataacacaggttgattatctagtttttgcagtaaatgagattttaaaagcgaggaatgcatcttcgagtaatatggagggaaaaaatgttaagaaacagttgattagtaggagaattatattttctgaaatagtttatgtttacaacagtaaagtccaccta

SEQ ID NO: 27218 - DNA, 599 bp, Chicken  19866894244145_1
  misc_feature (1)..(16): n is any nucleotide
nnnnnnnnnnnnnnnnctgtcccttcttatgttttaattaaaaaatttaaaaattaaaatgttttgttacttatacacattagctatattgtatattttatgaggctgtcccaaaagtaatgccttctgttttatgatgttggtccacaatattcaaggcagttgtcagtggtttggcagtacaagttgaaccttccccccaatatcccatcacattttgttgtcaagtgacagatggcagcagaggggcactctgacacaataccatctgacatggaagtgcatgtgaagaaaagtgcrccactgaattcctccatgcagaaaaaatggctcccactgatatccattgacacttgctgaatgtctgtagagaccaaccagtggatstgagcacagtgagcacagtgaggcggtggatggggtgtttcagcagcagtaacagtgaaagtgggtcacattgctcatgcagatctttatgagtgtggcatgcaggctcttgttcatcattggtgaaaatrcatagctcatggtggtgactgactgtgttgaaaaatagtgttttgtagctgagaattttctctatcaagcagtgttaccgc

SEQ ID NO: 27219 - DNA, 600 bp, Chicken  19866894244145_2
attgtatattttatgaggctgtcccaaaagtaatgccttctgttttatgatgttggtccacaatattcaaggcagttgtcagtggtttggcagtacaagttgaaccttccccccaatatcccatcacattttgttgtcaagtgacagatggcagcagaggggcactctgacacaataccatctgacatggaagtgcatgtgaagaaaagtgcrccactgaattcctccatgcagaaaaaatggctcccactgatatccattgacacttgctgaatgtctgtagagaccaaccagtggatstgagcacagtgagcacagtgaggcggtggatggggtgtttcagcagcagtaacagtgaaagtgggtcacattgctcatgcagatctttatgagtgtggcatgcaggctcttgttcatcattggtgaaaatrcatagctcatggtggtgactgactgtgttgaaaaatagtgttttgtagctgagaattttctctatcaagcagtgttaccgctctctttgtatctgttgtagtttccatggaaataaataggaggcattactttcagagtgaccgacatatatgcagcctaagacaattc

SEQ ID NO: 27220 - DNA, 600 bp, Chicken  19866894244145_3
tgttgtcaagtgacagatggcagcagaggggcactctgacacaataccatctgacatggaagtgcatgtgaagaaaagtgcrccactgaattcctccatgcagaaaaaatggctcccactgatatccattgacacttgctgaatgtctgtagagaccaaccagtggatstgagcacagtgagcacagtgaggcggtggatggggtgtttcagcagcagtaacagtgaaagtgggtcacattgctcatgcagatctttatgagtgtggcatgcaggctcttgttcatcattggtgaaaatrcatagctcatggtggtgactgactgtgttgaaaaatagtgttttgtagctgagaattttctctatcaagcagtgttaccgctctctttgtatctgttgtagtttccatggaaataaataggaggcattactttcagagtgaccgacatatatgcagcctaagacaattcctcttcactcagagtggtccagggaagccaaaaggttggacacgcatgccttaggcactcagttaaaggctggaaactggaaccttgtgaagtgcttatacagttgaagcaaaccctagacatagacagaa

SEQ ID NO: 27221 - DNA, 600 bp, Chicken  19866894244156_1
aggttttcagaaagcagccctggggtcagggcctggacgcagcattttgacacgacctgctgactgctgccaagttatgaacaatgcctcatcaaaacacagggttgtgcagagcgtgtaaatatgccataagagttaagctggtattctttccagcctcaggaccacccttgtttacttagagatgtttcaagaggaacatctaattcaattaatttgattttttcatttctgaaatcacttgtgtacttacttgtcagatgcatcaccaaagtttccaacatgcatgctgaaaataaygcaccaaagttcacagagtgaagttagatgcagatcaattacatattcctggtgaacaaagcagtgaataggctgactactgagagaggaagtctaaaacaagacagaaaacaatacaagcaactttgttcaagcaagctaagagagaaactaagctcccaactttgggccaatgtgttatttttgcctactaaatttactcacgcacatatgaatggagagtgctaacagaaaacgagagagaatccttacacaggaaccaaaaaaaaaaaaaggcttaagttctacatttcaaagtgg

SEQ ID NO: 27222 - DNA, 588 bp, Chicken  19866894244162_1
gcatgagcagggttcccacgcttggcacaatgcttgggctttttcaggtttccctgcgccactttggagctcatgtaatgggcacggtgggaatgatcttagagatcttttccaaccttaatgattctgtgatcctttgattcatatgcattaaagtcaggggaaagacaactgaacccatttaacccagcacactgcagagctctgtgccagtggcaccaggcagtctcccgttttggcagctctgctgagtgctgggattgggggtcagctgtctgccagccccagggaggcttccawaaaggaccttagtgcagtttgcccaagtgtagttgtgtctgtgtcaatgaggagggacctgattaagcgggtgtttgctgagcacccttagtggcttttttccaccttgtccttgcggagctagataagatttacaaayattacaaattttgctttttgcttaaaaagcagagataatgctgctggaagggctgttcaacccgccctgctccctggggaccccaacccatgggtataatggggcctctggggctcagcgccatctcacatgccactccgcagcaccca

SEQ ID NO: 27223 - DNA, 449 bp, Chicken  19866894244162_2
attcatatgcattaaagtcaggggaaagacaactgaacccatttaacccagcacactgcagagctctgtgccagtggcaccaggcagtctcccgttttggcagctctgctgagtgctgggattgggggtcagctgtctgccagccccagggaggcttccawaaaggaccttagtgcagtttgcccaagtgtagttgtgtctgtgtcaatgaggagggacctgattaagcgggtgtttgctgagcacccttagtggcttttttccaccttgtccttgcggagctagataagatttacaaayattacaaattttgctttttgcttaaaaagcagagataatgctgctggaagggctgttcaacccgccctgctccctggggaccccaacccatgggtataatggggcctctggggctcagcgccatctcacatgccactccgcagcaccca

SEQ ID NO: 27224 - DNA, 600 bp, Chicken  19866894244166_1
atatagcacacaccgagcaaatcaaagctaccttagactcagcatttccgcagctcttccctcccctaaccttccaggctaactaattaatagacaccatatgtcaagtactcaagtaatccaggatgtgaacaggctgatctcctcatcgccttggggcctcgtgtgtaaatcaaatttaagcatcactattgatttgctaacatccctctgcctttcaacgtggtgtaaataacaatacaaaggagaatcagggtcctaccatataaacacttccatctctgaatttttttttgccawatcttctaagcagcaatcagcagtaagtatgattccaatccaacactttgcagatatgacataaaagtagagaaaatgatcagaaacaaaaatttgaattcagatctttattatacaggcccaaagctgtggtcaccatgcagttacaccgtaatgggaatgatcttgctgaaaggatctcaccaaacaaatttaaagagaccacagactacagcattccaaataactggcactttgatttttgaaagagcaaaaataaatagaggaatggcaagtatgtccttttcacatatgttgggg

SEQ ID NO: 27225 - DNA, 600 bp, Chicken  19866894244168_1
atccaacagatcaagtacaagtctgcaactagaattaaacactgttcaaccaaacacttctcacatcatcccagggaggttgatttctgctctagaggcctatgtgtaaaataaaaagaaaggtgacagtatttctcaatttagaaaggtattatgcaatgcttatatactatagaaacaacaacaacaaaaaaccctaatagttgtaataataattctttacgtatacctacacatatatatgcatacacacatacatacagatgcaaggggaattttgccctgcacacctatccatastgttgatgcaagtctgcgatacactcaagtatacctgtggcaagatgggaacatgctggactcatacaggtcctaacttgattaagttttaaccatttcttaagtcacctgtgcagctggcatcacataagatttgcaagtctgatcttcagttgtcactgtggtttcccttatacatagggacaacaaaggcctgctgacttcaytgagttttgcaaatccacaataagaattcctttttttttttttgatagtcatcatgattaagtaacagcatattagtattgacttctgtaacat

SEQ ID NO: 27226 - DNA, 600 bp, Chicken  19866894244168_2
taataataattctttacgtatacctacacatatatatgcatacacacatacatacagatgcaaggggaattttgccctgcacacctatccatastgttgatgcaagtctgcgatacactcaagtatacctgtggcaagatgggaacatgctggactcatacaggtcctaacttgattaagttttaaccatttcttaagtcacctgtgcagctggcatcacataagatttgcaagtctgatcttcagttgtcactgtggtttcccttatacatagggacaacaaaggcctgctgacttcaytgagttttgcaaatccacaataagaattcctttttttttttttgatagtcatcatgattaagtaacagcatattagtattgacttctgtaacatcatgtactcagttttacagaagcaaagtacaaaaatacatgcacgtgtgtacttaagcaataagctggttgctgtcaactcagcagcaatgtatttatcaaggcacagtattcatttggaacctatcagtcaattccttaaactatttttgaaaacaaaacagaaataataataataaaaaaatcacacagataccgctgtatttt

SEQ ID NO: 27227 - DNA, 600 bp, Chicken  19866894244171_1
cagcatgatgcgctctgcacatgccttttagggtttttttgatagatggtattaataagttttctgatcacaaaataatttgatgggccatttcatcttatttgaaattcctcaaataatagtgagaattcagtttaagggataaaagaaattatcaattcaaacataatatctgctataagcaattgctttatttttcaccttacaaagctgtccctgtattctcttagaactaacactagcaaagacctatgctagtgaccagtcttggcctgctttcatttgccagagttatgaaamtcagctaccttaataattgtatacatttccatctttgtgctctaataaaacacatttcattttgtgcagtgtttataggctcagaagaaaatcatagttttcatctaggctaatgtttaagtatttcagcatgaagctgcacctttggaagactcagagactttcaagtttgggacatgccttgcctctgcctctcgggtgtctttacttccacaaggctgcacttcattgcagggctgactgagcaaaggcttgtgaagttgtcccttgggtgcttccccttctctgatcatgcctgtc

SEQ ID NO: 27228 - DNA, 600 bp, Chicken  19866894244179_1
tgctgatgacaaaccaaaagaggaataacctgagtgtcagcagtacctcatatgcctgaggaaaatgcaaggggcgactcaaagaaatcatcagattaaattcagaaccatagcagtactatgcacaaaagccataataagaatattaatttttaaatgccgtgttaaactatcaagcagcatagctaaaggcaatgcagactgaatgtgcaatgaataaaacacagaatgggctgggttggaaggaacctcaaggatcatgaatctccaacccccctgccgggcagggccaccaacctycccatttgatactagaccaggctgcccagggcttccatgtaacctggccttcaacacctccaaggagggggcatccacagyccctctgggcagtctgctccagcacctcaccactctcctggtaaagaacttccccctaacatccaacctaaatcttccctccctcaacttaaaaccgttcccccttgtcctgctgttatctagattatyatctattactattattacctattaaccttagatgagatattgaaaactcagtaaactctacagctcccaactgcaagctcatgcgacaac

SEQ ID NO: 27229 - DNA, 600 bp, Chicken  19866894244179_2
aagaaatcatcagattaaattcagaaccatagcagtactatgcacaaaagccataataagaatattaatttttaaatgccgtgttaaactatcaagcagcatagctaaaggcaatgcagactgaatgtgcaatgaataaaacacagaatgggctgggttggaaggaacctcaaggatcatgaatctccaacccccctgccgggcagggccaccaacctycccatttgatactagaccaggctgcccagggcttccatgtaacctggccttcaacacctccaaggagggggcatccacagyccctctgggcagtctgctccagcacctcaccactctcctggtaaagaacttccccctaacatccaacctaaatcttccctccctcaacttaaaaccgttcccccttgtcctgctgttatctagattatyatctattactattattacctattaaccttagatgagatattgaaaactcagtaaactctacagctcccaactgcaagctcatgcgacaacaaagctaggagcttcctctctgcatagaatacaaaacaaacatacaacaaaggctccatgaaagcttttactgagatgaca

SEQ ID NO: 27230 - DNA, 600 bp, Chicken  19866894244179_3
caatgaataaaacacagaatgggctgggttggaaggaacctcaaggatcatgaatctccaacccccctgccgggcagggccaccaacctycccatttgatactagaccaggctgcccagggcttccatgtaacctggccttcaacacctccaaggagggggcatccacagyccctctgggcagtctgctccagcacctcaccactctcctggtaaagaacttccccctaacatccaacctaaatcttccctccctcaacttaaaaccgttcccccttgtcctgctgttatctagattatyatctattactattattacctattaaccttagatgagatattgaaaactcagtaaactctacagctcccaactgcaagctcatgcgacaacaaagctaggagcttcctctctgcatagaatacaaaacaaacatacaacaaaggctccatgaaagcttttactgagatgacaagccctgaacacttccagaaacagagcattaagccaaatggatagtctggtcaggaaaacattttttaaggtggatgtttcagatgcactgactcctcacagcactccccacgcagaacactgctgcag

SEQ ID NO: 27231 - DNA, 600 bp, Chicken  19866894244192_1
cagctttctacagagggaagtcttacagtttcacatactccttgtattataaataccattatcagtagctgtgaagcaactggagccttacgttattctcaatgcagtaatgcaactatccagaacaagaataatgtcaaggctgttattttaggcatagaaaggtctatgggccgcaagcaaggttggcaacctgttctggtaggctgcacaaacaccagccaaaggcggtctttacatttgtaagctgacagacaaaagacaaagcagagcagacaaacatagggagacaatccatcrggtcagaccagctaggaattaaatagatccctcaggtcagccctcctgctacaccagcagctttaacgggcctgctttacccccagacagtactgccatttcttcagtgtgctttaacactaactgtaactaaagcaaagaacaactcatttttctacatcaaagccttcttttgaagccttatcacctgtttccaaattccctattgactctggaccgccattatacccaggcaaacaatttgccacactcttcaataattcagtggcatacggatcacaaattcaagctttctgctgt

SEQ ID NO: 27232 - DNA, 600 bp, Chicken  19866894244192_2
atgacgaagatgcttagatacaggaacaaatgggacaatgcataaagccaaaagagtagggttcagacagcaaagcccattccatcccttgcagaacatatctagtgaagactatggaaatagcttttataatcagaattccagtgaaataataatgttcaaagccttaagtctcagttactataactgtcccttacattttaagtcaactgtttccaaatggacttctgaactcaagctcacaaatctcagtacagaatgaggactatcacgatctatgggtagcaacctacccacagstggtaaccagctgtatagtctcatgttctctgcactgagaggtgcagctgatggtgtttaaaatgattcagtaagccacagcgtttcagattgaatcttcaatgggaacttttcagaattaagatctgcctgactgaagcaatggccttccttccctatgtgggtggcacagaatttcagtgcaaggagaacaagaaacacacagcaatttcctcctgaagttacttcagtaacatcaaagaattcatggaataggcagccaagttctgtttcctgctggggtgtgtctgcccagccagt

SEQ ID NO: 27233 - DNA, 600 bp, Chicken  19866894244193_1
gaaaaattcatccaaggccataacagccatatcagatggaagctaggataaagctcttcacagtatagccttataagtgcctctcagcttgccatgatgttaccctgtctacttttttttttattccttactttttatagggaaaattctctcatcctgtgttctatgcaagcattaaataaattaattaaatgaaattatgatgcatgtttcctgaaatatactcctttacttcattttatccttctttcatttatacgttgtaggtgctgaatctcaagctttgtccaacaaaaacamattgtatatttctatatctttcctattataaatccttaaccttctactcgactaatatattaaaattcttcagacacagagtagcaatgttcataatctccagttcattatcttaattagatctgtcttatattatcccacagtttagtctcattactttaaaggtgatcagccttggaagggaatgtgagcagaatttagtgaattctattgtggcaacatttctctcagatctggctttggatctttcaggtgcaataatgataatgctgctggtgcggttaattaaaaattgccttt

SEQ ID NO: 27234 - DNA, 599 bp, Chicken  19866894244203_1
  misc_feature (1)..(87): n is any nucleotide
nnnnnnnnnnnnnnnnnnnnnnnnnnnnnnnnnnnnnnnnnnnnnnnnnnnnnnnnnnnnnnnnnnnnnnnnnnnnnnnnnnnnnnnagtagtttaggaataatgcatgcaaaatgggcatgctgtgcttcctgaacacacttgacatggaaatgcccctgcagtctgctctgtgcatcatgcaagacctttatggcaccatctctactgtcttctaaagcagacataataaatgtctaatcctttcacttcactgtgagctttcagcctgttccagtttgtgattttgtttcatctgcrgagacaagaatttgagttacaattaaaacagtaaaaacagtactattcttactattattaaaaacagtactaattaaaatgaataagtaaaacaaataacattacactaggcttataaagtgataagtggtcaatccagaaattatgacaatgaatgttggattgtggaataataaatcactctattcggtgtcataaaggagcatcttatgatgtataatgtagatgtgttttttttaatagctcccacactttatatttttatattaaaaaatctgaataatttctaaaggggtaaa

SEQ ID NO: 27235 - DNA, 600 bp, Chicken  19866894244208_1
gtcagcactagaacattactcaacatgccagtggtaacagagccaaataacaccgcacatttctaccctgccttggcaatgtcccatcactggaagtgttcaaggcgaggttggatggggctctgagcaactcgatctagtgaaaggtgtctagatgatccttcaggtcccttccaacccaaaccattttacgattagcagaccagtcttcctatccaaatttccttcaagagtgcttaccttttgccacaactattccaacttctctgggagcctggcgtatgtctcccagctgaactrtttgtgaaagattttcagtgatcaagattgaatactgattttgcaccgatattaaaggccaacaaacagtgagcctcccccgctatcccctcttgggataactgcttctcaagagaagcaacattatgaaacagtccactaacccatcacatcacttagttccagcaagtaaccacttaagaatcagaaaccctaaacaattctcaacacttcttttctagacccccaagccacaatagagcaaagaataagaagcaagagtatgtcaataacaagtgccatactaggggaagaggctca

SEQ ID NO: 27236 - DNA, 600 bp, Chicken  19866894244208_2
aaccctaaacaattctcaacacttcttttctagacccccaagccacaatagagcaaagaataagaagcaagagtatgtcaataacaagtgccatactaggggaagaggctcagtagaccactcttatgctgagatagatgaagcaccggtaaaagcagagtaagtttggttcatcctgttctgtgtgagtcaaaattcacttttcagctcatcttcagagaaaacttggtctcccctgcaacttccagcatagaagatttgcttctgtgctacactggagacagatgccatcacatatgyatgcrtcttaaggtacagatggtgactgaatcaatgtttcctattggttaaacaagtcctcagctttcagcaccttcaccttagtaatcaggctgtgtacccacactgccattctcacttggctcacaccttaacagtaaatcccttgcagtcgctaagagcctgcctgaaggaagacaatgcaaactttacctgcgtgaatgacccatcctcattgcattctgggatgaagactgcttcctggggcttctttgcctgttccagtgcttgagctctctctaatcgacacttgctttggcc

SEQ ID NO: 27237 - DNA, 600 bp, Chicken  19866894244208_3
taaacaattctcaacacttcttttctagacccccaagccacaatagagcaaagaataagaagcaagagtatgtcaataacaagtgccatactaggggaagaggctcagtagaccactcttatgctgagatagatgaagcaccggtaaaagcagagtaagtttggttcatcctgttctgtgtgagtcaaaattcacttttcagctcatcttcagagaaaacttggtctcccctgcaacttccagcatagaagatttgcttctgtgctacactggagacagatgccatcacatatgyatgcrtcttaaggtacagatggtgactgaatcaatgtttcctattggttaaacaagtcctcagctttcagcaccttcaccttagtaatcaggctgtgtacccacactgccattctcacttggctcacaccttaacagtaaatcccttgcagtcgctaagagcctgcctgaaggaagacaatgcaaactttacctgcgtgaatgacccatcctcattgcattctgggatgaagactgcttcctggggcttctttgcctgttccagtgcttgagctctctctaatcgacacttgctttggccagcat

SEQ ID NO: 27238 - DNA, 600 bp, Chicken  19866894244211_1
gcagcccagggctgttccagcagcagaggcaccacggggcaccatgaacactgaaatgacttcaacccccactgttgcttactatgacaaaacatgacctgggccatttactttccattctggggccagtggaatctcacccatcagctgtgaggtgtcaggccacgtgccaagctgctgcacagggattgaacaggatcacccctttcaccgcagctctgcttacattcacatccataaagaacagggaaaacatgctttgaactccagagctgtctctgcagcacccgatgtaggctyagaaagcagcaawagctcagctyaggggtgtccagcagggacccaggggtttccttttggatcctgccccagtgaagagagattgaggttgacttctggaaarcatttcttctcccagagagcggtgatgcgttggcacagctgcccgtggtggtggtggagtcaccatcgctggaggtgtaccgaagccacggggatgtggcactgagggacgtggtcggtgggcatggtggggtgagggtgggctcagagatcttggaaggcttttccagtctgaatgattctgtgattctatgacaa

SEQ ID NO: 27239 - DNA, 600 bp, Chicken  19866894244211_2
gttccagcagcagaggcaccacggggcaccatgaacactgaaatgacttcaacccccactgttgcttactatgacaaaacatgacctgggccatttactttccattctggggccagtggaatctcacccatcagctgtgaggtgtcaggccacgtgccaagctgctgcacagggattgaacaggatcacccctttcaccgcagctctgcttacattcacatccataaagaacagggaaaacatgctttgaactccagagctgtctctgcagcacccgatgtaggctyagaaagcagcaawagctcagctyaggggtgtccagcagggacccaggggtttccttttggatcctgccccagtgaagagagattgaggttgacttctggaaarcatttcttctcccagagagcggtgatgcgttggcacagctgcccgtggtggtggtggagtcaccatcgctggaggtgtaccgaagccacggggatgtggcactgagggacgtggtcggtgggcatggtggggtgagggtgggctcagagatcttggaaggcttttccagtctgaatgattctgtgattctatgacaaagctggcatgagc

SEQ ID NO: 27240 - DNA, 600 bp, Chicken  19866894244211_3
cagaggcaccacggggcaccatgaacactgaaatgacttcaacccccactgttgcttactatgacaaaacatgacctgggccatttactttccattctggggccagtggaatctcacccatcagctgtgaggtgtcaggccacgtgccaagctgctgcacagggattgaacaggatcacccctttcaccgcagctctgcttacattcacatccataaagaacagggaaaacatgctttgaactccagagctgtctctgcagcacccgatgtaggctyagaaagcagcaawagctcagctyaggggtgtccagcagggacccaggggtttccttttggatcctgccccagtgaagagagattgaggttgacttctggaaarcatttcttctcccagagagcggtgatgcgttggcacagctgcccgtggtggtggtggagtcaccatcgctggaggtgtaccgaagccacggggatgtggcactgagggacgtggtcggtgggcatggtggggtgagggtgggctcagagatcttggaaggcttttccagtctgaatgattctgtgattctatgacaaagctggcatgagccacatctccc

SEQ ID NO: 27241 - DNA, 600 bp, Chicken  19866894244211_4
ccatttactttccattctggggccagtggaatctcacccatcagctgtgaggtgtcaggccacgtgccaagctgctgcacagggattgaacaggatcacccctttcaccgcagctctgcttacattcacatccataaagaacagggaaaacatgctttgaactccagagctgtctctgcagcacccgatgtaggctyagaaagcagcaawagctcagctyaggggtgtccagcagggacccaggggtttccttttggatcctgccccagtgaagagagattgaggttgacttctggaaarcatttcttctcccagagagcggtgatgcgttggcacagctgcccgtggtggtggtggagtcaccatcgctggaggtgtaccgaagccacggggatgtggcactgagggacgtggtcggtgggcatggtggggtgagggtgggctcagagatcttggaaggcttttccagtctgaatgattctgtgattctatgacaaagctggcatgagccacatctcccccgagttcagctgttcagactccgtgcaaactgctctcctgtgccacccctgagaacacagctctggggtaccttcccca

SEQ ID NO: 27242 - DNA, 600 bp, Chicken  19866894244216_1
ttcccaaagctgaggaggagggaggggaaggagaggtccccgcacaggggtggtcagagccctgagctacagccctccgctgctgacacgggcaaaccggtcagcacggtccctggcgccgatccaccctcggccccgagagtttgctccgctgcaggaaaggaccatcaatcttcacagttcccttgttccctggccccagagcagggcagccaattagtgctgggtgtgatggatggctcagtcccgtcctcgtgacacccgtccccgggatgctcccacctcgccggactgggatcrgcgctgcggtgctgctgagctctccccagccctgcccggctgatcccacagagcggctccatcacaccgaccccggggcttcacgggcggttccgagcagcgcgggctgcaacacggatctgattacgactgaagtgggtctcggggtccctgctctgttcgtaatgaagtgtaagcctagaaaaacatgttgccaattacacttcaattgaacccagataaaggcccagaaaagacagagtctggactgagaactccttcctaatggagaagaaaagtgttcctgaggcaggcccaggc

SEQ ID NO: 27243 - DNA, 599 bp, Chicken  19866894244220_1
  misc_feature (1)..(20): n is any nucleotide
nnnnnnnnnnnnnnnnnnnntgtctcagatcaaatctccaatacagtccataggtaccaagctagactgaaacagcatcagaggcagtaaatgggctttggtgctgtttcactactacaggcatatttgaagaagtttatttatttaataatatactgagaaaccataggaataaattaggaatggagtgcctcattttattcttcttggagtacttccttcactgtaaaatcagactgatcttgttttcctctgtggctgttctctttcagtgtcttctaagaaaaaaataagagtttrgattgaacatcagcagtcacagatatgaccgtagttgtgaattcttccccarcatcttatggaaaatgtcattttgtaaatgctttgaagaaacttatactatttaggaatatcaagaaaataaccttgccaacagcagtattttyagggcttgatatcagatgtgaaatcaaaagaggtcaggaagtcacagctcagttatctcaggtataagtaaattcctttcaacaactttgatatagcattgtaagtctagagactcatctgctcttaaaagcagacaacctgggcattttcat

SEQ ID NO: 27244 - DNA, 600 bp, Chicken  19866894244220_2
ggtaccaagctagactgaaacagcatcagaggcagtaaatgggctttggtgctgtttcactactacaggcatatttgaagaagtttatttatttaataatatactgagaaaccataggaataaattaggaatggagtgcctcattttattcttcttggagtacttccttcactgtaaaatcagactgatcttgttttcctctgtggctgttctctttcagtgtcttctaagaaaaaaataagagtttrgattgaacatcagcagtcacagatatgaccgtagttgtgaattcttccccarcatcttatggaaaatgtcattttgtaaatgctttgaagaaacttatactatttaggaatatcaagaaaataaccttgccaacagcagtattttyagggcttgatatcagatgtgaaatcaaaagaggtcaggaagtcacagctcagttatctcaggtataagtaaattcctttcaacaactttgatatagcattgtaagtctagagactcatctgctcttaaaagcagacaacctgggcattttcatgtctcatatacacagwcaggactcacttgcaaatgaagcaactcttgcctttc

SEQ ID NO: 27245 - DNA, 600 bp, Chicken  19866894244220_3
aataatatactgagaaaccataggaataaattaggaatggagtgcctcattttattcttcttggagtacttccttcactgtaaaatcagactgatcttgttttcctctgtggctgttctctttcagtgtcttctaagaaaaaaataagagtttrgattgaacatcagcagtcacagatatgaccgtagttgtgaattcttccccarcatcttatggaaaatgtcattttgtaaatgctttgaagaaacttatactatttaggaatatcaagaaaataaccttgccaacagcagtattttyagggcttgatatcagatgtgaaatcaaaagaggtcaggaagtcacagctcagttatctcaggtataagtaaattcctttcaacaactttgatatagcattgtaagtctagagactcatctgctcttaaaagcagacaacctgggcattttcatgtctcatatacacagwcaggactcacttgcaaatgaagcaactcttgcctttctygtgaaatggaacaaagtgggctacaccatcaagtaagcaggtcacaagagtcattgaaagtcactatttttcctcttcttctagcttgactg

SEQ ID NO: 27246 - DNA, 600 bp, Chicken  19866894244220_4
gtcacagatatgaccgtagttgtgaattcttccccarcatcttatggaaaatgtcattttgtaaatgctttgaagaaacttatactatttaggaatatcaagaaaataaccttgccaacagcagtattttyagggcttgatatcagatgtgaaatcaaaagaggtcaggaagtcacagctcagttatctcaggtataagtaaattcctttcaacaactttgatatagcattgtaagtctagagactcatctgctcttaaaagcagacaacctgggcattttcatgtctcatatacacagwcaggactcacttgcaaatgaagcaactcttgcctttctygtgaaatggaacaaagtgggctacaccatcaagtaagcaggtcacaagagtcattgaaagtcactatttttcctcttcttctagcttgactgactcctggctaaagaagttatgaattcaagcatttcatctctgcctgagggcttgtacttgataactcttgataactcttgactgatccatgaaaccactgtgattctatttctttctggattcatcactaacctgcttatgtgatcacttttgttaaaagtgattcca

SEQ ID NO: 27247 - DNA, 600 bp, Chicken  19866894244220_5
tcttatggaaaatgtcattttgtaaatgctttgaagaaacttatactatttaggaatatcaagaaaataaccttgccaacagcagtattttyagggcttgatatcagatgtgaaatcaaaagaggtcaggaagtcacagctcagttatctcaggtataagtaaattcctttcaacaactttgatatagcattgtaagtctagagactcatctgctcttaaaagcagacaacctgggcattttcatgtctcatatacacagwcaggactcacttgcaaatgaagcaactcttgcctttctygtgaaatggaacaaagtgggctacaccatcaagtaagcaggtcacaagagtcattgaaagtcactatttttcctcttcttctagcttgactgactcctggctaaagaagttatgaattcaagcatttcatctctgcctgagggcttgtacttgataactcttgataactcttgactgatccatgaaaccactgtgattctatttctttctggattcatcactaacctgcttatgtgatcacttttgttaaaagtgattccatatgtaaaggaaaaaagatttacattttatgataaaaaa

SEQ ID NO: 27248 - DNA, 600 bp, Chicken  19866894244221_1
ccttcaaccctttccttctacccttcccttagtctctttcttctccccatccttccctccctacactcctttccttcttctgtcctctctaatgtctatctttccttcccccttattcatttcctacttctttctgtccatccttctctccttccttttgtgtttctgtctatccgtccattcttccacacctttcctacatccttccatctttctgtcctctttctgtccacccttccctcccttcatccctctacttcccttcatccttctttgtctattttttcatccatccatccrttcttccctcactcttttgctttcctgttccattctgtccatccttcccttctccctctcatccctttcaacctttgcatccacctttccatccgtcctccttccttccctttgtccttcctcccatccttctgtccatccttctatttcttccattgctctgtatgtcattctgtcctcccttgtccttcaccccttccctaattccttctgtttgtccttctgctcatcctatccctatctttcactcttacctctttgcttccttccatctttttcctacttcctcctgtctctgtc

SEQ ID NO: 27249 - DNA, 600 bp, Chicken  19866894244228_1
tctgtcaaaacctgcctgcagcgtcagcttagcatccgtaaaggctgttttttaatgacaacagatgtaatgatttcataagcgtctacctctgccctatctcctgcagcattttttcccaatatcctctggaaagaatggaggagcagatggcaccaaagaggttatgccagctttgtggaaactggcttttccctagctctgaggacagacgtttctatgctctctttgccttactttggcagtacagaggtatactgctggaaggactggttgcctttaaattgaagatatggcccwgtacctgaagtgtatcagttagtatactgtgctcagtgcttcacagaattacccagatctttaaagcctctgaatggtgtcatcagcttctttctctgtggaacgctgccttggcaatgacagactgctgtactgttggaggagcccagggtgcctgggaaggagctcctcacttattcatgctcctctttggcctgcaatccccttaaatgtgacgaggttgyttggaccagaatgtagctgcctggcagctggactgaaagcaaaatcctcccaagaaacagaaatcaactggtacac

SEQ ID NO: 27250 - DNA, 600 bp, Chicken  19866894244228_2
ctctttgccttactttggcagtacagaggtatactgctggaaggactggttgcctttaaattgaagatatggcccwgtacctgaagtgtatcagttagtatactgtgctcagtgcttcacagaattacccagatctttaaagcctctgaatggtgtcatcagcttctttctctgtggaacgctgccttggcaatgacagactgctgtactgttggaggagcccagggtgcctgggaaggagctcctcacttattcatgctcctctttggcctgcaatccccttaaatgtgacgaggttgyttggaccagaatgtagctgcctggcagctggactgaaagcaaaatcctcccaagaaacagaaatcaactggtacactatgggcaggcctggttaaagcattaagcatatgggacacccgtgaaatacagatagatgaggggaagatgaatctctaatagtccagaagaaaagtagtgacagaggtcctctttcctgaattctcttgcttctttaaacataaaaagaggagaatcagtccagatatggcatgaaggagttagttagagctcttcccagaagaaagagcatgcagatggcag

SEQ ID NO: 27251 - DNA, 600 bp, Chicken  19866894244228_3
agtgacagaggtcctctttcctgaattctcttgcttctttaaacataaaaagaggagaatcagtccagatatggcatgaaggagttagttagagctcttcccagaagaaagagcatgcagatggcagacgtaaaacaaagagtcaagtggcctagaaaatttttggcaagattttcccagcaatgctgtttttatttctacacccaggtcacacagcaagatgttatctgttacaactgggtaaagctacagcagaagctaaatatctcacacatacatagaaactgcctctttggcagygagataaaagacaagtattctcatgacttctttgtgtgtctctctccttctcttgcagatactgagctacagctgaggagagattctatcttctgccagtctcttgtggctgctatttgcaccttttcagagcagttactggctgcgctcaactatcgatacaacaacaatggggaatacgaagagagcagcagagacgccagcagaaaatggctggaacagatagcagccactggtgttttattaaactaccagtccctgctctcccctactgtggtaagatgaagagttgaggcaccc

SEQ ID NO: 27252 - DNA, 599 bp, Chicken  19866894244230_1
  misc_feature (1)..(77): n is any nucleotide
nnnnnnnnnnnnnnnnnnnnnnnnnnnnnnnnnnnnnnnnnnnnnnnnnnnnnnnnnnnnnnnnnnnnnnnnnnnnncaaggttttacagataaatagttatttcatcattaccaggttatagatctttcacaggtatcttatcttagaatatttaacaggcctatatgccaaaaacatataccaaaacaagatgttacaaagatttgtatctaacaggtgtgctaaagagcaactttcatttcctttctgaacaccttttcttctgtttattgggatactttcttcctcccaagtcagmcaccgaaagaaccaattaagaaccagtaaactgtgttctgatattcctctaataatgcacctctatacagcagccatagcataggtatttacattaacaaattaaacacctcagaatgtacgaaagcataatcctcctgctctcctcaaaggcctaagagcgatgtgcctgcctctggacaccactctttaggaaacgtgtagagtaactggagactttccaataggacgtaactgaaataacacatttaatgaagaaacactaaaaaccatttgttttaaatttgggagaaaaaccta

SEQ ID NO: 27253 - DNA, 600 bp, Chicken  19866894244231_1
ggagccgagagcaactgcccgcattcagaaacaagcttcactgaccacctccagcggccctaatctttaggaattagacctgagtcctttcctgtaggcatatgaagaatatgtgcttcttctaaccctctgcacgcaaagagggagaagccctgttgtgagggaattacaggaattatagaactataaggaaatggcagcaccagcagaacaggtccaaaacatgccgtcatttttctccctctacgttttgtaacctgcctgtaacacctactggctcacatacgttatttgctataktatggtcttagaatacttagccgctctgaggatttattactacgcacgcacactcttacatgctattcccaatcacttttcagcaaataactgaattaactctgtttacgcatcagcagataatccccgaaataagctccttaagggccagctctcgtgctgctactgaaggcacccaaccctaaagatgagcagtgaaagcagaacaaatgcaaagccagaacagcgctgtcttcttcagataaagcagctaaacacgtatctgtgtacggacacgcgcgcattcagacatgcactmca

SEQ ID NO: 27254 - DNA, 445 bp, Chicken  19866894244231_2
aktatggtcttagaatacttagccgctctgaggatttattactacgcacgcacactcttacatgctattcccaatcacttttcagcaaataactgaattaactctgtttacgcatcagcagataatccccgaaataagctccttaagggccagctctcgtgctgctactgaaggcacccaaccctaaagatgagcagtgaaagcagaacaaatgcaaagccagaacagcgctgtcttcttcagataaagcagctaaacacgtatctgtgtacggacacgcgcgcattcagacatgcactmcaagaaacagtgccaagcacgattccatacgatgtatatcatcccgttttttacatatttataccaattacatcgatattacgaaatggcagctgtatactttaaatatgtaattggattaccaacatacgtccagagcattaat

SEQ ID NO: 27255 - DNA, 600 bp, Chicken  19866894244233_1
actactggggacaaaccacaacacctaagcacaatcctcaagcattgttctgagcttttcacagaatcctgctgtgtgttggtgaagtgttaacatttgcttcttaaatcaggaaagtaatggggtacattattagtaaaattgtaaagctaagacaaatggagtttagaacattatattcagagatgatgggccctcctacgacacagatgcaaaatagatacaagttaacggattttttttaagtataatctcatggttagaagtggataaagtcctgctaccactttgtttctgttrtgtgtaattatctgacttcccaatgtgaacaaccatcaggtctgccttgatcctgctttattttatayagaaggaaggtagaagaaacagcgaaaatgtaatataaaaatattgtgtctaggttgcaatctatcaaggtttttgtaaagtttcagcacatctttaataccccagtttgaattcaaatcattttaccagtttttagtagacaggagatwaacgtggttaacaataagtagaatttaagaggcttgtagaggttgcatcttttagagaagaaaaaatgttaagtaagacagt

SEQ ID NO: 27256 - DNA, 600 bp, Chicken  19866894244233_2
ctgctgtgtgttggtgaagtgttaacatttgcttcttaaatcaggaaagtaatggggtacattattagtaaaattgtaaagctaagacaaatggagtttagaacattatattcagagatgatgggccctcctacgacacagatgcaaaatagatacaagttaacggattttttttaagtataatctcatggttagaagtggataaagtcctgctaccactttgtttctgttrtgtgtaattatctgacttcccaatgtgaacaaccatcaggtctgccttgatcctgctttattttatayagaaggaaggtagaagaaacagcgaaaatgtaatataaaaatattgtgtctaggttgcaatctatcaaggtttttgtaaagtttcagcacatctttaataccccagtttgaattcaaatcattttaccagtttttagtagacaggagatwaacgtggttaacaataagtagaatttaagaggcttgtagaggttgcatcttttagagaagaaaaaatgttaagtaagacagtgtcttacagatgatttgtctttcagtaaaacttactcactgtaccttgaaaaacaggactttatcaac

SEQ ID NO: 27257 - DNA, 596 bp, Chicken  19866894244233_3
agatacaagttaacggattttttttaagtataatctcatggttagaagtggataaagtcctgctaccactttgtttctgttrtgtgtaattatctgacttcccaatgtgaacaaccatcaggtctgccttgatcctgctttattttatayagaaggaaggtagaagaaacagcgaaaatgtaatataaaaatattgtgtctaggttgcaatctatcaaggtttttgtaaagtttcagcacatctttaataccccagtttgaattcaaatcattttaccagtttttagtagacaggagatwaacgtggttaacaataagtagaatttaagaggcttgtagaggttgcatcttttagagaagaaaaaatgttaagtaagacagtgtcttacagatgatttgtctttcagtaaaacttactcactgtaccttgaaaaacaggactttatcaactctggtgtttggtaatctatgttttaaattagagcacaactcttttcaaatcaatataatgaattgatttgtacacagttcaaggaggactgctttctttggatttttcgtatgaatttgcaatgcagttaaggcatcttttctgt

SEQ ID NO: 27258 - DNA, 600 bp, Chicken  19866894244243_1
ctgtcccagcacagcttttcccagtgtaggggcagtgaaggctgctgtggccagatctggggacaaaatacaaagataacaaataactatgggagacctgggcttggtgaggctggacatggtgagctatgtgcacttctgaggatgtgtggaggagaggcagagcaacgtggagttcaaagctgccatctcaggaaacagtgccaagaatgacacaccctgtggaaaataacacggccaaaggcaacgtctgtcatctgcaaacagctacaggttatgtctaggcaggactgtgtaggygcagaggagagagcatggcacaggtggaggagatgagagaaggagcagacaagaagaccgacgagccggaggtggttggtcctggtgccttgctgcaggctggtacaggcctgggtgtgtttccaggtgcagcaggagggcagctgcagtgcagtgctcacaggactaagatctcctgtttttgctcacaaaaaaagactgtaacagatacctgctgctgattatgagcttagtcctacacatcagatacatccagtgaaaaggcagcagcttcagaatgtatctttcaggtaaggagca

SEQ ID NO: 27259 - DNA, 600 bp, Chicken  19866894244244_1
ataagcgtccaaatgcatactcttgaatactaaagatctagaatataattccagtaagtccttcttcaaacatacaatttctggtcaaggtacatttgtttaggaaaatattccaactggatttcaaaactgcagacaatggagaacatgcagcctccccataacaattacttcaagttggtcccacttcaagatatacatctttttctactttgacttggatagctacagccttacttaagttgtctgaactcacttcaactactgtcaagtcaagcttaaaaacttccaaatcatttwaaaaaatgtcaactatatgactggataaaatgagtttctgtagtccttcatcccataacaggctgttggtgcttcaaacacttctgcagatctttttggaattattgctatgaattaatttcctttttatgtacatcwtcttcactggtaccaaggctaagcaaagctatcaacaacagctctatggatattttattcttaatggaataaaacaccactgtcttaaatttgctacatgttcttgtactttcaagagcctcattattactttaatccaataaactggctaagtgaaaagtt

SEQ ID NO: 27260 - DNA, 600 bp, Chicken  19866894244244_2
atggagaacatgcagcctccccataacaattacttcaagttggtcccacttcaagatatacatctttttctactttgacttggatagctacagccttacttaagttgtctgaactcacttcaactactgtcaagtcaagcttaaaaacttccaaatcatttwaaaaaatgtcaactatatgactggataaaatgagtttctgtagtccttcatcccataacaggctgttggtgcttcaaacacttctgcagatctttttggaattattgctatgaattaatttcctttttatgtacatcwtcttcactggtaccaaggctaagcaaagctatcaacaacagctctatggatattttattcttaatggaataaaacaccactgtcttaaatttgctacatgttcttgtactttcaagagcctcattattactttaatccaataaactggctaagtgaaaagttcatttgcctatcttctatgactgctaaacatgcttcagaatacagttctcaagtttacaagtggaactgcactctccattcccmagatgcatttttttgagcatattttcatctacctagtgcaaagaagccatcttg

SEQ ID NO: 27261 - DNA, 571 bp, Chicken  19866894244244_3
tgcagatctttttggaattattgctatgaattaatttcctttttatgtacatcwtcttcactggtaccaaggctaagcaaagctatcaacaacagctctatggatattttattcttaatggaataaaacaccactgtcttaaatttgctacatgttcttgtactttcaagagcctcattattactttaatccaataaactggctaagtgaaaagttcatttgcctatcttctatgactgctaaacatgcttcagaatacagttctcaagtttacaagtggaactgcactctccattcccmagatgcatttttttgagcatattttcatctacctagtgcaaagaagccatcttggcaaattatttaggtaactgctatttaataatcatgtttggggtttaatgaacacgtctggtgtttacagactaattaaatatcttaaggtaacgtgaaagaattcacacacccagagattccattaagattgcctgacaagtaattaakaacacaaacaaaatagagaaatgatttaccctgagttcctcaagtttctctcttatttcaataaatc

SEQ ID NO: 27262 - DNA, 367 bp, Chicken  19866894244244_4
aagtgaaaagttcatttgcctatcttctatgactgctaaacatgcttcagaatacagttctcaagtttacaagtggaactgcactctccattcccmagatgcatttttttgagcatattttcatctacctagtgcaaagaagccatcttggcaaattatttaggtaactgctatttaataatcatgtttggggtttaatgaacacgtctggtgtttacagactaattaaatatcttaaggtaacgtgaaagaattcacacacccagagattccattaagattgcctgacaagtaattaakaacacaaacaaaatagagaaatgatttaccctgagttcctcaagtttctctcttatttcaataaatc

SEQ ID NO: 27263 - DNA, 600 bp, Chicken  19866894244248_1
gagaatctctcactattaaatacatataattatttgcgcactgtttcaccttttctttcatacacacggtttccaagcgtgttcagagtttgcctgttgtctatatgcaggatgtatgactagcctaatgacgtatcaaataggtgatgccagagtggtgaggcatgtggcctgaagagacatttccagtagccagaggaggggacagatacagcaagcctgacactgctggtgtcgctcgcggtcgcatgtggctggggagagcatgccaggcccccataattgcaggctcccgtggtrcccacgggatccctaggaatttgtaggcacagagcagtgagttagcccaatgtagagcaaaagcatttttcgtccgccagcgaagatatctgcagcatgcgcatcacaaaccaggggcgagtcaagtctttgcctgacaccttttcctccactcttcttggtctttttcagttggaggaggacaggccttctcagcactccctcccgaggtacagccccctgagaagactggcgtcctccgttttctcctcctcaaccctggagacagaacactaccctcacgttggtggcactttcata

SEQ ID NO: 27264 - DNA, 600 bp, Chicken  19866894244251_1
gaaaactcaaattcaactatttgtcctcattagccacctggtttgtaatgtttatatcttaatccaatcctgcccaagagtgtttcgttcccctctgaagtaaatcaaagcaagaaatgtagcagaataaagttcctgactggtagatttgtgtaatctgttgtcttatagcaccaaggaaaaaacaattccatttattctgcctcctccctcagatttctattttttgtggtccattgtgaagtattgactaacatttatgacctctcatcacttaaactttttaaatgctgtcttaaygatttgcagaaaactcagatttttgccaagagagctattgtttggaaaagcataggttaaatttacagatcttattattttgctgtataatttcatgatcatttaaacttgtttttcaagaaacatattttagtttttcttctgaagtaggatctatgaatttgtcatattttaataagataagccattttttctttgattgtgactggttcatcagtagtataatatgccattaaatcttgataacattgctatcaagccatcactcaattctactttattccattgcttcttggatct

SEQ ID NO: 27265 - DNA, 600 bp, Chicken  19866894244253_1
tcccttatcctatcattatctacccatgtaaaaaaaaaaaaaaaaaaaaaaaaaaagatttatttccattttataaactgcctttaagtactggaaggccacagtgatgtctcccctgatctgtctcatcttcagattgaagaagcccagagaagctggacatgagccagcagtgtgcacttgtagcccagaaggccaactgtattctgggctgcattaacagaggaatggccagcagggagagggaggtgattgtgcccctctactcagctcttgtaaggccccatctgcagtactgcrtccaggcctggggcccccagtagaggaaggacgtggagctcttggagtgggtccagaggagggccactaagacgatcagcaggctggagaacctctcctataaggaaaggttgagggaactgggattgtttagctaggagaggagatggctccagagagacctcattgtggccttccagtacttgaagggagtgtataaacaggagggggaatggctgtttacgagagtggatagtgataggacaagggggaatgggaatggttttcaactgaaacagtttacattagatattaggtgga

SEQ ID NO: 27266 - DNA, 600 bp, Chicken  19866894244265_1
gtgaataaaacaaatacagaccataagaagctctgagtgacatctatacatcactcagatctacataggattgctaaactcaagttgaagtttaacctaattctgtatcccatatccctcctctcatatttttatgactaattacattcatgtgtttttcctttcttaagtggccctgtggcttaggaagggtacgcactttgatcctctgcatgcattgtatttttttcccccttctttctctgcttacatactcctccaattttctgttttcagttactttttcctcctaaccaattwtatttgtatataggatattgtttcccataaggcattttcctttccctttcccttactgtttctctctgtttattctcaaatgtatactgcacaacgtmagagttttcatctaaaactcccttgccttttctacacacatcagaatgatcttttctccattttctagttccccaattcagttcgcccctcctaatacaccttctggcctttaatccctttccgctgtcctattaacataatctcttcccagtatgtaacactctatacaataaaagcactgtatgaacacacataattaca

SEQ ID NO: 27267 - DNA, 600 bp, Chicken  19866894244265_2
aattctgtatcccatatccctcctctcatatttttatgactaattacattcatgtgtttttcctttcttaagtggccctgtggcttaggaagggtacgcactttgatcctctgcatgcattgtatttttttcccccttctttctctgcttacatactcctccaattttctgttttcagttactttttcctcctaaccaattwtatttgtatataggatattgtttcccataaggcattttcctttccctttcccttactgtttctctctgtttattctcaaatgtatactgcacaacgtmagagttttcatctaaaactcccttgccttttctacacacatcagaatgatcttttctccattttctagttccccaattcagttcgcccctcctaatacaccttctggcctttaatccctttccgctgtcctattaacataatctcttcccagtatgtaacactctatacaataaaagcactgtatgaacacacataattacagaaaaaccttgagaatattactaccaaaatcaacagggtgagggactaaaaaggataatttaagagaaaactgtggcttttcttttgttttttaaagc

SEQ ID NO: 27268 - DNA, 600 bp, Chicken  19866894244281_1
acacagtttttcaacataatcaccgccatcagctaagcctatttgccagcaatgaggaagagcctgcatgctgtgcttgtaaaaatctgcaccggtggagctgacctaccattgccaccactgaaatactgtgctgacatccactgttgggtctccattaacactcagcaagtctcagtgtatgtcaataggtgcaaatttatttaatatagagaaattcacttatatacctttgcttcgtgcacacttccatgtcagacaccattttgtcagactgctcctctgctgccatctgtcacrtggcaacaaaaggtaatggaatgctggtgggaaaggtcagtctctactgcatctctgatatgttgggccaacataataaaataggaggcattactttcagagcagccctcatatatatctgcaattccaggggagaaaatgatgtagtaagttgtaaaatgaaagaaatgatagtatacagtggaaaataattattcagtcttttctcagtcaagctgaaaaataccattttataaaaatattagaggcttaaattgtattttcaccttcatcctgttatcttgcttaaacagttcttgc

SEQ ID NO: 27269 - DNA, 600 bp, Chicken  19866894244282_1
ccttgaaggatgatcttggaattggccatatgtcttagtgtgcttgaaatatcttaaaatacgccctcactaattaacttggtcagtaatgacagactagccattgtgtgaacaagaaaacttgcagcagaggctggatggatactcaaggacttcagtccacatgaaaatgtttgatcacaaacagcactgctgtgctgccaatatgtgagctataaaactaactcagactggtgtaatccctgcagactttttagccttagtatttggaactccttaggatagatattttccccccamaaatgaataaatatacaaataaaatccatgtaatgcttaatataataaatcccttaaacttgcctggagtaaataggctctgctacagtacaaatgccattgtctgtactgaatgaataatggataatgtcattccacacatttaacttttggttcatgaattgcccaaaggcaaatcacattagacataatcacttgctgagtaattttcacaaattagttttggtctgtagctccagtgcccacagtgctttgttattaatcattattataaattgatgccctcataggctgcttcag

SEQ ID NO: 27270 - DNA, 600 bp, Chicken  19866894244282_2
atataataaatcccttaaacttgcctggagtaaataggctctgctacagtacaaatgccattgtctgtactgaatgaataatggataatgtcattccacacatttaacttttggttcatgaattgcccaaaggcaaatcacattagacataatcacttgctgagtaattttcacaaattagttttggtctgtagctccagtgcccacagtgctttgttattaatcattattataaattgatgccctcataggctgcttcagataacttgtaggtgacaaaatgttgatttttttccccartcatagcttgcagacctgaactgccattaaaaatagccagccttgcagtagaaaatttgcctgctgtgagttctgcaaagttgtttaaacttctttgaaatcaacaaattaactcaaacaaactcatccacagtattcaagcaaaaaggaaggccaaatgcaccggatcgcactggctgccatccagtcttcaaagcagcaggaggtggctctgacccatccgggcgccagcggggccgcgcgctccccctgcagcccccactctgtggacgcagtgccatcatctcctcagagcaattt

SEQ ID NO: 27271 - DNA, 600 bp, Chicken  19866894244283_1
atagtctacaagggtttggttgaagtacagatgctggctcagactctccatgccctgtccttgttttctttctgtttggtacatggtcactggcaacctaacaacatattgcaattttattgtttcccaagacttaaatttggcatttcaagagaagaaaaactgagaaaaaaaacataccttcatatcattaaaaagttgttctgtgtctacagtacttggcaatggtgtaatttttaagggaggtacttcttctttcatttggacctgcttttttgtatctgcaaatgtttttgccascactgcctcttgtacatagggttcctcttgcatatctctgccaaacaagctcctctcaytgttggcattctgaactgacgatgaaccctcatgaatgggcttccctagctgcaaaaaaacatcatacagagtcacctgcttcagtttatttttacaggtctcctcacttccttgttttttctcttgacaacgaactccgcagaagcgatcagacagatccaagggcttatcacctggtgtgttccccattcatgtgctgaatatctgatcgaaagggtacagagttctctttgttgaaag

SEQ ID NO: 27272 - DNA, 600 bp, Chicken  19866894244283_2
cttgttttctttctgtttggtacatggtcactggcaacctaacaacatattgcaattttattgtttcccaagacttaaatttggcatttcaagagaagaaaaactgagaaaaaaaacataccttcatatcattaaaaagttgttctgtgtctacagtacttggcaatggtgtaatttttaagggaggtacttcttctttcatttggacctgcttttttgtatctgcaaatgtttttgccascactgcctcttgtacatagggttcctcttgcatatctctgccaaacaagctcctctcaytgttggcattctgaactgacgatgaaccctcatgaatgggcttccctagctgcaaaaaaacatcatacagagtcacctgcttcagtttatttttacaggtctcctcacttccttgttttttctcttgacaacgaactccgcagaagcgatcagacagatccaagggcttatcacctggtgtgttccccattcatgtgctgaatatctgatcgaaagggtacagagttctctttgttgaaagatgcattttcacagctaattgcatgctcatcttcagctttctttctcttggcacacctt

SEQ ID NO: 27273 - DNA, 600 bp, Chicken  19866894244289_1
tatacactgtctaattatacaaccttactgtcccagaatgtgatttctgaaaccatttctgacatatgggaagagggtagaacagctggtcattaaggttttctcaagactatttagtaacacacttgaatgtaattaaagtgctacattaaatactgcacttgtgtacaatgtatttttaatctttatggcatgctgtaaaagtaaataaatgcaaagcattaacatttctccccttcatctcctaaattgttaagacatgttattccctatctgttctgtgcactacctgaagaataytctgatgctttgtgagcatcctgtgcagtggataggaaacaagcccagtctgaattgtgcaagacagatataattctacatgaattttatttgcccaagtgaggccatgatgactcatctggttgtatttcagcagacagtattgcaacagtcctagtttattccttttggaaccagtcaaggtgtttcagagcaactttgacctatattggatctaatgcaagaagcaaaactttgtacacaaaataatgcaaacatcttcacagcaactttaccctcaggtatcctaatgggacttct

SEQ ID NO: 27274 - DNA, 600 bp, Chicken  19866894244290_1
gagacctgtctgctcctttgggctgtgcagagagatgcaggttcacagctgaggaagatctgagaacctgctcacctgttggggtcaatgtgtagctcaatggcattgctatgtccatcccaaagcagcacatccaaagtcacagggatgtgctggggcagtgccaccaggccagatgacacctcttatccacctactgacatttcactaccacggtccagccaaatgaaaagcaagcagatgccctgactgaagctccgagacatcaccagccacagatccatagctaaccctccctcraacatgcctaatgstttttcagccaactagcaagatccctgggagcaaaccaaaaacacctctgctatttctccataggcagtttctcagctgggcctggaataggcaaccacttccagggtgtttacataacaccacwaattcctcgtgtttatgaattcctgcagcccgtgatgctgcaaagccatggggatggctggcagggagacagcgatcctctcccaggtgcacaagtcctatctcctctctgcaggatgcacctgggcaatagtgactgcaggatgtggtggcgaggtagaa

SEQ ID NO: 27275 - DNA, 600 bp, Chicken  19866894244290_2
cctttgggctgtgcagagagatgcaggttcacagctgaggaagatctgagaacctgctcacctgttggggtcaatgtgtagctcaatggcattgctatgtccatcccaaagcagcacatccaaagtcacagggatgtgctggggcagtgccaccaggccagatgacacctcttatccacctactgacatttcactaccacggtccagccaaatgaaaagcaagcagatgccctgactgaagctccgagacatcaccagccacagatccatagctaaccctccctcraacatgcctaatgstttttcagccaactagcaagatccctgggagcaaaccaaaaacacctctgctatttctccataggcagtttctcagctgggcctggaataggcaaccacttccagggtgtttacataacaccacwaattcctcgtgtttatgaattcctgcagcccgtgatgctgcaaagccatggggatggctggcagggagacagcgatcctctcccaggtgcacaagtcctatctcctctctgcaggatgcacctgggcaatagtgactgcaggatgtggtggcgaggtagaaaagagaaatgttgc

SEQ ID NO: 27276 - DNA, 600 bp, Chicken  19866894244290_3
tcacagggatgtgctggggcagtgccaccaggccagatgacacctcttatccacctactgacatttcactaccacggtccagccaaatgaaaagcaagcagatgccctgactgaagctccgagacatcaccagccacagatccatagctaaccctccctcraacatgcctaatgstttttcagccaactagcaagatccctgggagcaaaccaaaaacacctctgctatttctccataggcagtttctcagctgggcctggaataggcaaccacttccagggtgtttacataacaccacwaattcctcgtgtttatgaattcctgcagcccgtgatgctgcaaagccatggggatggctggcagggagacagcgatcctctcccaggtgcacaagtcctatctcctctctgcaggatgcacctgggcaatagtgactgcaggatgtggtggcgaggtagaaaagagaaatgttgcttgggacttggaaagccagcatgccatccagagaggagaaaactccacaaacacggctgttttggccagaagaatggagcgtggtcacttcacagagggttaagcacatgtccaagagctacact

SEQ ID NO: 27277 - DNA, 600 bp, Chicken  19866894244293_1
aatgcaactgagggattgtattgcagcaaaactcaaatcagagaggagaaggggcagggaattacagatatctgacatttatcacaaacctgtcttccacaaacccctgtgccagtgtgttggtctgagtctctacaatttctcatcaaaatggggaaaggtggacctcaagtgagccctgagtatataatatatagtatttatagttctgtggtttgtccctggtttaggtttgaaaagcttgaggactgaagtttgattacaaattgcaggcagcaattgctggataatgcatgatgrgtgagctcatctggaagccgtgcagactccgcaggatctttttattgagtatgaaggagcaactgaaagcaaattcagtttggaagcaatattgtcccagtaatacagctactaagaaaacaccgtcaccatcattcatgttgcaaatctcacaacaggagaggcctgtacatgaagacagatggttgctttcaagttactatcagtactaaaaaactgtataactatctttttctgtgttaattgatccacgataaagcctttggtttgctagcttcatagaagtactaataccttcta

SEQ ID NO: 27278 - DNA, 600 bp, Chicken  19866894244294_1
gctgcttccacaactcagcagctgaacactgcagtgaggagccattcttttgcatagtcatttatttccaaagatgtatgggcaaagtggcacatacctttcagagcatatatcagctgtggattggtgttgagtgactctaagtggcagataaacagctgtgtgaggagagaaaaggatcctttcctgtgttctatccttgtcccgctttgggtaaaaagcaaattgcttgggtttcatgttactggaggcttgtgtgttccttagctatgggtataccaggaagcagaataaataaaygagaagtaaggaaatctttttcaaaacctgctggaatgtgacttggaaccctaggaaaggactgcaagccattcacacccacggaccatcctgctgacaaaggcaaacttctctagtttggcactgctagactcaattgaacaacgttcttacgtaggagtaragatgctgtggtagagatgctatgatcaggaggtttgggcagcagctgcccatatgactcctaactgcagccaggactgtcattctttcactgtcagaagcattaaattaaaacaaataagcaacctctcctgcccc

SEQ ID NO: 27279 - DNA, 600 bp, Chicken  19866894244294_2
tgaggagagaaaaggatcctttcctgtgttctatccttgtcccgctttgggtaaaaagcaaattgcttgggtttcatgttactggaggcttgtgtgttccttagctatgggtataccaggaagcagaataaataaaygagaagtaaggaaatctttttcaaaacctgctggaatgtgacttggaaccctaggaaaggactgcaagccattcacacccacggaccatcctgctgacaaaggcaaacttctctagtttggcactgctagactcaattgaacaacgttcttacgtaggagtaragatgctgtggtagagatgctatgatcaggaggtttgggcagcagctgcccatatgactcctaactgcagccaggactgtcattctttcactgtcagaagcattaaattaaaacaaataagcaacctctcctgcccccacaatagacacctctatttttattatgtgaactaggagaagaaatgtacctggagggtacccataatttatttaaaaaaataggaaaggagaatatctgcagttgatgaaaaaattcccagtccttggggtatttgatcagttaattatccatacttcagaa

SEQ ID NO: 27280 - DNA, 600 bp, Chicken  19866894244304_1
tacacagaagaggtgtccattgttacttaacactggctgttgcagtgtcataggctaagcagcccatagttagcagaagcatctgaaataataccagaggtctgtgtttaagcacccgaatcacatctcaagtatcagcagtttgttggtattgcgaaaacttttatttgtatatttctaaatagcattgctttttaatcctgtgaataaggatttttccttagatattttttttaacatctagcttgttattgtctttaatgataggtgcatatttctaatggtgaattaagcaattgmgaaaactgtgttcaggatgagcagcaacaacttagtgatagcaggtaatgttccagcaggtgctgtctgactgtcactgggaagcttttttagttgttgtctacaactattaatagatttcgagatgaggggaacagtcgaatcagggtttttatgaatataatagcagcttaagatgtaatgagaggtgatatgcagtagtacagtagacacagaatacatacgtctgaatgaatgttactgttccaaatatgtgtattagtacaaatcttaaagcagaagraacagcatttaacatca

SEQ ID NO: 27281 - DNA, 600 bp, Chicken  19866894244304_2
gtgaattaagcaattgmgaaaactgtgttcaggatgagcagcaacaacttagtgatagcaggtaatgttccagcaggtgctgtctgactgtcactgggaagcttttttagttgttgtctacaactattaatagatttcgagatgaggggaacagtcgaatcagggtttttatgaatataatagcagcttaagatgtaatgagaggtgatatgcagtagtacagtagacacagaatacatacgtctgaatgaatgttactgttccaaatatgtgtattagtacaaatcttaaagcagaagraacagcatttaacatcaaattctgtattcaggagtgaaagggatctacatttttaagagaacgtctcacacatgacctcttcattatttattcatatttttttaatttcaaaagtaacacaaaagctgcttctccgaggtgagctaagtgcatcaatacatcttttccatatgtaaaatgatgaaatcattggaccttctagtggtagtagtcagctggtaagttacatacagacactgacatgtctgtggtgtccctgtttcacatgtaaagcttggtccctataagcagttgttttaa

SEQ ID NO: 27282 - DNA, 600 bp, Chicken  19866894244304_3
tgactgtagcagcctcttgtgttatatctgtaaactacacctctgtcaggtgaaacccctgtgctcatgtctgtaacaatttgacagggtaggattatggggatgaacatgtcccagatgctgtacagtgcatagctgctatatcaaacaatgacaaaggttctgaacttccttatccttgtaaaatatttgtctaaatgtcttgaaatagtcactgaggcatttcaaaaagttccaagccctttagactgcacctgctgttagtcccataggtaaattgtaactttgcagccacgtttkcaatagtacttaattcttatttggagacaaaataaaactataatgcataaacattttcaagttaaaaatgtgcttatgtgtgttggctctcagggaagtcctatgggggtttttgttcaatgttgataatgcttaaaagctatgaagatcaggtgtgcttgaagttgttgggagatcagaagtaggttggaatatttgtgaaggacaggtaattatttgtagaatggttcaaagtaytgactacttaatgagctttatttgcagtttgggtcactgtcaactcgatcaagtttgaattct

SEQ ID NO: 27283 - DNA, 600 bp, Chicken  19866894244304_4
agccctttagactgcacctgctgttagtcccataggtaaattgtaactttgcagccacgtttkcaatagtacttaattcttatttggagacaaaataaaactataatgcataaacattttcaagttaaaaatgtgcttatgtgtgttggctctcagggaagtcctatgggggtttttgttcaatgttgataatgcttaaaagctatgaagatcaggtgtgcttgaagttgttgggagatcagaagtaggttggaatatttgtgaaggacaggtaattatttgtagaatggttcaaagtaytgactacttaatgagctttatttgcagtttgggtcactgtcaactcgatcaagtttgaattcttagtagttcacatttttgtgaacttgtgttttaattttgtgatcttagctgtagaagcttgtcagtatcttaggctatgtrgattaaaacagtggtataagaggatatgcaaaacaatacaacaaataagttgtaaaacttcccattgtctgcttccccattctcccttgtcagttgtcttcaaaagaatgctctaagtcttgactactgtaaatgaatgtcagcactattgtaaaa

SEQ ID NO: 27284 - DNA, 600 bp, Chicken  19866894244304_5
gttggctctcagggaagtcctatgggggtttttgttcaatgttgataatgcttaaaagctatgaagatcaggtgtgcttgaagttgttgggagatcagaagtaggttggaatatttgtgaaggacaggtaattatttgtagaatggttcaaagtaytgactacttaatgagctttatttgcagtttgggtcactgtcaactcgatcaagtttgaattcttagtagttcacatttttgtgaacttgtgttttaattttgtgatcttagctgtagaagcttgtcagtatcttaggctatgtrgattaaaacagtggtataagaggatatgcaaaacaatacaacaaataagttgtaaaacttcccattgtctgcttccccattctcccttgtcagttgtcttcaaaagaatgctctaagtcttgactactgtaaatgaatgtcagcactattgtaaaagcatttctgtgctcttacaaggaattggtaatacttgagtaagtggagaagaaacaatcttgtagttatcttaaacaaaacaaacacagaatcttaaaaataaccaaacatggaatgtagctagttagagattcttttttgggg

SEQ ID NO: 27285 - DNA, 600 bp, Chicken  19866894244307_1
accaattcttacccactgaatagttcactgttcaaaaccacctcaatttagacatagggatatggtgtgggaccatgtcaaaggccttgcacgagctcaggcagttgacatcagttgctctgttgtccaccgatgccatcacttcactgtagaaggccactagattgataaggcacaatctacccttggtgaggctgtactggctttcccagacaatctcatctcacatgtgttgaaagacttgttccatgatcttcccaggcacagaggtgaggctcaatggcatgtagttccctgggwsttcrtttcctctctcactttcttaaaaatgggaattatttttccagtcaccagggactctgcctgccagccatgatttttcaagtatgctggagggtggcttggaaaccacatcagccagttccttcaggaccctgggatgtgtgtcatccagtcccatagacttgtacacattcagtcccatgaggtggtcttggacctgctttccccttacagtggagggtattttgcttccccagtccccaccaagagatgagttcagagatactagaggcaagggaaacctgactgccagtgaag

SEQ ID NO: 27286 - DNA, 600 bp, Chicken  19866894244307_2
ccaattcttacccactgaatagttcactgttcaaaaccacctcaatttagacatagggatatggtgtgggaccatgtcaaaggccttgcacgagctcaggcagttgacatcagttgctctgttgtccaccgatgccatcacttcactgtagaaggccactagattgataaggcacaatctacccttggtgaggctgtactggctttcccagacaatctcatctcacatgtgttgaaagacttgttccatgatcttcccaggcacagaggtgaggctcaatggcatgtagttccctgggwsttcrtttcctctctcactttcttaaaaatgggaattatttttccagtcaccagggactctgcctgccagccatgatttttcaagtatgctggagggtggcttggaaaccacatcagccagttccttcaggaccctgggatgtgtgtcatccagtcccatagacttgtacacattcagtcccatgaggtggtcttggacctgctttccccttacagtggagggtattttgcttccccagtccccaccaagagatgagttcagagatactagaggcaagggaaacctgactgccagtgaaga

SEQ ID NO: 27287 - DNA, 600 bp, Chicken  19866894244307_3
ttcttacccactgaatagttcactgttcaaaaccacctcaatttagacatagggatatggtgtgggaccatgtcaaaggccttgcacgagctcaggcagttgacatcagttgctctgttgtccaccgatgccatcacttcactgtagaaggccactagattgataaggcacaatctacccttggtgaggctgtactggctttcccagacaatctcatctcacatgtgttgaaagacttgttccatgatcttcccaggcacagaggtgaggctcaatggcatgtagttccctgggwsttcrtttcctctctcactttcttaaaaatgggaattatttttccagtcaccagggactctgcctgccagccatgatttttcaagtatgctggagggtggcttggaaaccacatcagccagttccttcaggaccctgggatgtgtgtcatccagtcccatagacttgtacacattcagtcccatgaggtggtcttggacctgctttccccttacagtggagggtattttgcttccccagtccccaccaagagatgagttcagagatactagaggcaagggaaacctgactgccagtgaagatcga

SEQ ID NO: 27288 - DNA, 599 bp, Chicken  19866894244308_1
  misc_feature (1)..(9): n is any nucleotide
nnnnnnnnncaggaaaggaggaaggggagctgttaggaccattatgtcaagtagaaaatatttagctaaaaatactgtcatcactaatttagaagtaactgctgggtaacgtagcttcttatgcattatgatgataaattactggggaatgaacgaggagtaagatccatcaggacctctgctattactcagaagccatgcccagacactggtgcctgttgcctccagttctttatgaatttcacagcactaggataaacttctgaagtatcagtcccgttctattctgctctgactggmtgaagttgaaaagaaactccatattctacagctcccattctgcttcacaatgcaaactcaacttcttttacatgtactaattttggagtgtcacgtcttcaacaggagaaaggattttgcaacttggtcccttccaggcctcagtaygatatttatatggtattatgttgaccttccatgtacctgttatcagctgcaytgtcagaatacagtktgttctgagcttagccaccaacagtaacatctgcagtctctttgggctccagtgcwgggagtactttacgtaacagactttcttg

SEQ ID NO: 27289 - DNA, 600 bp, Chicken  19866894244308_2
aatgaacgaggagtaagatccatcaggacctctgctattactcagaagccatgcccagacactggtgcctgttgcctccagttctttatgaatttcacagcactaggataaacttctgaagtatcagtcccgttctattctgctctgactggmtgaagttgaaaagaaactccatattctacagctcccattctgcttcacaatgcaaactcaacttcttttacatgtactaattttggagtgtcacgtcttcaacaggagaaaggattttgcaacttggtcccttccaggcctcagtaygatatttatatggtattatgttgaccttccatgtacctgttatcagctgcaytgtcagaatacagtktgttctgagcttagccaccaacagtaacatctgcagtctctttgggctccagtgcwgggagtactttacgtaacagactttcttgtacctcttccaaccattccctctctgctacttattttgtatagtcagacctacattctgacactagctccttaacctttccttgttttgctcattgacctttcttgcttgcttcccattttgctttgcatttcctttttttctttttt

SEQ ID NO: 27290 - DNA, 600 bp, Chicken  19866894244308_3
gcccagacactggtgcctgttgcctccagttctttatgaatttcacagcactaggataaacttctgaagtatcagtcccgttctattctgctctgactggmtgaagttgaaaagaaactccatattctacagctcccattctgcttcacaatgcaaactcaacttcttttacatgtactaattttggagtgtcacgtcttcaacaggagaaaggattttgcaacttggtcccttccaggcctcagtaygatatttatatggtattatgttgaccttccatgtacctgttatcagctgcaytgtcagaatacagtktgttctgagcttagccaccaacagtaacatctgcagtctctttgggctccagtgcwgggagtactttacgtaacagactttcttgtacctcttccaaccattccctctctgctacttattttgtatagtcagacctacattctgacactagctccttaacctttccttgttttgctcattgacctttcttgcttgcttcccattttgctttgcatttcctttttttcttttttccctactgctttcccttgtgcagacatgtgccctcttgccctaacatacttt

SEQ ID NO: 27291 - DNA, 600 bp, Chicken  19866894244308_4
cctgttgcctccagttctttatgaatttcacagcactaggataaacttctgaagtatcagtcccgttctattctgctctgactggmtgaagttgaaaagaaactccatattctacagctcccattctgcttcacaatgcaaactcaacttcttttacatgtactaattttggagtgtcacgtcttcaacaggagaaaggattttgcaacttggtcccttccaggcctcagtaygatatttatatggtattatgttgaccttccatgtacctgttatcagctgcaytgtcagaatacagtktgttctgagcttagccaccaacagtaacatctgcagtctctttgggctccagtgcwgggagtactttacgtaacagactttcttgtacctcttccaaccattccctctctgctacttattttgtatagtcagacctacattctgacactagctccttaacctttccttgttttgctcattgacctttcttgcttgcttcccattttgctttgcatttcctttttttcttttttccctactgctttcccttgtgcagacatgtgccctcttgccctaacatactttttcatctatcttaat

SEQ ID NO: 27292 - DNA, 600 bp, Chicken  19866894244308_5
tcagtcccgttctattctgctctgactggmtgaagttgaaaagaaactccatattctacagctcccattctgcttcacaatgcaaactcaacttcttttacatgtactaattttggagtgtcacgtcttcaacaggagaaaggattttgcaacttggtcccttccaggcctcagtaygatatttatatggtattatgttgaccttccatgtacctgttatcagctgcaytgtcagaatacagtktgttctgagcttagccaccaacagtaacatctgcagtctctttgggctccagtgcwgggagtactttacgtaacagactttcttgtacctcttccaaccattccctctctgctacttattttgtatagtcagacctacattctgacactagctccttaacctttccttgttttgctcattgacctttcttgcttgcttcccattttgctttgcatttcctttttttcttttttccctactgctttcccttgtgcagacatgtgccctcttgccctaacatactttttcatctatcttaatttcaattatttatatatttacttcaaaaaataaaaacacagatatacccaaagcct

SEQ ID NO: 27293 - DNA, 599 bp, Chicken  19866894244327_1
  misc_feature (1)..(172): n is any nucleotide
nnnnnnnnnnnnnnnnnnnnnnnnnnnnnnnnnnnnnnnnnnnnnnnnnnnnnnnnnnnnnnnnnnnnnnnnnnnnnnnnnnnnnnnnnnnnnnnnnnnnnnnnnnnnnnnnnnnnnnnnnnnnnnnnnnnnnnnnnnnnnnnnnnnnnnnnnnnnnnnnnnnnnnnnnnnnagttaaagagggtcctcatgatcacttctcctctatgcctatcccacagtgagctctcaaaatggagtagctcataccagaaaagtaaatgccacattattgctgatatggacatttgaggcttacaraatcagctggcatttggtcattgagcttattatttattagcatgtttcacattcagagcaatgctctgctattcagtatagaggtaccacccccactaaagtcaacaggatgcagaacaatgtctgtgcagaaccagtcacacctcagaaatacgtgtgcccatggaccgaagggctcctggggctgcaaccatgacaccagcaagggcaaacaagtcaggcaagagatgacragagatcattgcagaagaaaacagtaaaaacgtatggagaatgtgtgcaaaatgcactttaggacc

SEQ ID NO: 27294 - DNA, 600 bp, Chicken  19866894244327_2
atggagtagctcataccagaaaagtaaatgccacattattgctgatatggacatttgaggcttacaraatcagctggcatttggtcattgagcttattatttattagcatgtttcacattcagagcaatgctctgctattcagtatagaggtaccacccccactaaagtcaacaggatgcagaacaatgtctgtgcagaaccagtcacacctcagaaatacgtgtgcccatggaccgaagggctcctggggctgcaaccatgacaccagcaagggcaaacaagtcaggcaagagatgacragagatcattgcagaagaaaacagtaaaaacgtatggagaatgtgtgcaaaatgcactttaggacctggcactcaatgggcagaaaaatggtgacagaagctacttgatacttaatgatgcagttaagttgtgcaggagcaaagggtagctcaaacccgcacattgttgacttatttccagactctcagtcatgctgacagtggggtacagcacgactgcttgatgccagcgtctgcgagtgtgaagatggatcgtagtgtttcccaacacttcctggcccccgtctgctggcagcccag

SEQ ID NO: 27295 - DNA, 599 bp, Chicken  19866894244332_1
  misc_feature (1)..(196): n is any nucleotide
nnnnnnnnnnnnnnnnnnnnnnnnnnnnnnnnnnnnnnnnnnnnnnnnnnnnnnnnnnnnnnnnnnnnnnnnnnnnnnnnnnnnnnnnnnnnnnnnnnnnnnnnnnnnnnnnnnnnnnnnnnnnnnnnnnnnnnnnnnnnnnnnnnnnnnnnnnnnnnnnnnnnnnnnnnnnnnnnnnnnnnnnnnnnnnnnnnnnttccctgttgtcagtcctgcactcttattcccaaatttgaccctgatggtgacctggtgggctgaggtctgtcccactcctgctgtgggctgggtgttgaagcrgttctggtggattgcagaagacttgagcttttgtcctgagccactcatctgcagcttggttgagtcaaggcatgtggtttcttcccggcctttgtcctttgctgtgacagtttaggacttagctcagcagtgtgaggaaaccctgggggtgggaacagagtgagcagcaggacgagatggggaggagtactggggagggtcagcatggagkttgggtgtcaggagcattttgtctccccttggcttctggaaccaccttcttgggattcatttcccatctttttgctcctatcacttgc

SEQ ID NO: 27296 - DNA, 600 bp, Chicken  19866894244332_2
cctgcactcttattcccaaatttgaccctgatggtgacctggtgggctgaggtctgtcccactcctgctgtgggctgggtgttgaagcrgttctggtggattgcagaagacttgagcttttgtcctgagccactcatctgcagcttggttgagtcaaggcatgtggtttcttcccggcctttgtcctttgctgtgacagtttaggacttagctcagcagtgtgaggaaaccctgggggtgggaacagagtgagcagcaggacgagatggggaggagtactggggagggtcagcatggagkttgggtgtcaggagcattttgtctccccttggcttctggaaccaccttcttgggattcatttcccatctttttgctcctatcacttgcttccttgtgttcagtttggagaatgctcccatgtaggttttgtttgcagcgaagtttgctgactgtcagaccaaccaacagcaattcttctgcagcgtcagagctaatttgcagtgcatttatgtagctcaggtatcacttgagtgctataaaatgcccagggcaccctgactggatggcagtattgctgcttgggtttttaacagccttcc

SEQ ID NO: 27297 - DNA, 600 bp, Chicken  19866894244337_1
gccataattcttgtccttacagttaggtacaaaaatatctgactcatatctgtctcagcactccccgctttctagcctagagccaaaaaaaaaaaaaaaaaacaccacatacttgtcaggaatccagaagttattaatgtcactgaacacttggcaaagcaccaaaatgaaaggcagtttaaaatgtccaggaatctcttccacagcctttcttttaaaattctctctgttccgtttgaatgagcccaccggacaccctaaaatcccattcctaatcactgtcagagcagtggtgaaagsactggccgggcaggctctcggtgttgagggtcaatcacagcacagatcactgagaacaccccaccagagaactatgctgcctttcctctgcctgactctcagccagcttaggaagaaaccaggacaccaatcctcagttatcacgtttgtcagtagacacaactcattgtatcatagagaccatgtaattgcttatcgtgagttcaaactctgcagagagataggccgttsctttctttgaactcggtggaaactcatctggtgacaccttgctcaaaacgcagcatttattcataccag

SEQ ID NO: 27298 - DNA, 600 bp, Chicken  19866894244337_2
ccgtttgaatgagcccaccggacaccctaaaatcccattcctaatcactgtcagagcagtggtgaaagsactggccgggcaggctctcggtgttgagggtcaatcacagcacagatcactgagaacaccccaccagagaactatgctgcctttcctctgcctgactctcagccagcttaggaagaaaccaggacaccaatcctcagttatcacgtttgtcagtagacacaactcattgtatcatagagaccatgtaattgcttatcgtgagttcaaactctgcagagagataggccgttsctttctttgaactcggtggaaactcatctggtgacaccttgctcaaaacgcagcatttattcataccagctgctatagattatatttactactttttagtattaatggctgcaatgaggaaaatttttctaagccaacccatgtcaccaaaagtattatcccacagttttctttctcccatgtacttacctacatgaataggattaacccttccaaactctgtatgccaacgtatgttaaagcagaaaaaagtcacattaaaatgtttttctcactaggcaccctatttagcaaccgcct

SEQ ID NO: 27299 - DNA, 600 bp, Chicken  19866894244337_3
ggtggaaactcatctggtgacaccttgctcaaaacgcagcatttattcataccagctgctatagattatatttactactttttagtattaatggctgcaatgaggaaaatttttctaagccaacccatgtcaccaaaagtattatcccacagttttctttctcccatgtacttacctacatgaataggattaacccttccaaactctgtatgccaacgtatgttaaagcagaaaaaagtcacattaaaatgtttttctcactaggcaccctatttagcaaccgcctggaacttcataggyrtgggttgttatcacagtatcaagcagtgccatttttaattaaaacttttcagggctgcctatctaayttctcaccgtgataatccagattacatgcaactcagaatagaggtcactgagatgataaaatgcatcagtagagtcctcccacagggcactttcctatgtgcaaactctgggaccaatgtgtcaaagtcagagctagagaaagagaaactgaccccagttgcctatgccaaagaaaactggttcttcacacacatgcaagtgctcaagaagagtcaagagccacaggtgaaa

SEQ ID NO: 27300 - DNA, 600 bp, Chicken  19866894244337_4
gtggaaactcatctggtgacaccttgctcaaaacgcagcatttattcataccagctgctatagattatatttactactttttagtattaatggctgcaatgaggaaaatttttctaagccaacccatgtcaccaaaagtattatcccacagttttctttctcccatgtacttacctacatgaataggattaacccttccaaactctgtatgccaacgtatgttaaagcagaaaaaagtcacattaaaatgtttttctcactaggcaccctatttagcaaccgcctggaacttcataggyrtgggttgttatcacagtatcaagcagtgccatttttaattaaaacttttcagggctgcctatctaayttctcaccgtgataatccagattacatgcaactcagaatagaggtcactgagatgataaaatgcatcagtagagtcctcccacagggcactttcctatgtgcaaactctgggaccaatgtgtcaaagtcagagctagagaaagagaaactgaccccagttgcctatgccaaagaaaactggttcttcacacacatgcaagtgctcaagaagagtcaagagccacaggtgaaag

SEQ ID NO: 27301 - DNA, 600 bp, Chicken  19866894244337_5
tatttactactttttagtattaatggctgcaatgaggaaaatttttctaagccaacccatgtcaccaaaagtattatcccacagttttctttctcccatgtacttacctacatgaataggattaacccttccaaactctgtatgccaacgtatgttaaagcagaaaaaagtcacattaaaatgtttttctcactaggcaccctatttagcaaccgcctggaacttcataggyrtgggttgttatcacagtatcaagcagtgccatttttaattaaaacttttcagggctgcctatctaayttctcaccgtgataatccagattacatgcaactcagaatagaggtcactgagatgataaaatgcatcagtagagtcctcccacagggcactttcctatgtgcaaactctgggaccaatgtgtcaaagtcagagctagagaaagagaaactgaccccagttgcctatgccaaagaaaactggttcttcacacacatgcaagtgctcaagaagagtcaagagccacaggtgaaagaaaactactttgaaggtactaagtggttgctacagcctcatagccttgtctctcatcacacctgtca

SEQ ID NO: 27302 - DNA, 600 bp, Chicken  19866894244339_1
gcaagctcaggatgccacatagctacaaaagaaactgccatggaggtttgtaacaaaacccagctcagcggtttccctattcgtacaaacaagctgacctgcagcttttctgaaagtctccttgtctatttacatgaaaagatttttagatcatttcattggattccaaaaccacattaaattagcggatgaggatcaaacaccaatgctgcaaacccctggctataaggaagcagataccacaagatttgcattcaaaacaagtctgctggcactgttgcctagtctgagagtagcaaygcttcaatatcagcttccatttaatatttctagcttcagtaagatttgcaacacaagcacagataaccaaacttgttacccaaaaagcacgttgtgatctacagcacagagttcattaaaccgcaatcaagactaatatttcctaagtgcctgctttgtccaataccctcacactgaggagaccaaaccaatcagtatccactttttcacatcacacttaaatattctctccccttcacatgacactcaatctacaacttctgctgtctagcaattttaaactgaaattcataagcctgt

SEQ ID NO: 27303 - DNA, 600 bp, Chicken  19866894244339_2
gtgtcagaaggttagcagtgtactgttctacagagttctgaaggacagccatcattaaactgcagcttaacaaatgacaccactggtttcctgccagaagcatcagtatagccaaaaacatcattaattctgcactcccacacctgtaccgagcagaaatatttgcatatctataaaattacaaacacaaccagcttttaaattgtacaccagtcaggcacaaagagatagatatctgaacatgagagaacaaagagagatatctgagcctacgagagaaaaggaatggcagctgaaagraggaagattacatgcaattgttgcagattgaatggacatgatgaactgttaataatattgggaatctggaaaagaaacagacgatgttcccctgtgccattacacacaagcagaatgtacagtggattccagctgagtgacagatggaatgcgagacagaagtgatgtttaggctagtctgtaaaggctagaaactcctataaggatcccacaagttaataaaattacttttagccataaaatcaatgtttcattgaggcttatctggtaattaaggggagtctcaaaatgccattaaaa

SEQ ID NO: 27304 - DNA, 600 bp, Chicken  19866894244340_1
ttcagtaagattcctataggattcatacctcttggaaagacctgcaccttgagccacactctctaccctgagagtgtgaaccaagtacagtaagtattatgtgtttctgaaacgtggcttttgtttgttttcaaggagcagtgcttcttggtagtttgacactttctttttcttctatgttacataggagttggcagtctctgggcagagcctgatgattcagtttgatctaagattgttttgtccacttgtaaactgaagtctagtcaattaatctttcttttcctcaccctaaattcyctttcaatatttccttcctttccttccatgctaacaagtatatttctccttgctactgaaatctgttcactctggttctcccagtgactaattagcattcttattcacgggacccttgctggtatccatcacacataaagtccacgagccaactggcataacatccttcattaacgccaccagagtgctttgaagctcagcaggatggacaaggctgcaatcagcagcaaagattaaaataataatttatatttcagttctaaagaagctgtttgaaatgagtgatcttcttgtccccag

SEQ ID NO: 27305 - DNA, 600 bp, Chicken  19866894244356_1
tcacttttcagatgaaccagtgtgttctgattttgtgtttacttatctgaaaggaaagaatctgaaagaatcctgtcttcataaggctttaaaatgaacagaggcttttctctgttaaattgaaccaaagcttgtgtgtttggaaatccctccccgcacccccctcggtgagaccgtgtctgattactagaggaggaggaaagaaaagccttttggggaagttttgctctctttgtgttaacttccttaaaaatgataataaaattaagttgttgcgatgtggcttaagtcaatggcagyagaagtcagaggcttggaaatagtgtgggttctcccttttccagggtaagccattcagcattcctaacagactcgtgctgggagaagcagacatcaccagcaaggtatttcctggakccttttgccaaatgctaataataataataacaataacaataataaaaagactcagatctgaactgagccacttgtgacttcatttggcagcataggcctgttctacataaacttctgcctctattttgatactcatggctgccaaaagcttctgaattaatttgccccccttctccctcccct

SEQ ID NO: 27306 - DNA, 600 bp, Chicken  19866894244356_2
aattgaaccaaagcttgtgtgtttggaaatccctccccgcacccccctcggtgagaccgtgtctgattactagaggaggaggaaagaaaagccttttggggaagttttgctctctttgtgttaacttccttaaaaatgataataaaattaagttgttgcgatgtggcttaagtcaatggcagyagaagtcagaggcttggaaatagtgtgggttctcccttttccagggtaagccattcagcattcctaacagactcgtgctgggagaagcagacatcaccagcaaggtatttcctggakccttttgccaaatgctaataataataataacaataacaataataaaaagactcagatctgaactgagccacttgtgacttcatttggcagcataggcctgttctacataaacttctgcctctattttgatactcatggctgccaaaagcttctgaattaatttgccccccttctccctcccctcttcctcttgccttagcaaaggagtagtggatcacacttagagccaaagaaacatatgggcttgggaagcttctgcagactaaggctctgctggctctttgtgaggatggtgccccg

SEQ ID NO: 27307 - DNA, 600 bp, Chicken  19866894244359_1
ggaaaagaaggatgcaatttgtcacctttcttgataaagcctccttctgagatctagcaatatccctcctttgcaagaacacagaaaattcactgccacatgaaaatagtagcgtatcttaccaaaaaaaaaaccccaccattcatctatcccagcatctcagagcaacccaagccagaacaagtgctggcttttaaccaataaactcattttgaccagctcatgcataagtagtgaaccctgctcctcagagaatgactctgaggttcactgtggtaagtgagaaacaggaagacaggrgtactaaatagacaaattttgcccagtattttgggactggctgggaagaaaggaacaagcagacatcttaccacattcagatttgcagagtagggagcaggatcccaggctactaagataacatctttgtacaaggagctgtcaacaaagtgatggtttgggttggtgagaatctgcaaataaacatgtaaaaaaaaaaatgcagttaaaagcaaatgggacccagtaaaagggtaaaacccttccctaaagtaagcagctctacccattctgctcttcgttctagtttaattctggttg

SEQ ID NO: 27308 - DNA, 600 bp, Chicken  19866894244359_2
ttgggactggctgggaagaaaggaacaagcagacatcttaccacattcagatttgcagagtagggagcaggatcccaggctactaagataacatctttgtacaaggagctgtcaacaaagtgatggtttgggttggtgagaatctgcaaataaacatgtaaaaaaaaaaatgcagttaaaagcaaatgggacccagtaaaagggtaaaacccttccctaaagtaagcagctctacccattctgctcttcgttctagtttaattctggttgattttaagcaacttgttccataaaaaaaawatatatatatatgggcccttttatacataatacacaaaaatagggttgtttatatatatatatatatatatatatatatatatacatacaaagagcccagccataaacgtcactatgacagtttgaagtagcagtgctctgaattactctccatctgtgatgtgatgagaccacttgagattctacataattgtatatcaacactactgcgtgttctggaacattacaatgaaagcgacgatatttcacactgcctgcaggatcctctttttcaacatagactagcgttctttgaagggc

SEQ ID NO: 27309 - DNA, 600 bp, Chicken  19866894244359_3
cattggttgttttctcatttcaacagaagcacaatgtcatgtgaagtacctctgaaaagacaaattaaaccatgacagtaaaagctcatatacctagaaaaagaattccaggaatagacgtgtgatagcactatttttgaagtaactgcgatattgctctaatctactgcactaccatagctccatcccacatcttctagtactctgcttgatcctcccaccctgatggaagtttcccttccactttttgctggcttcttcttacccagactctctgtgtctagccctggtgcatccaamccaatggaaggactgaactgaatgatttctgcactggttgatgcagcatgaatttggctccagctgttaaactaatcaacattccagacaaattcatactaattttcatttccctttaggatccaatgagccatatttgattatgcatatttttcttcagaaaaataatattgttgccatagcaatattctttctaccataaactttgagcttaatgacttcgcatcagccttctacaataagaacagaattagtcttgctgccatcagcatccctaactccatttctcagagcagtttt

SEQ ID NO: 27310 - DNA, 600 bp, Chicken  19866894244360_1
acagttaaacaaagcaaatggaaaacttccaaagagattcatctgaaagaattggattacactgaggatttatgtccatgtaatgaagacaattaattgctatgagatccataaaacattaaatgaacataggttggttttcttcttccttttcaatttttctcgtaagataaaatttattaactatgtttaattgctacttaaaattcttctcttacatatttattgaatgtgcttttttggcagaacagagcattttactaaccagatcctactaatctaaaaataagcaatttaagraaaaatactactctgcattttatccacagatcagtttaaaataattccttacacaagaagaataccattaccataaatatgttagtgccgttaaaaggggatcagcctgtctcacatgagtaaacatcttatgctgcaaagatgaacgtgttcagctaatactatttgggcatacgttgccatttccagcagagatacagagcaaatgtgggtcctgatgtcattcagtgctaccataatcactcaactaaccacatgaaaaaaactggctcaggccaaaaacagtaacttcagacaaac

SEQ ID NO: 27311 - DNA, 599 bp, Chicken  19866894244372_1
  misc_feature (1)..(45): n is any nucleotide
nnnnnnnnnnnnnnnnnnnnnnnnnnnnnnnnnnnnnnnnnnnnncctgcatttgctcttttttgctcactgcaaacacctgttcagatactaataatggtttgagtttgccaagtcagccaaacaccaaagaactttcatgcctttcacctgctgagacaataaaggaaatgcagcttcgtttcattgcaggaaggatgacaagaaattctcacttcctgctgcaggcaacagcttaagcccttcctgcaccacaggagagttgcgtttcattctgaaccaaatcaccttccattctgyccttatgggtattgcacacagaactcagcaggtccacctggaggccaacttcactattagaggtggctgatgyggagtgaggccccaaggggaagwttaaaagaggaaggaaattgggaaatttcataggaaaagcgtatcagattctgaagaagagagcacactctactgcagggtaaatcaagcctttgccagtccacattacgcttyggtttgcagatgacattacctggatgcttactaaaccagtttcaggtgggtagtattgactcatgctgatcctacatacacaggaagtc

SEQ ID NO: 27312 - DNA, 600 bp, Chicken  19866894244372_2
aaacacctgttcagatactaataatggtttgagtttgccaagtcagccaaacaccaaagaactttcatgcctttcacctgctgagacaataaaggaaatgcagcttcgtttcattgcaggaaggatgacaagaaattctcacttcctgctgcaggcaacagcttaagcccttcctgcaccacaggagagttgcgtttcattctgaaccaaatcaccttccattctgyccttatgggtattgcacacagaactcagcaggtccacctggaggccaacttcactattagaggtggctgatgyggagtgaggccccaaggggaagwttaaaagaggaaggaaattgggaaatttcataggaaaagcgtatcagattctgaagaagagagcacactctactgcagggtaaatcaagcctttgccagtccacattacgcttyggtttgcagatgacattacctggatgcttactaaaccagtttcaggtgggtagtattgactcatgctgatcctacatacacaggaagtcagcagttccccatgtcacaagtgcctttctcacactgagccaccctttatgcttgacagacatgctagatctac

SEQ ID NO: 27313 - DNA, 600 bp, Chicken  19866894244372_3
atggtttgagtttgccaagtcagccaaacaccaaagaactttcatgcctttcacctgctgagacaataaaggaaatgcagcttcgtttcattgcaggaaggatgacaagaaattctcacttcctgctgcaggcaacagcttaagcccttcctgcaccacaggagagttgcgtttcattctgaaccaaatcaccttccattctgyccttatgggtattgcacacagaactcagcaggtccacctggaggccaacttcactattagaggtggctgatgyggagtgaggccccaaggggaagwttaaaagaggaaggaaattgggaaatttcataggaaaagcgtatcagattctgaagaagagagcacactctactgcagggtaaatcaagcctttgccagtccacattacgcttyggtttgcagatgacattacctggatgcttactaaaccagtttcaggtgggtagtattgactcatgctgatcctacatacacaggaagtcagcagttccccatgtcacaagtgcctttctcacactgagccaccctttatgcttgacagacatgctagatctacaaatctgagctttcacctcacaa

SEQ ID NO: 27314 - DNA, 600 bp, Chicken  19866894244372_4
ctcacttcctgctgcaggcaacagcttaagcccttcctgcaccacaggagagttgcgtttcattctgaaccaaatcaccttccattctgyccttatgggtattgcacacagaactcagcaggtccacctggaggccaacttcactattagaggtggctgatgyggagtgaggccccaaggggaagwttaaaagaggaaggaaattgggaaatttcataggaaaagcgtatcagattctgaagaagagagcacactctactgcagggtaaatcaagcctttgccagtccacattacgcttyggtttgcagatgacattacctggatgcttactaaaccagtttcaggtgggtagtattgactcatgctgatcctacatacacaggaagtcagcagttccccatgtcacaagtgcctttctcacactgagccaccctttatgcttgacagacatgctagatctacaaatctgagctttcacctcacaaatcacacagttttactaagaaatcacagacctttcaggctaaccacacatttataatgaggccagtgaaaaaaagcagagtgtatcacagagatctgtagtttcagagctgcaa

SEQ ID NO: 27315 - DNA, 600 bp, Chicken  19866894244372_5
tctcagtctggagaggcttttccttctgaacacctgcttgctattcaggtaaccaactgttttgaggttagcaacttcatagcatcaacagctgatgtgtgaatcacatgtatgaaccaccagcagcaaaatttaatgtgaagtttttttcacttcatacaattcacattgtgaggtatgactttttccattatgaaactataaaaatatattcccagagtctggatcaagttcaataatttatactgataacaaacatataatcaagtgttgtccaggaagacctgtcccagaacagcragtttagagttaaaagattgactggggcaactcagaagggagtgtgagctcttcttcgagttccttttctttccacctaaagatgcacctgcrgggtcttttgcacatcccccttcagcacagtcagaagtctgctttaaggggaatttcttgtttttctgaagtgagtaaaactcctgcattaaatcttccacttcccactgctcttctttccgcttcctacagcagtgcagtgcagcagggtctatgggatgagcttcagtgttgaagacgtaccctccagcattcaagatgcattca

SEQ ID NO: 27316 - DNA, 600 bp, Chicken  19866894244372_6
gatgtgtgaatcacatgtatgaaccaccagcagcaaaatttaatgtgaagtttttttcacttcatacaattcacattgtgaggtatgactttttccattatgaaactataaaaatatattcccagagtctggatcaagttcaataatttatactgataacaaacatataatcaagtgttgtccaggaagacctgtcccagaacagcragtttagagttaaaagattgactggggcaactcagaagggagtgtgagctcttcttcgagttccttttctttccacctaaagatgcacctgcrgggtcttttgcacatcccccttcagcacagtcagaagtctgctttaaggggaatttcttgtttttctgaagtgagtaaaactcctgcattaaatcttccacttcccactgctcttctttccgcttcctacagcagtgcagtgcagcagggtctatgggatgagcttcagtgttgaagacgtaccctccagcattcaagatgcattcaccataaggggtgatcacaacatcaaagtctgatccatcgttgtggatgaagttgtctgggtcaaacagtaggtacaagtatttcactgtttca

SEQ ID NO: 27317 - DNA, 600 bp, Chicken  19866894244373_1
acacccctgacatctccaaacaaaaccctctttcagggctgcgttacagatctgctctgagctctgctacctttgcagggctcccacctccgcgcacagcttccatcgtcaccttttgtccgcattgctgaacagccctggcctttccccaaaggaaacagacaggcagacagagcagcacccacctgcacagccctgaggaccggcggagcacactctgctcatcagaactgggtctccatcgctggcacccagctggtgagctccagtgcgcaggtctgtgcccagccagagcaccartgccacttatagacatggagaggctctgattccagcccctcgtgctttctctagcaggtttgcttttgcttgcgttacccttccctgatcacagacacctaaaacggccacacgtggtctaaagggtgatattctgcaacgctatgcccatttgcaaagcacccctcgattctacacatacaggtcgctgttgagtgttgctatttagacagagcaacgtcagctttggcagaaatcagctctytggaatgcatgtgaaaatggaaagattacacctaaartatacctctcrgtgttttc

SEQ ID NO: 27318 - DNA, 518 bp, Chicken  19866894244373_2
ctggcacccagctggtgagctccagtgcgcaggtctgtgcccagccagagcaccartgccacttatagacatggagaggctctgattccagcccctcgtgctttctctagcaggtttgcttttgcttgcgttacccttccctgatcacagacacctaaaacggccacacgtggtctaaagggtgatattctgcaacgctatgcccatttgcaaagcacccctcgattctacacatacaggtcgctgttgagtgttgctatttagacagagcaacgtcagctttggcagaaatcagctctytggaatgcatgtgaaaatggaaagattacacctaaartatacctctcrgtgttttcatagctgaagttgctcagtgagctccaagccaaaaaccatcaggggagctcggagggaaggctgcagggtcccaaggcgagatgagaaccattgtcagatcttggccaatgttacatttctggaaaaatacccgagccttttaaagcagcaccacgggaaag

SEQ ID NO: 27319 - DNA, 481 bp, Chicken  19866894244373_3
tgcccagccagagcaccartgccacttatagacatggagaggctctgattccagcccctcgtgctttctctagcaggtttgcttttgcttgcgttacccttccctgatcacagacacctaaaacggccacacgtggtctaaagggtgatattctgcaacgctatgcccatttgcaaagcacccctcgattctacacatacaggtcgctgttgagtgttgctatttagacagagcaacgtcagctttggcagaaatcagctctytggaatgcatgtgaaaatggaaagattacacctaaartatacctctcrgtgttttcatagctgaagttgctcagtgagctccaagccaaaaaccatcaggggagctcggagggaaggctgcagggtcccaaggcgagatgagaaccattgtcagatcttggccaatgttacatttctggaaaaatacccgagccttttaaagcagcaccacgggaaag

SEQ ID NO: 27320 - DNA, 470 bp, Chicken  19866894244373_4
agcaccartgccacttatagacatggagaggctctgattccagcccctcgtgctttctctagcaggtttgcttttgcttgcgttacccttccctgatcacagacacctaaaacggccacacgtggtctaaagggtgatattctgcaacgctatgcccatttgcaaagcacccctcgattctacacatacaggtcgctgttgagtgttgctatttagacagagcaacgtcagctttggcagaaatcagctctytggaatgcatgtgaaaatggaaagattacacctaaartatacctctcrgtgttttcatagctgaagttgctcagtgagctccaagccaaaaaccatcaggggagctcggagggaaggctgcagggtcccaaggcgagatgagaaccattgtcagatcttggccaatgttacatttctggaaaaatacccgagccttttaaagcagcaccacgggaaag

SEQ ID NO: 27321 - DNA, 600 bp, Chicken  19866894244375_1
tttacagaggccagacagtggatgtgagcacagtgaggtggtgggtaatgcttctcagcggtggcaacagagacatgaaagacaagccacattctggacagccatgcagatttttacaagcacaacatgcaggctcttgttcatcactggtaaaaatgcacagttaatggtagtgatgatactgaaaaatagtgtgttatagctgaagccaagcagtgttattgcactctttgttgtagtttctgatgaaataaatgaggcattactttcagagtaacctatgtagttcaaagatgctgytagactgggattaggggagatggcatgccataggaggacatactggagaaatcctctcagatgtcccaccttcctagagtactgctgcactccagctgttctaatccaaacattcacaaattcaagaatgtcttctttccattcctrtatcaagtatctttctcaagctcctttcttcctacagttttccacatttccttctgccttcccaaagtctgttcctttctaacttgaaggtcagtatctaatcctcttcctcgggttgttttcttataagtacgtggcaaatcttcccacagt

SEQ ID NO: 27322 - DNA, 562 bp, Chicken  19866894244375_2
tggtaaaaatgcacagttaatggtagtgatgatactgaaaaatagtgtgttatagctgaagccaagcagtgttattgcactctttgttgtagtttctgatgaaataaatgaggcattactttcagagtaacctatgtagttcaaagatgctgytagactgggattaggggagatggcatgccataggaggacatactggagaaatcctctcagatgtcccaccttcctagagtactgctgcactccagctgttctaatccaaacattcacaaattcaagaatgtcttctttccattcctrtatcaagtatctttctcaagctcctttcttcctacagttttccacatttccttctgccttcccaaagtctgttcctttctaacttgaaggtcagtatctaatcctcttcctcgggttgttttcttataagtacgtggcaaatcttcccacagtgcacattttattgacaaagtctctatcgcctctttcaccctacgcctgctagaaagcttcccatgagatgtggcaaagcagaagtatgaagtcaaaaaactccagtatt

SEQ ID NO: 27323 - DNA, 600 bp, Chicken  19866894244378_1
aggctgcgggggttttgtatatcttgcattcagcacagtggattgcagaggagttggcagcagtgtgttttgagagcctgcacctcgcttgcagctctcggttccccggaggagtgccctgctggctgcgcagtgctggggatgggaagagacagaactggggtagcgctgattgctctgactgggggttgtctcgtggcagccctatgagtgtgctctgcagtcctggaagcggagcagagccaacaaagagctgtgaaatcccaaggctgcagagctcctttgggctgctctgccccrgtgggactttgtgagccctcagaaatacrctgaactggcgttggcactttaagtaaagcttttcatctcctttctgtatgagtatgtccggggctgcagccggcaatcygtttccttccctcaccccttcccctcaatccaagcatgcttctccccrtttccccaggctcagcccttgcaagtggagmagaatggcacagattttccctgcccccaaaccaggctgcrttttactggcagttagctgagttttggtgcactgcactgagtcaggttcttgctgtgtgagccttttccttg

SEQ ID NO: 27324 - DNA, 600 bp, Chicken  19866894244378_2
tcagcacagtggattgcagaggagttggcagcagtgtgttttgagagcctgcacctcgcttgcagctctcggttccccggaggagtgccctgctggctgcgcagtgctggggatgggaagagacagaactggggtagcgctgattgctctgactgggggttgtctcgtggcagccctatgagtgtgctctgcagtcctggaagcggagcagagccaacaaagagctgtgaaatcccaaggctgcagagctcctttgggctgctctgccccrgtgggactttgtgagccctcagaaatacrctgaactggcgttggcactttaagtaaagcttttcatctcctttctgtatgagtatgtccggggctgcagccggcaatcygtttccttccctcaccccttcccctcaatccaagcatgcttctccccrtttccccaggctcagcccttgcaagtggagmagaatggcacagattttccctgcccccaaaccaggctgcrttttactggcagttagctgagttttggtgcactgcactgagtcaggttcttgctgtgtgagccttttccttgtcttcctgcttagggtgtgggaacgcagt

SEQ ID NO: 27325 - DNA, 600 bp, Chicken  19866894244378_3
aggagtgccctgctggctgcgcagtgctggggatgggaagagacagaactggggtagcgctgattgctctgactgggggttgtctcgtggcagccctatgagtgtgctctgcagtcctggaagcggagcagagccaacaaagagctgtgaaatcccaaggctgcagagctcctttgggctgctctgccccrgtgggactttgtgagccctcagaaatacrctgaactggcgttggcactttaagtaaagcttttcatctcctttctgtatgagtatgtccggggctgcagccggcaatcygtttccttccctcaccccttcccctcaatccaagcatgcttctccccrtttccccaggctcagcccttgcaagtggagmagaatggcacagattttccctgcccccaaaccaggctgcrttttactggcagttagctgagttttggtgcactgcactgagtcaggttcttgctgtgtgagccttttccttgtcttcctgcttagggtgtgggaacgcagtgcctttctagcattactgggacagggtggggatctgtaccccaagccaacctgtcctatgcattgctcttgcaaaatcta

SEQ ID NO: 27326 - DNA, 600 bp, Chicken  19866894244378_4
ctggggtagcgctgattgctctgactgggggttgtctcgtggcagccctatgagtgtgctctgcagtcctggaagcggagcagagccaacaaagagctgtgaaatcccaaggctgcagagctcctttgggctgctctgccccrgtgggactttgtgagccctcagaaatacrctgaactggcgttggcactttaagtaaagcttttcatctcctttctgtatgagtatgtccggggctgcagccggcaatcygtttccttccctcaccccttcccctcaatccaagcatgcttctccccrtttccccaggctcagcccttgcaagtggagmagaatggcacagattttccctgcccccaaaccaggctgcrttttactggcagttagctgagttttggtgcactgcactgagtcaggttcttgctgtgtgagccttttccttgtcttcctgcttagggtgtgggaacgcagtgcctttctagcattactgggacagggtggggatctgtaccccaagccaacctgtcctatgcattgctcttgcaaaatctaacagctttctttggtctgtggcagcagcagagctcagaggatgcagct

SEQ ID NO: 27327 - DNA, 600 bp, Chicken  19866894244378_5
ttgtctcgtggcagccctatgagtgtgctctgcagtcctggaagcggagcagagccaacaaagagctgtgaaatcccaaggctgcagagctcctttgggctgctctgccccrgtgggactttgtgagccctcagaaatacrctgaactggcgttggcactttaagtaaagcttttcatctcctttctgtatgagtatgtccggggctgcagccggcaatcygtttccttccctcaccccttcccctcaatccaagcatgcttctccccrtttccccaggctcagcccttgcaagtggagmagaatggcacagattttccctgcccccaaaccaggctgcrttttactggcagttagctgagttttggtgcactgcactgagtcaggttcttgctgtgtgagccttttccttgtcttcctgcttagggtgtgggaacgcagtgcctttctagcattactgggacagggtggggatctgtaccccaagccaacctgtcctatgcattgctcttgcaaaatctaacagctttctttggtctgtggcagcagcagagctcagaggatgcagctgtgctcgcagcagtgcctttcagggatgtct

SEQ ID NO: 27328 - DNA, 600 bp, Chicken  19866894244378_6
gaagcggagcagagccaacaaagagctgtgaaatcccaaggctgcagagctcctttgggctgctctgccccrgtgggactttgtgagccctcagaaatacrctgaactggcgttggcactttaagtaaagcttttcatctcctttctgtatgagtatgtccggggctgcagccggcaatcygtttccttccctcaccccttcccctcaatccaagcatgcttctccccrtttccccaggctcagcccttgcaagtggagmagaatggcacagattttccctgcccccaaaccaggctgcrttttactggcagttagctgagttttggtgcactgcactgagtcaggttcttgctgtgtgagccttttccttgtcttcctgcttagggtgtgggaacgcagtgcctttctagcattactgggacagggtggggatctgtaccccaagccaacctgtcctatgcattgctcttgcaaaatctaacagctttctttggtctgtggcagcagcagagctcagaggatgcagctgtgctcgcagcagtgcctttcagggatgtctggaccagctgctgtgctccacccacggtaatagttggagg

SEQ ID NO: 27329 - DNA, 600 bp, Chicken  19866894244380_1
aagccttctgagaaatactggtggaagagaactgaactgtcaagctgtttaatgaaaccactaatgaaatcctaacaatctacttcacattgaagtggaaaaatgtctagtaggagcaacttttacttcagtgaggtgaaagtgcactatgaaaactgtatacctttgcatttgggattcattcagttactcggtattcactgttttcctacagcattgcataaaaagatgaattcagctggttctgccatcttgtctgacagtaataaagaaccagtaagaatcaatgagagcaatcamaagaactcaaaaatgcgcaactatcttccaactatattaaagacaactctgaaatgttcaattatttctttgttttaattgaaactaaagacagtttttgtttgcactattgaaaaagtatacaacaaaaatgccttaattactggtgtttgagaaagccaatatgttgagatgtaagtagctattgtatgttcagattgtgatggaaaaactgctacaaaaatcagggtttcacactgtgtagttgttcttgaaacattgcacatatacaaaaattcatgtaagacaaataatataaat

SEQ ID NO: 27330 - DNA, 600 bp, Chicken  19866894244386_1
tggtggaaatgacacccaaaccatcccaatggagagtgagaacaggacctgcagttatagagaagggcctcacagcaagaaaagggaaagcagcttcacagagtagaaataaggggcaaatagagatagtttaagtagagagtgttagaaaacgaggggctccaagcactttcacagacaccaggtctggattaacaaggaggatcaaggccatcaagataaggactgcagagcagctccaacacatttggcagggaggtgatgggatgtctgaagtgcgagctgaaagcggttcggggratgcccccccttcggggtcagaagtttgcagcgaggaagactacgagccttcatcatcacgacccgctacacacgcgcaaggagggggaggactgcatggactgcatgctgatgggctctggggaatggagtgaatatggatccgaattcctgtcaactactgaagatggattagttcgacctgtatctatagccccatttctttggacacagtgcaggtgaggtggagcgatcccccttgcaccgggctgtacgcgcgtcaccaacaaacacatccctgctctatatccttaccgccta

SEQ ID NO: 27331 - DNA, 600 bp, Chicken  19866894244389_1
tgccacgtagggctgtgttggggtcatttgggggctgtgttggggtcatttgggggctgtgttggggtcattggggggttctggttggggtcatttggggggtttcttggaagccactgtgtccattttaaggccaaccggggccgtttcagttcattttgagctgttctggggccttctgtgtcacttactgatatttcgggtcaactgcggtgcctcgcggatccattccgagtggttttggggccattctcatgtctctggagccattccaggcccttttgtgtccgttttggcccrtctcacatctgcctgggtgaccttgaggcggttttggtctattcggtctgacgtgggggcgctgtgggggaagtttctgtgtgttgtgaggctctttggcaccatttccatgatggggcggggacggggctgggatggcagcgagagcgttggaaaggcagcagcccggagcgagctgtgggcgggcgctgcacggacggagagtaaacaactatttttagctgcgtgcagagcggggagggcggtggggggttgccgtgcggcaatcagaccctataggcggtaaggatatagagcagg

SEQ ID NO: 27332 - DNA, 600 bp, Chicken  19866894244390_1
aaaatgtaagcaactccaagcaaaattccattatggcccttaaagagtatagggtttggcagagtttctctgcaaaagcaggattgcagtgttttccttatctcacaggaatttttaagaggcattctagtattatgagatgcaaagagacataaatctatatggaaaaacaagaaatatgcttaggcagttagtctgtgcagaaaaaaagagtcatgggttgtaagctctttggaaagcccttctgccataccaccaggtcacttaaataatgaatttgggggaatttctagagttgcraagactggactggctgtaactttgtgtaagggagatacagaagggccagaggaggtggccaggggccagcaggctgggtgatgtgactcctcacttacatgtctatatggctcaattactgaaccattgcactgtttctctgttaggtggcagaagtgtgtttctctcagggttttgagtaaggaaacaaattccatggagtagctaccatgtctgaggtgagttttccatgcagattagtgagagaggtgcattttaaaccctcgtgtgctttgtatcagttccgcatttttttgtatg

SEQ ID NO: 27333 - DNA, 600 bp, Chicken  19866894244398_1
ttttcacttacaagagtgacataatgacctatagatcacagaacagcttttcagtgacacaattttgatgctctcagttataaaagtttaagcaatgcatttgatgagtgtctgtagacgtaggggagcagttctggaggtttctgatagcattttggcagatgagtaaatagaaatttgcactgggtagtgctgcccaatccttttacattccctctccatctactgcatgagaagagggataccctgcagtcttactgagctacatgaaaaatgaccctcttctagtcctacattctrttttagcactgactgaatgcatccaaccttccattcttactccaaagtcttttatgactctactcctctgagtatccaggtttcactcactgggttacttctgcgtatttctgcactgataagtgacaaaaactctattcagtctttctctgggtctgtgttgccctacagccttgttcaaggttaacttcccaagagctgcttgctaccttcacaactccctggagaaaagcaaaccaccaaaggaagagcataaagatttgattgcttttatggcctcattgtgccatcttcttttag

SEQ ID NO: 27334 - DNA, 600 bp, Chicken  19866894244401_1
ctgggccatgctcatcatcacccagttctcttcctcctcccactactggctgctccccagtttgatgttgtttccgggcacttcttaccctggtgaaagctccttcagcctttcacagggcagggcagggaaaggctgcagtgtcgagagctctctggatgacacactgagctaccctgcctcacccaccagaatcttggcttcatctatgtttgtactcccatgaagcacaccatgcccacagctccctcgacagctctccgacacagcagcccctgttctaaaaccctttggtgctcycctttgctaagcaagagggaaactttaaggagcttccaggcccggtgccatgctgatacatacttccctgctcaggtctgtgcgggaggcaggcagatgctttcctgctgctgttactatgcaacctctgctgctgtgcacgtggtatctgctagagggagaagggcattgttgggttgtgtttttcctccttggtgcagatgggctgcaggatgggaggcaccaaggatcagtgccctgtttcactgcaaattccgaaggctggcagtggttacagcaggatgtggtctggcaatggtg

SEQ ID NO: 27335 - DNA, 518 bp, Chicken  19866894244403_1
cacaacttttttggtattctcaattaaataattcttatagatctaaccttttaaaatagcctattttacttactgtcactcattaagaaattattttacagaatcacagaatatccctagttggaagggacccagaaggatcattaagtccaactcctgtctttaaacgggaccacccatatgtctaatgctataggaagaaagaaataattattatttgaatatctcaaaaacagtgaggatgaactgatcaatgaatcagctattaaattcttcataaacatagagcagggaaatttmtttggcaatttgcagtactgactgatttcctgttagtattgactggtaagtgaattaaaatagtacaatataccaaacaggaggaattgtacaggatgtgtctgtattacaatatttttgaaaaaaaatctatattttaatgtgtaatatatatgtatatgatatattgcagattattatcatcagtttaggattggctttttttttttttttttttt

SEQ ID NO: 27336 - DNA, 600 bp, Chicken  19866894244408_1
tgccttccagggctgagcttatctgaatgattcacgcttgctgctgctgctgcctgagacccattgctgctttgggatgttttctcaatggtcaatttaaagtcattgttcttatttaaaagaaatctgcagtgtggccatggtcagcattagagtgagtcagagctggtgaaatgaaatcaaatggggttgtggcagcctgggcagcctgagctggtgttcagaggctgtgctggagccttgggggggagcacagcactgtgtggaggcagaggtgatgctgaaatcctggctgtgtcygcactgcccgcggcttctccagtaaaagscactgcctgttgcagtgggcacacagggcagtctgctggcacagcagggctgggtttgtcttgcaggagctgctgcttccccgtgctccagggagcagctctgtgccctcagccctctgcagagcccgctgctgggtttgcctgagggcgctggggagcaaatgggaaggttcagaaggagcagcgtgggctgggcaacaggcagaaaggaaacctgtcctcctgagacacagaggcctttttgctttggatagataggtttgtggaatcc

SEQ ID NO: 27337 - DNA, 592 bp, Chicken  19866894244408_2
attcacgcttgctgctgctgctgcctgagacccattgctgctttgggatgttttctcaatggtcaatttaaagtcattgttcttatttaaaagaaatctgcagtgtggccatggtcagcattagagtgagtcagagctggtgaaatgaaatcaaatggggttgtggcagcctgggcagcctgagctggtgttcagaggctgtgctggagccttgggggggagcacagcactgtgtggaggcagaggtgatgctgaaatcctggctgtgtcygcactgcccgcggcttctccagtaaaagscactgcctgttgcagtgggcacacagggcagtctgctggcacagcagggctgggtttgtcttgcaggagctgctgcttccccgtgctccagggagcagctctgtgccctcagccctctgcagagcccgctgctgggtttgcctgagggcgctggggagcaaatgggaaggttcagaaggagcagcgtgggctgggcaacaggcagaaaggaaacctgtcctcctgagacacagaggcctttttgctttggatagataggtttgtggaatcccagtgacacaagcggggtggg

SEQ ID NO: 27338 - DNA, 599 bp, Chicken  19866894244409_1
  misc_feature (1)..(80): n is any nucleotide
nnnnnnnnnnnnnnnnnnnnnnnnnnnnnnnnnnnnnnnnnnnnnnnnnnnnnnnnnnnnnnnnnnnnnnnnnnnnnnnnagttgcaggaggaggagaggaggtgaacctaaaaaggcccatatcactccctagtttaaagccagcactgctctaaggggtttccagcagttcttagcattcttgcaatgtgttttcattaccttagcacttcaccttgtagtggtgttacggttttaaatagtgttttcacttttctttccatttacttaaggagctgtccctgggctccagctgcagragaacagtgtagaaggacagccagcacagtgtgcagccagcctcctgagggccaagtaggactcaccaagcaaaatggtggaaacaggtagggatggagaaagatttgcatgaaaacatgcaaaaaatcccagccccctcctcatgctggtgactgaaacaggcaagctcagttcagaaagttagaagactgatgacactgmaagggacaaaaagtaggggcctcgtccaccaggagakttcagaggtgacagcttcagtgccttattaaaactcctatgcatattgtagagtgtgtgt

SEQ ID NO: 27339 - DNA, 600 bp, Chicken  19866894244409_2
cttagcacttcaccttgtagtggtgttacggttttaaatagtgttttcacttttctttccatttacttaaggagctgtccctgggctccagctgcagragaacagtgtagaaggacagccagcacagtgtgcagccagcctcctgagggccaagtaggactcaccaagcaaaatggtggaaacaggtagggatggagaaagatttgcatgaaaacatgcaaaaaatcccagccccctcctcatgctggtgactgaaacaggcaagctcagttcagaaagttagaagactgatgacactgmaagggacaaaaagtaggggcctcgtccaccaggagakttcagaggtgacagcttcagtgccttattaaaactcctatgcatattgtagagtgtgtgtaaacgcttttmacatgcattgtaagggcrtgtgtatgcacacacatgcttcatgaaaacacatgctgttgcatacttccatgctagccacagcaacctacctccctgaaatgtgtggcaaatatagttcccatacacggcacttcttcgctccatggctgtaagtgacatgttggaaagcactgtcttttctaagtcaaggat

SEQ ID NO: 27340 - DNA, 600 bp, Chicken  19866894244409_3
atagtgttttcacttttctttccatttacttaaggagctgtccctgggctccagctgcagragaacagtgtagaaggacagccagcacagtgtgcagccagcctcctgagggccaagtaggactcaccaagcaaaatggtggaaacaggtagggatggagaaagatttgcatgaaaacatgcaaaaaatcccagccccctcctcatgctggtgactgaaacaggcaagctcagttcagaaagttagaagactgatgacactgmaagggacaaaaagtaggggcctcgtccaccaggagakttcagaggtgacagcttcagtgccttattaaaactcctatgcatattgtagagtgtgtgtaaacgcttttmacatgcattgtaagggcrtgtgtatgcacacacatgcttcatgaaaacacatgctgttgcatacttccatgctagccacagcaacctacctccctgaaatgtgtggcaaatatagttcccatacacggcacttcttcgctccatggctgtaagtgacatgttggaaagcactgtcttttctaagtcaaggataatttaacttaaagataaattagggagcactcctgtt

SEQ ID NO: 27341 - DNA, 600 bp, Chicken  19866894244409_4
agaaggacagccagcacagtgtgcagccagcctcctgagggccaagtaggactcaccaagcaaaatggtggaaacaggtagggatggagaaagatttgcatgaaaacatgcaaaaaatcccagccccctcctcatgctggtgactgaaacaggcaagctcagttcagaaagttagaagactgatgacactgmaagggacaaaaagtaggggcctcgtccaccaggagakttcagaggtgacagcttcagtgccttattaaaactcctatgcatattgtagagtgtgtgtaaacgcttttmacatgcattgtaagggcrtgtgtatgcacacacatgcttcatgaaaacacatgctgttgcatacttccatgctagccacagcaacctacctccctgaaatgtgtggcaaatatagttcccatacacggcacttcttcgctccatggctgtaagtgacatgttggaaagcactgtcttttctaagtcaaggataatttaacttaaagataaattagggagcactcctgttgcactacactgcaaagagaagacgctktgaaactctgcctgtaacccaatccagtgccccagcagcagtgt

SEQ ID NO: 27342 - DNA, 600 bp, Chicken  19866894244409_5
gtgtgcagccagcctcctgagggccaagtaggactcaccaagcaaaatggtggaaacaggtagggatggagaaagatttgcatgaaaacatgcaaaaaatcccagccccctcctcatgctggtgactgaaacaggcaagctcagttcagaaagttagaagactgatgacactgmaagggacaaaaagtaggggcctcgtccaccaggagakttcagaggtgacagcttcagtgccttattaaaactcctatgcatattgtagagtgtgtgtaaacgcttttmacatgcattgtaagggcrtgtgtatgcacacacatgcttcatgaaaacacatgctgttgcatacttccatgctagccacagcaacctacctccctgaaatgtgtggcaaatatagttcccatacacggcacttcttcgctccatggctgtaagtgacatgttggaaagcactgtcttttctaagtcaaggataatttaacttaaagataaattagggagcactcctgttgcactacactgcaaagagaagacgctktgaaactctgcctgtaacccaatccagtgccccagcagcagtgtcacgtggtcctatatttt

SEQ ID NO: 27343 - DNA, 440 bp, Chicken  19866894244409_6
ttaaaactcctatgcatattgtagagtgtgtgtaaacgcttttmacatgcattgtaagggcrtgtgtatgcacacacatgcttcatgaaaacacatgctgttgcatacttccatgctagccacagcaacctacctccctgaaatgtgtggcaaatatagttcccatacacggcacttcttcgctccatggctgtaagtgacatgttggaaagcactgtcttttctaagtcaaggataatttaacttaaagataaattagggagcactcctgttgcactacactgcaaagagaagacgctktgaaactctgcctgtaacccaatccagtgccccagcagcagtgtcacgtggtcctatattttgaaagattatccttaatggcttttgcaaatggcaacttgcagataaaagtatgccgtagtctgctcaatttcaagaca

SEQ ID NO: 27344 - DNA, 600 bp, Chicken  19866894244418_1
tcctttaattcaatttcagcctttttttccttctttttcccccctttttcaggaaagagcacaacacatacagacaacaacaaaaaattgcttagtcttagaacacttctatacataaggcatcctgtacgtgagatctgtcttcataactagttcactcgtattaaaaataaatgatggtagcaaacagacacgtgaaagacaaacataatggcgatgaaaaccatttaatgataagtggagaaacaaatatttcttgaaaataaaaccatgtctaaagcctctagtgctgacttttgraaacattaccatgtagcagtattagcaatactgtgtgtcctgtacagtagatwttgtttaaaattgcttgggaactggagctttcaattgtgagcttggaatgtcctgcagataattaagttgtggtcaggctttagaaaaataaaaagttctcgaactatgattttacaaacatgctacaataacatttctttatatttaacagtttcttatagaaagctgatactctcatgaggcattcactaaaggtaaaacatcaagaaagaaaaaatattgaattaaaacttcacttaggatgtt

SEQ ID NO: 27345 - DNA, 600 bp, Chicken  19866894244418_2
aaagagcacaacacatacagacaacaacaaaaaattgcttagtcttagaacacttctatacataaggcatcctgtacgtgagatctgtcttcataactagttcactcgtattaaaaataaatgatggtagcaaacagacacgtgaaagacaaacataatggcgatgaaaaccatttaatgataagtggagaaacaaatatttcttgaaaataaaaccatgtctaaagcctctagtgctgacttttgraaacattaccatgtagcagtattagcaatactgtgtgtcctgtacagtagatwttgtttaaaattgcttgggaactggagctttcaattgtgagcttggaatgtcctgcagataattaagttgtggtcaggctttagaaaaataaaaagttctcgaactatgattttacaaacatgctacaataacatttctttatatttaacagtttcttatagaaagctgatactctcatgaggcattcactaaaggtaaaacatcaagaaagaaaaaatattgaattaaaacttcacttaggatgttgacagttggcttgtaatattaaacagatgtgcatgttcttgggatattcttca

SEQ ID NO: 27346 - DNA, 600 bp, Chicken  19866894244418_3
tatgattttacaaacatgctacaataacatttctttatatttaacagtttcttatagaaagctgatactctcatgaggcattcactaaaggtaaaacatcaagaaagaaaaaatattgaattaaaacttcacttaggatgttgacagttggcttgtaatattaaacagatgtgcatgttcttgggatattcttcatttagaactttgtttcatacccattttcaagtgacagctacaaatttttgattaatttaaaattcccctttcttcaattgtctttgatagatataattttctttyggtcagttcagctggactgtgatgcatactgcagtttctgttgtgttgcccaasgagagagctcctttatctaggcttagattgcaggagagttcagtcaactctggtttttaagaaagtaaattacacaaatgggaaaggtgctttggccagacgttacccttgcatgtgtgagcagggcacttgctggtactggttataggtatcataggacataattgggttggctcgtagtaaatgctgcacttgagatgacaccaaagttactgtctgtggattttacagaaaaccaaaactgag

SEQ ID NO: 27347 - DNA, 600 bp, Chicken  19866894244418_4
tagaaagctgatactctcatgaggcattcactaaaggtaaaacatcaagaaagaaaaaatattgaattaaaacttcacttaggatgttgacagttggcttgtaatattaaacagatgtgcatgttcttgggatattcttcatttagaactttgtttcatacccattttcaagtgacagctacaaatttttgattaatttaaaattcccctttcttcaattgtctttgatagatataattttctttyggtcagttcagctggactgtgatgcatactgcagtttctgttgtgttgcccaasgagagagctcctttatctaggcttagattgcaggagagttcagtcaactctggtttttaagaaagtaaattacacaaatgggaaaggtgctttggccagacgttacccttgcatgtgtgagcagggcacttgctggtactggttataggtatcataggacataattgggttggctcgtagtaaatgctgcacttgagatgacaccaaagttactgtctgtggattttacagaaaaccaaaactgagatacagtgctggagaaagtgtgttctcatgtgattcagctgccctttgatttag

SEQ ID NO: 27348 - DNA, 599 bp, Chicken  19866894244419_1
  misc_feature (1)..(31): n is any nucleotide
nnnnnnnnnnnnnnnnnnnnnnnnnnnnnnncaccagcaggcggtggagcagctcgccccgccagtctgccacggttgccaccgtgatgagcacgctcacgcgctccctaaagacgctgatcaataagtaaagcagctgctaaagccaacgggccgatgtgtgccgggctgcgtgtcagcggttcttgtatcgcctaggtctggtgaggatgtctgtctgtctgtctgtctgtctgcagggaaagcccacgcctgctgaggtccgcagtgaaaaagacgttgtttcttaacagaagggayggtaacgttggcggtgtttggaaagggagactcatggctggttgcaggcagtgcagacggcttgtcaggggtctygagcagctgcactgcttgtcctccggcactcgggaggcacagccatcccattgccacgctcgttgggttttgagtggttgtgggtctccctcgtgcaaagagctggcactgkgcccctctgtcacggtgcgtggtggccagcagttagcagggactgagccgacgccrccctgcttcacctgggcagtggtccgsttggagccaaaccggtgtcttgccacgta

SEQ ID NO: 27349 - DNA, 600 bp, Chicken  19866894244419_2
ttgccaccgtgatgagcacgctcacgcgctccctaaagacgctgatcaataagtaaagcagctgctaaagccaacgggccgatgtgtgccgggctgcgtgtcagcggttcttgtatcgcctaggtctggtgaggatgtctgtctgtctgtctgtctgtctgcagggaaagcccacgcctgctgaggtccgcagtgaaaaagacgttgtttcttaacagaagggayggtaacgttggcggtgtttggaaagggagactcatggctggttgcaggcagtgcagacggcttgtcaggggtctygagcagctgcactgcttgtcctccggcactcgggaggcacagccatcccattgccacgctcgttgggttttgagtggttgtgggtctccctcgtgcaaagagctggcactgkgcccctctgtcacggtgcgtggtggccagcagttagcagggactgagccgacgccrccctgcttcacctgggcagtggtccgsttggagccaaaccggtgtcttgccacgtaaacagctcttctgcctccagggtcttcctggcccacagatgcaatgtaattagcagcagaaggcatctctgggatg

SEQ ID NO: 27350 - DNA, 600 bp, Chicken  19866894244419_3
gtatcgcctaggtctggtgaggatgtctgtctgtctgtctgtctgtctgcagggaaagcccacgcctgctgaggtccgcagtgaaaaagacgttgtttcttaacagaagggayggtaacgttggcggtgtttggaaagggagactcatggctggttgcaggcagtgcagacggcttgtcaggggtctygagcagctgcactgcttgtcctccggcactcgggaggcacagccatcccattgccacgctcgttgggttttgagtggttgtgggtctccctcgtgcaaagagctggcactgkgcccctctgtcacggtgcgtggtggccagcagttagcagggactgagccgacgccrccctgcttcacctgggcagtggtccgsttggagccaaaccggtgtcttgccacgtaaacagctcttctgcctccagggtcttcctggcccacagatgcaatgtaattagcagcagaaggcatctctgggatgcaactccctgctgctgcgctagggcttgggaaagcccagcgtgrggaggatgccatgttcctaggacagggctaggtccccccagcaggctctactcccacagcttaggcac

SEQ ID NO: 27351 - DNA, 600 bp, Chicken  19866894244419_4
agcccacgcctgctgaggtccgcagtgaaaaagacgttgtttcttaacagaagggayggtaacgttggcggtgtttggaaagggagactcatggctggttgcaggcagtgcagacggcttgtcaggggtctygagcagctgcactgcttgtcctccggcactcgggaggcacagccatcccattgccacgctcgttgggttttgagtggttgtgggtctccctcgtgcaaagagctggcactgkgcccctctgtcacggtgcgtggtggccagcagttagcagggactgagccgacgccrccctgcttcacctgggcagtggtccgsttggagccaaaccggtgtcttgccacgtaaacagctcttctgcctccagggtcttcctggcccacagatgcaatgtaattagcagcagaaggcatctctgggatgcaactccctgctgctgcgctagggcttgggaaagcccagcgtgrggaggatgccatgttcctaggacagggctaggtccccccagcaggctctactcccacagcttaggcaccaatgccccagtcctgtacacgggcactgcctgtggaaaggcagcaactcgatgct

SEQ ID NO: 27352 - DNA, 600 bp, Chicken  19866894244419_5
aaaaagacgttgtttcttaacagaagggayggtaacgttggcggtgtttggaaagggagactcatggctggttgcaggcagtgcagacggcttgtcaggggtctygagcagctgcactgcttgtcctccggcactcgggaggcacagccatcccattgccacgctcgttgggttttgagtggttgtgggtctccctcgtgcaaagagctggcactgkgcccctctgtcacggtgcgtggtggccagcagttagcagggactgagccgacgccrccctgcttcacctgggcagtggtccgsttggagccaaaccggtgtcttgccacgtaaacagctcttctgcctccagggtcttcctggcccacagatgcaatgtaattagcagcagaaggcatctctgggatgcaactccctgctgctgcgctagggcttgggaaagcccagcgtgrggaggatgccatgttcctaggacagggctaggtccccccagcaggctctactcccacagcttaggcaccaatgccccagtcctgtacacgggcactgcctgtggaaaggcagcaactcgatgctatgtgagcagggagtcattccccattc

SEQ ID NO: 27353 - DNA, 600 bp, Chicken  19866894244419_6
atcccattgccacgctcgttgggttttgagtggttgtgggtctccctcgtgcaaagagctggcactgkgcccctctgtcacggtgcgtggtggccagcagttagcagggactgagccgacgccrccctgcttcacctgggcagtggtccgsttggagccaaaccggtgtcttgccacgtaaacagctcttctgcctccagggtcttcctggcccacagatgcaatgtaattagcagcagaaggcatctctgggatgcaactccctgctgctgcgctagggcttgggaaagcccagcgtgrggaggatgccatgttcctaggacagggctaggtccccccagcaggctctactcccacagcttaggcaccaatgccccagtcctgtacacgggcactgcctgtggaaaggcagcaactcgatgctatgtgagcagggagtcattccccattctctgctggatggccgtgttcatgctagaaagcctgcagagacccggattgctctgtgaccagtgcaagccaacagctgggctagcagctgagaggagacctcttccatgccattctccagagcaggtctgtgccttggaggctcagccc

SEQ ID NO: 27354 - DNA, 600 bp, Chicken  19866894244421_1
aaaacaggcagtgaggtgagactctattgctttatttcttatgggaaatattgtgcatagctaacccacctcttccctttcctcacccaccacccacagtcactgggagcgctcagcagctgtgtacagtgtgaagagtcacatccgggagcagggcgagagttaaagagttcacagccctgccttataatgaagcccctgttttcactgccttcccactctgccttaaagacttgatccgggttttggcactcatcatgtcagaatgggagggcagactggctatgccttttgttattrttattattattttattgctgtgctctcttgcaaggaaaagaggtggggagggtgrgggctgggagggagtraatcttaaaaagtgttcttgcttggctgtgtgaaaagaagaaatgagtctcagcacaggtgtgtctgcagaaagcctttgccaggacaggcaccaagaggcatctgattgccattctcacaaaaaaaaaacagcagcagccaaagaggactgagaggtgacccccactctttgttcatccttactgtatgtgggcacgctgatggttcaggccaggggacgctgacact

SEQ ID NO: 27355 - DNA, 600 bp, Chicken  19866894244421_2
catagctaacccacctcttccctttcctcacccaccacccacagtcactgggagcgctcagcagctgtgtacagtgtgaagagtcacatccgggagcagggcgagagttaaagagttcacagccctgccttataatgaagcccctgttttcactgccttcccactctgccttaaagacttgatccgggttttggcactcatcatgtcagaatgggagggcagactggctatgccttttgttattrttattattattttattgctgtgctctcttgcaaggaaaagaggtggggagggtgrgggctgggagggagtraatcttaaaaagtgttcttgcttggctgtgtgaaaagaagaaatgagtctcagcacaggtgtgtctgcagaaagcctttgccaggacaggcaccaagaggcatctgattgccattctcacaaaaaaaaaacagcagcagccaaagaggactgagaggtgacccccactctttgttcatccttactgtatgtgggcacgctgatggttcaggccaggggacgctgacactgtgacttaaaagaaccctattaaaatgatggaratctttgactatgaaaaataga

SEQ ID NO: 27356 - DNA, 600 bp, Chicken  19866894244421_3
cttccctttcctcacccaccacccacagtcactgggagcgctcagcagctgtgtacagtgtgaagagtcacatccgggagcagggcgagagttaaagagttcacagccctgccttataatgaagcccctgttttcactgccttcccactctgccttaaagacttgatccgggttttggcactcatcatgtcagaatgggagggcagactggctatgccttttgttattrttattattattttattgctgtgctctcttgcaaggaaaagaggtggggagggtgrgggctgggagggagtraatcttaaaaagtgttcttgcttggctgtgtgaaaagaagaaatgagtctcagcacaggtgtgtctgcagaaagcctttgccaggacaggcaccaagaggcatctgattgccattctcacaaaaaaaaaacagcagcagccaaagaggactgagaggtgacccccactctttgttcatccttactgtatgtgggcacgctgatggttcaggccaggggacgctgacactgtgacttaaaagaaccctattaaaatgatggaratctttgactatgaaaaatagagtctgcacctggacag

SEQ ID NO: 27357 - DNA, 600 bp, Chicken  19866894244421_4
ggaaaagaggtggggagggtgrgggctgggagggagtraatcttaaaaagtgttcttgcttggctgtgtgaaaagaagaaatgagtctcagcacaggtgtgtctgcagaaagcctttgccaggacaggcaccaagaggcatctgattgccattctcacaaaaaaaaaacagcagcagccaaagaggactgagaggtgacccccactctttgttcatccttactgtatgtgggcacgctgatggttcaggccaggggacgctgacactgtgacttaaaagaaccctattaaaatgatggaratctttgactatgaaaaatagagtctgcacctggacagtaattatgtttcaaaggaaatccatctggtattttattgcttattctctcaatgtacttcgtgtacaagaacaatacagggactggaatatttcatatcaggaggcttccaaaaagctgtttacaccctgccaggtcaataagctacacacatttttgcagtattatctcaattacggttaacaattgaaatacacgtttaaaaaaaaaatcttcccaaacactggcataggtccttggagcagacagactcctgcaaaccc

SEQ ID NO: 27358 - DNA, 600 bp, Chicken  19866894244421_5
acatttttgcagtattatctcaattacggttaacaattgaaatacacgtttaaaaaaaaaatcttcccaaacactggcataggtccttggagcagacagactcctgcaaaccccaccaaactccatgaagctcatgtactcaagaagcagttaggatttcagtatctggaaagagttagaactacaactgacgtcaagtggggtttacctttgccaacaacagaactagagcaatctgcttgcactgcagaccgacctctgcctgcgtacatgtaggcagtggaactcaaatcacagaaycattaaagttggaaaagacctctaagatcaccaggttcaatctaggcacccatcccaccatgcccactgaccatgtccctcgaccacattgccatggctcttgaacgcatccagggaccgtgactccaccgcctccctgggcagactaacccatcactactccttctgtgtagaaatgtttgctaatatccaacctgaacctcttcaggcataacctgaggccattccctctttccctatcactgttacctgggagcagaggctgacccccacttgccacaacctcctttcaaggaactg

SEQ ID NO: 27359 - DNA, 600 bp, Chicken  19866894244427_1
catcctgtacccagcctctctgtcttttgttattagatgtaagaaaaggtaataagttcacaagcagaattgcttgaattcatttaaaaaaaaaaaaaaaccacaaccagtatcctactcaaaggacagtgtttcagaggattgcattcattcttcctgaggaagttagctaagccataaaaattatctggtattctgtgggagtttagatatgccatcattctttgagatgtgttctgtggatgatgtactgttcttaactctgtctcaggaggacccaactaatgtactctggtttcrtgttctactcgatttcctaaaggctttgacaaaattccttgcagaagttttataaagaaaaatgagcagtcagggcataagagggaagttcttagatgtttaaacaactgttaaaaggtagggaaggtwgagtaggaataaatgagcatttcttatcttgcagcctttacagtagggtgatcttaaaattggtcaagcttactaacaggcttggttatagcacattgataaatagcctggaagggaatctaaacagtaaggtaagttttacagcttcttttgggtagtaatagtgagcac

SEQ ID NO: 27360 - DNA, 600 bp, Chicken  19866894244427_2
tgtttcagaggattgcattcattcttcctgaggaagttagctaagccataaaaattatctggtattctgtgggagtttagatatgccatcattctttgagatgtgttctgtggatgatgtactgttcttaactctgtctcaggaggacccaactaatgtactctggtttcrtgttctactcgatttcctaaaggctttgacaaaattccttgcagaagttttataaagaaaaatgagcagtcagggcataagagggaagttcttagatgtttaaacaactgttaaaaggtagggaaggtwgagtaggaataaatgagcatttcttatcttgcagcctttacagtagggtgatcttaaaattggtcaagcttactaacaggcttggttatagcacattgataaatagcctggaagggaatctaaacagtaaggtaagttttacagcttcttttgggtagtaatagtgagcactaactgtgaagaatttgaatggaaggtcgattaaaaatgaaggtgaaacctcaacataatttaagagtttgtatgcataaaaagtaagtctacttcattttatcttcagtgttggctgccaagcagggg

SEQ ID NO: 27361 - DNA, 600 bp, Chicken  19866894244431_1
aagtacttttgtttggtcctcatgtcacgtctgttctttacaatggtgactgttgcataatcagaattcctggttcagaacaggagtgagtctgacttagctgaagtctctctatgccatcttcagcatcaagtgaggtccgtcactgagttctgcatcagcgtagttccagctgtcccagttaggactggaatacttacaatgggagccacggggttgtccctgtttacatttaaactatactacatcattgcttattgcatatttgtgcttgatggaatattttagaaaaagctagargaacattttttagagtgaatgatttaattctgaaacatgagattcaaatgccaggggaaaaaaactgggctgctaaactgtcattgtccttttggacagtttaacttttgcactcaactctaagaaacaatattatcccwcatacagtaaatcacattcactcatagtcaatgatcttatctgttcagctattcagctcattttgtatgaagagaactctcagctgcagaaaagcattgaaatctgagaccagcagcagtctgagagattgtatttttactacttcatcagcagcttaat

SEQ ID NO: 27362 - DNA, 600 bp, Chicken  19866894244431_2
cgtcactgagttctgcatcagcgtagttccagctgtcccagttaggactggaatacttacaatgggagccacggggttgtccctgtttacatttaaactatactacatcattgcttattgcatatttgtgcttgatggaatattttagaaaaagctagargaacattttttagagtgaatgatttaattctgaaacatgagattcaaatgccaggggaaaaaaactgggctgctaaactgtcattgtccttttggacagtttaacttttgcactcaactctaagaaacaatattatcccwcatacagtaaatcacattcactcatagtcaatgatcttatctgttcagctattcagctcattttgtatgaagagaactctcagctgcagaaaagcattgaaatctgagaccagcagcagtctgagagattgtatttttactacttcatcagcagcttaatccattctcatcctccaaaagatactttcctttgatctacctgtacccagcccatttgaaatctggtttctagagtataaattctggccctcttgagccagcatgtgaaacctgagctctcatatcctcctgggtacatgt

SEQ ID NO: 27363 - DNA, 599 bp, Chicken  19866894244448_1
  misc_feature (1)..(64): n is any nucleotide
nnnnnnnnnnnnnnnnnnnnnnnnnnnnnnnnnnnnnnnnnnnnnnnnnnnnnnnnnnnnnnnnctggagcaccatggttctggcattcgtgtggagagtaacactgctgtgtatgggtttaatacactggaagccacgtgaagaagtaactaagaaatgatttagtgactgttctcaacagaagcttttagcagcacagaaagagagggaccttccttccctcacacactaaaatcctgctttacacatacataacactgcataatctcaattccacttgttagtgccaaaaatgatgyatatctcttacaaacggccaaactcacaagcaaaacatttaaaccatatagtgtttagttctacatttattgcagatattaaaagattaacaatgctaacagttttacttacactgaaaggaaacgtcagttaccccataacataagcatctactgttactagctaaatgctactgccaatttgcatggaacagaaactagcaaattgctctgcaagattaatggcaaagcaaaaaccaaaaaaaaaaaaaaaaaaccaaagaacaaaacaaaacagaaaaacaacaaaaaaaaaccaa

SEQ ID NO: 27364 - DNA, 600 bp, Chicken  19866894244449_1
ctcagggtcccatccaatctggccttgaacccctctaggaatggggcatccacagcatctctggacattcagtgaaaaatttcccctgacatccaacctaaatctcccctctttcagtttaaaaccattcccccttgtcatacactatccacccatgtaaaaactcagtctccttcctgtttatatgctgcttttatgcactggaatcactggagcttccagtagaagaagctcagctctctcagcctgcctttgttggaggcagccagccctctgaccatcttctaaatgatgaaaatmcacaacctcaatctatgtgaaaagggaatgtgtagaggctgtaaaggcaaacccatatcaaagccggtacagttactccagataagacttggttttccttcttgttatcagggctttccctggatcttttctttcatctatacaattaattattataattactccaaagtagaaaaaataatagtgaaattggtgttttctaggtccctattaagctcaacacaatttcatttgttaattggaatcatattgaaagtgagcagtgttaaacagtgaagaaacagctttcacaaatgcata

SEQ ID NO: 27365 - DNA, 600 bp, Chicken  19866894244455_1
tttccaggtatgtgcagctcaagcgaatcatcatttcccctaattactagtgttacctagttagttatctttagcttggtataatcaaccgtgattgtcacagccggtcctgatggatggcacattgcacgcttcagagcactcatcagccacaaatcccatgacaaacatctgtttgaccttaaagtttagtttgtgccttcctctgctggctgcactaactcttccctaaaatctcaagaatcagattcatgcgtaagtagggggagagaacagtcagaatatttatttccagaaatycgcagctcacccgcatctatggaggaaacactctcacttcaaagtactcaaaatttgtagctgatttgtgtgtagattgcacacagccattctgcctgtcgtcaagttgggggcaaaagactttctgtactttgaacaccaatagctcttgtacccctttctgttatccccattatcccatggaaaataagcagtttattgacatcccccagcaatgtcatggcagatttttcacccaggacaacaccaaaggattccaggtgacagaacgacatgatgaattgggttttttttttagtc

SEQ ID NO: 27366 - DNA, 600 bp, Chicken  19866894244456_1
ccataaaacatttcctgggtgtcactaactggaagacacattggagggttacactcactctgcataagaaataactttccagatgaaggagagagctgccacttttcaactgcctggtgctctcctcctccccacccgtccctgcatgcagcacccagaaatcatctgtctctctccatcagcatctcctctcctcaccagctgctgctctgatccctacccaggttccacttccataactattatataagtatcttgcatatcatagaatcatagaatggcctgggttgaaaaggaccrcaaygatcatcgagtttsaacycctctgytatgtgcagggtcgccaaccaccagaccaggctgcccagagccacatccagcctggccttgaatgcctccagggatggggcatccacaacctccttgggcaasatatgtattttatgtgtgcttttttatataggctacccatttatattgacctgtggaatcttctcatcaacaaaagaggaaaataaagtttccatcagtgcctccagctcctagcttctgccagctcatctcttctcatgttcttctgaacccattcctgctcttata

SEQ ID NO: 27367 - DNA, 600 bp, Chicken  19866894244456_2
aaaacatttcctgggtgtcactaactggaagacacattggagggttacactcactctgcataagaaataactttccagatgaaggagagagctgccacttttcaactgcctggtgctctcctcctccccacccgtccctgcatgcagcacccagaaatcatctgtctctctccatcagcatctcctctcctcaccagctgctgctctgatccctacccaggttccacttccataactattatataagtatcttgcatatcatagaatcatagaatggcctgggttgaaaaggaccrcaaygatcatcgagtttsaacycctctgytatgtgcagggtcgccaaccaccagaccaggctgcccagagccacatccagcctggccttgaatgcctccagggatggggcatccacaacctccttgggcaasatatgtattttatgtgtgcttttttatataggctacccatttatattgacctgtggaatcttctcatcaacaaaagaggaaaataaagtttccatcagtgcctccagctcctagcttctgccagctcatctcttctcatgttcttctgaacccattcctgctcttatattct

SEQ ID NO: 27368 - DNA, 600 bp, Chicken  19866894244456_3
gtgtcactaactggaagacacattggagggttacactcactctgcataagaaataactttccagatgaaggagagagctgccacttttcaactgcctggtgctctcctcctccccacccgtccctgcatgcagcacccagaaatcatctgtctctctccatcagcatctcctctcctcaccagctgctgctctgatccctacccaggttccacttccataactattatataagtatcttgcatatcatagaatcatagaatggcctgggttgaaaaggaccrcaaygatcatcgagtttsaacycctctgytatgtgcagggtcgccaaccaccagaccaggctgcccagagccacatccagcctggccttgaatgcctccagggatggggcatccacaacctccttgggcaasatatgtattttatgtgtgcttttttatataggctacccatttatattgacctgtggaatcttctcatcaacaaaagaggaaaataaagtttccatcagtgcctccagctcctagcttctgccagctcatctcttctcatgttcttctgaacccattcctgctcttatattctgtccatttcaccct

SEQ ID NO: 27369 - DNA, 600 bp, Chicken  19866894244456_4
cactaactggaagacacattggagggttacactcactctgcataagaaataactttccagatgaaggagagagctgccacttttcaactgcctggtgctctcctcctccccacccgtccctgcatgcagcacccagaaatcatctgtctctctccatcagcatctcctctcctcaccagctgctgctctgatccctacccaggttccacttccataactattatataagtatcttgcatatcatagaatcatagaatggcctgggttgaaaaggaccrcaaygatcatcgagtttsaacycctctgytatgtgcagggtcgccaaccaccagaccaggctgcccagagccacatccagcctggccttgaatgcctccagggatggggcatccacaacctccttgggcaasatatgtattttatgtgtgcttttttatataggctacccatttatattgacctgtggaatcttctcatcaacaaaagaggaaaataaagtttccatcagtgcctccagctcctagcttctgccagctcatctcttctcatgttcttctgaacccattcctgctcttatattctgtccatttcaccctaggt

SEQ ID NO: 27370 - DNA, 600 bp, Chicken  19866894244456_5
tggaagacacattggagggttacactcactctgcataagaaataactttccagatgaaggagagagctgccacttttcaactgcctggtgctctcctcctccccacccgtccctgcatgcagcacccagaaatcatctgtctctctccatcagcatctcctctcctcaccagctgctgctctgatccctacccaggttccacttccataactattatataagtatcttgcatatcatagaatcatagaatggcctgggttgaaaaggaccrcaaygatcatcgagtttsaacycctctgytatgtgcagggtcgccaaccaccagaccaggctgcccagagccacatccagcctggccttgaatgcctccagggatggggcatccacaacctccttgggcaasatatgtattttatgtgtgcttttttatataggctacccatttatattgacctgtggaatcttctcatcaacaaaagaggaaaataaagtttccatcagtgcctccagctcctagcttctgccagctcatctcttctcatgttcttctgaacccattcctgctcttatattctgtccatttcaccctaggtttcaaca

SEQ ID NO: 27371 - DNA, 600 bp, Chicken  19866894244456_6
cacccgtccctgcatgcagcacccagaaatcatctgtctctctccatcagcatctcctctcctcaccagctgctgctctgatccctacccaggttccacttccataactattatataagtatcttgcatatcatagaatcatagaatggcctgggttgaaaaggaccrcaaygatcatcgagtttsaacycctctgytatgtgcagggtcgccaaccaccagaccaggctgcccagagccacatccagcctggccttgaatgcctccagggatggggcatccacaacctccttgggcaasatatgtattttatgtgtgcttttttatataggctacccatttatattgacctgtggaatcttctcatcaacaaaagaggaaaataaagtttccatcagtgcctccagctcctagcttctgccagctcatctcttctcatgttcttctgaacccattcctgctcttatattctgtccatttcaccctaggtttcaacacaaagctctgcaccttcagtaaaacacagcagcagcacaactgctgtgtttagcayaggcagcagggccctgctggcttcagagtcaagagctacaagaactc

SEQ ID NO: 27372 - DNA, 600 bp, Chicken  19866894244456_7
ccttgaatgcctccagggatggggcatccacaacctccttgggcaasatatgtattttatgtgtgcttttttatataggctacccatttatattgacctgtggaatcttctcatcaacaaaagaggaaaataaagtttccatcagtgcctccagctcctagcttctgccagctcatctcttctcatgttcttctgaacccattcctgctcttatattctgtccatttcaccctaggtttcaacacaaagctctgcaccttcagtaaaacacagcagcagcacaactgctgtgtttagcayaggcagcagggccctgctggcttcagagtcaagagctacaagaactccgaaggttctgctccccacataaaccaaacaggaagatctgagtgggaaaaagaagtgctcaagcagggcaaagccagtatctggatgatttgcatttacatttacaaacaaaaaatggctgggtgattccttaagcgctttggatttaggatgtgaaatatgactcaggttacacttgataggaatcagcgggttttgtcgtaatattctggaattgaacggtcgctttgacaaatcgctgcacgcatcagc

SEQ ID NO: 27373 - DNA, 599 bp, Chicken  19866894244458_1
  misc_feature (1)..(44): n is any nucleotide
nnnnnnnnnnnnnnnnnnnnnnnnnnnnnnnnnnnnnnnnnnnncactagcaaccggaggcattgtttgttagtgggaagaaaggcgtatagatttaccagttatgtaagtttgtaacaacctgagaagaagcggtgtgtgaagcatgggcatttgtgacaaaaatgaagcctgtcttcttccacatattcttagccaactcttagacattccattcttctgttatgaagactaggcaggggatctcctgctatctatacccacctgtgtcattcttaccatccctatgcctctcctcaycacatgctcataatgttgccccagaaatctagctctctgtgagctagtctgtgtcattcacctgaaataagagacattggtttgacacacagcacaaggaaggtggcaaatcacctgctaaggagaggggaggctttgaaggagcaggagaaataaggagtagtaagaacctgatggtggtaagagactttgaaaaagaccacctcatgcgatttcacccttagtttagtttccacctcctttaatttcatttgcaatactgattgtgcatttatgtcctagttcagtaaaaagctgct

SEQ ID NO: 27374 - DNA, 600 bp, Chicken  19866894244458_2
gtgcatttatgtcctagttcagtaaaaagctgctttgaaaaacaatacagaggtatgcattagctagacactgtctatactaaacttcagtgctcaatacagacagtggatacattcctgaagtctgtgcattaatttttaatgagctttgaaatcttttcagtaagaatatacagaaaccctgggttcttttctaaaatatacctttgtacactgagtaaaattgccaaattacaaaattgaagagtaacacataaactcatgcagccacagtcatagctaacagtaaaacaatgaccsacactagcattttatcgaagtatgaaggttgttctaaaagtaatgcctcctatttatttccatggaaactacaacagatacatacagcacagtaacaccatttgacagagtaaatcctcagctacaaaatactattttttcagcatattcaccaccattacctttgcattttcaccagcaacgaacaagagcctgcatgccatgcttataaaaatctgcatggccatctggaacgtgacttttctttcgtgccattgttgccactgctgaaaggcaccactcaccacttcactgtgctca

SEQ ID NO: 27375 - DNA, 600 bp, Chicken  19866894244459_1
atgctttctagcagtactctgccccagtgtttatgtggcaatcagctgaagtctgcattagtaagaaagggtccatttccaggaagggaaccagggctgtgggcagggcatcgggtgcctcagggtccaacctcctgtcacacagctgtgctccacaggctgagctgccatgacaaaaacaagatacagaacccatccttggatggtgcagagccacagacaccatccacaccagtttgagctctttcttctttatcttttgtggcactgaaggttacgattgaaaagatggccaggacrtaacttattaattcaaatgtactgagttcaccagcaatcttaactgaaagcctgagctgcttaatttatcactggaattgttttaccactgagcttttttagatttcttgtgggcgctgtaataaatggcctcagggaacactggaattgccacttctggaagcttttaagaatacagttatttggattgaaatagatacaatttagaggatagaactcagttgtctcttccaaccttactttttctacaattttagcaggtgcattcaattcctgccccgagctggctgtgttcagctg

SEQ ID NO: 27376 - DNA, 600 bp, Chicken  19866894244461_1
ggatggatctcattggaaactcaaagcagctcatcaatacaattctttagacagttatgagcatgtaccattctacagttacaatggggagaggttttttaatctcagctataacgttttccttgtaaagccatgcaacctggtttaatataaattccaaaaaagaattttaaatgtttctctgcagtaaaatgaaacatctgttcaaatctaaagcatttacaaatgtacaaacacatatatataaagaaaaaatataaaattgaaagttttttttcatgaggaaaactaaatttaaaktctttaaaaagtgttagatttctaaaatttatctctctgcatgattctcctcctttccccattccacaaatagataatttggtgtaacagatygagtcaaagcgtaacttcagtattttcagatcttttccaaaaagtatttacattgaagaagtttgaccacttttgctgaaaattttattagaaaaatgggcctgatacaaactgaacatagttagcagtgattcacataaataaagataaattctttcatgatgttagagctgtgtgaattatttaattcacttatatgaagggtgt

SEQ ID NO: 27377 - DNA, 600 bp, Chicken  19866894244461_2
gttttttaatctcagctataacgttttccttgtaaagccatgcaacctggtttaatataaattccaaaaaagaattttaaatgtttctctgcagtaaaatgaaacatctgttcaaatctaaagcatttacaaatgtacaaacacatatatataaagaaaaaatataaaattgaaagttttttttcatgaggaaaactaaatttaaaktctttaaaaagtgttagatttctaaaatttatctctctgcatgattctcctcctttccccattccacaaatagataatttggtgtaacagatygagtcaaagcgtaacttcagtattttcagatcttttccaaaaagtatttacattgaagaagtttgaccacttttgctgaaaattttattagaaaaatgggcctgatacaaactgaacatagttagcagtgattcacataaataaagataaattctttcatgatgttagagctgtgtgaattatttaattcacttatatgaagggtgtttagtatagcctagcgttaacctttgtacagaatctggtaatttcctctgaggctcttaagcacaaagacacagtgtaatatcccagtccttt

SEQ ID NO: 27378 - DNA, 600 bp, Chicken  19866894244463_1
acctcaagcatcccctgatgtttgaaccagaacttccataattcttatttcacaagcccctctcagatacacaggcccataaccaagcatcctgagctcagagtcccaggagactcaaacgtcatttaaaaaaacaatccaaaaacttttgcatccaggtgaatctgatttcaaaaatccttgttcaaaactctcaaatcatcactatgcctcatttcagttagttttgtttttttttttaatggaatgtactgtgttggtttggtggctctttctagtatgagcttgtcattccactgsggatgtggaaaacttttatcagttaaagttttgttgaaactcatatgtttctgtgagaargatgactgaccatttttttccagtaggagtaaacttctcagttgcccatttgyttggaaaactcaccccagggtgaatgtgatggagaatctttggaatggcccggcacaaggttatgcatgtgctgtgtttcacaacaaattaataatgtcagatatgttgcccttgagaagtacctatatatgtaaacagatttaggaatatgcttctagttgcaytcccttctgttaattcctacat

SEQ ID NO: 27379 - DNA, 600 bp, Chicken  19866894244463_2
tctcagatacacaggcccataaccaagcatcctgagctcagagtcccaggagactcaaacgtcatttaaaaaaacaatccaaaaacttttgcatccaggtgaatctgatttcaaaaatccttgttcaaaactctcaaatcatcactatgcctcatttcagttagttttgtttttttttttaatggaatgtactgtgttggtttggtggctctttctagtatgagcttgtcattccactgsggatgtggaaaacttttatcagttaaagttttgttgaaactcatatgtttctgtgagaargatgactgaccatttttttccagtaggagtaaacttctcagttgcccatttgyttggaaaactcaccccagggtgaatgtgatggagaatctttggaatggcccggcacaaggttatgcatgtgctgtgtttcacaacaaattaataatgtcagatatgttgcccttgagaagtacctatatatgtaaacagatttaggaatatgcttctagttgcaytcccttctgttaattcctacattcacaaattcattaaacactattttcccctgaattgtcccaaattgtcacccaaattatg

SEQ ID NO: 27380 - DNA, 600 bp, Chicken  19866894244463_3
ctcaaacgtcatttaaaaaaacaatccaaaaacttttgcatccaggtgaatctgatttcaaaaatccttgttcaaaactctcaaatcatcactatgcctcatttcagttagttttgtttttttttttaatggaatgtactgtgttggtttggtggctctttctagtatgagcttgtcattccactgsggatgtggaaaacttttatcagttaaagttttgttgaaactcatatgtttctgtgagaargatgactgaccatttttttccagtaggagtaaacttctcagttgcccatttgyttggaaaactcaccccagggtgaatgtgatggagaatctttggaatggcccggcacaaggttatgcatgtgctgtgtttcacaacaaattaataatgtcagatatgttgcccttgagaagtacctatatatgtaaacagatttaggaatatgcttctagttgcaytcccttctgttaattcctacattcacaaattcattaaacactattttcccctgaattgtcccaaattgtcacccaaattatgatcacgttgattttacattcttgcaatgcagtcaggattttacaagggtttgt

SEQ ID NO: 27381 - DNA, 600 bp, Chicken  19866894244463_4
tatgagcttgtcattccactgsggatgtggaaaacttttatcagttaaagttttgttgaaactcatatgtttctgtgagaargatgactgaccatttttttccagtaggagtaaacttctcagttgcccatttgyttggaaaactcaccccagggtgaatgtgatggagaatctttggaatggcccggcacaaggttatgcatgtgctgtgtttcacaacaaattaataatgtcagatatgttgcccttgagaagtacctatatatgtaaacagatttaggaatatgcttctagttgcaytcccttctgttaattcctacattcacaaattcattaaacactattttcccctgaattgtcccaaattgtcacccaaattatgatcacgttgattttacattcttgcaatgcagtcaggattttacaagggtttgtttccataaggttaagcagaaacatatttttcaatagtgtgttcaaagaggtcatgttactaatattttcttggataacaaagttttttaaaactgtaactttgcttacatgtattttccctatcttagaaaaacaattaaaataaaaaagtgctgtatatacacc

SEQ ID NO: 27382 - DNA, 600 bp, Chicken  19866894244463_5
aatgtattttgtaaaggaagcctactttgagatatttcacctcatttttcaggaaggtatgagatctgcctcataaaaaggctgagggtacaactatgtgtgttctccactttttgtctttcctagtgcaaccaggaactttgtcagtgcaattcagaggagttttaatgaatgcagccaatactgcagtgatagcaagccatcctgggaagaatctgtggcagtgttttcagtgagggtactggattgagactcaggaggtctggattcagatttaccagactttggattaaaaatatktaggtgtattgcaccaagcattcgtagaatcatagagtggtttgggttggaagagaccttaaagcccacgcagccccaacccccaagccatgggcagggctgcccccccgagctcaggctgcccagggccccatccaacctggccttgagtgcctgcagggatggggcaccacagcttctctgcacagctgtgccactgcctcgccaccctatgaggaaagaatttcctcctaacatctaacctatatcttccctcttttagtttaaaccattcctccttgcccccactatcagactgtg

SEQ ID NO: 27383 - DNA, 599 bp, Chicken  19866894244465_1
  misc_feature (1)..(50): n is any nucleotide
nnnnnnnnnnnnnnnnnnnnnnnnnnnnnnnnnnnnnnnnnnnnnnnnnncttgtgctgaatggttttatttgctggcttgctactgtaaatggaattcattaatctgaagcaaaagtaattataacaaagaacataagatatcagattattaagatggtatctttctctgtcgagatgggttatttcaatccattcatcatctcatggaagcgctaagttactttagaagcaatgtgtcgtgaatttgaatctgaggacatacctaagaatatgttttgcactaaaaaacaaacaaacraacaaaaaacaaggaaagaagcactcaggaatgatatcttcagtacacctgatgcattaaaggctaattgtttcatctggatatttcacttctatttcaaaatgtgattcttgcattcaattacacttcacgaaagtgaatttcacccctgtctagagtgccaaaatgaatgatgtgaggataccccatggactgtagtagcaactgttttcagagggggacagcaatcaatatttcattctctacattccagtgaatgagaggagatctccaaggtccaggagtactcagggactaaa

SEQ ID NO: 27384 - DNA, 417 bp, Chicken  19866894244465_2
ggaatgatatcttcagtacacctgatgcattaaaggctaattgtttcatctggatatttcacttctatttcaaaatgtgattcttgcattcaattacacttcacgaaagtgaatttcacccctgtctagagtgccaaaatgaatgatgtgaggataccccatggactgtagtagcaactgttttcagagggggacagcaatcaatatttcattctctacattccagtgaatgagaggagatctccaaggtccaggagtactcagggactaaactctaggcacctatcaccgatcactttkatattattcaacatggagcagtgcagcccatttcactttctcttctgttcctaagcaccacagagcagtccgtatcatggtctgcaagctagcagtgattccctttgttacaaatta

SEQ ID NO: 27385 - DNA, 600 bp, Chicken  19866894244470_1
aaaatgcaaataaaataaaataaatggaacctagaatcttgtatgttttcttaaaaattctggcatggaatgcatacaaataaaaatattcataaaatataaaatataaatatccatgcctcaagatgccactgacagcagcttcaacataacctttcaaactgcaaggaacaagactgaccttaagggctgtccttaagcacggagattaagcgtgcctgatttatataatttgcactgattttaagcttctcgagtttgaataagctataacagttagttaatatactttagttaacrcaatttactcattgctaaagccagacaaacatttacttcaagtgcaacggttttactggtctcagtgttttcacccataaacattttagcattttgaaatatcagtcatttctatttaatcttaagccattctaacccagtcttggtacgaagtgtgtacgtaaaccatcagctacataaaagaccagaagmgaccgggagtgattttgttgtttttatccactcatgcctctgacataaagccatcttcaagctgggtttctgttgcctcctctgctcaaacatgtataactatgaagt

SEQ ID NO: 27386 - DNA, 600 bp, Chicken  19866894244470_2
tccttaagcacggagattaagcgtgcctgatttatataatttgcactgattttaagcttctcgagtttgaataagctataacagttagttaatatactttagttaacrcaatttactcattgctaaagccagacaaacatttacttcaagtgcaacggttttactggtctcagtgttttcacccataaacattttagcattttgaaatatcagtcatttctatttaatcttaagccattctaacccagtcttggtacgaagtgtgtacgtaaaccatcagctacataaaagaccagaagmgaccgggagtgattttgttgtttttatccactcatgcctctgacataaagccatcttcaagctgggtttctgttgcctcctctgctcaaacatgtataactatgaagttaaaagagggcatcttttaaaagaaggaaaactctcgattcagtttgctccctgttgttctttgcctgtgatccttactgcttttaaaaggatagaggattcagatgccaaacttagctgagaagagttttcttcacccatcgcttgcagtcgtgctcaaatgtcataggcagcttggttttaaattcgtgt

SEQ ID NO: 27387 - DNA, 600 bp, Chicken  19866894244471_1
tggcaaagcacccattgccggctgcaagacgccgaaagtcagtgtgctgctcaaagagagctctgctcccccgggtccttggagatggggggctcccagctgagctcctcctccgtgggcagaggctgtaggagcagcacccgggccccggcggggacgcacagctggggggcaccgaagaaaaaggagcgggcggcacgcagggctccgagctggaaaggggatgaggaacgggagctgctgtgtgccatcgaagagaaggaaaaggtggaggagcaggtcaacgtcagcttggagctrctccaagcctctgaggatgaagcccagggtgagctggggaaaggaaatgggattgctgggagctttcgcctcaccccaagctgcacattccccctgctggccccagcaaggggaccaagtgtcttgttttattccacaggtggaatccaacgcaggctggagggcgcggacatggagctcgaggggctgcggcaggaggttggtggagaggtcctggcacggcagaggctgggcagtacggagcccctgtgcctcagcgccccgcacaacgtgctgccagctgtggatggtgagcaaacg

SEQ ID NO: 27388 - DNA, 599 bp, Chicken  19866894244479_1
  misc_feature (1)..(173): n is any nucleotide
nnnnnnnnnnnnnnnnnnnnnnnnnnnnnnnnnnnnnnnnnnnnnnnnnnnnnnnnnnnnnnnnnnnnnnnnnnnnnnnnnnnnnnnnnnnnnnnnnnnnnnnnnnnnnnnnnnnnnnnnnnnnnnnnnnnnnnnnnnnnnnnnnnnnnnnnnnnnnnnnnnnnnnnnnnnnnctagcattgggacaacagaatgacacagagggacaagtaacgtggaatacttggctcaccttttgctgttggtataaaagaagttccagtgtgaagtacaatcagaagtaggtaaattcattttttwaaaaaacattttccgatttaataatgtaagttacaggcttaaaatgaaatgaaaatgttattcccaaaccaccttttgtctcacacccaaagcaatcacttctaataaaatgggcggcgaagagagaggaaaaaattcaatttcagcaactgatttagttttattattttaattaccagtaaactaaaattgccttagcacgccaacccagcaagtaaaactgtccagttttactgactgatactcttccagctgtctgagtctgaaattccactaaatgcaaaacacaatctataccc

SEQ ID NO: 27389 - DNA, 600 bp, Chicken  19866894244484_1
cctgaaagatggctctgaagaacaaatccatttccagaggaggcagagctggagccagcagggctgtgctggggcctggcatccttcatggcatggagggagcacaggcagagctgcccagaaaatcctgagtgaaatcatgtttaggactaagatatttttggggtgggatggaggaagggccagtgtcaggaatgggctgcagtacagtgcagttttgctgtgctggttctgtaatgatgcacttatcagtccttacagtattactcctcaacaaaagtggaagacaaagttattaamtgggtgaattcagcaactttgttgggttaagcaggaaaatcaaatgcacacctgaaaaaacaggaaaacattcctaagatctggatgcagaattataaataaggggaaatggtaagagatagcaacctggagcctggggtgtttcatcagtactgatgaatggtgcccatgaggatcctgagctgaactgcaatttgctgatacagacaaaccaatgtcttacaccagctcagaagtcaactcccggctgactctgtgacttgcaagagcctgtctcatacttgctgctctctgcccaag

SEQ ID NO: 27390 - DNA, 600 bp, Chicken  19866894244484_2
tgcagaattataaataaggggaaatggtaagagatagcaacctggagcctggggtgtttcatcagtactgatgaatggtgcccatgaggatcctgagctgaactgcaatttgctgatacagacaaaccaatgtcttacaccagctcagaagtcaactcccggctgactctgtgacttgcaagagcctgtctcatacttgctgctctctgcccaaggaagctggaaaggagcacttggtctggatggagacagagatggacagagggagctctaagcccagaggcctttccagttcctgcwgcacttctttcycaggctctcagtgtcccaggtcatcctcagtctggattcttcatttggggttacagcrggtgggcaaacacagctcttatcctccacctgggccacagcactgcaattaatgactgctgcctgagaacagcatttgaacattgcagcctctcacaacggtgctgatgctttggggaagaaatgggtgctgaactctaccctccgaaagactatgaatttttaatggtgattagagtagtttccttcagccctttccaaatacaattcccacagataagactggcatag

SEQ ID NO: 27391 - DNA, 600 bp, Chicken  19866894244484_3
aataaggggaaatggtaagagatagcaacctggagcctggggtgtttcatcagtactgatgaatggtgcccatgaggatcctgagctgaactgcaatttgctgatacagacaaaccaatgtcttacaccagctcagaagtcaactcccggctgactctgtgacttgcaagagcctgtctcatacttgctgctctctgcccaaggaagctggaaaggagcacttggtctggatggagacagagatggacagagggagctctaagcccagaggcctttccagttcctgcwgcacttctttcycaggctctcagtgtcccaggtcatcctcagtctggattcttcatttggggttacagcrggtgggcaaacacagctcttatcctccacctgggccacagcactgcaattaatgactgctgcctgagaacagcatttgaacattgcagcctctcacaacggtgctgatgctttggggaagaaatgggtgctgaactctaccctccgaaagactatgaatttttaatggtgattagagtagtttccttcagccctttccaaatacaattcccacagataagactggcatagcacttagcgtga

SEQ ID NO: 27392 - DNA, 600 bp, Chicken  19866894244484_4
atgaatggtgcccatgaggatcctgagctgaactgcaatttgctgatacagacaaaccaatgtcttacaccagctcagaagtcaactcccggctgactctgtgacttgcaagagcctgtctcatacttgctgctctctgcccaaggaagctggaaaggagcacttggtctggatggagacagagatggacagagggagctctaagcccagaggcctttccagttcctgcwgcacttctttcycaggctctcagtgtcccaggtcatcctcagtctggattcttcatttggggttacagcrggtgggcaaacacagctcttatcctccacctgggccacagcactgcaattaatgactgctgcctgagaacagcatttgaacattgcagcctctcacaacggtgctgatgctttggggaagaaatgggtgctgaactctaccctccgaaagactatgaatttttaatggtgattagagtagtttccttcagccctttccaaatacaattcccacagataagactggcatagcacttagcgtgagccaagcctgggagctccccctgctaccaagaaatagggagttctgaagtgtgcagcc

SEQ ID NO: 27393 - DNA, 600 bp, Chicken  19866894244487_1
tgcattttaaaactaaaatgcaaacacatttacaggtaggtaggggaagattttcctaggaaggtaatgccaaaattaataatatctgtgtatatactttcctttcagtgatcacagttgcgccccaacaacttgcttcttaagcaccagatgtttggttatggatttggcagagctctgcagacccaggtttctctagcaggactgctgtctgtgaaatttgcattttcatgcagatgcattatagatgatccatctgataacattagctaacacacatgagtattaaggcttaacttsttgctacaaatcattcttgttttcgccttgtttctaaaatggaaggaaatgctagtgtaatacctctgccatcctttggttttgtgaaatacttgtggattcaagtatttatttactagtgacagtgagtcactcatagacaaatggatcacttattttcttgacttgcacgagttggctcagctgtctgttagttccatgcacttccattcatttcattacaattgtgggaataactcatgttgttgaaagaacaatgttttcaacgtagatagttacactgctatagctgtgcttgaa

SEQ ID NO: 27394 - DNA, 548 bp, Chicken  19866894244488_1
cgtttttcagcagttaatttacttggctttgtgtacgtttgaagtgacgttgtagaaactggtaggatcactggtcgtatcttttatgagacaaaatagagataaattaggcacttggtttatatactgctgactctctatcacaaattttaccctcagcatggtgaatatttctaaacaaaatatatatgctggattatcagagagagcatcacctcatgaatcttaatgtgacagcccctgagtagttagcactcatcagatcgcagcatctcattcttctcgtggcaagccataatmctactgttgcaaaacatgacatggcagctgggagatcaaaatatttcccctcaatatatcataggcaactgcattccagcactacagtcagaggccgtctgctcaaccaggtgaacttcagctgcagtttctgctttagcttgtaggatgggggagggttgggctggctctgtgtataaggaagctgtaaagcagagtgtaggtgtaagagaagagctgcgtgttatgaaggggaacaaaagctggag

SEQ ID NO: 27395 - DNA, 600 bp, Chicken  19866894244489_1
gtgagacactgtaactgtatcctgtgactacactagaacatacacccagcattgagttcaagtgctaaacaagtatatatcctgtttcagctaattctagcatctgagattctaggtggcagtcattccccttgatgtgtcagtgcccaaatgccatgatgaagagttaggccttgctaggaccccgtactactaagctggaaagaggaattttgcacaaaaggatttaaagctaaaacagagcaaacaaaaagcccatagctagtcaaggtatcctgagagttgggaaagacaaacctrctgggcaggtattccctaacagtgtaattttgacattactagcctgccttctcctcgatgtatcctctatttgttcaaagaaaatcatctgctcctctcagttattgcaaagtaaagtcacaagaatagcttgttcccactctattccaaatatagctgttggcagcgattgctgagataagggggaaggaaaaggaactaccaaggaagaggaaagacaggagggggaagagagaaaaggagctgaaaaggttggacaatagagagtaaagagagagacgtgaatgagaggaaaggtga

SEQ ID NO: 27396 - DNA, 599 bp, Chicken  19866894244494_1
  misc_feature (1)..(130): n is any nucleotide
nnnnnnnnnnnnnnnnnnnnnnnnnnnnnnnnnnnnnnnnnnnnnnnnnnnnnnnnnnnnnnnnnnnnnnnnnnnnnnnnnnnnnnnnnnnnnnnnnnnnnnnnnnnnnnnnnnnnnnnnnnnnnnnnnntctcagtgttcacccaatgcattgtcttttccatttttcatgtggacaccagaaatagattctgatgtcagcttcagtcctgctcttaggaaacattatccttgcctacaaagaaaaataatttaactgactttaagtgaatagcagtttagaaaataggatttctgaayagtaatatttttctgaagacgttcataaactactctgtgtagtgccagtactcttaactaagtagcacccttatatctgaattcatgagttatgtacacagaacacctgcagatacagcagtgtcagctaagatggaatcaaagctgttaagagaaaatgaatataatagaaaatgaatatgttaatagaaaataaaacctgttagtcttattttctgaagatattctggtattttgtcaccatccttgtttcctcaaaaaatcaataaaattcctgtaatgattttgaaatactttaa

SEQ ID NO: 27397 - DNA, 600 bp, Chicken  19866894244495_1
taagagcttaaggagtgaaagaatgaagaatgaaagagcttactgactgaagtgtgcaatatatggaagccatttttcaacttgcaaacttgagatttcaagttgtaagcttaagtcatcctatcacttgctaatagaatcataaaaatactagcatccaccagcccaataagcagcattaccagagcccaagcactttcaacacaatttaaaccacaagccactcacacagcaagctctcaagaacatgcagacccactggacaaagatccgctattttcagggaatagcagctgaaaytgagatgatgtactgataratgctttttaaaaatatcaccaactcttgtctttgtagcataaatacactgtatgacagtactggaaacaagattacaaggaaacaagatgacacctagtgcaaaattgcagagtagtcacagttcagaacttcaacaggttgttctgtgctgctgatcctaacagatcatcttggtaaaacaacaaggcttgggacaggcaagcctctgttatggcactgtttttccccccagcaacaaarcaaattttttaagcaaagaatatccttattttgttatty

SEQ ID NO: 27398 - DNA, 600 bp, Chicken  19866894244495_2
agaatgaagaatgaaagagcttactgactgaagtgtgcaatatatggaagccatttttcaacttgcaaacttgagatttcaagttgtaagcttaagtcatcctatcacttgctaatagaatcataaaaatactagcatccaccagcccaataagcagcattaccagagcccaagcactttcaacacaatttaaaccacaagccactcacacagcaagctctcaagaacatgcagacccactggacaaagatccgctattttcagggaatagcagctgaaaytgagatgatgtactgataratgctttttaaaaatatcaccaactcttgtctttgtagcataaatacactgtatgacagtactggaaacaagattacaaggaaacaagatgacacctagtgcaaaattgcagagtagtcacagttcagaacttcaacaggttgttctgtgctgctgatcctaacagatcatcttggtaaaacaacaaggcttgggacaggcaagcctctgttatggcactgtttttccccccagcaacaaarcaaattttttaagcaaagaatatccttattttgttattygttacgtttcagtgcctgt

SEQ ID NO: 27399 - DNA, 600 bp, Chicken  19866894244495_3
gacaaagatccgctattttcagggaatagcagctgaaaytgagatgatgtactgataratgctttttaaaaatatcaccaactcttgtctttgtagcataaatacactgtatgacagtactggaaacaagattacaaggaaacaagatgacacctagtgcaaaattgcagagtagtcacagttcagaacttcaacaggttgttctgtgctgctgatcctaacagatcatcttggtaaaacaacaaggcttgggacaggcaagcctctgttatggcactgtttttccccccagcaacaaarcaaattttttaagcaaagaatatccttattttgttattygttacgtttcagtgcctgtctgaagaactgattcctctaagactttaatgaatttatattaagggacacacaaataggagcttcttgtgactaatgrgaaacttctgagcaaaagtagactcatttccaaagatctctacaggacccgtccccgcatggttcccacacccacactcagcaagaactgctcccaaaatttcatacataaattagaagttatcagggaaggcctctgttatgcttggccagtcacatgtcctg

SEQ ID NO: 27400 - DNA, 571 bp, Chicken  19866894244495_4
tgagatgatgtactgataratgctttttaaaaatatcaccaactcttgtctttgtagcataaatacactgtatgacagtactggaaacaagattacaaggaaacaagatgacacctagtgcaaaattgcagagtagtcacagttcagaacttcaacaggttgttctgtgctgctgatcctaacagatcatcttggtaaaacaacaaggcttgggacaggcaagcctctgttatggcactgtttttccccccagcaacaaarcaaattttttaagcaaagaatatccttattttgttattygttacgtttcagtgcctgtctgaagaactgattcctctaagactttaatgaatttatattaagggacacacaaataggagcttcttgtgactaatgrgaaacttctgagcaaaagtagactcatttccaaagatctctacaggacccgtccccgcatggttcccacacccacactcagcaagaactgctcccaaaatttcatacataaattagaagttatcagggaaggcctctgttatgcttggccagtcacatgtcctgtggtctctca

SEQ ID NO: 27401 - DNA, 474 bp, Chicken  19866894244495_5
aggaaacaagatgacacctagtgcaaaattgcagagtagtcacagttcagaacttcaacaggttgttctgtgctgctgatcctaacagatcatcttggtaaaacaacaaggcttgggacaggcaagcctctgttatggcactgtttttccccccagcaacaaarcaaattttttaagcaaagaatatccttattttgttattygttacgtttcagtgcctgtctgaagaactgattcctctaagactttaatgaatttatattaagggacacacaaataggagcttcttgtgactaatgrgaaacttctgagcaaaagtagactcatttccaaagatctctacaggacccgtccccgcatggttcccacacccacactcagcaagaactgctcccaaaatttcatacataaattagaagttatcagggaaggcctctgttatgcttggccagtcacatgtcctgtggtctctca

SEQ ID NO: 27402 - DNA, 600 bp, Chicken  19866894244500_1
gttaaacaaaagttaaagaaggcatagtaatgagggtattttccaaatgattcttcaacagacaggcaatagaaagggtctacaaggaaaataaatatatataatgaaaatttcaagtggtcttgtcagatagaaatgatgtttaggttgtcaaaaaataaaagtcctgagtagggacaagtatggtggtttttgatgagaactgtgtcactcttcagaagcataaagaaacatggccatggagaaacaataatagaatcatagaagccacagcttctctgggcagcctgtgccagtgcstcaccaccctccaagtaaaaaatttcttcctaacatctaacctatatcttccctcttttagtttaaaaccattctcctttgttttaccacaaccagaccatttaaaaagtcagtctcctgttcataagatcccttgaagtactggaaggccacagtgaggtcttcccagagcctgttctcctccaggttgtattcataggagaagtgctccagccctctgatcattttcatggtctctgccagacccattccaaaagttttgcattcttcttgtgatgggagccccaggcctggatgcaa

SEQ ID NO: 27403 - DNA, 600 bp, Chicken  19866894244501_1
catggaacttgctattacaaaattcaagcttattttatatttcataccagaattcacaataattttaaatgcatatttttatattactctttcaaaatagaatataaaacaattctctatatactagtaacttaaagaagcatcatgacgataaataccagaacttcaactagaagtacagagataactgtaacagctggtactaactccaacacagacacttgccaacattaagtaaaaacttccattgtcactgaaaatgtaaaaaagattttaaagctcaaataaaatgctccagawctttgatttttatttgatttccaaaatagaatttaaaaaaagttaaacaccacasagcacactgtgtggcatttccttactcctaaataaaagttttatatcacctcttccaaaaacgtttgttttagttagctcctacactgacataactatggataaactgctgctgaacagtaacatttagagagttggtcagatttatatttaactttaataagcaaaattggatttactgctatacaagtaagctattgcctcaatgtactccacgaaatatgaaaaatactgaaaacctgagat

SEQ ID NO: 27404 - DNA, 600 bp, Chicken  19866894244501_2
acaataattttaaatgcatatttttatattactctttcaaaatagaatataaaacaattctctatatactagtaacttaaagaagcatcatgacgataaataccagaacttcaactagaagtacagagataactgtaacagctggtactaactccaacacagacacttgccaacattaagtaaaaacttccattgtcactgaaaatgtaaaaaagattttaaagctcaaataaaatgctccagawctttgatttttatttgatttccaaaatagaatttaaaaaaagttaaacaccacasagcacactgtgtggcatttccttactcctaaataaaagttttatatcacctcttccaaaaacgtttgttttagttagctcctacactgacataactatggataaactgctgctgaacagtaacatttagagagttggtcagatttatatttaactttaataagcaaaattggatttactgctatacaagtaagctattgcctcaatgtactccacgaaatatgaaaaatactgaaaacctgagatacttacaggttgaaatatcttgagttttttcttcccacttggatttgcagctttt

SEQ ID NO: 27405 - DNA, 600 bp, Chicken  19866894244502_1
aattacagctgtgtcacagaaacaacaagagcacaggaaatagttgcattataaatgtttgctgtggtgacttcagtgacgtttgctgcatcttaagtatgtgcatcagaaacagcagaggaatgttcccaaaacatcgctctttggtttggaaatggttttctgtgttccattcaggcttcctatgaagaggctgtttgaggaactagattttatgggagctcttttaccacagcattactcttcgcaaacatacatacacagtataatatagtatatggtatgtatatatatatatasatacaatatacacaaataatatacacaaagggacactttctattgtatttgtcaaagaagaatatgaaatgcttacatccctttccagttaattaggtaattatataatttcatgtcagaagattctcaagtgattactctgttgaaagtggtaacctccattacaggaatccctcacattgtagccactatactaataaacagtaattctcattagatcacatagaggcatgttagttccaaatcatcctaatggctgcataacttgataagaaaaataccattgctaacagataagaa

SEQ ID NO: 27406 - DNA, 600 bp, Chicken  19866894244502_10
taggatgaactcatctcctggcaacgtcctttagagaagggggacctgaatgagtagaagygagaaccaggaggactctcccatccccctgaatttcagtcactcctgtctctctgtcttaatgatacaaagraattctaattaayaaytgtgtaacattttgacagcaaaataagggatctttgtaaagctctcctgtggttctgaactcattttcatgccaaaatatctgtctttcagaaaagaaagatgccaaggagcttcagctctgttgtcttgtcagatacyttgctcctgctycgtgagggtgatttcataagaagtttcatctttgttatttatttatttattttaccttaatgaagatgattgtatgacaaaggggaggaagatagtggtgtgtgggtagaaaggaaaatgtaggaaattgagaaaatgtcagctctctcaatttttcacatacacacagaaattttgcacttcacaaacactccataattatggagagattttgtaacataaaaataaaccctttaattatatgtagtgctggctgcagataatgatggggatttagctgggaatggattaaagggatgt

SEQ ID NO: 27407 - DNA, 600 bp, Chicken  19866894244502_11
tttctcactgcttctgaagcctcaggcagcttaaacacaggacagtgtaattcacatcatcccctgaactacagtgagtcagcttaaggccagatacatagctgacacacagtggtgcataaaataatagatctaaggaagataccctgatgcccactgcacctcaaatgtgctcatgctctttcatgttccaagcacgttggtgagagacgagatccctttactttagggtagcctccataccaagtactagcctactcccattcatttctagtacaccttttacaaattcttcttctkctgctgctgctgtgtgccatggtgcttgccttgctggccacctgccaccagtgctgttcctcagctgggaggagttggcagccagcaaatggccacagcactgttgccttccttctcaacacaggagacctggaagatgaagttggttggaccaaaggttgtttttggagatggagaggaaaggaagagcagaaggactgaggcctcctaaaaagagcagccaacatcacttcccaccctagacaccagtactggcagcagcgggtctctcctcagctattggttgcgctgttgctctct

SEQ ID NO: 27408 - DNA, 600 bp, Chicken  19866894244502_12
gagatggagaggaaaggaagagcagaaggactgaggcctcctaaaaagagcagccaacatcacttcccaccctagacaccagtactggcagcagcgggtctctcctcagctattggttgcgctgttgctctctcatttccttccctttctctagcaggagccatgcagcctgcagttctttacttcagatgccaccattttgctcctgccctgaggatccccagggcaggctttggttggtgctgctgtactgacctgtcttgcagcacgtcaacaccaactgagcctgcaaggagcccygcaaagcttgtgcaatgttcagtragccttgtggaggcatattttgagaagaccaaaatgacattaataacaccatgttaccctttattaatctatgttgtaacaatgaaattcacaataattgcattgtaagttttgacttattttgcctaagtgtgaatctagaggtgactcacagtcaccagagggaaagaacagtcaacagaagtgttcaggtctagattgatttaacaagtgaggttaaaccctrctttggttgttgactgaacagtctgtccagacagtttataccctttatct

SEQ ID NO: 27409 - DNA, 600 bp, Chicken  19866894244502_13
gaaggactgaggcctcctaaaaagagcagccaacatcacttcccaccctagacaccagtactggcagcagcgggtctctcctcagctattggttgcgctgttgctctctcatttccttccctttctctagcaggagccatgcagcctgcagttctttacttcagatgccaccattttgctcctgccctgaggatccccagggcaggctttggttggtgctgctgtactgacctgtcttgcagcacgtcaacaccaactgagcctgcaaggagcccygcaaagcttgtgcaatgttcagtragccttgtggaggcatattttgagaagaccaaaatgacattaataacaccatgttaccctttattaatctatgttgtaacaatgaaattcacaataattgcattgtaagttttgacttattttgcctaagtgtgaatctagaggtgactcacagtcaccagagggaaagaacagtcaacagaagtgttcaggtctagattgatttaacaagtgaggttaaaccctrctttggttgttgactgaacagtctgtccagacagtttataccctttatcttcaatgaaagtgaggcagagtttt

SEQ ID NO: 27410 - DNA, 600 bp, Chicken  19866894244502_14
ctgacctgtcttgcagcacgtcaacaccaactgagcctgcaaggagcccygcaaagcttgtgcaatgttcagtragccttgtggaggcatattttgagaagaccaaaatgacattaataacaccatgttaccctttattaatctatgttgtaacaatgaaattcacaataattgcattgtaagttttgacttattttgcctaagtgtgaatctagaggtgactcacagtcaccagagggaaagaacagtcaacagaagtgttcaggtctagattgatttaacaagtgaggttaaaccctrctttggttgttgactgaacagtctgtccagacagtttataccctttatcttcaatgaaagtgaggcagagttttctacctatgtaggctgatagaatcatagaaccaccaaggttggaaaagacctctaatatcatcccatccaaccgtccacctatcaccagtatttcccactaacccatgtccctcagtacaacatctaattgttttctggataaatccagaaaatgtaattgtagatacataggaagcacccaagatgctgagcaaatacttattaatgtctgaaggaaagatgaag

SEQ ID NO: 27411 - DNA, 600 bp, Chicken  19866894244502_15
gctacattctatgagtggtgggagactaattcttcagtcactgtggggtcttttgagatcatcatccaaaaaaagtcacaaccaccaatcaaatgtcctcttctgcttctgttctcagcatgatgaacctcgtgtagaagttcactggtctgggctttggtgatacacttgcactacctatgtctcactgtgaagaagaacagttttctgcatgtctatacaagatacatattataacaccttccacaggcaatatgtattgtgtaattactaaaagaggagaacttgcagaaatataasagagtttaagaagtggctatgacaggaaaaatggaatttctctgtctgcatttatgcagaggatcaagtggcctgctaaatggaaatgcaattaccagctccaacctatggcagagtgggaaytgcactttccarttttatgtgaatgaggatttcatctgmgatctacatgtctgaattcagaggaatcagtattatgccttgttgtggggtggctaataagcattttcctcrctgatgggtatgcgtagctcctgtcagcagcaactgtagtggtatttcagtaccaacagggaaatt

SEQ ID NO: 27412 - DNA, 483 bp, Chicken  19866894244502_16
tgaacctcgtgtagaagttcactggtctgggctttggtgatacacttgcactacctatgtctcactgtgaagaagaacagttttctgcatgtctatacaagatacatattataacaccttccacaggcaatatgtattgtgtaattactaaaagaggagaacttgcagaaatataasagagtttaagaagtggctatgacaggaaaaatggaatttctctgtctgcatttatgcagaggatcaagtggcctgctaaatggaaatgcaattaccagctccaacctatggcagagtgggaaytgcactttccarttttatgtgaatgaggatttcatctgmgatctacatgtctgaattcagaggaatcagtattatgccttgttgtggggtggctaataagcattttcctcrctgatgggtatgcgtagctcctgtcagcagcaactgtagtggtatttcagtaccaacagggaaattacaccc

SEQ ID NO: 27413 - DNA, 471 bp, Chicken  19866894244502_17
agaagttcactggtctgggctttggtgatacacttgcactacctatgtctcactgtgaagaagaacagttttctgcatgtctatacaagatacatattataacaccttccacaggcaatatgtattgtgtaattactaaaagaggagaacttgcagaaatataasagagtttaagaagtggctatgacaggaaaaatggaatttctctgtctgcatttatgcagaggatcaagtggcctgctaaatggaaatgcaattaccagctccaacctatggcagagtgggaaytgcactttccarttttatgtgaatgaggatttcatctgmgatctacatgtctgaattcagaggaatcagtattatgccttgttgtggggtggctaataagcattttcctcrctgatgggtatgcgtagctcctgtcagcagcaactgtagtggtatttcagtaccaacagggaaattacaccc

SEQ ID NO: 27414 - DNA, 444 bp, Chicken  19866894244502_18
atacacttgcactacctatgtctcactgtgaagaagaacagttttctgcatgtctatacaagatacatattataacaccttccacaggcaatatgtattgtgtaattactaaaagaggagaacttgcagaaatataasagagtttaagaagtggctatgacaggaaaaatggaatttctctgtctgcatttatgcagaggatcaagtggcctgctaaatggaaatgcaattaccagctccaacctatggcagagtgggaaytgcactttccarttttatgtgaatgaggatttcatctgmgatctacatgtctgaattcagaggaatcagtattatgccttgttgtggggtggctaataagcattttcctcrctgatgggtatgcgtagctcctgtcagcagcaactgtagtggtatttcagtaccaacagggaaattacaccc

SEQ ID NO: 27415 - DNA, 372 bp, Chicken  19866894244502_19
taacaccttccacaggcaatatgtattgtgtaattactaaaagaggagaacttgcagaaatataasagagtttaagaagtggctatgacaggaaaaatggaatttctctgtctgcatttatgcagaggatcaagtggcctgctaaatggaaatgcaattaccagctccaacctatggcagagtgggaaytgcactttccarttttatgtgaatgaggatttcatctgmgatctacatgtctgaattcagaggaatcagtattatgccttgttgtggggtggctaataagcattttcctcrctgatgggtatgcgtagctcctgtcagcagcaactgtagtggtatttcagtaccaacagggaaattacaccc

SEQ ID NO: 27416 - DNA, 600 bp, Chicken  19866894244502_2
aaagaagaatatgaaatgcttacatccctttccagttaattaggtaattatataatttcatgtcagaagattctcaagtgattactctgttgaaagtggtaacctccattacaggaatccctcacattgtagccactatactaataaacagtaattctcattagatcacatagaggcatgttagttccaaatcatcctaatggctgcataacttgataagaaaaataccattgctaacagataagaaacacttgatactttactaggacaaatttaaattacatctttagaaagggtttygtagagaaagcaattcacttctcaggtatgacaattttgcatgcttctcactaggaaaatgaatgctctgtgaatcaagatgtgagaatcacacaggctgaagtagtaatgacattttaatagaaaattacaagtgattcatgtgccaacagctcctgtcagaactggtagtagcaaactaaccagtggtgtgcacagttttcataataactttgcagttcattgttaagtctacagcgaaagtgagcacaygtaagacagcataataaaataggactgatatcagtaaaggtcaaatta

SEQ ID NO: 27417 - DNA, 600 bp, Chicken  19866894244502_3
tgatactttactaggacaaatttaaattacatctttagaaagggtttygtagagaaagcaattcacttctcaggtatgacaattttgcatgcttctcactaggaaaatgaatgctctgtgaatcaagatgtgagaatcacacaggctgaagtagtaatgacattttaatagaaaattacaagtgattcatgtgccaacagctcctgtcagaactggtagtagcaaactaaccagtggtgtgcacagttttcataataactttgcagttcattgttaagtctacagcgaaagtgagcacaygtaagacagcataataaaataggactgatatcagtaaaggtcaaattatagatgtgtgaatcttygttgttctattattttgtttactctattatctctattgtttcgttactctttctcatacaagatattaagttaggtcattattatcaagtcaaatgttgctatctcttatttactgtacctcctatttctcaattttactactaaaacaaataagatacaataacttgaaaatagatgggataaaataatcattttctaggaatcttaatggacaactttatgatgcatattggg

SEQ ID NO: 27418 - DNA, 600 bp, Chicken  19866894244502_4
cttctcaggtatgacaattttgcatgcttctcactaggaaaatgaatgctctgtgaatcaagatgtgagaatcacacaggctgaagtagtaatgacattttaatagaaaattacaagtgattcatgtgccaacagctcctgtcagaactggtagtagcaaactaaccagtggtgtgcacagttttcataataactttgcagttcattgttaagtctacagcgaaagtgagcacaygtaagacagcataataaaataggactgatatcagtaaaggtcaaattatagatgtgtgaatcttygttgttctattattttgtttactctattatctctattgtttcgttactctttctcatacaagatattaagttaggtcattattatcaagtcaaatgttgctatctcttatttactgtacctcctatttctcaattttactactaaaacaaataagatacaataacttgaaaatagatgggataaaataatcattttctaggaatcttaatggacaactttatgatgcatattgggcaaacataaaccaaacatcactggtatcaattttgcaaaatactaccctgcaagttatattattt

SEQ ID NO: 27419 - DNA, 600 bp, Chicken  19866894244502_5
cattttctaggaatcttaatggacaactttatgatgcatattgggcaaacataaaccaaacatcactggtatcaattttgcaaaatactaccctgcaagttatattattttcaggatcctgtaagttccaagccagctattgacatctatgtgtgatagcccttccatttctatgttttgtagtgttttgatatttgttttgtattgttttgtttctcaatatcagtctctctgtttggtaggatgaactcatctcctggcaacgtcctttagagaagggggacctgaatgagtagaagygagaaccaggaggactctcccatccccctgaatttcagtcactcctgtctctctgtcttaatgatacaaagraattctaattaayaaytgtgtaacattttgacagcaaaataagggatctttgtaaagctctcctgtggttctgaactcattttcatgccaaaatatctgtctttcagaaaagaaagatgccaaggagcttcagctctgttgtcttgtcagatacyttgctcctgctycgtgagggtgatttcataagaagtttcatctttgttatttatttatttattttaccttaat

SEQ ID NO: 27420 - DNA, 600 bp, Chicken  19866894244502_6
caattttgcaaaatactaccctgcaagttatattattttcaggatcctgtaagttccaagccagctattgacatctatgtgtgatagcccttccatttctatgttttgtagtgttttgatatttgttttgtattgttttgtttctcaatatcagtctctctgtttggtaggatgaactcatctcctggcaacgtcctttagagaagggggacctgaatgagtagaagygagaaccaggaggactctcccatccccctgaatttcagtcactcctgtctctctgtcttaatgatacaaagraattctaattaayaaytgtgtaacattttgacagcaaaataagggatctttgtaaagctctcctgtggttctgaactcattttcatgccaaaatatctgtctttcagaaaagaaagatgccaaggagcttcagctctgttgtcttgtcagatacyttgctcctgctycgtgagggtgatttcataagaagtttcatctttgttatttatttatttattttaccttaatgaagatgattgtatgacaaaggggaggaagatagtggtgtgtgggtagaaaggaaaatgtaggaaattgaga

SEQ ID NO: 27421 - DNA, 600 bp, Chicken  19866894244502_7
tactaccctgcaagttatattattttcaggatcctgtaagttccaagccagctattgacatctatgtgtgatagcccttccatttctatgttttgtagtgttttgatatttgttttgtattgttttgtttctcaatatcagtctctctgtttggtaggatgaactcatctcctggcaacgtcctttagagaagggggacctgaatgagtagaagygagaaccaggaggactctcccatccccctgaatttcagtcactcctgtctctctgtcttaatgatacaaagraattctaattaayaaytgtgtaacattttgacagcaaaataagggatctttgtaaagctctcctgtggttctgaactcattttcatgccaaaatatctgtctttcagaaaagaaagatgccaaggagcttcagctctgttgtcttgtcagatacyttgctcctgctycgtgagggtgatttcataagaagtttcatctttgttatttatttatttattttaccttaatgaagatgattgtatgacaaaggggaggaagatagtggtgtgtgggtagaaaggaaaatgtaggaaattgagaaaatgtcagctct

SEQ ID NO: 27422 - DNA, 600 bp, Chicken  19866894244502_8
taccctgcaagttatattattttcaggatcctgtaagttccaagccagctattgacatctatgtgtgatagcccttccatttctatgttttgtagtgttttgatatttgttttgtattgttttgtttctcaatatcagtctctctgtttggtaggatgaactcatctcctggcaacgtcctttagagaagggggacctgaatgagtagaagygagaaccaggaggactctcccatccccctgaatttcagtcactcctgtctctctgtcttaatgatacaaagraattctaattaayaaytgtgtaacattttgacagcaaaataagggatctttgtaaagctctcctgtggttctgaactcattttcatgccaaaatatctgtctttcagaaaagaaagatgccaaggagcttcagctctgttgtcttgtcagatacyttgctcctgctycgtgagggtgatttcataagaagtttcatctttgttatttatttatttattttaccttaatgaagatgattgtatgacaaaggggaggaagatagtggtgtgtgggtagaaaggaaaatgtaggaaattgagaaaatgtcagctctctc

SEQ ID NO: 27423 - DNA, 600 bp, Chicken  19866894244502_9
ctctctgtttggtaggatgaactcatctcctggcaacgtcctttagagaagggggacctgaatgagtagaagygagaaccaggaggactctcccatccccctgaatttcagtcactcctgtctctctgtcttaatgatacaaagraattctaattaayaaytgtgtaacattttgacagcaaaataagggatctttgtaaagctctcctgtggttctgaactcattttcatgccaaaatatctgtctttcagaaaagaaagatgccaaggagcttcagctctgttgtcttgtcagatacyttgctcctgctycgtgagggtgatttcataagaagtttcatctttgttatttatttatttattttaccttaatgaagatgattgtatgacaaaggggaggaagatagtggtgtgtgggtagaaaggaaaatgtaggaaattgagaaaatgtcagctctctcaatttttcacatacacacagaaattttgcacttcacaaacactccataattatggagagattttgtaacataaaaataaaccctttaattatatgtagtgctggctgcagataatgatggggatttagctgggaatgga

SEQ ID NO: 27424 - DNA, 599 bp, Chicken  19866894244504_1
  misc_feature (1)..(36): n is any nucleotide
nnnnnnnnnnnnnnnnnnnnnnnnnnnnnnnnnnnnaaaagcaaacagccctgggaaaaagagacttcacagaaagagcctgtggtttgtcagaagcaaggctgaacaacgtttccttgtggtctgtaattaccaacagagggaagagatagctcagacttggggatgctttcatccggcagacaaaagctggatgaatccaatagctggaggctgaagttagcaagattgaaatgtaggatgcaaatatctaagactggaggtaattaataagttccctgatgtttgctgtgccaagtrgatggcagtcagagcgggcgagctgcccatgctagggcctgatgcctttcctcaatcagtgctgtatagcacataggcagcagtgtagggctgatcccaagtgagcaggacacacatctggagtgcccagagccccaggaagctgagctgtggttttcctgaatgcaagaagacaaatgaatatccaaaactggaacaggctgcccagagttgttgtggatgccccatccccagaggtgcccaaggccaggcttgctggggccctaggcaacctgatctgatggagggcaacaagccat

SEQ ID NO: 27425 - DNA, 600 bp, Chicken  19866894244504_2
gaatatccaaaactggaacaggctgcccagagttgttgtggatgccccatccccagaggtgcccaaggccaggcttgctggggccctaggcaacctgatctgatggagggcaacaagccatggcagaggtttgagcttgatggtctttaaggtcctttccaactcactccattctataattctatgataaactgcctggtgtccaccatataggaggagccacttagtctcaacccattttctactcacagaatgtcccatccatggatcgcaaggggaattaaagacactggggccccycagccatgtgatgagcagtctgtggctaatgccttcattgtgggatgtgctgttctgtgggatgtgtcaggctgatgcactacaggagtttaaatgcctgatgtgaagtctctccttcagtccttgtgttgtaggggctgcaaagctgtatggggcataccatgcccgattagttttatggactgctgtggctcaaggctgattattttccaaataaaatatcagtttaagagtaactcggtatgcttgctagcttgggaacatggggtgccattttattggctcgggtagattgcttgc

SEQ ID NO: 27426 - DNA, 600 bp, Chicken  19866894244513_1
ttcaccgcgccgccagcgccacaacaggtccgcacaggagacctctccctgcccagccggctcctccgctcgcctcagcccgctgccagcccgaactcgtggctcacgcagacaaaccaacttaaaaggaaaggcgaagctctctcctacgaggagcgcccgcttcctcagagcgctccgcgccgccagggggcgcctccccgcccggcgctgcccctcagcgccccgcgccgccctcaggcgggaggaaaagtgccgggtttctgccgaaaaaccggtgttaaaaggctctggagtgargagatgtgtttctgccttggctattatgtacactaaaacgtgaatgtcctcttctcgtgcctctgtctctcgttagaaaccatttattcatccatactgratctgtttaaaataattcaggtaattgtaaaagttcgattrccttctgtctcgcaacattttatgtttgtgttgctttcagttccatggtacataagtggctccaaacactcatatctcatgacacttctgtgggaagaaagtggtaccatccccacctcagataggagagtaaggcacaggcaagggaacctctgtgtt

SEQ ID NO: 27427 - DNA, 600 bp, Chicken  19866894244513_2
ggctcacgcagacaaaccaacttaaaaggaaaggcgaagctctctcctacgaggagcgcccgcttcctcagagcgctccgcgccgccagggggcgcctccccgcccggcgctgcccctcagcgccccgcgccgccctcaggcgggaggaaaagtgccgggtttctgccgaaaaaccggtgttaaaaggctctggagtgargagatgtgtttctgccttggctattatgtacactaaaacgtgaatgtcctcttctcgtgcctctgtctctcgttagaaaccatttattcatccatactgratctgtttaaaataattcaggtaattgtaaaagttcgattrccttctgtctcgcaacattttatgtttgtgttgctttcagttccatggtacataagtggctccaaacactcatatctcatgacacttctgtgggaagaaagtggtaccatccccacctcagataggagagtaaggcacaggcaagggaacctctgtgttgcagtcacctgtatttacacaacagaacttgtaattagatgatacatcatatttacacaacgtgactgcataactagaacctcagcactacacgatgtgt

SEQ ID NO: 27428 - DNA, 600 bp, Chicken  19866894244513_3
ctctcctacgaggagcgcccgcttcctcagagcgctccgcgccgccagggggcgcctccccgcccggcgctgcccctcagcgccccgcgccgccctcaggcgggaggaaaagtgccgggtttctgccgaaaaaccggtgttaaaaggctctggagtgargagatgtgtttctgccttggctattatgtacactaaaacgtgaatgtcctcttctcgtgcctctgtctctcgttagaaaccatttattcatccatactgratctgtttaaaataattcaggtaattgtaaaagttcgattrccttctgtctcgcaacattttatgtttgtgttgctttcagttccatggtacataagtggctccaaacactcatatctcatgacacttctgtgggaagaaagtggtaccatccccacctcagataggagagtaaggcacaggcaagggaacctctgtgttgcagtcacctgtatttacacaacagaacttgtaattagatgatacatcatatttacacaacgtgactgcataactagaacctcagcactacacgatgtgtagggcaagtcaaagatcacaggatatcagcccaaaccctgt

SEQ ID NO: 27429 - DNA, 600 bp, Chicken  19866894244518_1
cccaatctggtttattcattcacatccttctgcttttcacatttcagggatctcaaagaaaaatgtgatgctttaatattgtatgaacctcttgtatgttgtagcagggcaagagagccaaatgtgttctccctctcccaagatcgtgcagtcttgttcaaagcaggctgtttatgcaagtgtccactggttgcagtacaccttaattctgtttctgagtacacagaggtaggagggaaagcaatgacagaatggagagaaagagcacagaagcagaagtagtgattaaaaacacctttrtgcaagaataatgcatgctagcttgcatttccaaatattttgatgcaattagtggggggggaagactatttttaagtttataaatactgaacaaaggttcacagcattgaggttgtatcccttaaaaactgaaaccctgtaagtcttagtgaggtggatcttaatgtcctctcccatttaacagtttggggatagatctgccaaagtagccctaaaaatttccattctgtattcaaggaaagctgacattttctgcaaatcagatgacgataatcatcacttagttaccatctaaatact

SEQ ID NO: 27430 - DNA, 599 bp, Chicken  19866894244519_1
  misc_feature (1)..(85): n is any nucleotide
nnnnnnnnnnnnnnnnnnnnnnnnnnnnnnnnnnnnnnnnnnnnnnnnnnnnnnnnnnnnnnnnnnnnnnnnnnnnnnnnnnnnnacgaaattgccatcagcagaaactctagctgcagctccctcttaaagaagaaatttgcaaaggaaggtatgcattgctgtactctcaattaattgtccatcactgtcattgtttgccatgattctagccatctgaatagctgaccattcttgctctttctgacatagaagaatgaaaggtgacacaatgcagtatctcataatatatctagctayatatctagctattgctgttcacttttggtggggcggcttgtatgaattacatcttttttaccagagaaagcaaataggttgtaatgtggtatttcttaattcctacctgtgctaaatccaggtaatatacagagaatataaaatgatacatttgacaagataactacttgttctgatgagtagatgttgaagattaccttaacacaaggaaaatctaaactcttaagtgggtgaaatcttcaataytggagaatttgttttcaagtgctctactttattatttttactttattaattgt

SEQ ID NO: 27431 - DNA, 600 bp, Chicken  19866894244519_2
acatagaagaatgaaaggtgacacaatgcagtatctcataatatatctagctayatatctagctattgctgttcacttttggtggggcggcttgtatgaattacatcttttttaccagagaaagcaaataggttgtaatgtggtatttcttaattcctacctgtgctaaatccaggtaatatacagagaatataaaatgatacatttgacaagataactacttgttctgatgagtagatgttgaagattaccttaacacaaggaaaatctaaactcttaagtgggtgaaatcttcaataytggagaatttgttttcaagtgctctactttattatttttactttattaattgttattagcataaagtgtacctctgaagacatatcaagacaagtatgccacagaaaaattaatctcccatgttctggagtcacacaaatacaatattttagattactccaaatgtatactctgaaagaactactctttcccaaattacattttgccagctatgaaaaaaaatatttcacattttatagtggcaatattaataaaagcttattattttagttaagggagctattctatcttgaataaaag

SEQ ID NO: 27432 - DNA, 599 bp, Chicken  19866894244520_1
  misc_feature (1)..(157): n is any nucleotide
nnnnnnnnnnnnnnnnnnnnnnnnnnnnnnnnnnnnnnnnnnnnnnnnnnnnnnnnnnnnnnnnnnnnnnnnnnnnnnnnnnnnnnnnnnnnnnnnnnnnnnnnnnnnnnnnnnnnnnnnnnnnnnnnnnnnnnnnnnnnnnnnnnnnnnnnnnnnncgttttctcttcggaaatcccccatttaagtgaaaatcacgcgttttctcttcggaaatcccccaataaagcgagaatcatgcgctttctctacgagaatctcccattttagcaaaaatcacgcattttctctttgcaaatcymccatttaacccgaaaatcacgcgttttctcttcgcgaatcccccatttaaccagaaaatcacgcgttttgtcttcgcaaatcccccatttaagcgaaaatcacgcgttttaatctttgagaatcccccatttaagcaaaaatcacgcgttttctcttcgagaatcccccatttaagcgaaaatcacgttttctcttcgcaaatcccccatttaagcgaaaatcacgcgttttctcttcgagaatcccccatctaactgaaaatcacgcgttttcccttcgcaaatcccccatttaagc

SEQ ID NO: 27433 - DNA, 599 bp, Chicken  19866894244520_2
  misc_feature (1)..(156): n is any nucleotide
nnnnnnnnnnnnnnnnnnnnnnnnnnnnnnnnnnnnnnnnnnnnnnnnnnnnnnnnnnnnnnnnnnnnnnnnnnnnnnnnnnnnnnnnnnnnnnnnnnnnnnnnnnnnnnnnnnnnnnnnnnnnnnnnnnnnnnnnnnnnnnnnnnnnnnnnnnnncgttttctcttcggaaatcccccatttaagtgaaaatcacgcgttttctcttcggaaatcccccaataaagcgagaatcatgcgctttctctacgagaatctcccattttagcaaaaatcacgcattttctctttgcaaatcymccatttaacccgaaaatcacgcgttttctcttcgcgaatcccccatttaaccagaaaatcacgcgttttgtcttcgcaaatcccccatttaagcgaaaatcacgcgttttaatctttgagaatcccccatttaagcaaaaatcacgcgttttctcttcgagaatcccccatttaagcgaaaatcacgttttctcttcgcaaatcccccatttaagcgaaaatcacgcgttttctcttcgagaatcccccatctaactgaaaatcacgcgttttcccttcgcaaatcccccatttaagcc

SEQ ID NO: 27434 - DNA, 524 bp, Chicken  19866894244520_3
cacgcgttttctcttcgcgaatcccccatttaaccagaaaatcacgcgttttgtcttcgcaaatcccccatttaagcgaaaatcacgcgttttaatctttgagaatcccccatttaagcaaaaatcacgcgttttctcttcgagaatcccccatttaagcgaaaatcacgttttctcttcgcaaatcccccatttaagcgaaaatcacgcgttttctcttcgagaatcccccatctaactgaaaatcacgcgttttcccttcgcaaatcccccatttaagccacaattcacgcgttttcyctttggaaatcctccatttaagtgaaaatcacgcgttttctcttcgagaatcccccatttaagcaaaaatcacgcgttttctcttcgcaaatcccccatttaagtgaaaatcacgcgttttctcttcacaaatcccccatttaacccgaaaatcacgagttttctcttcgcgaatcccccatttaaccagaaaatcacgcattttctctttagaatcccccatt

SEQ ID NO: 27435 - DNA, 600 bp, Chicken  19866894244525_1
agaatatttttcaaaaaccctcttacactattgtatggcaaacaggtatacagattgtaaggtataggaccagactgattatcacattgtaaaggaaaaatgaaataaagagcttacccatatcctaggctcacagaaggattccaagggggatgatctccagatggagatccttcttccttgggagtcagcccttaaatggggtctaggaggtctggtcactcaggtgaaattgcattcacctgtgcccctgcagctgactcagcccttgcctcaggtgttcaatcagagtttcaggcsgtgattcagcagttcccatacacactataatgtcaaaggatgtcattaataaaacaaagtgtttgagccccataatatttgtatatccatccagcagaatttctgaaagaagggcagttttcttgttattgtgctcaatatgctgcagtagaagcactgtaattactaggtcttttttagatatttgtagccatgctgtattgtttgtatgcatccgatctttattcagtagtcacagaattgcaggggttggaagggacctctagagatcatccagtccaacccccagtggttgcttcc

SEQ ID NO: 27436 - DNA, 600 bp, Chicken  19866894244525_2
agggttgtggtttttcttgtttgtcagttggtttttttttttttcatgttatggaaagtttttatttccgcttttgtttataattgtgttagtaactacctcaactattttcatatgtatttctttctgaccctgaaaatatctttgtgttcttaactgaagaatcatacaatggcctgggttgaaaaggaccacaataatcatagagtttcaacccccttgctatgtgcagggtcaccaaccaccagaccaggctgcccagagccacatccagcctggccttgaatgcctctaggggtrgggcatccacaacctctttgggcaacctgttccagtgcgccaccactctgtgtgtgaaaaactaatatctgagctaaacttcacctgtctcagtttaaaaccgctcccccttgtcctattactatccacccttgtaaacagttgtaatgctgcacacttttgtgctttcatctttcctatttcgctccagtgctagagccaggttggcacaattttggctaagartggcagggtggagttctctatggaaaactttggcatctaaaatctactaaggttacaaagatggataaggaattg

SEQ ID NO: 27437 - DNA, 523 bp, Chicken  19866894244525_3
tgtgcagggtcaccaaccaccagaccaggctgcccagagccacatccagcctggccttgaatgcctctaggggtrgggcatccacaacctctttgggcaacctgttccagtgcgccaccactctgtgtgtgaaaaactaatatctgagctaaacttcacctgtctcagtttaaaaccgctcccccttgtcctattactatccacccttgtaaacagttgtaatgctgcacacttttgtgctttcatctttcctatttcgctccagtgctagagccaggttggcacaattttggctaagartggcagggtggagttctctatggaaaactttggcatctaaaatctactaaggttacaaagatggataaggaattgtgtggtctctgggacttaagtatgctgcctatgaaggctttctgtttttgtggacttgagaaataggagactaatgcagtggatttgtctgtcatggtactttttattttaaatatggttccatagtagtagataacattttaagata

SEQ ID NO: 27438 - DNA, 600 bp, Chicken  19866894244530_1
gataaatagtcaggctaaagcccttgctgagtaacacaactgctgaagaattggaaagaatgcaaattctgcatggttttgctaggaaaataatgatagcaaggagtattttgtgttttcactttaaagcaagaagctctagacctttggaaatgacatattgaagctatttctgacctgccctgtagccagtgtagccacaaggcatctgtgaaacagtccatttgatcgtgagagtcacatgagctcgcctcagacatcaggataaatacacagcaggtttggatcttttttcccctraagaggccagcagctgaagaagcctgacagcactgagcagcacagccagtcatgccatgcagattgctacagcttgcagaaaaccctggtgcttactttacaactccataaacaggatccaggaacatcagcaatgctccagaaattgacacgtctcacccagccagctaacacactcctgacaataacagaagtctcaaaatcagttctgttgcagtatttggctagcagaaacaaatatactacatgaaagaaatctagcccaatacatatttaaaggggaaggggagacaggaggga

SEQ ID NO: 27439 - DNA, 600 bp, Chicken  19866894244535_1
agaggaaatctaagaatatcatgctgatgaaattgttttagttctgttatctccaccagattttagtttctttgtgtggaggaaaagcaattcacaacacataatgggcacagtatagaaattgctttgtcttcttttactttctttccccccacacattttcacatcaagatggagccttagatgatcatgaaatacaagggaacaatagacatcagaaaattcattccagtctatctgaagtgtttctcagtggtaattacagccaactgcattttgcttctttctttcttctatatraagatcctgtcctaagttattgactgtaagacaattttgttgtggcggggcagagatgatttcagttcagaaatgcaacaactcggatagtttcagatgttactaagctatgcaatttacctgctctgaaacagaaacataagatctttactaagtgttcaagactcagacaccctgtagatttacagtaagccattatgaagttgcaatgcctcttctttcctgatatgcctagcattagatgacctacagtcacaagacagcagtccttgcagcccaagggacagcagtcacctcaga

SEQ ID NO: 27440 - DNA, 600 bp, Chicken  19866894244535_2
cctgatatgcctagcattagatgacctacagtcacaagacagcagtccttgcagcccaagggacagcagtcacctcagagcagcctgaagctgtggcgatctttgtatttaagcaaggactgaatgacagaatcaaaaattctggatgtgggacttgatctaagcatcatagaaatcactggcagttttacaacgacaagatcagtttttcatctgactgatttcgctgaaggaagtattggactctatttttgggcagactttggccatgtcagtaaattttccccatctttaccaacrtacttggcttgatggcagtgtagcccacagcataatgctctttcaracttgytgttgcagttctgatgtaaaatgttttgctttggagacatgtttaatgttttataccctagttacwctagctgaagtgttgttgagcacagtgtgatgcttattattttaatcgtgttaggcgccrtttagaaactaaattgtgtgcagttattgagggcactttatctctgaggtttgatttccccacctcctttaggagaataaaaggtttaaatgaagtaacctgtgcagaaggcactaagtgga

SEQ ID NO: 27441 - DNA, 600 bp, Chicken  19866894244535_3
ccttgcagcccaagggacagcagtcacctcagagcagcctgaagctgtggcgatctttgtatttaagcaaggactgaatgacagaatcaaaaattctggatgtgggacttgatctaagcatcatagaaatcactggcagttttacaacgacaagatcagtttttcatctgactgatttcgctgaaggaagtattggactctatttttgggcagactttggccatgtcagtaaattttccccatctttaccaacrtacttggcttgatggcagtgtagcccacagcataatgctctttcaracttgytgttgcagttctgatgtaaaatgttttgctttggagacatgtttaatgttttataccctagttacwctagctgaagtgttgttgagcacagtgtgatgcttattattttaatcgtgttaggcgccrtttagaaactaaattgtgtgcagttattgagggcactttatctctgaggtttgatttccccacctcctttaggagaataaaaggtttaaatgaagtaacctgtgcagaaggcactaagtggatgctagcagaacatcattgtttcttttcagagcaacagccaccacc

SEQ ID NO: 27442 - DNA, 600 bp, Chicken  19866894244535_4
agcccaagggacagcagtcacctcagagcagcctgaagctgtggcgatctttgtatttaagcaaggactgaatgacagaatcaaaaattctggatgtgggacttgatctaagcatcatagaaatcactggcagttttacaacgacaagatcagtttttcatctgactgatttcgctgaaggaagtattggactctatttttgggcagactttggccatgtcagtaaattttccccatctttaccaacrtacttggcttgatggcagtgtagcccacagcataatgctctttcaracttgytgttgcagttctgatgtaaaatgttttgctttggagacatgtttaatgttttataccctagttacwctagctgaagtgttgttgagcacagtgtgatgcttattattttaatcgtgttaggcgccrtttagaaactaaattgtgtgcagttattgagggcactttatctctgaggtttgatttccccacctcctttaggagaataaaaggtttaaatgaagtaacctgtgcagaaggcactaagtggatgctagcagaacatcattgtttcttttcagagcaacagccaccacctgattt

SEQ ID NO: 27443 - DNA, 600 bp, Chicken  19866894244535_5
actgaatgacagaatcaaaaattctggatgtgggacttgatctaagcatcatagaaatcactggcagttttacaacgacaagatcagtttttcatctgactgatttcgctgaaggaagtattggactctatttttgggcagactttggccatgtcagtaaattttccccatctttaccaacrtacttggcttgatggcagtgtagcccacagcataatgctctttcaracttgytgttgcagttctgatgtaaaatgttttgctttggagacatgtttaatgttttataccctagttacwctagctgaagtgttgttgagcacagtgtgatgcttattattttaatcgtgttaggcgccrtttagaaactaaattgtgtgcagttattgagggcactttatctctgaggtttgatttccccacctcctttaggagaataaaaggtttaaatgaagtaacctgtgcagaaggcactaagtggatgctagcagaacatcattgtttcttttcagagcaacagccaccacctgattttttatttttttttaatctaaagaagcacattttttatacctcacactctgctttcaggacacctgg

SEQ ID NO: 27444 - DNA, 600 bp, Chicken  19866894244535_6
ctggcagttttacaacgacaagatcagtttttcatctgactgatttcgctgaaggaagtattggactctatttttgggcagactttggccatgtcagtaaattttccccatctttaccaacrtacttggcttgatggcagtgtagcccacagcataatgctctttcaracttgytgttgcagttctgatgtaaaatgttttgctttggagacatgtttaatgttttataccctagttacwctagctgaagtgttgttgagcacagtgtgatgcttattattttaatcgtgttaggcgccrtttagaaactaaattgtgtgcagttattgagggcactttatctctgaggtttgatttccccacctcctttaggagaataaaaggtttaaatgaagtaacctgtgcagaaggcactaagtggatgctagcagaacatcattgtttcttttcagagcaacagccaccacctgattttttatttttttttaatctaaagaagcacattttttatacctcacactctgctttcaggacacctggacatgcataagtatctattttgcaatgtaaggatataatcaaatttccttctaaaagcat

SEQ ID NO: 27445 - DNA, 600 bp, Chicken  19866894244537_1
ttgtgcatgaaagccagtaagtaacaataaatagatgaagaatagggattgctaagccttcctcacactgctgttagtggtctttagaggatctgggaatatgggcttattcccagatgatttacctcccatttggcacacaaatgccctagtaatgatagcatgttaaaagtttactgatcagcctggcctctcccaggaggccaatgctgactgctcttgcaaacaatcattgtatgaaacaaacataatgtggttttgaagacatccaagggatgccattcaaaaattagtacaaayaggttctctgttttaagacacttgttctaaaaagttttgtcttacagatagtatgtggttattagttgttatgtagtttgaaatgctaaataaattcctgctgttttgtaattaacctatattttgagtgctgagtgacaggaatgtcaaggctgcatagtgtggtacaaccttattaagctgcctttgcagaaagccacaggacagagcattggagtttacttaaccagaatcttcctgtttgtgacacttgtagttgggtccaaaattaagaaaatggtgaataagcattaaaaaaat

SEQ ID NO: 27446 - DNA, 600 bp, Chicken  19866894244542_1
aagattccaagagattgtcaagattttacccatcactgggatgagtgaagttaagccgactggctcagcgttctgacctctgctgcctctttttgaaaaaattcatagttgtgttctccatgtcagatagttgagtggatcgagggagaagtttaactccttccagacatgctaatttaacttacgcattttcatatgtaaggggatccaaccttaacaagttatactgagtgagaagtgcacgtgtgtatcatctcttcagtacacaaaaggaatgcattaccacctctgtgctcccaragatgctctyayrtggtcgaagttccgggttctgagtttgcactgaaatctccttcagacatctccaaaagcacagcgtgacctatccaagtgcagagctggtagtgcacgtagcagtaagggctcctcaacagaggaacactgagctttgcagtcgtaatttccttgtctaaaacagttgttttgttacttcagccattaccgtattgaaacgtgaacacttttttcctcacataggtttcagtcggaaaaaaggaaagaggtaaaggattgttttacaaagccattcagaactgtcct

SEQ ID NO: 27447 - DNA, 600 bp, Chicken  19866894244542_2
gagattgtcaagattttacccatcactgggatgagtgaagttaagccgactggctcagcgttctgacctctgctgcctctttttgaaaaaattcatagttgtgttctccatgtcagatagttgagtggatcgagggagaagtttaactccttccagacatgctaatttaacttacgcattttcatatgtaaggggatccaaccttaacaagttatactgagtgagaagtgcacgtgtgtatcatctcttcagtacacaaaaggaatgcattaccacctctgtgctcccaragatgctctyayrtggtcgaagttccgggttctgagtttgcactgaaatctccttcagacatctccaaaagcacagcgtgacctatccaagtgcagagctggtagtgcacgtagcagtaagggctcctcaacagaggaacactgagctttgcagtcgtaatttccttgtctaaaacagttgttttgttacttcagccattaccgtattgaaacgtgaacacttttttcctcacataggtttcagtcggaaaaaaggaaagaggtaaaggattgttttacaaagccattcagaactgtccttgggcaaagg

SEQ ID NO: 27448 - DNA, 600 bp, Chicken  19866894244542_3
gattgtcaagattttacccatcactgggatgagtgaagttaagccgactggctcagcgttctgacctctgctgcctctttttgaaaaaattcatagttgtgttctccatgtcagatagttgagtggatcgagggagaagtttaactccttccagacatgctaatttaacttacgcattttcatatgtaaggggatccaaccttaacaagttatactgagtgagaagtgcacgtgtgtatcatctcttcagtacacaaaaggaatgcattaccacctctgtgctcccaragatgctctyayrtggtcgaagttccgggttctgagtttgcactgaaatctccttcagacatctccaaaagcacagcgtgacctatccaagtgcagagctggtagtgcacgtagcagtaagggctcctcaacagaggaacactgagctttgcagtcgtaatttccttgtctaaaacagttgttttgttacttcagccattaccgtattgaaacgtgaacacttttttcctcacataggtttcagtcggaaaaaaggaaagaggtaaaggattgttttacaaagccattcagaactgtccttgggcaaaggta

SEQ ID NO: 27449 - DNA, 600 bp, Chicken  19866894244542_4
attgtcaagattttacccatcactgggatgagtgaagttaagccgactggctcagcgttctgacctctgctgcctctttttgaaaaaattcatagttgtgttctccatgtcagatagttgagtggatcgagggagaagtttaactccttccagacatgctaatttaacttacgcattttcatatgtaaggggatccaaccttaacaagttatactgagtgagaagtgcacgtgtgtatcatctcttcagtacacaaaaggaatgcattaccacctctgtgctcccaragatgctctyayrtggtcgaagttccgggttctgagtttgcactgaaatctccttcagacatctccaaaagcacagcgtgacctatccaagtgcagagctggtagtgcacgtagcagtaagggctcctcaacagaggaacactgagctttgcagtcgtaatttccttgtctaaaacagttgttttgttacttcagccattaccgtattgaaacgtgaacacttttttcctcacataggtttcagtcggaaaaaaggaaagaggtaaaggattgttttacaaagccattcagaactgtccttgggcaaaggtaa

SEQ ID NO: 27450 - DNA, 546 bp, Chicken  19866894244542_5
ggatctgctcttagaggtttaaaagaagataaggatgaagaaaatacaaagccacttctaaaactaacacttagaactcttttcaaacaagaactcctttgtgacttgagtactgtgtgactccctctccgccccccaagtttttatacaagttgctaccaaaatggagttctatgtgcaagcattctgggatcaagtactgcacttagctcacaaaaaacacatccactcactgaagtagtgctgacttccacaggataccctcttacaaacatagccttgttgaacattgcccgcatytcttatcctattgtttgaagttacattccctagagttcagtagagattccatacatgctaactatagcttsgtgagccacacaggaaataaacacctgctcattgagtactccactctcttccaattggcagatctcagtaatttccttcrgcttggtatgcacrcttatataagtactgagtcacagcaagttacatctgttcatgaacagctggtaaaagccaaatcttattttcaacagacac

SEQ ID NO: 27451 - DNA, 475 bp, Chicken  19866894244542_6
tagaactcttttcaaacaagaactcctttgtgacttgagtactgtgtgactccctctccgccccccaagtttttatacaagttgctaccaaaatggagttctatgtgcaagcattctgggatcaagtactgcacttagctcacaaaaaacacatccactcactgaagtagtgctgacttccacaggataccctcttacaaacatagccttgttgaacattgcccgcatytcttatcctattgtttgaagttacattccctagagttcagtagagattccatacatgctaactatagcttsgtgagccacacaggaaataaacacctgctcattgagtactccactctcttccaattggcagatctcagtaatttccttcrgcttggtatgcacrcttatataagtactgagtcacagcaagttacatctgttcatgaacagctggtaaaagccaaatcttattttcaacagacac

SEQ ID NO: 27452 - DNA, 395 bp, Chicken  19866894244542_7
gttgctaccaaaatggagttctatgtgcaagcattctgggatcaagtactgcacttagctcacaaaaaacacatccactcactgaagtagtgctgacttccacaggataccctcttacaaacatagccttgttgaacattgcccgcatytcttatcctattgtttgaagttacattccctagagttcagtagagattccatacatgctaactatagcttsgtgagccacacaggaaataaacacctgctcattgagtactccactctcttccaattggcagatctcagtaatttccttcrgcttggtatgcacrcttatataagtactgagtcacagcaagttacatctgttcatgaacagctggtaaaagccaaatcttattttcaacagacac

SEQ ID NO: 27453 - DNA, 381 bp, Chicken  19866894244542_8
ggagttctatgtgcaagcattctgggatcaagtactgcacttagctcacaaaaaacacatccactcactgaagtagtgctgacttccacaggataccctcttacaaacatagccttgttgaacattgcccgcatytcttatcctattgtttgaagttacattccctagagttcagtagagattccatacatgctaactatagcttsgtgagccacacaggaaataaacacctgctcattgagtactccactctcttccaattggcagatctcagtaatttccttcrgcttggtatgcacrcttatataagtactgagtcacagcaagttacatctgttcatgaacagctggtaaaagccaaatcttattttcaacagacac

SEQ ID NO: 27454 - DNA, 600 bp, Chicken  19866894244547_1
cacttcaaactgctgcctatatgtacgtgttgggagtgcctgtgggatggaagtggtaaagttgcagtaaatgtagtcaaaagaagtagatgcatcaaagaaaacacattcgttttcaaaagggtgagtttatggcacagtttccacaacttccatggctggaaatggcacaagtaggaaagatctcttgctttgcctctgataattagatgacatttcctctgtagatttcctgtggtgaccaagaaaacattattccaagctgtattcttggaattacctaacttaaatgcataaaaytattttttacctgtgatcgcacatagcataccttgcacagtcttcaccacagaatgttttatgctggagtgaagaggctgaaggtaacacatgaaatttataaatgcattccattacagtgaaatataggctgaaagctaggtttacttcaaagtgtctaaataactttaaaaagatgcccaaataatctctccaagaaaaacaacaacaaaacaaccacatcatcatctggcccttccaaacctgttcaaaacaaagattgatgctaaaaaaagatacctcaagatatacttagccata

SEQ ID NO: 27455 - DNA, 600 bp, Chicken  19866894244549_1
tttcgaatttcagagaagatgaactttctgcagcatttcattagaaccttaaatctgcttcatttccctgtatggttagtgatcactgctaatggccatagctcttttagtctgtgacttctttcgtcttggttcctattgctaatgcattccctaatgctattacaaaaaccaaaataccacccacaactcgatctttaatgctctttacctcctgtccagctagcactggaatttgtatttattaaaaaacaataattccatgtgatcataatggcttttatttaagtgatcaatgcygataggctctgwgttggagtaccatctgtttgctactgtgggcatttcactgtatgacccttaaaaatacagtgtcagtagggtagagctgacaaactgtagcctccgtttccctttcttacccaattctaattaatgttagttccccactttatagtttacttgtacatctaatgcacctcttaaaactctttggactttaagctctcttcttgtgtttcctggagctgagaccctgatggattcatggttatatcatgaaagaaatgtgtgctttttttttctctccgttattgatga

SEQ ID NO: 27456 - DNA, 600 bp, Chicken  19866894244549_2
gagaagatgaactttctgcagcatttcattagaaccttaaatctgcttcatttccctgtatggttagtgatcactgctaatggccatagctcttttagtctgtgacttctttcgtcttggttcctattgctaatgcattccctaatgctattacaaaaaccaaaataccacccacaactcgatctttaatgctctttacctcctgtccagctagcactggaatttgtatttattaaaaaacaataattccatgtgatcataatggcttttatttaagtgatcaatgcygataggctctgwgttggagtaccatctgtttgctactgtgggcatttcactgtatgacccttaaaaatacagtgtcagtagggtagagctgacaaactgtagcctccgtttccctttcttacccaattctaattaatgttagttccccactttatagtttacttgtacatctaatgcacctcttaaaactctttggactttaagctctcttcttgtgtttcctggagctgagaccctgatggattcatggttatatcatgaaagaaatgtgtgctttttttttctctccgttattgatgatgaacagcagat

SEQ ID NO: 27457 - DNA, 600 bp, Chicken  19866894244549_3
gctcctggagagatgcagagaggtgttcatgtctgaaatatctcctgactgaactctcttgctctggaccatacttcttgaggtccatcagagggggaacggcgaagccttagtggacctcttacatccaaaagcctgttaaagattctttgtttagaagcagtcttcgtgctgtcagaccagccatgttcctggccttgtcagagcctctgagatatttgcttctgtacatctttcacagaaaaacactctgcttgaattgccagtacggctgtttcccctcccttctttctaataccrgcagccatttagtgctgttccctgaactggcaggatttctgagaaactagcagacaccgctgcctaagtttaatctgtttctgtccccaaggccttttcttctaacrtatgaaacaagaagatgcacttgttagtaacagagtttttactattagtgatgttgttccaactctggtggagctgacaaggaccatctgaagttggttcatagaaacgtgggtaggcaggagagggtctgcatagaaggggcacttagaaagtgcagtgggcaggaggaaaaggaagaaagagagagctggg

SEQ ID NO: 27458 - DNA, 600 bp, Chicken  19866894244549_4
ccttagtggacctcttacatccaaaagcctgttaaagattctttgtttagaagcagtcttcgtgctgtcagaccagccatgttcctggccttgtcagagcctctgagatatttgcttctgtacatctttcacagaaaaacactctgcttgaattgccagtacggctgtttcccctcccttctttctaataccrgcagccatttagtgctgttccctgaactggcaggatttctgagaaactagcagacaccgctgcctaagtttaatctgtttctgtccccaaggccttttcttctaacrtatgaaacaagaagatgcacttgttagtaacagagtttttactattagtgatgttgttccaactctggtggagctgacaaggaccatctgaagttggttcatagaaacgtgggtaggcaggagagggtctgcatagaaggggcacttagaaagtgcagtgggcaggaggaaaaggaagaaagagagagctgggagcaataatacggagtaaaaaactgtgtcataacagaaggaacaattgttaaagtttaacagaagaaaattgtttgtgctacctgtggcattctttgctgcgggggc

SEQ ID NO: 27459 - DNA, 600 bp, Chicken  19866894244553_1
ggttgtggagtctccttctttggagatatttacctggacactttcctctgcaacctcctctagggaacctcattcagcagggacttggactagatgatctccagaggtctcttccaacttctgtggttctgtaattctgtgactgtgatcgtcatcctattgaaagaaataaaactacttctatatgtctttagtctgagttactcttttcttggagttactgggtggaagtgctgtttaaatgttattttgttgctctatacattctagagaatttgtaatggctggagatttaacaaytctttttctatattttctcagttgcttgtggtattttacctcattttacttttagtattatattttcttgaggatcattctgacctatggagtttgacagatatgcrcattatagcatctaaattgcagttgttctccactacttaaagcccagctagaactgaacttggccactaaggtaaaggaaaacaataaatatttttataaatacatcaacagtaagaggagggctagggagaattgccatcccttgttggatgctgagggcaacttggtgaccaaggatcaggattaggctga

SEQ ID NO: 27460 - DNA, 600 bp, Chicken  19866894244553_2
tctcttccaacttctgtggttctgtaattctgtgactgtgatcgtcatcctattgaaagaaataaaactacttctatatgtctttagtctgagttactcttttcttggagttactgggtggaagtgctgtttaaatgttattttgttgctctatacattctagagaatttgtaatggctggagatttaacaaytctttttctatattttctcagttgcttgtggtattttacctcattttacttttagtattatattttcttgaggatcattctgacctatggagtttgacagatatgcrcattatagcatctaaattgcagttgttctccactacttaaagcccagctagaactgaacttggccactaaggtaaaggaaaacaataaatatttttataaatacatcaacagtaagaggagggctagggagaattgccatcccttgttggatgctgagggcaacttggtgaccaaggatcaggattaggctgaggtacttactgccttctttgcctcagtctttaatattaagacttgttactccctgggaacacagcccctcgtgatggtagatagggatggggaacagaataagctct

SEQ ID NO: 27461 - DNA, 600 bp, Chicken  19866894244558_1
gcttgttgaaatgcttactgatactgctggcaaatccctgacatggcatgaccatggctagaagagaagtcagagcctcctagaatcatacttactctgcagccatggcatatatattattttcttaaatagtaagatgtgagagtcagtgtaacaaagaatgtgttgtctgtgtcctcctatttaaaaatatatcgtgttaatgtaaacatgaccaccagactaacagataaactaggctttctggtagcacctataaaaactagtaaacatgtgtgaggaaagtggtagaaatcaagwaaagaatctggaaaattctagttagttagggctggactgtcagtcttttggaaatggggagaggaagatttttgcctcagactatctgaaaaatgtgagagttcaaatgtaaacaagtctgagatgcatgggctttctgcatgtagcctatttcaagacttaaatcaatcaacatgcatttgaggcagaaacacaaattgtgatctgtattaaaaaaaaaaaaagcaccagagaatacaraaaatatagatatcagtgttatctcaagggagagaatacagcaagcttggactcatcatc

SEQ ID NO: 27462 - DNA, 600 bp, Chicken  19866894244558_2
tttctggtagcacctataaaaactagtaaacatgtgtgaggaaagtggtagaaatcaagwaaagaatctggaaaattctagttagttagggctggactgtcagtcttttggaaatggggagaggaagatttttgcctcagactatctgaaaaatgtgagagttcaaatgtaaacaagtctgagatgcatgggctttctgcatgtagcctatttcaagacttaaatcaatcaacatgcatttgaggcagaaacacaaattgtgatctgtattaaaaaaaaaaaaagcaccagagaatacaraaaatatagatatcagtgttatctcaagggagagaatacagcaagcttggactcatcatctcaaggggtgttgtaaagctgaaaatagataaaaacacagagaatgtttagagggtttggaagaataggcaatttaacagagtggtaagtgagactactgaagtgtgtagtttataatgctgacaatcagggcagttgaaaggtgacaaatcagaagctgaagaattggcagtgtctctattatgtgttagtgagctccataaacttgagaagaatgagtgtgtggaagagcagagatag

SEQ ID NO: 27463 - DNA, 600 bp, Chicken  19866894244567_1
ctgagtgccacaccagtgccgccccaatgccttcctctcaatatacaatggggcatctcctctggatgccaaaccccaaaacgacacagcgaagtgcatgtttcttggaagcagtgggtgggatctgaggtggttttggtttccccaatggtctttgtagctttccagtaacttgcacttccccttcctcggatgactaagccacagtctggtttcctacccagcagcattctctgccattcttttcgttctcttccatttgcttttctggttgtttctgctgtagcccccaatgggcayaacggatgggtgcgcatcgatgggtcctgccctactgtgctcactgcagggtgtccggacccatccttgctcagtttgctctcccatttctccagtacaggggagatcctcgctcacaccctgaaggccttcatggagctgatggagcacgatttcgtctcctgggagactcttagtgcagccttcatcaaaaaagtacacaactcctgtgccgtgggctgcccgtgttgatgctgacacccgcaggctcgacctgccttgtactgatggtttctgttattgtagatcgtgagttatgtc

SEQ ID NO: 27464 - DNA, 600 bp, Chicken  19866894244568_1
gcgtcggcgggaggagaacctcagaaggcggctggagaatgagcggaaggcagagattgttcaagtggtgagtccagaactgaatgcagggctcttgtttgctttgactccttctccagtacctcccctacctccaccccggctctagaggggctgggggaggacagttgcagctccccatgacatcactccaggagtgacccatgagatgacagggcaagggatatggggcaccagcagcgctccaagcatgtgaggctttggcagggcttctctaccttggagagacctggcggtggyggggtaaagggatgtgattgtctgctgttccttccctcccatgcaagagctgggggagcccggagacgttcctgggagttttaggataaaacgctgcctttccacctacctgaaagctgcctccttctgccccccagatccgcaacccaatgaagctcaagcgggcgaagaagaagcagctgcgcagggtggagaagcgggacacgctgggcatgctccagaaggcgcccgtgaggtgcaaagcagctgcagagtgaggctggagttctgcaggtcctgccgctctctggggcctcagct

SEQ ID NO: 27465 - DNA, 600 bp, Chicken  19866894244568_2
aaggcgcccgtgaggtgcaaagcagctgcagagtgaggctggagttctgcaggtcctgccgctctctggggcctcagctctgaatggacagcaggatggaaaaggatccagctgctgcgcgccccgtcttgtgaaaccaggctgttgtcagtgcctggggctggactgagaactgcacaaatctacgttttcttcattaaaagcaaagaggaattgctccagcctcgccttcagggaggcttctgtacctctggggtcacagcaccgtggccccttgcccctggggctccatttcctctrggagaggccttgctcctgacaaggagtgatggggtgggggcacctccactgtgtcgcagagcaagtgagcacaccrcagccttctgcctcccctcctgggctgggggacagtggggaggtgggaagaaggaaggggcttggagctggaagcccatgtgcacctcttcacgtctgtggttagatttcttgctccatgagcgcccatttctgctgctgcgtttccctgtgctgagctgaacgagcagttgctggagggagccatccccgtgcaccctgggcagagggaagcacggggagtta

SEQ ID NO: 27466 - DNA, 600 bp, Chicken  19866894244568_3
gctctgaatggacagcaggatggaaaaggatccagctgctgcgcgccccgtcttgtgaaaccaggctgttgtcagtgcctggggctggactgagaactgcacaaatctacgttttcttcattaaaagcaaagaggaattgctccagcctcgccttcagggaggcttctgtacctctggggtcacagcaccgtggccccttgcccctggggctccatttcctctrggagaggccttgctcctgacaaggagtgatggggtgggggcacctccactgtgtcgcagagcaagtgagcacaccrcagccttctgcctcccctcctgggctgggggacagtggggaggtgggaagaaggaaggggcttggagctggaagcccatgtgcacctcttcacgtctgtggttagatttcttgctccatgagcgcccatttctgctgctgcgtttccctgtgctgagctgaacgagcagttgctggagggagccatccccgtgcaccctgggcagagggaagcacggggagttagctgtggatgcaacatttgtaggttctccactggagcaggcggagctccccactgctgcatcaccaccccccagca

SEQ ID NO: 27467 - DNA, 600 bp, Chicken  19866894244572_1
gtgccttcatgtctagaggttctgtccgttaaatcagaatgcagaaggtggagagttaggaatggagaggaaagacatgtattttaaaggagcatccagcaacaagttattagtcagcctagctcactgctgtcagttatgttcctcagtcccccagtaaattctgttcattatgatcaaccaatgccagtgtgccatgtcagttttagaggtgatgttttttctcctgataacaattacaaccaggatttatatgtatgccttttctttttttaattgttttatgttgtgaaatgcacraatgcctttcaggagtagctctgcatacaggagctgttctgaaacacttgtgaggaagtgggaggcaatttactgtactcctcacatttggtttaaatagaaagaagtgggtggcttgtgtaccaggagccagtgcattgtgaacaaactttgcagctgcattttatgaccctgtgttattcttcagtatgaagaatcttggtgcaccaacgaatgacagaataactgcgggggggttaattgccaaagtaggataactgattaaacaaaaatgagtttaatgctaatcagacttctgtg

SEQ ID NO: 27468 - DNA, 599 bp, Chicken  19866894244575_1
  misc_feature (1)..(88): n is any nucleotide
nnnnnnnnnnnnnnnnnnnnnnnnnnnnnnnnnnnnnnnnnnnnnnnnnnnnnnnnnnnnnnnnnnnnnnnnnnnnnnnnnnnnnnnntcagaacagttttttgtttgtttgtttttttgcttctatttcatattgtggctgtgttttgatattctatttctttatttgttttgctcccgttgaaaaaaaaaacccagttcgtacatatttaaaattgatccaatttaaacctatttttgagtgccacttttaccagtttcatttcctttcaaggggaaaggtatttgaatatatctgaygggcttttctgaaattaaaattcctaaattcatcagagttttctgttgatggtagatgttcattttctacaagagaatagctcaatattttcttatctcaaaattctctgacattcattttatggtataaaacaaagtatagcaaaataacattttcagtaactccgcaggaagactaaagtctaatctgctgagtaatgaagaaaggtaggagtcattttaattgtctatggacaaaaagatggataaaatcagggtaaattgggtctcaaaaatggattcctattaaagccaaggaa

SEQ ID NO: 27469 - DNA, 600 bp, Chicken  19866894244575_2
ataacattttcagtaactccgcaggaagactaaagtctaatctgctgagtaatgaagaaaggtaggagtcattttaattgtctatggacaaaaagatggataaaatcagggtaaattgggtctcaaaaatggattcctattaaagccaaggaagtgatatatcacatttctctttgtgaagacgcacaataaatcatgagaaaagttgtgcttgtccattggagaagcaacatggaatttctccgtaagtagctctatctactgttaggttatacatcttattcattgattgtgcctatrcagcctgtacactacactccctataagcctgtacaccygcttgtatgctagctcaggtctgccatgggtcttgtagatgtgcagatgcagataggcaggaaaagcagtgaactggtcccagtccagtcttcatctttgcaagtactgctgacacaaccagactgaatttcttggtggagtacattttaacttgcattaggacattaccagcaactacatccgtgtaaccaaactcatcctatctgaaatcattatcattcttaacaattctatatagccctacataggagttcacaacca

SEQ ID NO: 27470 - DNA, 600 bp, Chicken  19866894244575_3
aatctgctgagtaatgaagaaaggtaggagtcattttaattgtctatggacaaaaagatggataaaatcagggtaaattgggtctcaaaaatggattcctattaaagccaaggaagtgatatatcacatttctctttgtgaagacgcacaataaatcatgagaaaagttgtgcttgtccattggagaagcaacatggaatttctccgtaagtagctctatctactgttaggttatacatcttattcattgattgtgcctatrcagcctgtacactacactccctataagcctgtacaccygcttgtatgctagctcaggtctgccatgggtcttgtagatgtgcagatgcagataggcaggaaaagcagtgaactggtcccagtccagtcttcatctttgcaagtactgctgacacaaccagactgaatttcttggtggagtacattttaacttgcattaggacattaccagcaactacatccgtgtaaccaaactcatcctatctgaaatcattatcattcttaacaattctatatagccctacataggagttcacaaccagctcaatgattatggagttcaccatgaagcaataattt

SEQ ID NO: 27471 - DNA, 600 bp, Chicken  19866894244575_4
ttgtatgctagctcaggtctgccatgggtcttgtagatgtgcagatgcagataggcaggaaaagcagtgaactggtcccagtccagtcttcatctttgcaagtactgctgacacaaccagactgaatttcttggtggagtacattttaacttgcattaggacattaccagcaactacatccgtgtaaccaaactcatcctatctgaaatcattatcattcttaacaattctatatagccctacataggagttcacaaccagctcaatgattatggagttcaccatgaagcaataattttygagagcaagtgccaaagtcaaaacaaagtaactacagatgtcacttcataatgcctaaacattctgaacttttggctatgaggttgtcgtatgtctggagaatcaaaatgaaatttgtgtgatttgactgagactgcagcaagggaagatggtacttaaggtctctatttctcagtttccctgtctagagggtgaaactggtcaagaaaatgttactctttgactttttttttttttttttccaggacggagatcatgaaagatgtgtgccccaattttttccagttatttaagaataaa

SEQ ID NO: 27472 - DNA, 599 bp, Chicken  19866894244581_1
  misc_feature (1)..(156): n is any nucleotide
nnnnnnnnnnnnnnnnnnnnnnnnnnnnnnnnnnnnnnnnnnnnnnnnnnnnnnnnnnnnnnnnnnnnnnnnnnnnnnnnnnnnnnnnnnnnnnnnnnnnnnnnnnnnnnnnnnnnnnnnnnnnnnnnnnnnnnnnnnnnnnnnnnnnnnnnnnnnattgctatcgtgttaatataaataaaatctaatcagcatttggttgtcttcattaagaagaaaaataaaaacatctgaaaaatactgctgtttaaatttaatgcccagtaagagaaatgagatgaatttttcattcactaaagygatctctttacctggctaatgccactaaatattaaacacgtaatgcaagttttattacttttcgagaattacagtaataaattgcaaggaaactgcactgctatgtattttagcttctctgacatttcaaatatatttttgttaatctagcagaaatcatttgctagactgtaaagccaccctacataacacacaactgttaaaatgtaaattgccaaactatttttagctgttgctgaagggctggggttgggggagggaaaaaaaaaaaaaaggaaaaaaaagaaaaggaagaaaaa

SEQ ID NO: 27473 - DNA, 600 bp, Chicken  19866894244584_1
agtgatgatgatgcatcctctctatgctgctactcaagctgggtgtaacgagtcacaaaccctgttaagcaattcagtgtcacatttttgggtaagcaaacacccaaaccacagatctttggcaagaacaggtcggtcctcagtgatggaatgaaaacactgcttacaattcactttcctgatggaatcaaactgaagtcttcagaagcccattgggaagagctctggattgcaagggcggctctaaaggaaaaccctgcgaaacaccatctagaaaccaaaaggcttttacaccactayccaggaaaacctttcgtgggaagcaactcagaggctcctggaagtggtttgtgtctctccttgttgactgtgaaaataagttcccaggagggcaccagcacttttaacaaacaaacacaktgaacaaaaacaaataaacaagaaaaaccaaaccaacccacaaacaagaaataccagccagagttaccttatgtttttccacatgacagttaccattcagttactctgaataaaaaacgcttccacttcaaagacagaaaaagctattatgtccaaatcacacatttattcatagacaac

SEQ ID NO: 27474 - DNA, 600 bp, Chicken  19866894244584_2
ggcaagaacaggtcggtcctcagtgatggaatgaaaacactgcttacaattcactttcctgatggaatcaaactgaagtcttcagaagcccattgggaagagctctggattgcaagggcggctctaaaggaaaaccctgcgaaacaccatctagaaaccaaaaggcttttacaccactayccaggaaaacctttcgtgggaagcaactcagaggctcctggaagtggtttgtgtctctccttgttgactgtgaaaataagttcccaggagggcaccagcacttttaacaaacaaacacaktgaacaaaaacaaataaacaagaaaaaccaaaccaacccacaaacaagaaataccagccagagttaccttatgtttttccacatgacagttaccattcagttactctgaataaaaaacgcttccacttcaaagacagaaaaagctattatgtccaaatcacacatttattcatagacaacatctctgtcacacaatgaagtccatggaggaaaatgcatttctaccttcagaacaaaaccttggggacaagcagggtccagccaactttatctggatatctcccttttatttaaaacaaa

SEQ ID NO: 27475 - DNA, 600 bp, Chicken  19866894244594_1
ggatgaaaacaaacccatgtcttgaaccaacacttaggaaagcacctctgctttatgaacatgtgacaaaacaccacaaaaccccacaccctacatcatgacagtgaaatatatgccagcaaattaagaaatgcaatgttgatatttatgccccggaaaggaccacatctgtagtgggtatcccatcccaacaccctgcaatggcatcacatcatcccctccagaaggaagcccaggtctccatggaaagagcccaaatgctggagaagctctcagttagccaagaaaaaccaccgcccyggctacactgcttcccagcaaagcccagtgctatttaatcttcagtaaactggagccaycatccaccatcctgctctgcttgtgtctacaggcctgaagagccccatagctctccagtcttctctgctgggctccctagctcttggtaatgagattagaaagcatcacacggtcaaagggcaaagtgctcttggaggagatttcacaacaaaagtatgacatgtagggcatgaacccatcattccattaagtgctcaactacaagagaaggaggacagctgctgaattctggcacaactg

SEQ ID NO: 27476 - DNA, 600 bp, Chicken  19866894244594_2
catgtgacaaaacaccacaaaaccccacaccctacatcatgacagtgaaatatatgccagcaaattaagaaatgcaatgttgatatttatgccccggaaaggaccacatctgtagtgggtatcccatcccaacaccctgcaatggcatcacatcatcccctccagaaggaagcccaggtctccatggaaagagcccaaatgctggagaagctctcagttagccaagaaaaaccaccgcccyggctacactgcttcccagcaaagcccagtgctatttaatcttcagtaaactggagccaycatccaccatcctgctctgcttgtgtctacaggcctgaagagccccatagctctccagtcttctctgctgggctccctagctcttggtaatgagattagaaagcatcacacggtcaaagggcaaagtgctcttggaggagatttcacaacaaaagtatgacatgtagggcatgaacccatcattccattaagtgctcaactacaagagaaggaggacagctgctgaattctggcacaactgtactgctcagaaacggcaagcaactgatggaacaaaccttgatggagaaagaccccaaa

SEQ ID NO: 27477 - DNA, 600 bp, Chicken  19866894244597_1
aggtttaaaattaaagctgcagatgtgaacactccctatcattccatagtggcacatagacctattcctgtttctaaatcagctgaagaaattcatgctacttaggggagcaaagaagagcaagttcttcaaatcactcctcgctcctcttcagacctatagctcattactgcacctcttcacttcccctcctccaggataaaaataacagtactgaagagttgtaggaagtcattgtgagctactgatacattttttatgacaccactgagtaattcagtttcccaccttgagtgtttkgttttgtttttacaatagtgccctataccctaactctcatgtcatttttatttccaagtaattaattgaccgattttagatatatataaaatccatatccttccttgcaagtcaaaatctatttaactatcaactacaccctcacatcatgtctttaattttttttgccgttatgaacttcagagagagcagcctttgttctcattctctgagatgcctcactgaggacagacctcaccagctataaaatgttacagctcataaccagattcaaaagaaactacagcagtttctgtaagg

SEQ ID NO: 27478 - DNA, 599 bp, Chicken  19866894244604_1
  misc_feature (1)..(18): n is any nucleotide
nnnnnnnnnnnnnnnnnntatttaataaaccttttctatgattctgccaaaatcagaaagactataacttatcttttaacacgtggatgatgatgtcttctggttccttcagcataacttgatccagtatttccagcagaccttctttaagcacgtgtagagtggagcagaattaatgtgtgacattcaggtacttaataaatcattataaaattcctcatttcaagaggaatattatgaagcatagagtaccatatgcatacgttaaagtttccagaattataagaaataaaacaagcrcaagtatctgatttggtttcttctaaggtatattgaaagtgccattgaaatcagatctacrttttgagggtatgcctrgagcagtgctccgcataataaatgtcagtcctgaatccatgtatggaatgaattatgaatgtgccagttttgaaacttctctctctcactttttaatttttcctcacaggttactcaagatgatgttgtaatggcagaaaggctctttggcattctggcatatgtagcatcttctgagctgccccgttatcgcttgctttcttcctttggagaatctgggt

SEQ ID NO: 27479 - DNA, 600 bp, Chicken  19866894244604_2
ctataacttatcttttaacacgtggatgatgatgtcttctggttccttcagcataacttgatccagtatttccagcagaccttctttaagcacgtgtagagtggagcagaattaatgtgtgacattcaggtacttaataaatcattataaaattcctcatttcaagaggaatattatgaagcatagagtaccatatgcatacgttaaagtttccagaattataagaaataaaacaagcrcaagtatctgatttggtttcttctaaggtatattgaaagtgccattgaaatcagatctacrttttgagggtatgcctrgagcagtgctccgcataataaatgtcagtcctgaatccatgtatggaatgaattatgaatgtgccagttttgaaacttctctctctcactttttaatttttcctcacaggttactcaagatgatgttgtaatggcagaaaggctctttggcattctggcatatgtagcatcttctgagctgccccgttatcgcttgctttcttcctttggagaatctgggtaaatttgttgttaacattcaagaaggagtgcagaggctgtgttgttctttaaataatacaga

SEQ ID NO: 27480 - DNA, 600 bp, Chicken  19866894244604_3
acacgtggatgatgatgtcttctggttccttcagcataacttgatccagtatttccagcagaccttctttaagcacgtgtagagtggagcagaattaatgtgtgacattcaggtacttaataaatcattataaaattcctcatttcaagaggaatattatgaagcatagagtaccatatgcatacgttaaagtttccagaattataagaaataaaacaagcrcaagtatctgatttggtttcttctaaggtatattgaaagtgccattgaaatcagatctacrttttgagggtatgcctrgagcagtgctccgcataataaatgtcagtcctgaatccatgtatggaatgaattatgaatgtgccagttttgaaacttctctctctcactttttaatttttcctcacaggttactcaagatgatgttgtaatggcagaaaggctctttggcattctggcatatgtagcatcttctgagctgccccgttatcgcttgctttcttcctttggagaatctgggtaaatttgttgttaacattcaagaaggagtgcagaggctgtgttgttctttaaataatacagatactgactgaaattgca

SEQ ID NO: 27481 - DNA, 600 bp, Chicken  19866894244604_4
ctctctctcactttttaatttttcctcacaggttactcaagatgatgttgtaatggcagaaaggctctttggcattctggcatatgtagcatcttctgagctgccccgttatcgcttgctttcttcctttggagaatctgggtaaatttgttgttaacattcaagaaggagtgcagaggctgtgttgttctttaaataatacagatactgactgaaattgcaacgcgtgtttctgagcgaacgaagttttcttgtttagctccttttgtttttctgttattattttggaccatccttgarttccttttttgtaaaagatacatattggtactgttaatgaaccttgaagaactgcatgcattagaacataaattccgtaaactgagatgagatttgtctgaatgaaatgtactgtcactttaatggtatactattatagcagttagaacaatgaaattaccatattacactgacatttcagagaaactgtatgtagacaaaatacaatgaactgaagtagaatttgtctggaatgtattgttttaattttccaagatgtcattcatgataaattctttctaggtaaagagataaaaatgt

SEQ ID NO: 27482 - DNA, 600 bp, Chicken  19866894244613_1
tgtcgtgcagtgtttggtgaggtgacagtgtatgaattatttatgccaataaaaaacactttgaaaacaagtgtgtccccttccagctgcgccgtggggctgccatgtgtcacccgtggtgtgtgtatccctgggggggggggggggtgcatcagtccctccatccatgttccagtggcatcccagtctccacctttggtgctcggaatggagaccctgccttgccctcctcatcctcatcgacatcacactgcctgttctcagctctttggggatgatgatggatggtggagcatggtrcatcgggccatcaatctgggctgggtgctgctgggggtgcgtgtccccgctgggcccccccacggcaggctgagccccatgggctgtgcacatctgctgtgctgtttgctcgctgctcccttgccatcaatctgcccaacctcccggtggagcgtggcagtgggggccctatgggaggggatgcaggggaaagctgcagtcggtttgtgctgcttcctcctccccagccccttcccacctcgctgtcacccgggtgcttgaaaggtaaaataatgatggctcgccattaataacccatga

SEQ ID NO: 27483 - DNA, 600 bp, Chicken  19866894244621_1
atgtgggtactgtttacatgtcttttagggtctgtgtctctctcccactccaaggcatctttctgttttccgactgacgcagaccagcccaatccttaagccaacacacctgcaggagctgtatattctgtgtagaggtgggaacaagctgcccacagagggcatccagcacagagtatcactgctgctggccccttaaaggcaaaccccacccttcaagcagggagtgccagaaaagcagatagatttgactgcatgcaatgagcacgcaggcatgggagagggcttgctcaccctaaygcttcccaactgctggggtctgggcagttgcctactgacccacgttcaatgggctggtttctgtagatctcattctgagccctttaccattcctcaggtgcggcaggaggagcctaaacatagccttgtgtctgagctgactcctaaggggggggcactgcagcacccagacccccactgcatcttgctctgcacagcagggagccacagtctggtgattaagcgcaggcttgggcactggttwccactgccaattccaatattgacatcttgtgttattaactgatactcacagacaaa

SEQ ID NO: 27484 - DNA, 508 bp, Chicken  19866894244621_2
gatttgactgcatgcaatgagcacgcaggcatgggagagggcttgctcaccctaaygcttcccaactgctggggtctgggcagttgcctactgacccacgttcaatgggctggtttctgtagatctcattctgagccctttaccattcctcaggtgcggcaggaggagcctaaacatagccttgtgtctgagctgactcctaaggggggggcactgcagcacccagacccccactgcatcttgctctgcacagcagggagccacagtctggtgattaagcgcaggcttgggcactggttwccactgccaattccaatattgacatcttgtgttattaactgatactcacagacaaaaaggacatcgatggtttaccacttaagcacacttaactcttaaaagagaaggctattttctcaatgagtgctcctggcatttaacattatcagcattctgcagtctcctatttagtagcatttccttacacgctgctttctctttgcctcat

SEQ ID NO: 27485 - DNA, 600 bp, Chicken  19866894244623_1
acaactgtggacagctgaagatcaactccattttctgaacgtcctacaccatcattccaggccagagtgtaaactcttctactgcccagtgcagcatccatgtactaagtgactctaaaccaaaccttcatagaatcacagaatggcctgggttgaaaaggaccacaatgctcatctcgttccaaccctttgctatgtgcagggtcgccaaccagcagaccaggctgcccagagccacatccagcctggccttgaatgcctccaggggcatccacagcctccttgggcaacctgtcccartgtcacactacraaacaatttctgctacaaggaatgtccattcaatgctgaacatctgctcacacagaaagacaaaacaaacaaacaaaaaaaaaaagaatgaggaagaatcgatgtaagagtgccatctggtgacatctgccataaccttgtatcatagacagcatcttctctgcagtgcagagtggaaaaatttagggacaaggtccatttagggacaaggtccacaacaccagaggaaacagttctacagaacaggtccttctgctccaagaaattaggtgactcatgttggtaaca

SEQ ID NO: 27486 - DNA, 600 bp, Chicken  19866894244623_2
agctgaagatcaactccattttctgaacgtcctacaccatcattccaggccagagtgtaaactcttctactgcccagtgcagcatccatgtactaagtgactctaaaccaaaccttcatagaatcacagaatggcctgggttgaaaaggaccacaatgctcatctcgttccaaccctttgctatgtgcagggtcgccaaccagcagaccaggctgcccagagccacatccagcctggccttgaatgcctccaggggcatccacagcctccttgggcaacctgtcccartgtcacactacraaacaatttctgctacaaggaatgtccattcaatgctgaacatctgctcacacagaaagacaaaacaaacaaacaaaaaaaaaaagaatgaggaagaatcgatgtaagagtgccatctggtgacatctgccataaccttgtatcatagacagcatcttctctgcagtgcagagtggaaaaatttagggacaaggtccatttagggacaaggtccacaacaccagaggaaacagttctacagaacaggtccttctgctccaagaaattaggtgactcatgttggtaacacaaaattggtag

SEQ ID NO: 27487 - DNA, 600 bp, Chicken  19866894244624_1
tattttgttatcaccatttataagcatttgtattaactaggaaaatcttcaccaagggaaagtccaggacttgaacgtgtggaagccagatgttgcattcattatagtgacattagatgttgattagtaaacctgagagttaaagcaataaaagcagctctgggaactgataaagggatgcgacttccagcactgaagttcttcaagctgttcagaaacttgaatttcattagtaaggtctgctagcaatgttcttccccgtatttgagttgccactgtgttcacaaacctccacacaaygccttgcaccagaacaggtgttagatagcacagtcagacaggtatttaagtggtgcatgggactctgatgcacctcaccagaagcaactaattgatgttttgccatcctggtggttctggcctccaccgtgccatattttcagatggtgattaacaaaatcagttggcctaagagaggtgaagcctgctgtttcacagtggggggctgttatttcatagagtagaacaagcggttccttgttcatttgtaagacaagttgatttattgccttgaagggagaggattatgggcctgtaata

SEQ ID NO: 27488 - DNA, 599 bp, Chicken  19866894244637_1
  misc_feature (1)..(239): n is any nucleotide
nnnnnnnnnnnnnnnnnnnnnnnnnnnnnnnnnnnnnnnnnnnnnnnnnnnnnnnnnnnnnnnnnnnnnnnnnnnnnnnnnnnnnnnnnnnnnnnnnnnnnnnnnnnnnnnnnnnnnnnnnnnnnnnnnnnnnnnnnnnnnnnnnnnnnnnnnnnnnnnnnnnnnnnnnnnnnnnnnnnnnnnnnnnnnnnnnnnnnnnnnnnnnnnnnnnnnnnnnnnnnnnnnnnnnnnnnnnnnnnccaactcataggcctattaatggtgagatggggaggttttccataagcagaatgatagagsattatcgtatgttacattgcactggtgtggcctcacttcaagcacagcgtgcatttttggacaccacgatgtgagaaggacataaaaccaatagtgggcctccaaaggagggctatggagatggtgaaggatatagaggaagatgtgaggagcggtggagatcccacagtttgcttggcccagagcagaggcctgagggaatggcatggagggccaggtgggggttagggaaaggctttgccccggagggtggtgggcacagccccaggctgccatggttttagatatacagctggaat

SEQ ID NO: 27489 - DNA, 600 bp, Chicken  19866894244637_2
tgtgagaaggacataaaaccaatagtgggcctccaaaggagggctatggagatggtgaaggatatagaggaagatgtgaggagcggtggagatcccacagtttgcttggcccagagcagaggcctgagggaatggcatggagggccaggtgggggttagggaaaggctttgccccggagggtggtgggcacagccccaggctgccatggttttagatatacagctggaattctgggcggtcctatgttggagacaggagttggactcaatgatctctgtgggagcatgctatcttggaaygttctaggattgctaaagcaattaaagtaactatctcagaattacaatatgaaatgctaagtgaaatatttaggctctgtctgctatgtttcttccctacaatctggacggtgataccaccacatagttgggagttacagcacaaattcagctcaaaaatgaaagtctctggtaattaatttattgagagcagtaatccataagctgtgttttagcacatatttcagagaagaggaacacttgcaaatataagaaataatggtactaaactctgctctatcagaagactgaaattacaca

SEQ ID NO: 27490 - DNA, 600 bp, Chicken  19866894244638_1
cgatcaccaattaccaaataattccagagacttacctgtgaactgacactattaagatcttctttaaggtatgtctaaatggagaaattccaccaatgtggtgatggaagaattaaatttgtgattcttgctagacttatcaagttccaaatctaaaagtgctccaaaacattctggtgccactgcaaaaattaagcttgagcctaagccaatgcaaaggaatcttcctgactctgtacattggcttgactatagaaagggcaaatggcccaattgtaaaattcctggctacacccagasttgttaaacttcagyaaaaatatataacattttgtggaatttttatattcccactgtttggtaaggtctaaataaagcctttgaagcttcatttactcattttaaatgcaggtgttcaaactggaacacatacattcaccaaaacaaggcacagcacaaatagtaaagaaggcgatgtggtggaagacggcatacatcagtaggaaaacagttaaccaagatttagttcatacatatttaattgaacatgtatttaagccaagtattctttcccatatctttgcatacatacttctatgt

SEQ ID NO: 27491 - DNA, 600 bp, Chicken  19866894244638_2
aaataattccagagacttacctgtgaactgacactattaagatcttctttaaggtatgtctaaatggagaaattccaccaatgtggtgatggaagaattaaatttgtgattcttgctagacttatcaagttccaaatctaaaagtgctccaaaacattctggtgccactgcaaaaattaagcttgagcctaagccaatgcaaaggaatcttcctgactctgtacattggcttgactatagaaagggcaaatggcccaattgtaaaattcctggctacacccagasttgttaaacttcagyaaaaatatataacattttgtggaatttttatattcccactgtttggtaaggtctaaataaagcctttgaagcttcatttactcattttaaatgcaggtgttcaaactggaacacatacattcaccaaaacaaggcacagcacaaatagtaaagaaggcgatgtggtggaagacggcatacatcagtaggaaaacagttaaccaagatttagttcatacatatttaattgaacatgtatttaagccaagtattctttcccatatctttgcatacatacttctatgtctctttctgtatagc

SEQ ID NO: 27492 - DNA, 599 bp, Chicken  19866894244640_1
  misc_feature (1)..(44): n is any nucleotide
nnnnnnnnnnnnnnnnnnnnnnnnnnnnnnnnnnnnnnnnnnnncagacatgctgcactccgtgaacctaacagcgtgacactgcacaagacacatgctaatagggacacaggttaggcaacagctttcatggctaaaatcactcagtgcaagatcaccagatatgaggtgaaagtaaaaacattagctgtcagatagaaggacaactcctctacagaactgattgtttttggtatcagttataggccatgtggctgaattaagtacctggtaatttactcggatccaaatgaattgcaytacttgtgtccagttgttccttgcttagatttgytgaagtagtaataaaccaccagctagcagttcagcaatttctgccaaacatgagataaaaaattattaaaatgagggtggtgaggcactggaacagattgcccagagaggtagtggggtgtcccatcactggagtcatccaaagtcagactggacrgggctctgagcaacctgaacaagctgtaggtatccctactcgctgtaggggagttggactgaatcacctttaagggtgtctttcaagtcaaatgattctgagatactat

SEQ ID NO: 27493 - DNA, 599 bp, Chicken  19866894244640_2
  misc_feature (1)..(10): n is any nucleotide
nnnnnnnnnncagacatgctgcactccgtgaacctaacagcgtgacactgcacaagacacatgctaatagggacacaggttaggcaacagctttcatggctaaaatcactcagtgcaagatcaccagatatgaggtgaaagtaaaaacattagctgtcagatagaaggacaactcctctacagaactgattgtttttggtatcagttataggccatgtggctgaattaagtacctggtaatttactcggatccaaatgaattgcaytacttgtgtccagttgttccttgcttagatttgytgaagtagtaataaaccaccagctagcagttcagcaatttctgccaaacatgagataaaaaattattaaaatgagggtggtgaggcactggaacagattgcccagagaggtagtggggtgtcccatcactggagtcatccaaagtcagactggacrgggctctgagcaacctgaacaagctgtaggtatccctactcgctgtaggggagttggactgaatcacctttaagggtgtctttcaagtcaaatgattctgagatactatgataaaggcacaacacaaaggacaaagcattcag

SEQ ID NO: 27494 - DNA, 600 bp, Chicken  19866894244640_3
tcagatagaaggacaactcctctacagaactgattgtttttggtatcagttataggccatgtggctgaattaagtacctggtaatttactcggatccaaatgaattgcaytacttgtgtccagttgttccttgcttagatttgytgaagtagtaataaaccaccagctagcagttcagcaatttctgccaaacatgagataaaaaattattaaaatgagggtggtgaggcactggaacagattgcccagagaggtagtggggtgtcccatcactggagtcatccaaagtcagactggacrgggctctgagcaacctgaacaagctgtaggtatccctactcgctgtaggggagttggactgaatcacctttaagggtgtctttcaagtcaaatgattctgagatactatgataaaggcacaacacaaaggacaaagcattcagccactagagaggaggctaaaggtaaagctgggacaaagatttcaagtggaaattgccttctgcaagggacagccaaagttacatcaggcatttgcagctgtttagaaaaaaaggaactacttcatgttatgaagatattcttaatcaattcgcagcc

SEQ ID NO: 27495 - DNA, 600 bp, Chicken  19866894244642_1
tcatttacagctgctttccttcagtgcacatacttcactctaattactgttaatagaagccggttgtgcggtctgaggaagtctgaattagttgcttttcattcagcagagatgaagatgtgtgtgactaaataaaaccctgccattctgaatgcccagcctacaacactaattggactgccatcttgacaatatggcaagggcatggagggggtaattttgtctttcttttgtacatgaaggtcaagaacacttgcagctgctttgctctgcaaaacacaagagtggtttccttccctyttcctgcttctgtccttcttttccccttcatcttctcttttcaacagcaagacaagggaaaaaaaagccaggagaggaaatttggaaaggaactctttcaatagatttaactacaatgtgttatacccctgggtgaaataaagctcaggccaaatagctgcagctcagaaggtacatggtcttatattgtcggtgcttgtttctgctatctcagtttcagagttcattcagttactgtgttacagcagtaacatgcatcagcagagtcatagtgactgttgaggtgggctgctgtagcaa

SEQ ID NO: 27496 - DNA, 600 bp, Chicken  19866894244648_1
ctcaccaacagcagcagtacctgaaaacaggaatgatgcactaacagcactacgagacactaacagcagtgagtcgaggtaatggttaagaaaacaaacagcagcaccagcaaactgctcagcattttctcaatggagtatcaaacatcttaatttacatttgggcaatagaataaactttaaactttcagtttggaaaagtcctacagcaaagaggtactacctctgaaccctctaagatgactaactggaatactgtcattttaaggtatgatttctaattggctccaaacatgcctyaacrtgttttctaccataagcagaggaaacaagcatttaactgagaaatacaatagacgtagtagaaaagactcaggcagaggagagcattactaacaccgctactgactttcatttaggatggcagggtgaaaagagataatttaagtcaggttcagagcacacagtacaacggagagttctcaggttggtccctggttcaatgcttacattacgcaattctcacatttattgccttttgcttaggaactgagacatmcactctcagctgcctcctttaccaatctgctcatctggaaa

SEQ ID NO: 27497 - DNA, 600 bp, Chicken  19866894244648_2
ccaacagcagcagtacctgaaaacaggaatgatgcactaacagcactacgagacactaacagcagtgagtcgaggtaatggttaagaaaacaaacagcagcaccagcaaactgctcagcattttctcaatggagtatcaaacatcttaatttacatttgggcaatagaataaactttaaactttcagtttggaaaagtcctacagcaaagaggtactacctctgaaccctctaagatgactaactggaatactgtcattttaaggtatgatttctaattggctccaaacatgcctyaacrtgttttctaccataagcagaggaaacaagcatttaactgagaaatacaatagacgtagtagaaaagactcaggcagaggagagcattactaacaccgctactgactttcatttaggatggcagggtgaaaagagataatttaagtcaggttcagagcacacagtacaacggagagttctcaggttggtccctggttcaatgcttacattacgcaattctcacatttattgccttttgcttaggaactgagacatmcactctcagctgcctcctttaccaatctgctcatctggaaattct

SEQ ID NO: 27498 - DNA, 549 bp, Chicken  19866894244648_3
cattttaaggtatgatttctaattggctccaaacatgcctyaacrtgttttctaccataagcagaggaaacaagcatttaactgagaaatacaatagacgtagtagaaaagactcaggcagaggagagcattactaacaccgctactgactttcatttaggatggcagggtgaaaagagataatttaagtcaggttcagagcacacagtacaacggagagttctcaggttggtccctggttcaatgcttacattacgcaattctcacatttattgccttttgcttaggaactgagacatmcactctcagctgcctcctttaccaatctgctcatctggaaattctggaggtgtctgctgtcttcttccacacgggctactaccagaatgaccttttttcttccactctttcccaggtgcgtttcagaagatacactgcagcatgaagtccccctacattcacccacactgtgtgatttttgcgccagatgtgtcccagtcttgacaaggcctacgacagaaaaataacacaaagaacagccccaagagt

SEQ ID NO: 27499 - DNA, 600 bp, Chicken  19866894244655_1
aatggattcacatgggagcaaaatgagaggtctgacaaatatttcttggatatataagcaaggcttcagagttctctccctattctttccagcacagggaactgtgactctcttcaaattgtctaagcttcttatgtatagaaatggagtcctgaacatgcaggagaagctgcaacctgcctgtctgtatgggaaaagagcttgcaggtgtgagggagttgagatgcatcaagagcatcatagttggttttggccctgtgggaatcatggcctttagagaacttgctctgttttcttggscttcactttctttttaacattttcttttgttagaataattctggctccatgtttcagtggacaaacaaagtctgtttttgcaggcaaagttcccccacggcaaggggatagatgaaccctgtgatcccaaaaaaaagcatttgagtttttggatcagccctcctgtcctggatgcctgcctctactcctctggctttgacttagtactgtatgtaggtttgtaggcagctttaggagcacgatgggtgatcgtatctagaatgtgttccctctgaagcaggtctctggatgtagtgctgt

SEQ ID NO: 27500 - DNA, 600 bp, Chicken  19866894244655_2
aggtgagatgtctggagcggagagcgctgatatcacagcacatcagtcaaggttagggatgccttgagctcccagagtaagctgaggggaagggaaggcaggctgatggaagcttaccccactggtgggaagccatcatcttgtttaaacaaatctcttaaactgtggtgttacagcttacagtaaggataaggatgcagctgggatgctattagcatgttacccagtgtagtgtacaataagtcattcacagtaagaccttcttgccagatttattgtgttctattcccaaacacaaamattctaatgttttttattatggtactgtgttttttattatgatactgatatggaaacagaaacaaatgtgcaaaaatgacttctgcttctatgcatacatcctgttctgaaagctttgaaagcgaggaatctgctccgaaggatccagagtgttgtgccatttctgtatgtacaggcacctgagctttgagctgttgctgtggcaggagaggaactagtactgcattaggcataaatatcagtaaccctaactgtttgttacagatgcctcaaaaatacagctttgcttggctgcaagcc

SEQ ID NO: 27501 - DNA, 599 bp, Chicken  19866894244657_1
  misc_feature (1)..(78): n is any nucleotide
nnnnnnnnnnnnnnnnnnnnnnnnnnnnnnnnnnnnnnnnnnnnnnnnnnnnnnnnnnnnnnnnnnnnnnnnnnnnnntggggaatcaatgggaatgaagtgtgtcctctccataatagtgttttcttgaattgtcccagagtttttcttaggtatccctctgctactcagttactacactgttttgcttttgccattattaaagtatacattgctacagctgttcttgaaactttctaggttactggtttctctcaggggaaataatttcaacatgtagataaagtataacattttaargaaacaaaatattgtgcatgaggtaactttcctctgtgatattcaatcctaaaacgagctcagggtgttatccaacaaaggttcaccaagctgaattcactgtaaggaaaatgcctttccccaggatcctgtgaggctgaggccaatatccatcacctgtgagaagaggaaatgcagagccttgagcagacatcccagaaaaatcagggaaagttctttgaaaatgaaggtgctaccaacccctttttttctccagtaggttrtattcagcatggakttcrcaatacaaacttaatggt

SEQ ID NO: 27502 - DNA, 600 bp, Chicken  19866894244657_2
ataatttcaacatgtagataaagtataacattttaargaaacaaaatattgtgcatgaggtaactttcctctgtgatattcaatcctaaaacgagctcagggtgttatccaacaaaggttcaccaagctgaattcactgtaaggaaaatgcctttccccaggatcctgtgaggctgaggccaatatccatcacctgtgagaagaggaaatgcagagccttgagcagacatcccagaaaaatcagggaaagttctttgaaaatgaaggtgctaccaacccctttttttctccagtaggttrtattcagcatggakttcrcaatacaaacttaatggtaatatttccagcaggaaaaatacaagcactttatatcacaccctcccaaattcctccttcagctttgttgttacactcaaggcttttctcagacaaacagtgggccttacccaggactgakaactatcaaggttttgtcgagacagttaacgactacaaatctgtctcaatctgtgttctcaaaggactgatagcaggcacctggtgcaacagctgaagttcaattgagcatgggctaaaactctcagtcagycatcttacccc

SEQ ID NO: 27503 - DNA, 600 bp, Chicken  19866894244657_3
tagataaagtataacattttaargaaacaaaatattgtgcatgaggtaactttcctctgtgatattcaatcctaaaacgagctcagggtgttatccaacaaaggttcaccaagctgaattcactgtaaggaaaatgcctttccccaggatcctgtgaggctgaggccaatatccatcacctgtgagaagaggaaatgcagagccttgagcagacatcccagaaaaatcagggaaagttctttgaaaatgaaggtgctaccaacccctttttttctccagtaggttrtattcagcatggakttcrcaatacaaacttaatggtaatatttccagcaggaaaaatacaagcactttatatcacaccctcccaaattcctccttcagctttgttgttacactcaaggcttttctcagacaaacagtgggccttacccaggactgakaactatcaaggttttgtcgagacagttaacgactacaaatctgtctcaatctgtgttctcaaaggactgatagcaggcacctggtgcaacagctgaagttcaattgagcatgggctaaaactctcagtcagycatcttaccccatgaatggtgagca

SEQ ID NO: 27504 - DNA, 600 bp, Chicken  19866894244657_4
taaagtataacattttaargaaacaaaatattgtgcatgaggtaactttcctctgtgatattcaatcctaaaacgagctcagggtgttatccaacaaaggttcaccaagctgaattcactgtaaggaaaatgcctttccccaggatcctgtgaggctgaggccaatatccatcacctgtgagaagaggaaatgcagagccttgagcagacatcccagaaaaatcagggaaagttctttgaaaatgaaggtgctaccaacccctttttttctccagtaggttrtattcagcatggakttcrcaatacaaacttaatggtaatatttccagcaggaaaaatacaagcactttatatcacaccctcccaaattcctccttcagctttgttgttacactcaaggcttttctcagacaaacagtgggccttacccaggactgakaactatcaaggttttgtcgagacagttaacgactacaaatctgtctcaatctgtgttctcaaaggactgatagcaggcacctggtgcaacagctgaagttcaattgagcatgggctaaaactctcagtcagycatcttaccccatgaatggtgagcagccc

SEQ ID NO: 27505 - DNA, 600 bp, Chicken  19866894244657_5
ccaggatcctgtgaggctgaggccaatatccatcacctgtgagaagaggaaatgcagagccttgagcagacatcccagaaaaatcagggaaagttctttgaaaatgaaggtgctaccaacccctttttttctccagtaggttrtattcagcatggakttcrcaatacaaacttaatggtaatatttccagcaggaaaaatacaagcactttatatcacaccctcccaaattcctccttcagctttgttgttacactcaaggcttttctcagacaaacagtgggccttacccaggactgakaactatcaaggttttgtcgagacagttaacgactacaaatctgtctcaatctgtgttctcaaaggactgatagcaggcacctggtgcaacagctgaagttcaattgagcatgggctaaaactctcagtcagycatcttaccccatgaatggtgagcagcccaagagctcctgagtatgatagatggctgaatgatattaggaatgtgttttgaggttatacctgctgcagatgaaccctaactccttgacatcaacataccttgctgatacatctccttggtaagtgattaatagcttgt

SEQ ID NO: 27506 - DNA, 600 bp, Chicken  19866894244657_6
ccagtaggttrtattcagcatggakttcrcaatacaaacttaatggtaatatttccagcaggaaaaatacaagcactttatatcacaccctcccaaattcctccttcagctttgttgttacactcaaggcttttctcagacaaacagtgggccttacccaggactgakaactatcaaggttttgtcgagacagttaacgactacaaatctgtctcaatctgtgttctcaaaggactgatagcaggcacctggtgcaacagctgaagttcaattgagcatgggctaaaactctcagtcagycatcttaccccatgaatggtgagcagcccaagagctcctgagtatgatagatggctgaatgatattaggaatgtgttttgaggttatacctgctgcagatgaaccctaactccttgacatcaacataccttgctgatacatctccttggtaagtgattaatagcttgttttaagttttcttagttttgctaaggttatatctttgattgttcatgtagaatttctcaagtataaagtgttgaccatatctaggcctaggattggattcagctgcacctagactcctttgagaaagagttc

SEQ ID NO: 27507 - DNA, 600 bp, Chicken  19866894244663_1
tcataggcagttgctcagcagtgaattaccatttttccataacatcagttctatttgagcacagcagcaatgctacagcatgactgggtggaaggaacaggtcttgctgcaggacttatcactcacccatgatgtgcaacccattggtcacacccgttggtcttataaatggtgtaacttgtggctctggaatgagaaatcctacacccagccccactgtatatttaagggttgacaagtgatgagctggaaatccagaaaggaatggggaattcaaagggagtactggaaaaaatttayttgtgaaatgtctcagggawgagcgatgctggccaaactctgctctagttatgtcaccgtgaagtcttccagggaatttagtgggaaggaaacaaagttgtgcaaaaagcttcagagaattctattttaatgaagaaaacgtctcatttttgggatacttctctacttgccaaggaatctgaaaaaagaagcatgtaaagaatggcacttgcaaaaaaaatctgttttcttttttcccttaacagaatatgggtattaaattgctatttttaaccacagtaatttattcaatgtatatgg

SEQ ID NO: 27508 - DNA, 600 bp, Chicken  19866894244663_2
gtgaattaccatttttccataacatcagttctatttgagcacagcagcaatgctacagcatgactgggtggaaggaacaggtcttgctgcaggacttatcactcacccatgatgtgcaacccattggtcacacccgttggtcttataaatggtgtaacttgtggctctggaatgagaaatcctacacccagccccactgtatatttaagggttgacaagtgatgagctggaaatccagaaaggaatggggaattcaaagggagtactggaaaaaatttayttgtgaaatgtctcagggawgagcgatgctggccaaactctgctctagttatgtcaccgtgaagtcttccagggaatttagtgggaaggaaacaaagttgtgcaaaaagcttcagagaattctattttaatgaagaaaacgtctcatttttgggatacttctctacttgccaaggaatctgaaaaaagaagcatgtaaagaatggcacttgcaaaaaaaatctgttttcttttttcccttaacagaatatgggtattaaattgctatttttaaccacagtaatttattcaatgtatatggcaaatggaacaattctcaca

SEQ ID NO: 27509 - DNA, 600 bp, Chicken  19866894244665_1
tttaagtactgtccctttatatgaaaggtataaagtagtcaatctaaaagcttcaccatcagacaggaagtgtgaatgttgaaaactctatcttcttcattatttataacactgaattattgcttttgttgttcatcttagagagaggtttttacagtgttatttggtaacatttcatccaccatacaagctattctacttcgtggttctgaggtcattttcttaatatactaatctcaccagcataaccctctagacagtctttgtgatggtgcatccaagtaccttggtatctcttcrgaaaatgagagccaaattattccacctgctgtaagaaattttcactgttgcttctaaattttcaccaaacatttttcattctcaaggaaatgggcagaactactcacatttatttggcaacagaaagaaattacaggtgttttggagtagcatagaaagatagtatattttattcctcttaatctgtcttttccacaagttatggatattttaaatcatttactaagtatgactgtatgtattcatatataacttgtgcactttcaggagatggaatatctgtatgcatacactttatta

SEQ ID NO: 27510 - DNA, 600 bp, Chicken  19866894244674_1
agacatttcatcatattattatttcctaaaccgtgtttccttagcattctttttaattattattatgtttagcaccttttactcatagaagctacttgaaatgatctttccttccaattctctgatttcaccgaagtctgactttctgaaagccatttttattctgctcttagttgtgctctctgtatgaaggatcatgaaactacagtggcatgctcattcacatccaagttgtttttcaacgtaatgatcttagaattctttcctttcagttgaaatgatatgtgtaacttctccctyagaagtgtcctacaacattaatgtcagttggaaaaacttgtatagcaatcagtgccttgttatgttcatttttactgttgaacaacaagaaatatattattaaatatttctactgatggtcactcatttgagggttttgaaaggtcagattgacatcacctgtgctatcctaaaattgcaacaaatatttctgcttgagattgttcactggataattttatattttgaaaaactttgccattcagtctcctctattttctttatttgcattttattgccagttccaagtctcagctgtgg

SEQ ID NO: 27511 - DNA, 600 bp, Chicken  19866894244675_1
aatcattagagagaacacaggaggcgagaggttaggctgcaggtcatacctggaggtacgtcttgaagatgtgtttcgctgatcgagtgatcagttcactgatgccaattttctaccccaaggaataaaaagtgaagactaagagtcagtcaatgacaacaatgaaaaacacaccttccttttgaagtgggcttttaccaagatgcacagaaggcacctaattctgcccttaccctacaacacagaactattctgcatttgacaacactcttggggatggggaaaggcccccagatcacmaygagtccccccgtactgcagagctcaccctgcagccccatgcagtcatgctcacaccaccacctcccagtcagacccaaagccttgccgggtattagaggcttaaaaatgaatggcttaaaatccaactgcgtgctgcctgctgatacacctgggaatccctcaacaacttttctttcccaaaggatactcaaacagcctaacctagtgagagccattaaggaatggggagcaaaactcccccatcaaccacctacaggtccttctccttccttctctgtttttgaagctggttctttt

SEQ ID NO: 27512 - DNA, 600 bp, Chicken  19866894244675_2
tcattagagagaacacaggaggcgagaggttaggctgcaggtcatacctggaggtacgtcttgaagatgtgtttcgctgatcgagtgatcagttcactgatgccaattttctaccccaaggaataaaaagtgaagactaagagtcagtcaatgacaacaatgaaaaacacaccttccttttgaagtgggcttttaccaagatgcacagaaggcacctaattctgcccttaccctacaacacagaactattctgcatttgacaacactcttggggatggggaaaggcccccagatcacmaygagtccccccgtactgcagagctcaccctgcagccccatgcagtcatgctcacaccaccacctcccagtcagacccaaagccttgccgggtattagaggcttaaaaatgaatggcttaaaatccaactgcgtgctgcctgctgatacacctgggaatccctcaacaacttttctttcccaaaggatactcaaacagcctaacctagtgagagccattaaggaatggggagcaaaactcccccatcaaccacctacaggtccttctccttccttctctgtttttgaagctggttctttttc

SEQ ID NO: 27513 - DNA, 600 bp, Chicken  19866894244675_3
tagagagaacacaggaggcgagaggttaggctgcaggtcatacctggaggtacgtcttgaagatgtgtttcgctgatcgagtgatcagttcactgatgccaattttctaccccaaggaataaaaagtgaagactaagagtcagtcaatgacaacaatgaaaaacacaccttccttttgaagtgggcttttaccaagatgcacagaaggcacctaattctgcccttaccctacaacacagaactattctgcatttgacaacactcttggggatggggaaaggcccccagatcacmaygagyccccccgtactgcagagctcaccctgcagccccatgcagtcatgctcacaccaccacctcccagtcagacccaaagccttgccgggtattagaggcttaaaaatgaatggcttaaaatccaactgcgtgctgcctgctgatacacctgggaatccctcaacaacttttctttcccaaaggatactcaaacagcctaacctagtgagagccattaaggaatggggagcaaaactcccccatcaaccacctacaggtccttctccttccttctctgtttttgaagctggttctttttcacag

SEQ ID NO: 27514 - DNA, 600 bp, Chicken  19866894244675_4
gtcatgctcacaccaccacctcccagtcagacccaaagccttgccgggtattagaggcttaaaaatgaatggcttaaaatccaactgcgtgctgcctgctgatacacctgggaatccctcaacaacttttctttcccaaaggatactcaaacagcctaacctagtgagagccattaaggaatggggagcaaaactcccccatcaaccacctacaggtccttctccttccttctctgtttttgaagctggttctttttcacagagaaagcaattagccaagttggaatctgtacagggcaygttaggccagaggcagctggagctgacagtctgaagttaaggctgatgcttacaaagatatgatccagctgagcatggccgggggtcttggtgatgaagtggatcactttgcctaggtatcgcatgttgatgcccctctggtgcatggcctctgctaaggtggccccatccatggggagcactgtgtgatccaggcagtccttgacctgcagggtacgtgcaaacgttggttacggaggacagacatgaaggaggacagcccrgggttcccccgcacaggtacaggacagggcagggaca

SEQ ID NO: 27515 - DNA, 565 bp, Chicken  19866894244675_5
gaaagcaattagccaagttggaatctgtacagggcaygttaggccagaggcagctggagctgacagtctgaagttaaggctgatgcttacaaagatatgatccagctgagcatggccgggggtcttggtgatgaagtggatcactttgcctaggtatcgcatgttgatgcccctctggtgcatggcctctgctaaggtggccccatccatggggagcactgtgtgatccaggcagtccttgacctgcagggtacgtgcaaacgttggttacggaggacagacatgaaggaggacagcccrgggttcccccgcacaggtacaggacagggcagggacagccttcagcccatgggagagctgctgtttgtgtacagcctcattggtcttttcactggaagtgtttttaatcggtgactgtaaggcactttgttgataatgggaaatggcacttgcatttcaggttgtgttgcagtgctgataaagagtcatttaatccacatcacggagtaacacagttacattccaacacacagagctgggaggacagtgcctgtgcagcatgtca

SEQ ID NO: 27516 - DNA, 599 bp, Chicken  19866894244680_1
  misc_feature (1)..(60): n is any nucleotide
nnnnnnnnnnnnnnnnnnnnnnnnnnnnnnnnnnnnnnnnnnnnnnnnnnnnnnnnnnnnaccgaccttcaccgtcagactgagcccgagcacgcaactcactatacacttaggacacctgccagtcattcttttttccctgcttctgtgttcagtaaaagcacaaacagagaaataaaagagaggtcttattttcagaagaaatagagcacaagcaagggaccaaagtcaatggaagaaatccaatgggctgctggactgagctcactcgttacccatgggaaatacagcctaggtgcmctgctggagtcatccatcatgtcttccccaacctcagcgatgtcctagggagacagaaaaaatgaaaagtcacctaaggaggtaaacattgcatatctgattttacacattatttacttttttttttcataatttaaatattattaaatattcaaacattagggaatgaggcaggaatggcaagtaataaataaacctttatgggctggagattccagtcttaaggaaattatcatttgcgcctgtgcgtgcagtcttcagaagaacaaaactgaaatgatgtgaactacaatatccat

SEQ ID NO: 27517 - DNA, 600 bp, Chicken  19866894244682_1
acacgtggccgggcaccccggatgcccggtgatgggcagaggagcgggtcggtggcccaccacaggccccatccccatgctgggcacacaatagagcagcaccttgctatgggggtgggcaggccgtggctatctgctggcatgtgtaataaaggagggagtttaaaaatagactttgagctgcagtgccggaaaggcagcgagacgtatagagcgggtgtgtatttaccctgcatttacacaccctgcgcccgctgccccgctgccacggggaccgctcaccgtggggccccgcagccrgcgctccccagcatggatggggcacggggggtaccctgagggtagtgggactgcacaggtgcccgagcatcrctggagcggtgggatgggagyccccatccgccccaatctgcggctcctccgcccccctgtgcccagacaaagtggcatctctcaggacaaagcctttcaatagatcccctgccctctgccctccgccgaacaatgagaaatcaaggaatattgtccgagctgaataaaaagatctaaatttagagtgtctgatgtgttcttggtttcctgccatggctcccctcctcc

SEQ ID NO: 27518 - DNA, 600 bp, Chicken  19866894244682_2
ccccatgctgggcacacaatagagcagcaccttgctatgggggtgggcaggccgtggctatctgctggcatgtgtaataaaggagggagtttaaaaatagactttgagctgcagtgccggaaaggcagcgagacgtatagagcgggtgtgtatttaccctgcatttacacaccctgcgcccgctgccccgctgccacggggaccgctcaccgtggggccccgcagccrgcgctccccagcatggatggggcacggggggtaccctgagggtagtgggactgcacaggtgcccgagcatcrctggagcggtgggatgggagyccccatccgccccaatctgcggctcctccgcccccctgtgcccagacaaagtggcatctctcaggacaaagcctttcaatagatcccctgccctctgccctccgccgaacaatgagaaatcaaggaatattgtccgagctgaataaaaagatctaaatttagagtgtctgatgtgttcttggtttcctgccatggctcccctcctccttcccagcctcctgctccgctgctgcctgctctcagcacagaaaggtttctgccgggctgagatcaccagcg

SEQ ID NO: 27519 - DNA, 600 bp, Chicken  19866894244682_3
gagcagcaccttgctatgggggtgggcaggccgtggctatctgctggcatgtgtaataaaggagggagtttaaaaatagactttgagctgcagtgccggaaaggcagcgagacgtatagagcgggtgtgtatttaccctgcatttacacaccctgcgcccgctgccccgctgccacggggaccgctcaccgtggggccccgcagccrgcgctccccagcatggatggggcacggggggtaccctgagggtagtgggactgcacaggtgcccgagcatcrctggagcggtgggatgggagyccccatccgccccaatctgcggctcctccgcccccctgtgcccagacaaagtggcatctctcaggacaaagcctttcaatagatcccctgccctctgccctccgccgaacaatgagaaatcaaggaatattgtccgagctgaataaaaagatctaaatttagagtgtctgatgtgttcttggtttcctgccatggctcccctcctccttcccagcctcctgctccgctgctgcctgctctcagcacagaaaggtttctgccgggctgagatcaccagcgagaccctgtgtccccagccat

SEQ ID NO: 27520 - DNA, 600 bp, Chicken  19866894244696_1
atttcttcaatttccagaaacacccagtacttagtctcattattagaatactcagtcataaaaactgttcctgttacttcatttatgttcccagtttcttattcagtgttccccctggctcatcggcaacatttctccagtgagccaaaatacaatccagaacggtctttttcggaatttcttttgacaccctttgttccataacagctgtttatcccagctgatcttaggtattgggtgaaaataccttgtgttttgctgggtaatgaagtccacctacttccccagggcacgggaacrctgaattccctgggcaagagtcttaaccaacgtcccctagcaagacaagtattttaaacagggaatggaattccacaagtaacatttttacaacacaaacatttaacaattacaaagacagtgacaatgactaatatagttatttatacaaggagcaggatcccacaagaagcatttttgctgtacaagcaccgagcgattacagcaattaccacaatgactacccgtagttcctatgacaggccagaacaaaaaaaataaaaacccagttcatacattcgctccaaatgccctcctggg

SEQ ID NO: 27521 - DNA, 600 bp, Chicken  19866894244699_1
aagtgatagaataaatttagttttcaaaatgactcttgaggcacatgatctagctgcaaaaattctaaaaactgaataaattcttagaatctcagcacattttctaaaccaccatgtaacatatttggaaatctaccacagattatttatacatcatcagtatatttatatgtccaaattaagactacctattttgttttcaaattttttatatttgtgagtcactaatttcaaagtaaatgaaaatggcttgtgattgttttcacagagaacatacatgcagttgaatattgcaatcaygcatagtacattattttcaataaagccatagtttgtaccatggaacagtttacacaaaaaggaaggtgaaaaccttagaatcagaggctttaacctccaatgagataataaaagaagtgaggttatatttgaaagtgagaacattgaaaatgttccagactcctcagaagaaaaaaaaaatacgtattacaaatatgagagtacatgtaacaacaaagcgagcatacatgtaatgagagcatattttcatatctaattatataaactcaaccaaatttgtgtataacacagaaactctaa

SEQ ID NO: 27522 - DNA, 575 bp, Chicken  19866894244712_1
gttttaaagctaagcatcccatcagagaggatctactgaaagccatggatatgcatgataaaggtttgatcgtttttcttctgttaggtttgtagagaagatctctgtgtttcctcagtatttttttagttttcagaaaggtgtacgaatgacctcttctattatggaaatagctatggtagacagtgttgcagaactagtagttgtgaaagaacaaaataggtcctacatgaccttattcaaagaaactgccttaccttttaaatgtgtaatacctattcttttgagttaatacagtamtgtgaggaggataagtccatttgcagtttggaaaccaaactaaggcatggactcaggtaaacactgcaagttacggtacataatgtacaaatttgatacaaaaaccataagtatgtaacttcagtgtatgtctttttaataacagtgcactaaggtgaaacaaattaatctgctgatgtcctttctgaattgtagaagtgggggatttcatgcttggctgatgcttctctgcattactctttaaggaccgttccaacctaagccattctataatt

SEQ ID NO: 27523 - DNA, 600 bp, Chicken  19866894244720_1
gctccgcctcctggccacagtaagaactgcaaccggttcggtgaaggtcctgtaaaggatagcaagataaagaagaacagacgaaaaaaaagatgtttactcccctcctcccattagttttcctgcctgccccagttttcccttcacgtccgccctccaaacacatgctcttcaagttgatgagcttgtttcttttttaatctgtaaacctttagcttgctcaacctatttctcttcagtagggtcacgagtaagtaagttatctagaaaatgctcacaggaagtcgtcacagaaaatakcagaagatacgtatgtttcaaagaggcaaaatatatcagctctgtaatttctttttaaatctacctccacagaatggtgttttcccttgattttaaggattttcaaagaagtcagaaaaatgtattctgtgcatattaaacaaaggcacatgggaaaagtattttttttcctatctcaaaaccactttcattgcatggggcaaccactacaatgtgagttggctgagcataatgtcgtgatttgttaatattgaacaatawggaacaraggattagagtagatgcttgtgtgcaactgac

SEQ ID NO: 27524 - DNA, 600 bp, Chicken  19866894244720_2
atctagaaaatgctcacaggaagtcgtcacagaaaatakcagaagatacgtatgtttcaaagaggcaaaatatatcagctctgtaatttctttttaaatctacctccacagaatggtgttttcccttgattttaaggattttcaaagaagtcagaaaaatgtattctgtgcatattaaacaaaggcacatgggaaaagtattttttttcctatctcaaaaccactttcattgcatggggcaaccactacaatgtgagttggctgagcataatgtcgtgatttgttaatattgaacaatawggaacaraggattagagtagatgcttgtgtgcaactgacacagcagcaatttcaaggcctgaagctagacgcaaaatttctagcaagcatctgccaaggacttccacttcaagatatttgttctagaaaccattcaaatttttgactgggatgtgcccggcattaccattacatttgtgaagaggtaatttgggctaggaaacaaatacagacaaaatccaatttttaaaatgaccaaacaaaacaagaggaactgcttttctttaaagcaaaatataaaataaattccagccaactaag

SEQ ID NO: 27525 - DNA, 600 bp, Chicken  19866894244720_3
aaatgctcacaggaagtcgtcacagaaaatakcagaagatacgtatgtttcaaagaggcaaaatatatcagctctgtaatttctttttaaatctacctccacagaatggtgttttcccttgattttaaggattttcaaagaagtcagaaaaatgtattctgtgcatattaaacaaaggcacatgggaaaagtattttttttcctatctcaaaaccactttcattgcatggggcaaccactacaatgtgagttggctgagcataatgtcgtgatttgttaatattgaacaatawggaacaraggattagagtagatgcttgtgtgcaactgacacagcagcaatttcaaggcctgaagctagacgcaaaatttctagcaagcatctgccaaggacttccacttcaagatatttgttctagaaaccattcaaatttttgactgggatgtgcccggcattaccattacatttgtgaagaggtaatttgggctaggaaacaaatacagacaaaatccaatttttaaaatgaccaaacaaaacaagaggaactgcttttctttaaagcaaaatataaaataaattccagccaactaagttttcaa

SEQ ID NO: 27526 - DNA, 600 bp, Chicken  19866894244724_1
tgttcatctcctctagggctaaggcgtatccaggagtgctttgttacagatgtgtacatatacataacccctcctatctcctacacacacatattcctatcccttatcttcctggaagggtgtataaagaaaaaagaaaaatgaaaagaggatttgtagctaggtgaaagacaatgaggtttgtgataagcattaggttctgtggaaggtccttctcctgtcatggactggaaaagctcattcaaaatgggtggtattttccattaatttaatctcagagatttaattcaattatcctgyttcttagttaaaggacaagagaagtaaaagcagagyatgagcaaaagctctggccagatccagctgcaagaaaaagaaaaagggttaaagatatatgcttatttgcctaagattataaaagatacagargctttggcatatctrtgccaaagttaaacatgctaaaatgggcaaattgagagatttaaaaacttaaaagcttagagaayatgatttcatatgttttcaagattaaattgattatgataagaataaragarcaaaacaacaaactctctaggagcaagcctttcctatcag

SEQ ID NO: 27527 - DNA, 600 bp, Chicken  19866894244724_2
tgctttgttacagatgtgtacatatacataacccctcctatctcctacacacacatattcctatcccttatcttcctggaagggtgtataaagaaaaaagaaaaatgaaaagaggatttgtagctaggtgaaagacaatgaggtttgtgataagcattaggttctgtggaaggtccttctcctgtcatggactggaaaagctcattcaaaatgggtggtattttccattaatttaatctcagagatttaattcaattatcctgyttcttagttaaaggacaagagaagtaaaagcagagyatgagcaaaagctctggccagatccagctgcaagaaaaagaaaaagggttaaagatatatgcttatttgcctaagattataaaagatacagargctttggcatatctrtgccaaagttaaacatgctaaaatgggcaaattgagagatttaaaaacttaaaagcttagagaayatgatttcatatgttttcaagattaaattgattatgataagaataaragarcaaaacaacaaactctctaggagcaagcctttcctatcagtaacaccttcagaaaggtcttacaacatatgctgag

SEQ ID NO: 27528 - DNA, 600 bp, Chicken  19866894244724_3
aaaaaagaaaaatgaaaagaggatttgtagctaggtgaaagacaatgaggtttgtgataagcattaggttctgtggaaggtccttctcctgtcatggactggaaaagctcattcaaaatgggtggtattttccattaatttaatctcagagatttaattcaattatcctgyttcttagttaaaggacaagagaagtaaaagcagagyatgagcaaaagctctggccagatccagctgcaagaaaaagaaaaagggttaaagatatatgcttatttgcctaagattataaaagatacagargctttggcatatctrtgccaaagttaaacatgctaaaatgggcaaattgagagatttaaaaacttaaaagcttagagaayatgatttcatatgttttcaagattaaattgattatgataagaataaragarcaaaacaacaaactctctaggagcaagcctttcctatcagtaacaccttcagaaaggtcttacaacatatgctgaggactaagcatgctcttggcagctgagaaaaggagcaagactcatcagtaagaaacactcttcatgcaacataggtcacttaagatgcaaaggt

SEQ ID NO: 27529 - DNA, 600 bp, Chicken  19866894244724_4
aaagaggatttgtagctaggtgaaagacaatgaggtttgtgataagcattaggttctgtggaaggtccttctcctgtcatggactggaaaagctcattcaaaatgggtggtattttccattaatttaatctcagagatttaattcaattatcctgyttcttagttaaaggacaagagaagtaaaagcagagyatgagcaaaagctctggccagatccagctgcaagaaaaagaaaaagggttaaagatatatgcttatttgcctaagattataaaagatacagargctttggcatatctrtgccaaagttaaacatgctaaaatgggcaaattgagagatttaaaaacttaaaagcttagagaayatgatttcatatgttttcaagattaaattgattatgataagaataaragarcaaaacaacaaactctctaggagcaagcctttcctatcagtaacaccttcagaaaggtcttacaacatatgctgaggactaagcatgctcttggcagctgagaaaaggagcaagactcatcagtaagaaacactcttcatgcaacataggtcacttaagatgcaaaggtgcaggctttatagga

SEQ ID NO: 27530 - DNA, 600 bp, Chicken  19866894244724_5
tccttctcctgtcatggactggaaaagctcattcaaaatgggtggtattttccattaatttaatctcagagatttaattcaattatcctgyttcttagttaaaggacaagagaagtaaaagcagagyatgagcaaaagctctggccagatccagctgcaagaaaaagaaaaagggttaaagatatatgcttatttgcctaagattataaaagatacagargctttggcatatctrtgccaaagttaaacatgctaaaatgggcaaattgagagatttaaaaacttaaaagcttagagaayatgatttcatatgttttcaagattaaattgattatgataagaataaragarcaaaacaacaaactctctaggagcaagcctttcctatcagtaacaccttcagaaaggtcttacaacatatgctgaggactaagcatgctcttggcagctgagaaaaggagcaagactcatcagtaagaaacactcttcatgcaacataggtcacttaagatgcaaaggtgcaggctttataggaaggcagaaaaaaaaacaacaccctgagttcctgcagaacagctctcagtggttgcttttcaacag

SEQ ID NO: 27531 - DNA, 600 bp, Chicken  19866894244724_6
ttttccattaatttaatctcagagatttaattcaattatcctgyttcttagttaaaggacaagagaagtaaaagcagagyatgagcaaaagctctggccagatccagctgcaagaaaaagaaaaagggttaaagatatatgcttatttgcctaagattataaaagatacagargctttggcatatctrtgccaaagttaaacatgctaaaatgggcaaattgagagatttaaaaacttaaaagcttagagaayatgatttcatatgttttcaagattaaattgattatgataagaataaragarcaaaacaacaaactctctaggagcaagcctttcctatcagtaacaccttcagaaaggtcttacaacatatgctgaggactaagcatgctcttggcagctgagaaaaggagcaagactcatcagtaagaaacactcttcatgcaacataggtcacttaagatgcaaaggtgcaggctttataggaaggcagaaaaaaaaacaacaccctgagttcctgcagaacagctctcagtggttgcttttcaacaggcaagtctctattgccctgtaaggtgactaagtgccattatgacttc

SEQ ID NO: 27532 - DNA, 600 bp, Chicken  19866894244724_7
ccattaatttaatctcagagatttaattcaattatcctgyttcttagttaaaggacaagagaagtaaaagcagagyatgagcaaaagctctggccagatccagctgcaagaaaaagaaaaagggttaaagatatatgcttatttgcctaagattataaaagatacagargctttggcatatctrtgccaaagttaaacatgctaaaatgggcaaattgagagatttaaaaacttaaaagcttagagaayatgatttcatatgttttcaagattaaattgattatgataagaataaragarcaaaacaacaaactctctaggagcaagcctttcctatcagtaacaccttcagaaaggtcttacaacatatgctgaggactaagcatgctcttggcagctgagaaaaggagcaagactcatcagtaagaaacactcttcatgcaacataggtcacttaagatgcaaaggtgcaggctttataggaaggcagaaaaaaaaacaacaccctgagttcctgcagaacagctctcagtggttgcttttcaacaggcaagtctctattgccctgtaaggtgactaagtgccattatgacttcatcc

SEQ ID NO: 27533 - DNA, 599 bp, Chicken  19866894244725_1
  misc_feature (1)..(46): n is any nucleotide
nnnnnnnnnnnnnnnnnnnnnnnnnnnnnnnnnnnnnnnnnnnnnnctatcagcaattcaagaggctcctggaatgcattgaggaaatttcctgagtcaagtaattgaaggccccccccagccaggatgcagtactggacctgttgctcaccaatgcaaatgaactgattggtgacatcaggattggaggctgcctgggctgtagggaccacactatgatggagttcatgctccagcgcaatatcaaacaggcaaagattaaaattaggatgctaaatttcaggaaagctaaattctagmtcttcagggagttgtgaactaaacaccctgggaaactgtcctcatgggcaagggtgtggagcagagctagcagatcattaaggaggtttctttagggcacaagagttccccatgcccaggtgtagaaacttgggaaaggaaggcaagagaccagcatggctaaaccaggacctgccagcaaaactgaagagcccttacagctcagaaagccaactgtattctgggctgcatcaaaagaagcatggccagcagggcaagggaggtgatcctgcccctctactccgtactatgaggcctca

SEQ ID NO: 27534 - DNA, 600 bp, Chicken  19866894244725_2
gtgaactaaacaccctgggaaactgtcctcatgggcaagggtgtggagcagagctagcagatcattaaggaggtttctttagggcacaagagttccccatgcccaggtgtagaaacttgggaaaggaaggcaagagaccagcatggctaaaccaggacctgccagcaaaactgaagagcccttacagctcagaaagccaactgtattctgggctgcatcaaaagaagcatggccagcagggcaagggaggtgatcctgcccctctactccgtactatgaggcctcacctggagtactgamtccagatgtggagtcctcagtacaggatagacatggacctgttggagtgcatccagagaaggactacaaaaatgatasaagggatggaacacctctcctacgaggacaggccgagagagctggggctgttcagcctggagaagagaacgctccaagatgcyctgatagtggcctttcagcatctaaaggggagctacaagaaagaagcagacagactttttcacagggtctatggtgatagaacaaggggaaatggcttcaagctcaaagaggataagtttaggttggatataagggaaa

SEQ ID NO: 27535 - DNA, 600 bp, Chicken  19866894244725_3
ttagggcacaagagttccccatgcccaggtgtagaaacttgggaaaggaaggcaagagaccagcatggctaaaccaggacctgccagcaaaactgaagagcccttacagctcagaaagccaactgtattctgggctgcatcaaaagaagcatggccagcagggcaagggaggtgatcctgcccctctactccgtactatgaggcctcacctggagtactgamtccagatgtggagtcctcagtacaggatagacatggacctgttggagtgcatccagagaaggactacaaaaatgatasaagggatggaacacctctcctacgaggacaggccgagagagctggggctgttcagcctggagaagagaacgctccaagatgcyctgatagtggcctttcagcatctaaaggggagctacaagaaagaagcagacagactttttcacagggtctatggtgatagaacaaggggaaatggcttcaagctcaaagaggataagtttaggttggatataagggaaatttcttttacagtgaggatgatgatgcactggaacaggttgcctaragatatggctgatgccttgttcctggagactt

SEQ ID NO: 27536 - DNA, 600 bp, Chicken  19866894244725_4
ccagcaaaactgaagagcccttacagctcagaaagccaactgtattctgggctgcatcaaaagaagcatggccagcagggcaagggaggtgatcctgcccctctactccgtactatgaggcctcacctggagtactgamtccagatgtggagtcctcagtacaggatagacatggacctgttggagtgcatccagagaaggactacaaaaatgatasaagggatggaacacctctcctacgaggacaggccgagagagctggggctgttcagcctggagaagagaacgctccaagatgcyctgatagtggcctttcagcatctaaaggggagctacaagaaagaagcagacagactttttcacagggtctatggtgatagaacaaggggaaatggcttcaagctcaaagaggataagtttaggttggatataagggaaatttcttttacagtgaggatgatgatgcactggaacaggttgcctaragatatggctgatgccttgttcctggagactttcaaagccaggctggatcaagcactgggcaacctgatctagctgtggtgtccctgttcatcgcaggggagttgggctagatgg

SEQ ID NO: 27537 - DNA, 600 bp, Chicken  19866894244725_5
gtgcatccagagaaggactacaaaaatgatasaagggatggaacacctctcctacgaggacaggccgagagagctggggctgttcagcctggagaagagaacgctccaagatgcyctgatagtggcctttcagcatctaaaggggagctacaagaaagaagcagacagactttttcacagggtctatggtgatagaacaaggggaaatggcttcaagctcaaagaggataagtttaggttggatataagggaaatttcttttacagtgaggatgatgatgcactggaacaggttgcctaragatatggctgatgccttgttcctggagactttcaaagccaggctggatcaagcactgggcaacctgatctagctgtggtgtccctgttcatcgcaggggagttgggctagatggccttcagaggtcctttgcaactctaaggattctatgactgtgtgattctaagtactgtacatgttcacttgttaaaatgattccaacttcagctttattgttttcaccttttaaaaaaatctcacaattacctgtagtccaccctgtgaagtgctgagtttcttgaatgctccctgaatgtaatg

SEQ ID NO: 27538 - DNA, 600 bp, Chicken  19866894244732_1
gtcacacagaaacagatgctgacattcagccattgcttatccacccagagatctgacacacattccctgtggctccagattttcctgttgttttctgcttgttgcatgtcagtcagagggtttgggacaagtgccatccagagccctgccagtaaagtaaaacacgtcaaagcatagctgactcacagcccttttcctgaatgtgttactctgcacacagtgagcaaaataggaaaggtgaatactacaggaagaaaaaaggcaaataaaatagctcttatagagtgtgtaactactgcygtgctgtagctggacactgcggaagctggcaaacctcatctgtcccccacagacttcagagtacaatgtcagtggatgttctggtccttctgtgtgtaagtaccccagtgggcaaacttctgcgaggtgtatggcaagtaaacttagaaagtagcctaagtactgtctctgtggatgaagtaacttctgttactgccccagcagaagtgtgctgttctatgcatgtgtcagrgtgggcgtgggggacagtgaagcagtcagggactgtcagggacttacttggatgcccctttccttgct

SEQ ID NO: 27539 - DNA, 600 bp, Chicken  19866894244732_2
gaaaggtgaatactacaggaagaaaaaaggcaaataaaatagctcttatagagtgtgtaactactgcygtgctgtagctggacactgcggaagctggcaaacctcatctgtcccccacagacttcagagtacaatgtcagtggatgttctggtccttctgtgtgtaagtaccccagtgggcaaacttctgcgaggtgtatggcaagtaaacttagaaagtagcctaagtactgtctctgtggatgaagtaacttctgttactgccccagcagaagtgtgctgttctatgcatgtgtcagrgtgggcgtgggggacagtgaagcagtcagggactgtcagggacttacttggatgcccctttccttgcttattttattttgcaacctgatgtatgtttgttcacaggcatgtacagtggttccagcgctaaccataatggtccctcaccaggtatactgccacctcctcacgacatcccttcaagacaccatcctcttgactctgccctttccagtccacatcaccatcagtcgccattggagagtgccagggaagggtatgtgttgtgaaacatgcttggcttgygtctggcatgatgaa

SEQ ID NO: 27540 - DNA, 600 bp, Chicken  19866894244732_3
tatgcatgtgtcagrgtgggcgtgggggacagtgaagcagtcagggactgtcagggacttacttggatgcccctttccttgcttattttattttgcaacctgatgtatgtttgttcacaggcatgtacagtggttccagcgctaaccataatggtccctcaccaggtatactgccacctcctcacgacatcccttcaagacaccatcctcttgactctgccctttccagtccacatcaccatcagtcgccattggagagtgccagggaagggtatgtgttgtgaaacatgcttggcttgygtctggcatgatgaagactaattaattgtttattatactttgcatagatactgtttgaatgaaaaaaactgactaaaagttagctatattgtttgtttwagaatcatagaaaatttaatttgaaagggacttcaaaaggtcatctcatccatcctccaagcaaagcagggcaaactttgatgttattrtcaggctactcaggtccttgtttttgtcttcaamaaaatacagaggtttcttttcttcgtagagtgtaattgcatttaaggttttttataattcttcctcggtgacttcttg

SEQ ID NO: 27541 - DNA, 600 bp, Chicken  19866894244732_4
ctgatgtatgtttgttcacaggcatgtacagtggttccagcgctaaccataatggtccctcaccaggtatactgccacctcctcacgacatcccttcaagacaccatcctcttgactctgccctttccagtccacatcaccatcagtcgccattggagagtgccagggaagggtatgtgttgtgaaacatgcttggcttgygtctggcatgatgaagactaattaattgtttattatactttgcatagatactgtttgaatgaaaaaaactgactaaaagttagctatattgtttgtttwagaatcatagaaaatttaatttgaaagggacttcaaaaggtcatctcatccatcctccaagcaaagcagggcaaactttgatgttattrtcaggctactcaggtccttgtttttgtcttcaamaaaatacagaggtttcttttcttcgtagagtgtaattgcatttaaggttttttataattcttcctcggtgacttcttgcagatttggataagtgtagatgacttttctcagctaaaatgaaaaaattctcaaagggtagtaaagcaagctatgactcactcagaatgaggyagtgtt

SEQ ID NO: 27542 - DNA, 600 bp, Chicken  19866894244732_5
atcccttcaagacaccatcctcttgactctgccctttccagtccacatcaccatcagtcgccattggagagtgccagggaagggtatgtgttgtgaaacatgcttggcttgygtctggcatgatgaagactaattaattgtttattatactttgcatagatactgtttgaatgaaaaaaactgactaaaagttagctatattgtttgtttwagaatcatagaaaatttaatttgaaagggacttcaaaaggtcatctcatccatcctccaagcaaagcagggcaaactttgatgttattrtcaggctactcaggtccttgtttttgtcttcaamaaaatacagaggtttcttttcttcgtagagtgtaattgcatttaaggttttttataattcttcctcggtgacttcttgcagatttggataagtgtagatgacttttctcagctaaaatgaaaaaattctcaaagggtagtaaagcaagctatgactcactcagaatgaggyagtgtttgcctttgtaggacttagtttgtgtcagrctttctcacttccttgcactctgttaggactttctgtaatacacctttcagctgcaagca

SEQ ID NO: 27543 - DNA, 600 bp, Chicken  19866894244732_6
tttccagtccacatcaccatcagtcgccattggagagtgccagggaagggtatgtgttgtgaaacatgcttggcttgygtctggcatgatgaagactaattaattgtttattatactttgcatagatactgtttgaatgaaaaaaactgactaaaagttagctatattgtttgtttwagaatcatagaaaatttaatttgaaagggacttcaaaaggtcatctcatccatcctccaagcaaagcagggcaaactttgatgttattrtcaggctactcaggtccttgtttttgtcttcaamaaaatacagaggtttcttttcttcgtagagtgtaattgcatttaaggttttttataattcttcctcggtgacttcttgcagatttggataagtgtagatgacttttctcagctaaaatgaaaaaattctcaaagggtagtaaagcaagctatgactcactcagaatgaggyagtgtttgcctttgtaggacttagtttgtgtcagrctttctcacttccttgcactctgttaggactttctgtaatacacctttcagctgcaagcattaaccagtaagaccttaatcagggaaggatata

SEQ ID NO: 27544 - DNA, 600 bp, Chicken  19866894244732_7
tgtttwagaatcatagaaaatttaatttgaaagggacttcaaaaggtcatctcatccatcctccaagcaaagcagggcaaactttgatgttattrtcaggctactcaggtccttgtttttgtcttcaamaaaatacagaggtttcttttcttcgtagagtgtaattgcatttaaggttttttataattcttcctcggtgacttcttgcagatttggataagtgtagatgacttttctcagctaaaatgaaaaaattctcaaagggtagtaaagcaagctatgactcactcagaatgaggyagtgtttgcctttgtaggacttagtttgtgtcagrctttctcacttccttgcactctgttaggactttctgtaatacacctttcagctgcaagcattaaccagtaagaccttaatcagggaaggatatattatcacattgattatatagattgcattgctacagtgttatatttctatactgtcattttctttgaggatctcaaaacatatcaacagtaaagaatctctgcaatccaaaaaactctgctctcatcctagaagcttctgtggtgcctatactgatgcaaatcatatataaa

SEQ ID NO: 27545 - DNA, 600 bp, Chicken  19866894244732_8
acttcaaaaggtcatctcatccatcctccaagcaaagcagggcaaactttgatgttattrtcaggctactcaggtccttgtttttgtcttcaamaaaatacagaggtttcttttcttcgtagagtgtaattgcatttaaggttttttataattcttcctcggtgacttcttgcagatttggataagtgtagatgacttttctcagctaaaatgaaaaaattctcaaagggtagtaaagcaagctatgactcactcagaatgaggyagtgtttgcctttgtaggacttagtttgtgtcagrctttctcacttccttgcactctgttaggactttctgtaatacacctttcagctgcaagcattaaccagtaagaccttaatcagggaaggatatattatcacattgattatatagattgcattgctacagtgttatatttctatactgtcattttctttgaggatctcaaaacatatcaacagtaaagaatctctgcaatccaaaaaactctgctctcatcctagaagcttctgtggtgcctatactgatgcaaatcatatataaaacatgcattcttttcttccaagtacttggacaggg

SEQ ID NO: 27546 - DNA, 600 bp, Chicken  19866894244734_1
gtggagcaactcagattatgaaaggacttgcaaaagaacctgggctaaactagcctagttgtaatcaggttgaaaatttgttacctgggagttgagaaatgagcctgaaagaggcaggaaattgcttcataggggtaaccgagatccaagcagtcaggaagagctgcagtgggcgggagctgtgccggagagggctgtggtgttgaacgttgcattggcagtgacgctagctaaactcagcagcagcagggtctgcagtccatcagctctgacatccagtaggtgtcattgcagccaackgggattatcggtctcagaaggcagggatgatttgtcagggtgcagggtgggagagagggaaacccaagtcgaaatacacgattccagagctgcaaatctgtgagcgctttaggaagagaatgcctctatttatcttcagatttttccaaatacgtaaaactctgatttctcatcattagcctcgtgcttttggagacatctgtgtttagtttcccgtggattgaaaatwgatgcaaaaaagaagaaacattttcaatccttctttgtgaatttggtttgattaaaaattagtgtgctttc

SEQ ID NO: 27547 - DNA, 600 bp, Chicken  19866894244734_2
gctaaactcagcagcagcagggtctgcagtccatcagctctgacatccagtaggtgtcattgcagccaackgggattatcggtctcagaaggcagggatgatttgtcagggtgcagggtgggagagagggaaacccaagtcgaaatacacgattccagagctgcaaatctgtgagcgctttaggaagagaatgcctctatttatcttcagatttttccaaatacgtaaaactctgatttctcatcattagcctcgtgcttttggagacatctgtgtttagtttcccgtggattgaaaatwgatgcaaaaaagaagaaacattttcaatccttctttgtgaatttggtttgattaaaaattagtgtgctttctgggtagaggaaaggtacagtttacataaattacagcttaggcagatgattatcagaaagattaaaataatctcttgttgataaccaagtcatgaaagtcttggtggaagtattttatagtgggtcacaaagctagaatggtagtgagagacagagtcgctcttctatcttaaagggacatttttccaatgaattgatttagtacagagctactcacagatgtaagaat

SEQ ID NO: 27548 - DNA, 600 bp, Chicken  19866894244734_3
tgattatcagaaagattaaaataatctcttgttgataaccaagtcatgaaagtcttggtggaagtattttatagtgggtcacaaagctagaatggtagtgagagacagagtcgctcttctatcttaaagggacatttttccaatgaattgatttagtacagagctactcacagatgtaagaattattcacaagtgagaaattgtaatttcaacccatatctttgtatgtggaacgggtgataatgatataaaacaatctttaaataaagtgtttgggctagttgcagcattagacacttyataaaattatttcttgtatgtaataattttttctcttgggaccatgcttgagttcacaagatgacagctgtggtatttctcaattaatcacagtggcagtcagtgcattatgcataaggctttggcctcttcatttagacagttcttcaaatatcttttgtctcttaattgaaaagcaggaagcggctcatacagatgacttcggtgtcttttcaaagctagattgtccttaggtagataattgttatccactgaggactgatacgggtttgtttcaaagagtcgacttctgtgtgtatt

SEQ ID NO: 27549 - DNA, 600 bp, Chicken  19866894244741_1
ttggagttctataggaggcactttttgcctttctgaagttaatccagctctaagatagataagcaaaaggccaacgctagtggaaaaataccacagaaagtatttgtgtagataaatgagctttctaaaggcaatgctcctgtcacaatggaaaaattgtcagtcactaaatagagagatggagaattaaaacagaagaaactacagcacacaacctgtttcctgggtacaaggacgtctctgctggttagggacaatgctttactgaatacacctaataagttaaatgtaaaagtgtaygcatttcataagggatccatttgagcaaatgttgacatgaacttctgtgctagttgtctggaccaccaccagagctgacagagaaaaaagcacttccagggaagaatgcatctcattttaaagcagttgtctaaaaaggggtcagatgaactgcatcccaaaacatctatttctttttactgactggaagatgagcccatataactcagtcaaacgtggacagcaagtctctcggtatttaaagctaatggtggattcacttctctgagtgtcaaactsattgcagcacctaacttcaga

SEQ ID NO: 27550 - DNA, 600 bp, Chicken  19866894244741_2
aagttaaatgtaaaagtgtaygcatttcataagggatccatttgagcaaatgttgacatgaacttctgtgctagttgtctggaccaccaccagagctgacagagaaaaaagcacttccagggaagaatgcatctcattttaaagcagttgtctaaaaaggggtcagatgaactgcatcccaaaacatctatttctttttactgactggaagatgagcccatataactcagtcaaacgtggacagcaagtctctcggtatttaaagctaatggtggattcacttctctgagtgtcaaactsattgcagcacctaacttcagactcaagtacagacatgggctttgcagaaatgaatccactttctgtgctgactggaaattgtactccagagaaggccaagtcccgagtttctgtatgatctatgttgccaattaaaatgaatcaagatgtagtctttacagttgcagagatggcctttcaaatacacacgaaatgcaaatgagagctatgctatattcctgagtctgcagattaatacaagcagcacttcagtgacgctcaaaagcatgaaaagagccatcacaagaaaattctcaagac

SEQ ID NO: 27551 - DNA, 600 bp, Chicken  19866894244741_3
tttaaaggactacagcaagtgactagaagagaactgcacaacgaactttaacattacatttgatatagtagaagaatacatttaaaagcagcagagcatttttttctatccctaaaagcatgaagaaaggagctagaagggacttgaattgcacatttgaaaaattactcaaggacaacaggatgtacggcaagttattttaatggctgagtttatgacaaaggatgcccagagcacaaggatggctgccatcttgagaagatgaatacatttagagatcaggtgctttcttagcatacrtatcagataaactgtatgtgtaggctggtagagcaatctagcaggacaagcacacaggcaatttctagagacaaaagcttgtaattgtccaagaatttaattattataaataaaattatgatcacagaggttaaatgcttgaaagtattttgccaaagtcatttagacgtggaccaaaactccgagagaataagaaggaaaaagcaattcatgtttgcatgctgggattttcattaaaaccctcaaggtagcttataaccattaaaaatacataataaaaaggcatagggcatctactta

SEQ ID NO: 27552 - DNA, 600 bp, Chicken  19866894244750_1
attccattctgttgctgtatgacagatggcagcagaggggcagtctgacagaacagtgtctgacgtgggagtgcgcatggaacaaaggaatcgaactctttcatgtagaaaatattgcactcattgatgtttgtcagtgcttgctgaaagtttatggagaccaaacagtggatgtgagtatagtgaggcagtgggtggtgtttcacattgctgttgccactgctgaaagaccagctgtgttccaggcagccatgcagatttttatgaggatggcatgcaggctctcattcattgctggcraaaatgcatagctaatggtggtggctacgttcagaaatagtgttctgtagctgacaatttgttgtatcaaacagcattattgtgttctttgtatctgtagtttccatggaaataagtaggagacattactgtcggagagacctatatattatttcttacgtgtagtagttaaaaccaagctgacccaagactgtctggattctgtgttaatactgacatttctctccagaagatgccacgtctggctctcccagatgacagcgctcctattgcaggaggataagtacaggggagtttatg

SEQ ID NO: 27553 - DNA, 599 bp, Chicken  19866894244751_1
  misc_feature (1)..(19): n is any nucleotide
nnnnnnnnnnnnnnnnnnnttaagaaaagctgaacatatatgcaagaggctgttttattttggtttaaaacaaagcaagaaattgtattttgcttaatcacataactaataaagctatactacagtgtgttaaaaaaatgtatgagagattggtgaatttttatcacatttgcttgcaatgactacaaagtgacatacgggactgggatgtttttgtgttgaaccatagccaatttacttaggaaaataaagagaaaatgtcaacaaactaaaataaaagtaacaaagtaagaagagaargacagaggcagttgccagagcttaaagcaatgctttgactccattcttacagctagccatttgagaagctgatagaggactcatacctcatacagatagaccatgttgtcttccattgaatttaagcascaggaggctgagcaattcccatgaaatcaacagcagttgacatcaaggtcttgttttcccacagtctgcatatcaagacctgctttacagataaggtggagggaatacagataatcattctaatctcacccgtcatgcaactcctacaaagcttgctgaaagttgttact

SEQ ID NO: 27554 - DNA, 600 bp, Chicken  19866894244751_2
ttaaaaaaatgtatgagagattggtgaatttttatcacatttgcttgcaatgactacaaagtgacatacgggactgggatgtttttgtgttgaaccatagccaatttacttaggaaaataaagagaaaatgtcaacaaactaaaataaaagtaacaaagtaagaagagaargacagaggcagttgccagagcttaaagcaatgctttgactccattcttacagctagccatttgagaagctgatagaggactcatacctcatacagatagaccatgttgtcttccattgaatttaagcascaggaggctgagcaattcccatgaaatcaacagcagttgacatcaaggtcttgttttcccacagtctgcatatcaagacctgctttacagataaggtggagggaatacagataatcattctaatctcacccgtcatgcaactcctacaaagcttgctgaaagttgttacttgattaatgccagactgaataactattctgaaatattcacacttaaataaaaagaatcaaagatgtttttgtacgtatctggaatttaatctgaatttaagatctttgttaaaggaattgcagtgtgatc

SEQ ID NO: 27555 - DNA, 600 bp, Chicken  19866894244762_1
ctaagaatcaggattgcaacatgaagggcctccccctaggctgaagaacaagtttcagtttcagagttagaaaaataaaacaatacttcctcagtatgaatctgtggcatgagatgagatctgcaagaggggaaaactttcaaatatctgaagagcctaatcatatctccttcaaatgctgtgtcaggctcctcctcataaggatcaaagaagagcgtatatacatttggaggccaaatgcaccaagttgttatcactggctactattacgtgtggcatatcatagagagatggcagtgytaaatctcatgctgggtgtttatctggagacaaccaggaaattgttaagctatcctagtcactatcccagctatccctttcttgacttgcttatggtaacatgcaaaagggaaaaggagattaaacagcaagactaaagaacatgttattgtttgtaataggattgaaaggctatttccagtaaacccatgacaactatcttcccaaggcaagagttgctgtgaagtagaaacagaacttgcctcattcacacatcttccaggttygtgagtattccattgccacaaagtctaagtggag

SEQ ID NO: 27556 - DNA, 583 bp, Chicken  19866894244762_2
ttacgtgtggcatatcatagagagatggcagtgytaaatctcatgctgggtgtttatctggagacaaccaggaaattgttaagctatcctagtcactatcccagctatccctttcttgacttgcttatggtaacatgcaaaagggaaaaggagattaaacagcaagactaaagaacatgttattgtttgtaataggattgaaaggctatttccagtaaacccatgacaactatcttcccaaggcaagagttgctgtgaagtagaaacagaacttgcctcattcacacatcttccaggttygtgagtattccattgccacaaagtctaagtggagtccttattctgggtgcccttgttctattcccagctgtttttcacacatcaggcagccattagacatcagcatttctataccttattccttcctatgcaaaaagagaataayaccaygtaggtcacagagatactacacatctgttgtcaaaaagggggtgactcctggagatccacagatagatagtattaaagaagggcaaagactgcttatacttttctctgctcacctgtcctttcttcccctttc

SEQ ID NO: 27557 - DNA, 438 bp, Chicken  19866894244762_3
aaaaggagattaaacagcaagactaaagaacatgttattgtttgtaataggattgaaaggctatttccagtaaacccatgacaactatcttcccaaggcaagagttgctgtgaagtagaaacagaacttgcctcattcacacatcttccaggttygtgagtattccattgccacaaagtctaagtggagtccttattctgggtgcccttgttctattcccagctgtttttcacacatcaggcagccattagacatcagcatttctataccttattccttcctatgcaaaaagagaataayaccaygtaggtcacagagatactacacatctgttgtcaaaaagggggtgactcctggagatccacagatagatagtattaaagaagggcaaagactgcttatacttttctctgctcacctgtcctttcttcccctttc

SEQ ID NO: 27558 - DNA, 433 bp, Chicken  19866894244762_4
gagattaaacagcaagactaaagaacatgttattgtttgtaataggattgaaaggctatttccagtaaacccatgacaactatcttcccaaggcaagagttgctgtgaagtagaaacagaacttgcctcattcacacatcttccaggttygtgagtattccattgccacaaagtctaagtggagtccttattctgggtgcccttgttctattcccagctgtttttcacacatcaggcagccattagacatcagcatttctataccttattccttcctatgcaaaaagagaataayaccaygtaggtcacagagatactacacatctgttgtcaaaaagggggtgactcctggagatccacagatagatagtattaaagaagggcaaagactgcttatacttttctctgctcacctgtcctttcttcccctttc

SEQ ID NO: 27559 - DNA, 599 bp, Chicken  19866894244764_1
  misc_feature (1)..(88): n is any nucleotide
nnnnnnnnnnnnnnnnnnnnnnnnnnnnnnnnnnnnnnnnnnnnnnnnnnnnnnnnnnnnnnnnnnnnnnnnnnnnnnnnnnnnnnnnctgctgaacaataattgctaaattttctgagggattccttactgtccccgttaatcccttcagccacacaaatttctgtgctggagcacatgcagaagcaagaaaacacagaagctgtcttcgtgttgcttgtcagctgttctgccagatctctgtgggagatcttagcacaagtcctgtcaaattgaattgtttggctagtttatcattamgttttgcgagtaattttggtaaaggtataacacctgtgttagtcaatatttattatcttcctttctgttgatactacttgcatggaatttatttagaaaataattgtacatctgctctcaaaggtttgctagcatggactcttcagctcttgatrtagtatttctgatgccaaaattttggcctcatattagaaattagataaaagtcatgatgtccaatatttgacaatggaaagtattatgtggtcagtgaaaacaggcagttaactgaagttatactcgtgatatcaagtaccata

SEQ ID NO: 27560 - DNA, 600 bp, Chicken  19866894244764_2
acaaatttctgtgctggagcacatgcagaagcaagaaaacacagaagctgtcttcgtgttgcttgtcagctgttctgccagatctctgtgggagatcttagcacaagtcctgtcaaattgaattgtttggctagtttatcattamgttttgcgagtaattttggtaaaggtataacacctgtgttagtcaatatttattatcttcctttctgttgatactacttgcatggaatttatttagaaaataattgtacatctgctctcaaaggtttgctagcatggactcttcagctcttgatrtagtatttctgatgccaaaattttggcctcatattagaaattagataaaagtcatgatgtccaatatttgacaatggaaagtattatgtggtcagtgaaaacaggcagttaactgaagttatactcgtgatatcaagtaccataacaaggactgatgttaaaattactggcatagagatgcactgtatgtcctagtattctttgaggagccaagtgaagtcttagytctgcaccttactgatagatactgtttggtttattggtaagggaacctcaatatgtcgaaatagcagtgggtca

SEQ ID NO: 27561 - DNA, 600 bp, Chicken  19866894244764_3
atggaatttatttagaaaataattgtacatctgctctcaaaggtttgctagcatggactcttcagctcttgatrtagtatttctgatgccaaaattttggcctcatattagaaattagataaaagtcatgatgtccaatatttgacaatggaaagtattatgtggtcagtgaaaacaggcagttaactgaagttatactcgtgatatcaagtaccataacaaggactgatgttaaaattactggcatagagatgcactgtatgtcctagtattctttgaggagccaagtgaagtcttagytctgcaccttactgatagatactgtttggtttattggtaagggaacctcaatatgtcgaaatagcagtgggtcaagttggtgatctttcctcattttgagttcctttatatactgtttttttttaagtgtgaaatgctttgaaaaaaaaaaattgaaatttcaagtgattttcaactactcatgaactttgttgttttttggaaaatatggctaatagaaaatagttctaaacctcagacagcactgggtattgatctgaaaatagttgtttcctttttcccattatttactaaaaaaat

SEQ ID NO: 27562 - DNA, 600 bp, Chicken  19866894244766_1
gaggagtagttggagctgttagttgctctcagacaggaaggatgcactctctaatgttttatcccagcagcgggagggatgggcagcctccattcacctccaaagccctacgcacagctccagcccctctgcagcccgtgccctgcagcacgtctgagagcgcacctgcacacccaggggcgcacctgcacacccagccttggcagctgcgagccgtgcggggtgccagggagtgctcggggtgggggctaggcatgcacagcgggtggcaaggcatgcgctcctgggggtgggagtgcsaagcgcccggagatgccacgctgggaagggatggagcagagcaacgcggacccgttcgtgggagactcctgccccccagtgtcggccctgggcagtgccagctacaaacacacgcaagtgttgcagcaccctcctgctctctggtcatyggtcgccttgtagcgatatgttggattacgctccaattttacacttccatttctcttgcaaacgtgacttctctgcggcgcagaggggggaccatcatttcccaccccctccgttgtcaccgttggactttcgggcagtttcagctttcct

SEQ ID NO: 27563 - DNA, 600 bp, Chicken  19866894244766_2
acgtctgagagcgcacctgcacacccaggggcgcacctgcacacccagccttggcagctgcgagccgtgcggggtgccagggagtgctcggggtgggggctaggcatgcacagcgggtggcaaggcatgcgctcctgggggtgggagtgcsaagcgcccggagatgccacgctgggaagggatggagcagagcaacgcggacccgttcgtgggagactcctgccccccagtgtcggccctgggcagtgccagctacaaacacacgcaagtgttgcagcaccctcctgctctctggtcatyggtcgccttgtagcgatatgttggattacgctccaattttacacttccatttctcttgcaaacgtgacttctctgcggcgcagaggggggaccatcatttcccaccccctccgttgtcaccgttggactttcgggcagtttcagctttcctgctggagttgaaaaggacccttaaaagccatctggtccaactccccgcactgaacagggacacccgcagytccatcagctgctcagagcccatccagcctgaccttggtgtcttcagggatggaccaccacgaccatctctctgggcaa

SEQ ID NO: 27564 - DNA, 511 bp, Chicken  19866894244766_3
gccccccagtgtcggccctgggcagtgccagctacaaacacacgcaagtgttgcagcaccctcctgctctctggtcatyggtcgccttgtagcgatatgttggattacgctccaattttacacttccatttctcttgcaaacgtgacttctctgcggcgcagaggggggaccatcatttcccaccccctccgttgtcaccgttggactttcgggcagtttcagctttcctgctggagttgaaaaggacccttaaaagccatctggtccaactccccgcactgaacagggacacccgcagytccatcagctgctcagagcccatccagcctgaccttggtgtcttcagggatggaccaccacgaccatctctctgggcaacctgtgccagcgcctcaatgcccctatggtaaaaacttttcctttctcttctttatatctctcctcttttactttgaaaccacttccccttcttctatcacaacagaccctgctacaggggtcagtcccttc

SEQ ID NO: 27565 - DNA, 600 bp, Chicken  19866894244785_1
tctcctataacactgaaagaggcattcaaattgaagttggcatccagccttcattatagttgttgttactgctgccaacagcagaatcaagaagcagatattagaaatagctgagctcattagttcaaaacccagcgagggctggctgcccatcagtagaggtacactaactgaatgccaggtccggcattccatcgcacgggagggatattgaaaaagtaggtactgtgaacattaaagatcttacttttgttgtctacatgcttaccttcatgttatccaaaggctatgatgaaccaractcagtggaaggtggctgtatcaagtggttcaccacattccatttgacttcatactcacaatcatcaacacttcagaatcaatgcttctaaagctctattactacttttgcctgggaaaataaccgtattgacatgtctccttccacagaaggtctacttatgcatctgggttctcaccccaacagttacacagagtaataaaggaggctgcccttatttactccagttctcctctaaaatatcaaaaccagtgaaactgaagaaaagaaagaggaaattcaccttcttaattacagaa

SEQ ID NO: 27566 - DNA, 599 bp, Chicken  19866894244794_1
  misc_feature (1)..(11): n is any nucleotide
nnnnnnnnnnnctaacccacagatctcagatcaccccagaacagtgggggaaagctgccaaaaaacagctctttagctgagcccctctaaagcccagttccagcccaaaactatgggctttgtgctgaagacttgagcaaacagcaaacatgagccttgttgctgccatcaccctgcaggttgctcagacccttctgctcctttccagcctcttctctctcaacaaagaggagaacaaaggtgacaatgcaactgcaggccacagttggtgcacttttgtggtaaagagacagagagagraaggctgagagaaatgatcccatggtaactgcagcgtgaaacggatgaaatgttgtggaaaaggcattggatttctattgcactgaggctcttctccggggagcatgcttctgggagcactgcactgaggggctttgccaccagtgagcagtgaagacctgcaacaagcaggagggatcagatcgaacgaagcaaatcaaagtctctatgagaacactttcctgctcaccagggatgggacaggcttcccgcgacgcagagcaygctgcttaaagctaatgctgcttaaagataatact

SEQ ID NO: 27567 - DNA, 600 bp, Chicken  19866894244794_2
gttggtgcacttttgtggtaaagagacagagagagraaggctgagagaaatgatcccatggtaactgcagcgtgaaacggatgaaatgttgtggaaaaggcattggatttctattgcactgaggctcttctccggggagcatgcttctgggagcactgcactgaggggctttgccaccagtgagcagtgaagacctgcaacaagcaggagggatcagatcgaacgaagcaaatcaaagtctctatgagaacactttcctgctcaccagggatgggacaggcttcccgcgacgcagagcaygctgcttaaagctaatgctgcttaaagataatactccttatctttcttctgccccccaaacaaggayagagcaaatgaaggtcagycatgggcatggaatagaagacaggtgatttatctcaatgttgaatccaaattctggaagaacataaagcatttccccatatcctttaacattatacatgagtgctttgcaatcactagcagaatgggctcatgggattagcagggattttaggtgacaaatgatagcccaccctcttcacrcggatggaatgacaatttttttccatttggcaa

SEQ ID NO: 27568 - DNA, 600 bp, Chicken  19866894244794_3
cagcgtgaaacggatgaaatgttgtggaaaaggcattggatttctattgcactgaggctcttctccggggagcatgcttctgggagcactgcactgaggggctttgccaccagtgagcagtgaagacctgcaacaagcaggagggatcagatcgaacgaagcaaatcaaagtctctatgagaacactttcctgctcaccagggatgggacaggcttcccgcgacgcagagcaygctgcttaaagctaatgctgcttaaagataatactccttatctttcttctgccccccaaacaaggayagagcaaatgaaggtcagycatgggcatggaatagaagacaggtgatttatctcaatgttgaatccaaattctggaagaacataaagcatttccccatatcctttaacattatacatgagtgctttgcaatcactagcagaatgggctcatgggattagcagggattttaggtgacaaatgatagcccaccctcttcacrcggatggaatgacaatttttttccatttggcaactggaaataattcagtcctgtgcaatgcaagaccaagtacatctrtatcttccaccaaacagaacar

SEQ ID NO: 27569 - DNA, 600 bp, Chicken  19866894244794_4
tgttgtggaaaaggcattggatttctattgcactgaggctcttctccggggagcatgcttctgggagcactgcactgaggggctttgccaccagtgagcagtgaagacctgcaacaagcaggagggatcagatcgaacgaagcaaatcaaagtctctatgagaacactttcctgctcaccagggatgggacaggcttcccgcgacgcagagcaygctgcttaaagctaatgctgcttaaagataatactccttatctttcttctgccccccaaacaaggayagagcaaatgaaggtcagycatgggcatggaatagaagacaggtgatttatctcaatgttgaatccaaattctggaagaacataaagcatttccccatatcctttaacattatacatgagtgctttgcaatcactagcagaatgggctcatgggattagcagggattttaggtgacaaatgatagcccaccctcttcacrcggatggaatgacaatttttttccatttggcaactggaaataattcagtcctgtgcaatgcaagaccaagtacatctrtatcttccaccaaacagaacarggacaatcacagcagcagc

SEQ ID NO: 27570 - DNA, 600 bp, Chicken  19866894244794_5
gggatgggacaggcttcccgcgacgcagagcaygctgcttaaagctaatgctgcttaaagataatactccttatctttcttctgccccccaaacaaggayagagcaaatgaaggtcagycatgggcatggaatagaagacaggtgatttatctcaatgttgaatccaaattctggaagaacataaagcatttccccatatcctttaacattatacatgagtgctttgcaatcactagcagaatgggctcatgggattagcagggattttaggtgacaaatgatagcccaccctcttcacrcggatggaatgacaatttttttccatttggcaactggaaataattcagtcctgtgcaatgcaagaccaagtacatctrtatcttccaccaaacagaacarggacaatcacagcagcagcctcgactcgcagcaaacatgctgcaggtccctaagttctcacactttgcaaaattttatcaagagcctatcttcagcctgccacatttgtaagtcagatcatgttagcaacaagaataaacaacagttgtttgcccttgtgctgcacctttcatccaagggctctgcagtcattattctga

SEQ ID NO: 27571 - DNA, 600 bp, Chicken  19866894244794_6
cttctgccccccaaacaaggayagagcaaatgaaggtcagycatgggcatggaatagaagacaggtgatttatctcaatgttgaatccaaattctggaagaacataaagcatttccccatatcctttaacattatacatgagtgctttgcaatcactagcagaatgggctcatgggattagcagggattttaggtgacaaatgatagcccaccctcttcacrcggatggaatgacaatttttttccatttggcaactggaaataattcagtcctgtgcaatgcaagaccaagtacatctrtatcttccaccaaacagaacarggacaatcacagcagcagcctcgactcgcagcaaacatgctgcaggtccctaagttctcacactttgcaaaattttatcaagagcctatcttcagcctgccacatttgtaagtcagatcatgttagcaacaagaataaacaacagttgtttgcccttgtgctgcacctttcatccaagggctctgcagtcattattctgataagtcttctgttgttgctttgagacaagcagataccattattctcactttatagataaataaacagaggtcagggaa

SEQ ID NO: 27572 - DNA, 600 bp, Chicken  19866894244794_7
agagcaaatgaaggtcagycatgggcatggaatagaagacaggtgatttatctcaatgttgaatccaaattctggaagaacataaagcatttccccatatcctttaacattatacatgagtgctttgcaatcactagcagaatgggctcatgggattagcagggattttaggtgacaaatgatagcccaccctcttcacrcggatggaatgacaatttttttccatttggcaactggaaataattcagtcctgtgcaatgcaagaccaagtacatctrtatcttccaccaaacagaacarggacaatcacagcagcagcctcgactcgcagcaaacatgctgcaggtccctaagttctcacactttgcaaaattttatcaagagcctatcttcagcctgccacatttgtaagtcagatcatgttagcaacaagaataaacaacagttgtttgcccttgtgctgcacctttcatccaagggctctgcagtcattattctgataagtcttctgttgttgctttgagacaagcagataccattattctcactttatagataaataaacagaggtcagggaaatcccccaaggcaatccagaga

SEQ ID NO: 27573 - DNA, 600 bp, Chicken  19866894244804_1
cagacccaggctgctctgctggacatctgttgggatcttatctcgtgtcatgtttacagtttgtacacaaggctgtttggaataaacactgataaatgccaccctacaacttctgccctgccctgcagactgcgtgtcccagctcagtgtgacagctgtgcacagcagcacatacacacagccctgtgtgtccatctgctcctctgaggaccagggacaaagggtgatgggcacagagccgaggcctcctgaatgcactcttcccatgcaggttcagcatctggatttgcctggccttgyagcttgggcagtgcttgtgccagctccaggggtgtggggtgaggaaggaagtgtgccctgggagtcccgttctcctgggcacagagcagcctgcccctgtgcccccagccagcatctgacagcccagtgcagggccacacacagctcctgctgcactgtgagaaaggtaaagggtagcatctgcttctgtgatttaaagtcagtgctgtaaaggctaaccagtccttagctgtttgctggaagttaaccccatcctgttgctgtcccagggagtacctgggctgctgctgtctggcagag

SEQ ID NO: 27574 - DNA, 600 bp, Chicken  19866894244804_2
gcctgcccctgtgcccccagccagcatctgacagcccagtgcagggccacacacagctcctgctgcactgtgagaaaggtaaagggtagcatctgcttctgtgatttaaagtcagtgctgtaaaggctaaccagtccttagctgtttgctggaagttaaccccatcctgttgctgtcccagggagtacctgggctgctgctgtctggcagaggatgtgccaggacagcactgtggtcacttctctttgtgcagtgatcttctgaagcctctgaacacccaccctggcaccagggcacagrgacacgcagagctgaaggctgagcactgggacagacccagggcttctgcctctgtctggacacagagtgtaggtctgctccccgttaccgctgccttgcacagccagtccatgctgctctgaagtgtcgagtttgacataactgtgagctgtggtgtgccattccttgtgtatttgcaccagggatgcatcacacacagtgcgcttgctaatggggtacaatatggatgtgtgctcttaggctcccagggcatgcccagaagctggctgcagcggtctgcctgtccaggtaatattgtca

SEQ ID NO: 27575 - DNA, 600 bp, Chicken  19866894244806_1
aagatagtaggctgggcaaactagtgatagataaaaccaggagttgcagcatggtttgcaaggatgcaaatgtataaatgagttaggtacaagggagtgtaggcataatctgtctgtgtgcttgcaactgcatcccttttacctcaaaatcatacctgaactgaaactgtacaacacaacacaacaaaaatagttttaaaccatctaaaggtcccatggcatttccagcttttgatgactttttcatcacagctatccttctccttgtgttcatgcagattcttactgacatcaggcatygcattgcctggcacagcaatttgtggaacactggagcagggatagcagtgcagaaaataaaatgwtgatgatgatgatggaggttttcctgggattcccacatgtgcwctcattattactgctgctatcattcagctgctgaactctccacgctgcgattgttgatgcctctgctatcaaagtaggtagaatattaaactgagcacagcttttcttggattgggcagtggaccattgtrtgtgtcttctctcacaacttaaagttggtgagctgtagtgagtagctgaagaccagagggc

SEQ ID NO: 27576 - DNA, 600 bp, Chicken  19866894244806_10
ctctggcttgtcagaattattttatacatcattagctcagcagtgcaggggatgattactttcccatagaaaagtaattctttcttggaagacgcatgtaaatcttggctgttgagaccgtggcttttgtaaatttccttgaaagccgaatactcgggattttattcttcaccgcctcgtgccatcatttatagctctgccaagagcttgtggaacactgctgaaccagggggaccagtggcagcccgtgctgcgtgtgctcgcctttgagactgcttgctttgccatctcagcaccttygtacgcrggtcttgtttacttcttcagtgtgatttcaacttcatttcctttaatgatcaaaagtgggcggcacggtttagccctgaaaaggagagatcccacagcctgcctacagcgggagaggaactagggcagaggccagctgggcagcggccagggctgcggctgcttcccgggccggagcgcttcgaggtgaaatacaatcggccacgctggaaaactaggggctgtaaatagaataaaacaaataagtgcttgggaaaaaaaaaattaggaaaaaaaaaaaaagaagaaggacaa

SEQ ID NO: 27577 - DNA, 600 bp, Chicken  19866894244806_11
ttgtcagaattattttatacatcattagctcagcagtgcaggggatgattactttcccatagaaaagtaattctttcttggaagacgcatgtaaatcttggctgttgagaccgtggcttttgtaaatttccttgaaagccgaatactcgggattttattcttcaccgcctcgtgccatcatttatagctctgccaagagcttgtggaacactgctgaaccagggggaccagtggcagcccgtgctgcgtgtgctcgcctttgagactgcttgctttgccatctcagcaccttygtacgcrggtcttgtttacttcttcagtgtgatttcaacttcatttcctttaatgatcaaaagtgggcggcacggtttagccctgaaaaggagagatcccacagcctgcctacagcgggagaggaactagggcagaggccagctgggcagcggccagggctgcggctgcttcccgggccggagcgcttcgaggtgaaatacaatcggccacgctggaaaactaggggctgtaaatagaataaaacaaataagtgcttgggaaaaaaaaaattaggaaaaaaaaaaaaagaagaaggacaagaaagga

SEQ ID NO: 27578 - DNA, 600 bp, Chicken  19866894244806_2
gcaaatgtataaatgagttaggtacaagggagtgtaggcataatctgtctgtgtgcttgcaactgcatcccttttacctcaaaatcatacctgaactgaaactgtacaacacaacacaacaaaaatagttttaaaccatctaaaggtcccatggcatttccagcttttgatgactttttcatcacagctatccttctccttgtgttcatgcagattcttactgacatcaggcatygcattgcctggcacagcaatttgtggaacactggagcagggatagcagtgcagaaaataaaatgwtgatgatgatgatggaggttttcctgggattcccacatgtgcwctcattattactgctgctatcattcagctgctgaactctccacgctgcgattgttgatgcctctgctatcaaagtaggtagaatattaaactgagcacagcttttcttggattgggcagtggaccattgtrtgtgtcttctctcacaacttaaagttggtgagctgtagtgagtagctgaagaccagagggcagaacttgttcacccacgtagctgccaaggccaggcagtcwtgaagcacgctggaggcatctcca

SEQ ID NO: 27579 - DNA, 600 bp, Chicken  19866894244806_3
tctgtctgtgtgcttgcaactgcatcccttttacctcaaaatcatacctgaactgaaactgtacaacacaacacaacaaaaatagttttaaaccatctaaaggtcccatggcatttccagcttttgatgactttttcatcacagctatccttctccttgtgttcatgcagattcttactgacatcaggcatygcattgcctggcacagcaatttgtggaacactggagcagggatagcagtgcagaaaataaaatgwtgatgatgatgatggaggttttcctgggattcccacatgtgcwctcattattactgctgctatcattcagctgctgaactctccacgctgcgattgttgatgcctctgctatcaaagtaggtagaatattaaactgagcacagcttttcttggattgggcagtggaccattgtrtgtgtcttctctcacaacttaaagttggtgagctgtagtgagtagctgaagaccagagggcagaacttgttcacccacgtagctgccaaggccaggcagtcwtgaagcacgctggaggcatctccatggatcacgttccagaccccatccacacctggagttcctccak

SEQ ID NO: 27580 - DNA, 600 bp, Chicken  19866894244806_4
tttttcatcacagctatccttctccttgtgttcatgcagattcttactgacatcaggcatygcattgcctggcacagcaatttgtggaacactggagcagggatagcagtgcagaaaataaaatgwtgatgatgatgatggaggttttcctgggattcccacatgtgcwctcattattactgctgctatcattcagctgctgaactctccacgctgcgattgttgatgcctctgctatcaaagtaggtagaatattaaactgagcacagcttttcttggattgggcagtggaccattgtrtgtgtcttctctcacaacttaaagttggtgagctgtagtgagtagctgaagaccagagggcagaacttgttcacccacgtagctgccaaggccaggcagtcwtgaagcacgctggaggcatctccatggatcacgttccagaccccatccacacctggagttcctccakgctttttaacttcaaaaaatgttctgttcatcagctgcaattgtagatcgagttttcttcccagaaaatattctgctgggggaatgaaactgttacacagctatcacagcaaagcctcgttactgctattt

SEQ ID NO: 27581 - DNA, 600 bp, Chicken  19866894244806_5
atagcagtgcagaaaataaaatgwtgatgatgatgatggaggttttcctgggattcccacatgtgcwctcattattactgctgctatcattcagctgctgaactctccacgctgcgattgttgatgcctctgctatcaaagtaggtagaatattaaactgagcacagcttttcttggattgggcagtggaccattgtrtgtgtcttctctcacaacttaaagttggtgagctgtagtgagtagctgaagaccagagggcagaacttgttcacccacgtagctgccaaggccaggcagtcwtgaagcacgctggaggcatctccatggatcacgttccagaccccatccacacctggagttcctccakgctttttaacttcaaaaaatgttctgttcatcagctgcaattgtagatcgagttttcttcccagaaaatattctgctgggggaatgaaactgttacacagctatcacagcaaagcctcgttactgctatttgaggtatgacaccatggctgtacatctttcagttctgtagcataggcaggcattgcagagagaaccctaatagcactgtggtacaattactggggcttacag

SEQ ID NO: 27582 - DNA, 600 bp, Chicken  19866894244806_6
ctcattattactgctgctatcattcagctgctgaactctccacgctgcgattgttgatgcctctgctatcaaagtaggtagaatattaaactgagcacagcttttcttggattgggcagtggaccattgtrtgtgtcttctctcacaacttaaagttggtgagctgtagtgagtagctgaagaccagagggcagaacttgttcacccacgtagctgccaaggccaggcagtcwtgaagcacgctggaggcatctccatggatcacgttccagaccccatccacacctggagttcctccakgctttttaacttcaaaaaatgttctgttcatcagctgcaattgtagatcgagttttcttcccagaaaatattctgctgggggaatgaaactgttacacagctatcacagcaaagcctcgttactgctatttgaggtatgacaccatggctgtacatctttcagttctgtagcataggcaggcattgcagagagaaccctaatagcactgtggtacaattactggggcttacagttgccacagatcccctttccaacattcagccatgaagatctgctcartacaggcacattakttcaca

SEQ ID NO: 27583 - DNA, 600 bp, Chicken  19866894244806_7
cacacctggagttcctccakgctttttaacttcaaaaaatgttctgttcatcagctgcaattgtagatcgagttttcttcccagaaaatattctgctgggggaatgaaactgttacacagctatcacagcaaagcctcgttactgctatttgaggtatgacaccatggctgtacatctttcagttctgtagcataggcaggcattgcagagagaaccctaatagcactgtggtacaattactggggcttacagttgccacagatcccctttccaacattcagccatgaagatctgctcartacaggcacattakttcacattagcccctttagaaatacaatgttttaataatgatttaggaataaacagaaatcccatttctttcgtgctgccaatatacaatggtagagttatgctgggaaagaaagctctttggatggcgtacgtgtagacttggaccaaagtgcctgaaggtgtggtcttcccaggcaatctcagtatttctcagggggtttgtgtgtagacaagcctctgaaagtcacgagtgatgcaaccatacaacttccagaactggtgtccgaaacaaggactaagcacca

SEQ ID NO: 27584 - DNA, 600 bp, Chicken  19866894244806_8
ctccakgctttttaacttcaaaaaatgttctgttcatcagctgcaattgtagatcgagttttcttcccagaaaatattctgctgggggaatgaaactgttacacagctatcacagcaaagcctcgttactgctatttgaggtatgacaccatggctgtacatctttcagttctgtagcataggcaggcattgcagagagaaccctaatagcactgtggtacaattactggggcttacagttgccacagatcccctttccaacattcagccatgaagatctgctcartacaggcacattakttcacattagcccctttagaaatacaatgttttaataatgatttaggaataaacagaaatcccatttctttcgtgctgccaatatacaatggtagagttatgctgggaaagaaagctctttggatggcgtacgtgtagacttggaccaaagtgcctgaaggtgtggtcttcccaggcaatctcagtatttctcagggggtttgtgtgtagacaagcctctgaaagtcacgagtgatgcaaccatacaacttccagaactggtgtccgaaacaaggactaagcaccaaaaagagctatctt

SEQ ID NO: 27585 - DNA, 600 bp, Chicken  19866894244806_9
aatggcagtccatctttgggtgtttatatttgccatctggagacgtcagctttgttctgcagaactatgagatggtgtaagtaaatctcaagaagttgtaaagaacatttttaaaaggtttccacacaaatgtacccataaatagcatagaaaaatgaaagttgtagtcacgtgtaatggtacggacatgtatttttttctaagttattttattatctgatttttttttttttttggatcctattgctacagatagcacctaaagagttgtaattcacatgtatcacagagataataaamgttctagtttttagcttcttaattttatgcatgtgatggtctgctcagcgtgatcaggttcacagttcttccagtgcttctatactgaggcagatttcatggtttgcatggattttacacacagcaacttctgtggaaaagacttgaacaaaggatgatccactcgtaaaatacaacaaatcctggatcccttggacaggcagttgtgataattgtgctttattcttattgctgtcgctcttgcttttcgtacttgcaaaaattcgagcgtataatctgtatttccttgtactcagctac

SEQ ID NO: 27586 - DNA, 600 bp, Chicken  19866894244807_1
tcaggaccctgcaaagggactaatgccaagtaagaagttatgctttgatgcagggccagaatggttggactagatgacctttaaaggtccttcaaactcaaacagttctatgaaaatgacacagaaaagcccacataccttggagaatccaacacactgacgcctctcattggaccagtgtatttaagtgccaccatcagcaactgattcctcttttaaagacagatatccacggtagattgaaattactaacgctactgatagagaaatattttggtgaagagtggagattatgcaccmctgtgcaagcatcaagmctgtgttaagaaaaaacrtaagtgaggtattttgcaatagcactgtacrccccaagaatcacagaataagcgtgtgcagaagttctgacttsatttggaatagatgttttagaggggctgtgtcattagcgcagtattacrcagctcagagtccctgaaataatgatactggtatgtcttaagaacacagttcgtctacctcctgcttggactgagttgtgtccatgtgtctgtttaactggctaaagtcagggagctgaggttgtgtacaatagatcttcat

SEQ ID NO: 27587 - DNA, 600 bp, Chicken  19866894244807_2
gactaatgccaagtaagaagttatgctttgatgcagggccagaatggttggactagatgacctttaaaggtccttcaaactcaaacagttctatgaaaatgacacagaaaagcccacataccttggagaatccaacacactgacgcctctcattggaccagtgtatttaagtgccaccatcagcaactgattcctcttttaaagacagatatccacggtagattgaaattactaacgctactgatagagaaatattttggtgaagagtggagattatgcaccmctgtgcaagcatcaagmctgtgttaagaaaaaacrtaagtgaggtattttgcaatagcactgtacrccccaagaatcacagaataagcgtgtgcagaagttctgacttsatttggaatagatgttttagaggggctgtgtcattagcgcagtattacrcagctcagagtccctgaaataatgatactggtatgtcttaagaacacagttcgtctacctcctgcttggactgagttgtgtccatgtgtctgtttaactggctaaagtcagggagctgaggttgtgtacaatagatcttcattcactttaagcagatgt

SEQ ID NO: 27588 - DNA, 600 bp, Chicken  19866894244807_3
agttatgctttgatgcagggccagaatggttggactagatgacctttaaaggtccttcaaactcaaacagttctatgaaaatgacacagaaaagcccacataccttggagaatccaacacactgacgcctctcattggaccagtgtatttaagtgccaccatcagcaactgattcctcttttaaagacagatatccacggtagattgaaattactaacgctactgatagagaaatattttggtgaagagtggagattatgcaccmctgtgcaagcatcaagmctgtgttaagaaaaaacrtaagtgaggtattttgcaatagcactgtacrccccaagaatcacagaataagcgtgtgcagaagttctgacttsatttggaatagatgttttagaggggctgtgtcattagcgcagtattacrcagctcagagtccctgaaataatgatactggtatgtcttaagaacacagttcgtctacctcctgcttggactgagttgtgtccatgtgtctgtttaactggctaaagtcagggagctgaggttgtgtacaatagatcttcattcactttaagcagatgttcactgactaatcacatt

SEQ ID NO: 27589 - DNA, 600 bp, Chicken  19866894244807_4
ggactagatgacctttaaaggtccttcaaactcaaacagttctatgaaaatgacacagaaaagcccacataccttggagaatccaacacactgacgcctctcattggaccagtgtatttaagtgccaccatcagcaactgattcctcttttaaagacagatatccacggtagattgaaattactaacgctactgatagagaaatattttggtgaagagtggagattatgcaccmctgtgcaagcatcaagmctgtgttaagaaaaaacrtaagtgaggtattttgcaatagcactgtacrccccaagaatcacagaataagcgtgtgcagaagttctgacttsatttggaatagatgttttagaggggctgtgtcattagcgcagtattacrcagctcagagtccctgaaataatgatactggtatgtcttaagaacacagttcgtctacctcctgcttggactgagttgtgtccatgtgtctgtttaactggctaaagtcagggagctgaggttgtgtacaatagatcttcattcactttaagcagatgttcactgactaatcacattccggtcttatgtaaatacagttgaaattgct

SEQ ID NO: 27590 - DNA, 600 bp, Chicken  19866894244807_5
atgaaaatgacacagaaaagcccacataccttggagaatccaacacactgacgcctctcattggaccagtgtatttaagtgccaccatcagcaactgattcctcttttaaagacagatatccacggtagattgaaattactaacgctactgatagagaaatattttggtgaagagtggagattatgcaccmctgtgcaagcatcaagmctgtgttaagaaaaaacrtaagtgaggtattttgcaatagcactgtacrccccaagaatcacagaataagcgtgtgcagaagttctgacttsatttggaatagatgttttagaggggctgtgtcattagcgcagtattacrcagctcagagtccctgaaataatgatactggtatgtcttaagaacacagttcgtctacctcctgcttggactgagttgtgtccatgtgtctgtttaactggctaaagtcagggagctgaggttgtgtacaatagatcttcattcactttaagcagatgttcactgactaatcacattccggtcttatgtaaatacagttgaaattgcttaaacagtgcttcttttaaatgaagatacatagagtgataatg

SEQ ID NO: 27591 - DNA, 600 bp, Chicken  19866894244807_6
gacgcctctcattggaccagtgtatttaagtgccaccatcagcaactgattcctcttttaaagacagatatccacggtagattgaaattactaacgctactgatagagaaatattttggtgaagagtggagattatgcaccmctgtgcaagcatcaagmctgtgttaagaaaaaacrtaagtgaggtattttgcaatagcactgtacrccccaagaatcacagaataagcgtgtgcagaagttctgacttsatttggaatagatgttttagaggggctgtgtcattagcgcagtattacrcagctcagagtccctgaaataatgatactggtatgtcttaagaacacagttcgtctacctcctgcttggactgagttgtgtccatgtgtctgtttaactggctaaagtcagggagctgaggttgtgtacaatagatcttcattcactttaagcagatgttcactgactaatcacattccggtcttatgtaaatacagttgaaattgcttaaacagtgcttcttttaaatgaagatacatagagtgataatggaaccattaagttgtcttgtcatcagtcaggaaatagagtgctgtattt

SEQ ID NO: 27592 - DNA, 599 bp, Chicken  19866894244819_1
  misc_feature (1)..(4): n is any nucleotide
nnnnaaaagctctgatggcccctggatctgcaccctggatctgcacccacaccccaacttatgagctggttccctgggctaattgctgcccccagtcctggccagagagctcgggtcaccttgagctccaagtcagagcttctagaaagtggatgctttggaggcccttagggattggagatctgcaaagatcgtgacagcatgttccctgtgcaaatgaagccagatgggaggaggagtgcagctcatgcagatcatgagctgttttcactcgagctgtctggatgtgaataaaaaacramcccgggaaaacctttgttggtgaggggagaagcagcatgttagtgaagacagacaacccatgtgctgtcagcagagggaagagaaggtgtgtactgaggactccaggaaagaaaaacaagaccgggctttggcatgctgtttctaaaaaaatgaaaaggaggaggaggtggaaaaagtgagcaacacgccagccttcaacgccagcttacaaacaagggcttgacctgcagatccctgggggaagagtggggatccaaggtctagcagcagctctgcggggagtgaatcacaacctg

SEQ ID NO: 27593 - DNA, 599 bp, Chicken  19866894244819_2
  misc_feature (1)..(2): n is any nucleotide
nnaaaagctctgatggcccctggatctgcaccctggatctgcacccacaccccaacttatgagctggttccctgggctaattgctgcccccagtcctggccagagagctcgggtcaccttgagctccaagtcagagcttctagaaagtggatgctttggaggcccttagggattggagatctgcaaagatcgtgacagcatgttccctgtgcaaatgaagccagatgggaggaggagtgcagctcatgcagatcatgagctgttttcactcgagctgtctggatgtgaataaaaaacramcccgggaaaacctttgttggtgaggggagaagcagcatgttagtgaagacagacaacccatgtgctgtcagcagagggaagagaaggtgtgtactgaggactccaggaaagaaaaacaagaccgggctttggcatgctgtttctaaaaaaatgaaaaggaggaggaggtggaaaaagtgagcaacacgccagccttcaacgccagcttacaaacaagggcttgacctgcagatccctgggggaagagtggggatccaaggtctagcagcagctctgcggggagtgaatcacaacctgag

SEQ ID NO: 27594 - DNA, 600 bp, Chicken  19866894244821_1
atgagccctgatctcaacttatatgccaagattagttagaagtcttgatgcagcttcttttctgagctaggcggtcatgtcacaaatttgcctctttgcccacaatactgaatgtgaccgtgacccattcaaatctcccttcttgctgcccccagcctccaccaccatcacttgaaatctctgtgagctgtcaggaatggtggtttctactgcatttctttcaggacctgatgttctgtaagtggcaagagtttctggtttggagcataggcccattcccagacctgcttcttgcccttmcaggatactgaacttaacaaagcttaaacatctgaaatactaggaatgaaagaatggaacagtgcgagagctttgagtacttaatagagttggccatgagaaagctgtgctcagccataaccacacaggagctggtatgctgctgtaataaaagcagtgaagaaaggggcaataacatgcttacataaatgttacaaaattaggaaaaggaagaaaaacagatcttaactggcaccaaataatagcaatttgttttcaagccctgacacaaaaatgttgacttagcttttattaagctag

SEQ ID NO: 27595 - DNA, 600 bp, Chicken  19866894244822_1
gatatctaattcctgagaagtaattacaaaaataatgtgatagatgcactgtcaaggaagctgttctgttcatcccgagattgaagacctcagacaagcaagctgtcactggctattctcattcatgaagataaatatcatttcagactagagctgtgatttactttattttttcttaatgacctgtcaatctgctttttctcctactccttcatcaaagacacccttccaatctgatgttagacagactgagtggaaaaatcctgcatatcgactttggggactgttttgaggtaagtygtttgtatttgaacataaacttcagtaatgtttcacattctctgatagatcaaaaatttatttataagtcaagaaaaatagaccttgaagagtagtcctgagcaacctgtttgtttcttttttgagtttcacttttacctatgggtgaaaataaaattggttttatttcagaggyatgtcttggtgataaaytaaccactytagagcaagtaaagatgtattagctattagcatcactgttctgtaaaatttcttggagcagtttaagctccattggcaatttttgttacttagcattgg

SEQ ID NO: 27596 - DNA, 600 bp, Chicken  19866894244822_2
tcattcatgaagataaatatcatttcagactagagctgtgatttactttattttttcttaatgacctgtcaatctgctttttctcctactccttcatcaaagacacccttccaatctgatgttagacagactgagtggaaaaatcctgcatatcgactttggggactgttttgaggtaagtygtttgtatttgaacataaacttcagtaatgtttcacattctctgatagatcaaaaatttatttataagtcaagaaaaatagaccttgaagagtagtcctgagcaacctgtttgtttcytttttgagtttcacttttacctatgggtgaaaataaaattggttttatttcagaggyatgtcttggtgataaaytaaccactytagagcaagtaaagatgtattagctattagcatcactgttctgtaaaatttcttggagcagtttaagctccattggcaatttttgttacttagcattggcaacacrggcacatgtttgaattttccctgttgccaagttaattacctatgcttctctctcaaattagtggaagctcaggaatataaagctgggactttctttgtgtttggagtataa

SEQ ID NO: 27597 - DNA, 600 bp, Chicken  19866894244822_3
ttaatgacctgtcaatctgctttttctcctactccttcatcaaagacacccttccaatctgatgttagacagactgagtggaaaaatcctgcatatcgactttggggactgttttgaggtaagtygtttgtatttgaacataaacttcagtaatgtttcacattctctgatagatcaaaaatttatttataagtcaagaaaaatagaccttgaagagtagtcctgagcaacctgtttgtttcttttttgagtttcacttttacctatgggtgaaaataaaattggttttatttcagaggyatgtcttggtgataaaytaaccactytagagcaagtaaagatgtattagctattagcatcactgttctgtaaaatttcttggagcagtttaagctccattggcaatttttgttacttagcattggcaacacrggcacatgtttgaattttccctgttgccaagttaattacctatgcttctctctcaaattagtggaagctcaggaatataaagctgggactttctttgtgtttggagtataacccttaagggtgtaactagaaagcaatacttattaactcttaataagttagccattc

SEQ ID NO: 27598 - DNA, 600 bp, Chicken  19866894244822_4
tgctttttctcctactccttcatcaaagacacccttccaatctgatgttagacagactgagtggaaaaatcctgcatatcgactttggggactgttttgaggtaagtygtttgtatttgaacataaacttcagtaatgtttcacattctctgatagatcaaaaatttatttataagtcaagaaaaatagaccttgaagagtagtcctgagcaacctgtttgtttcttttttgagtttcacttttacctatgggtgaaaataaaattggttttatttcagaggyatgtcttggtgataaaytaaccactytagagcaagtaaagatgtattagctattagcatcactgttctgtaaaatttcttggagcagtttaagctccattggcaatttttgttacttagcattggcaacacrggcacatgtttgaattttccctgttgccaagttaattacctatgcttctctctcaaattagtggaagctcaggaatataaagctgggactttctttgtgtttggagtataacccttaagggtgtaactagaaagcaatacttattaactcttaataagttagccattcatttactaattctccat

SEQ ID NO: 27599 - DNA, 600 bp, Chicken  19866894244822_5
tcctactccttcatcaaagacacccttccaatctgatgttagacagactgagtggaaaaatcctgcatatcgactttggggactgttttgaggtaagtygtttgtatttgaacataaacttcagtaatgtttcacattctctgatagatcaaaaatttatttataagtcaagaaaaatagaccttgaagagtagtcctgagcaacctgtttgtttcttttttgagtttcacttttacctatgggtgaaaataaaattggttttatttcagaggyatgtcttggtgataaaytaaccactytagagcaagtaaagatgtattagctattagcatcactgttctgtaaaatttcttggagcagtttaagctccattggcaatttttgttacttagcattggcaacacrggcacatgtttgaattttccctgttgccaagttaattacctatgcttctctctcaaattagtggaagctcaggaatataaagctgggactttctttgtgtttggagtataacccttaagggtgtaactagaaagcaatacttattaactcttaataagttagccattcatttactaattctccattatttgttt

SEQ ID NO: 27600 - DNA, 502 bp, Chicken  19866894244822_6
tttgaacataaacttcagtaatgtttcacattctctgatagatcaaaaatttatttataagtcaagaaaaatagaccttgaagagtagtcctgagcaacctgtttgtttcttttttgagtttcacttttacctatgggtgaaaataaaattggttttatttcagaggyatgtcttggtgataaaytaaccactytagagcaagtaaagatgtattagctattagcatcactgttctgtaaaatttcttggagcagtttaagctccattggcaatttttgttacttagcattggcaacacrggcacatgtttgaattttccctgttgccaagttaattacctatgcttctctctcaaattagtggaagctcaggaatataaagctgggactttctttgtgtttggagtataacccttaagggtgtaactagaaagcaatacttattaactcttaataagttagccattcatttactaattctccattatttgtttaggttgcg

SEQ ID NO: 27601 - DNA, 600 bp, Chicken  19866894244825_1
aacttgatatattccagcagatgtaagacaggatttaagacaaagtccttatttctttctcctgtactgctccttagataactgcagtcatttcggaactgttggacatgtcttagaaaacatgtgtatgaagtataacaacatatgttgttatatcgtataacttactgcttaaatttatctttcagctaaaaagaattcaaacaagctttatcctgaacttccaagtgattatgcctctctgagtaagtactgagcttacacattttattagtgcaatatgaaatctgcaaagtcctsaaagtactttggaagacatctatcaacatttgcccatttctttattaaccatgagttaaaatgatattccattgcatacgctctcctgaaaatatttcattaatgtatattttattccttggctttatattccaacaaaaataagtcttacggcaaaagttattttgctttattcaatgaccttgaaaaatacattgaaaatagcaaagatattttacattgccacctaactgaagtgaaaaagaaagctgatataacaagcttgtgcccaaactcttatgcaaggtagtataactcctg

SEQ ID NO: 27602 - DNA, 600 bp, Chicken  19866894244829_1
ttgctttcctcccatctaggagcatcccccagctctctcgctcctgttcctcttcgttgcttacagtgacagctgctggctgcacagtgatgctggaagtttgcagagatcagccctcactttcagcagcctttgctaactcacgttgtgaactggagtcctggcttttatcatccaatatttgcccatatatgcctgtcacatctattctataaatatttcagtctcctttttgctattcatgatagaaagatgtagctaagtatggaggcaaagaaagcaacatggggacactacatyttttctaacaaagctggcatctcaacctatgttagttggccagccagtacaccaggcttagaaggagaggagggtgtttcacttaactggggtacatggggatccagaagggcatgagtcacatttgttcaccagtttgaggcctgagctatctgttcatttttgtcctttttaattttttttcccctttataaagcagtacttgattaaaaaatagcaaagtatcataccactggatgcttttcaaaaagcaatgtttgcccatggcccgaaaattgagttctttaccttctcataaaa

SEQ ID NO: 27603 - DNA, 515 bp, Chicken  19866894244829_2
aatatttgcccatatatgcctgtcacatctattctataaatatttcagtctcctttttgctattcatgatagaaagatgtagctaagtatggaggcaaagaaagcaacatggggacactacatyttttctaacaaagctggcatctcaacctatgttagttggccagccagtacaccaggcttagaaggagaggagggtgtttcacttaactggggtacatggggatccagaagggcatgagtcacatttgttcaccagtttgaggcctgagctatctgttcatttttgtcctttttaaytttttttcccctttataaagcagtacttgattaaaaaatagcaaagtatcataccactggatgcttttcaaaaagcaatgtttgcccatggcccgaaaattgagttctttaccttctcataaaaaaataaaaaataaaaaaaaacttaccctaaaaggcaagatttctcagcttcaaaaccttctctttctggaaaaaaaaaaatcataaatatt

SEQ ID NO: 27604 - DNA, 600 bp, Chicken  19866894244834_1
tttagattattctgtgttaccatattaaaagtcaaaaggagggatctttcaccttctattgagtgctgggattagtatcttgtccctagtttcaaagtcacagttcaggagaagaaaaccctctgtgattctctcacaccagttatcttcctcttatggttttttgagaagaataattggaaaaagaagaaaagcaagactagagaggagttttcaagtctgtgactttgaatgtagtcaacaaaataagaaagaacttaaacggacatgcacttttgcaagaaatgcatacctcaaaaygaatcaagtcagactgctgatacaccaggcaaacttcaasttctggaagtagcaggaacatagtgattgtgccagacatgcaagcattattcagccacagagagtattgtttagctggaaagttgttggcaccttcttgacattctttgaaggatccactgcattacattgaaagayaacagaaatagcaaaaatcattggtactacaagccagtaagtgaaagtagaaaaaagagagcttcagaagagctttgttttccagcaagctatggaaagacttgggttcctaggtaagaaatg

SEQ ID NO: 27605 - DNA, 600 bp, Chicken  19866894244834_2
gggatctttcaccttctattgagtgctgggattagtatcttgtccctagtttcaaagtcacagttcaggagaagaaaaccctctgtgattctctcacaccagttatcttcctcttatggttttttgagaagaataattggaaaaagaagaaaagcaagactagagaggagttttcaagtctgtgactttgaatgtagtcaacaaaataagaaagaacttaaacggacatgcacttttgcaagaaatgcatacctcaaaaygaatcaagtcagactgctgatacaccaggcaaacttcaasttctggaagtagcaggaacatagtgattgtgccagacatgcaagcattattcagccacagagagtattgtttagctggaaagttgttggcaccttcttgacattctttgaaggatccactgcattacattgaaagayaacagaaatagcaaaaatcattggtactacaagccagtaagtgaaagtagaaaaaagagagcttcagaagagctttgttttccagcaagctatggaaagacttgggttcctaggtaagaaatgcagatgaatctgaactacagtgaacatccatctccaagga

SEQ ID NO: 27606 - DNA, 600 bp, Chicken  19866894244834_3
tggaaaaagaagaaaagcaagactagagaggagttttcaagtctgtgactttgaatgtagtcaacaaaataagaaagaacttaaacggacatgcacttttgcaagaaatgcatacctcaaaaygaatcaagtcagactgctgatacaccaggcaaacttcaasttctggaagtagcaggaacatagtgattgtgccagacatgcaagcattattcagccacagagagtattgtttagctggaaagttgttggcaccttcttgacattctttgaaggatccactgcattacattgaaagayaacagaaatagcaaaaatcattggtactacaagccagtaagtgaaagtagaaaaaagagagcttcagaagagctttgttttccagcaagctatggaaagacttgggttcctaggtaagaaatgcagatgaatctgaactacagtgaacatccatctccaaggaacgtttcatcttgataccactgccctaaacactgctgagcacagtgagatgctgccagttatgagagatgctaggaaagatggagmggagcagaaggaagttttttaggaaaggaggtaggggatgccaaaatgagt

SEQ ID NO: 27607 - DNA, 600 bp, Chicken  19866894244834_4
tggcaccttcttgacattctttgaaggatccactgcattacattgaaagayaacagaaatagcaaaaatcattggtactacaagccagtaagtgaaagtagaaaaaagagagcttcagaagagctttgttttccagcaagctatggaaagacttgggttcctaggtaagaaatgcagatgaatctgaactacagtgaacatccatctccaaggaacgtttcatcttgataccactgccctaaacactgctgagcacagtgagatgctgccagttatgagagatgctaggaaagatggagmggagcagaaggaagttttttaggaaaggaggtaggggatgccaaaatgagtgagtctgaagcacaggtttgtcagaatacatttctctgagtcttaatatgtcttctccattctttagggcttttcctgaacagctgtactactgagagtgctgcattcctgttgcgagacgtgatgaaagggcagaagatgaaactgaagaggtgacaagtcattacccatactgtggaagagaattcatttcagaagtgacagtttaagtatacacaaagatgcaggaagattttttttccatactta

SEQ ID NO: 27608 - DNA, 600 bp, Chicken  19866894244834_5
ttaagtatacacaaagatgcaggaagattttttttccatacttaaacaatatggttcctttttatatggtgacatatttccacccttcaaagaataaagagattcctacctgccaaaaacaaatcatagctgctgtcagagccttctgcctctgatgtcttcacatcagatgcactcaacactccaatgcaagaccccgcctgaaccttccacattcatgtgatttgcactggagtagaaagattgcgtgctggaaaggggagctgaggatgtgcttcctatataccactccatccatayttttgagcaacagtgacctaatgatggtgatgaatatacctttatagtgtccatttacaatattcaaacaggcaattttgctattaacgttagattaacttttagatagagagagagatagatagatagatacatacatacatatatgctcatatgtatgcttaggctgctattaaaatcatatacagcagagggtacgttgaagactaccttctttaactcaagagaaattactcatatgatgttaaatagtatcagtcaattccttccttttactctcttcttcacccagaacttcca

SEQ ID NO: 27609 - DNA, 600 bp, Chicken  19866894244843_1
tctgcctatgcaggacacagccttggggctggcagatggctgctgcttttcaggccggtgcttttcaggctggcatgccttccctctcccccagccctccctcccagcgcacacactgcgcacagcagggccagctccaccaccaccccctctgccagagggcccggcagctcagccctcatgcccacagctgcagggatgcggctctgggtctggttggagctcacagccccgggcacagcagccccttgcagaggctgaatgggtggcaggagagcgggatggagctggagatgtgayctgctcagatggagctaccgttaaggcaaggaggagctgcaggagggctccaggtgaccacgcagggctgggctcggcacgctgcggccacagccttgggtgtgggtgctgggacggagcaagaaccccattggatttgcagagctggggctccaagtattgctcacccatccttgcaggaacggagaagccctcggactgccagcgcccacccggccccaggacagggctgccccgcgccagcaggaaggggtaaccccgctgcggcgctccaggagtgcggtctcactccatccccac

SEQ ID NO: 27610 - DNA, 600 bp, Chicken  19866894244844_1
aggcgtaagtggcagctcagggagaggggaacttcagcaacgaaacaacagcagtgctgggcttccacaaatgacatttggcattgaagagtagacattcagactgctgtggtcatagctaatgaggagtcagacaatcacagagaccacgcttaagtttccaatgttgcccttttatataagtattaattaaattccctgacttaagtgagttgtataaagtcaaaatccctcatttaagagcaaccccaacagcagttgtcccagctgttccaggtgtacgtattccagccatctccstactgtctccagggttatttattsccctttaggtgggaaacacttttaaaaatcggtttgccaaactggttttcatacagctgaaaataattagctgagatggagtttgtctgggctgtgtgtggagcagtacctgatgtgtggtgctggtaggagactgggttgcaaagctctctgtgctttactggcagaatacgcaggacgcacaggatgagataattagaattgatctgaggggtgagggatgccttcagaatcacgtctccaaaagctcgatgtcaggattctgttaatttgagg

SEQ ID NO: 27611 - DNA, 600 bp, Chicken  19866894244844_2
aggggaacttcagcaacgaaacaacagcagtgctgggcttccacaaatgacatttggcattgaagagtagacattcagactgctgtggtcatagctaatgaggagtcagacaatcacagagaccacgcttaagtttccaatgttgcccttttatataagtattaattaaattccctgacttaagtgagttgtataaagtcaaaatccctcatttaagagcaaccccaacagcagttgtcccagctgttccaggtgtacgtattccagccatctccstactgtctccagggttatttattsccctttaggtgggaaacacttttaaaaatcggtttgccaaactggttttcatacagctgaaaataattagctgagatggagtttgtctgggctgtgtgtggagcagtacctgatgtgtggtgctggtaggagactgggttgcaaagctctctgtgctttactggcagaatacgcaggacgcacaggatgagataattagaattgatctgaggggtgagggatgccttcagaatcacgtctccaaaagctcgatgtcaggattctgttaatttgaggcttatttttatttgtttttaagtc

SEQ ID NO: 27612 - DNA, 515 bp, Chicken  19866894244848_1
ctttgtatattgcttaatgcagaggtgcctgaaaaacaggaaaagatcaaataatttcatagtcacaagttaccatatcattcaaactctcatattctgcaaatgtaaaaagggtttgactcattttttttttacatatcaggtcatatttttgttcactgaaattaggaagaggaaatcagtgaaaagtgaaattccaaaagcgattgaatcataccatcatacactccacacaaaatggtatatatgtgattcattgctagaataatcatgaaaattattatgcctcctgccagaaayaccagtaagaaaacaacaacctgtttttctaatgcatatataattttaagtgctccaaattacatttgcagaaatggttgatatggtcagaaaactgctgttccttaaacgcagggtgctttcctgtactcagtgaaaagatatgttatatacactctaagcatactatgtcttagctaatagaaatatctcaaaatatcaaataaaataaattt

SEQ ID NO: 27613 - DNA, 600 bp, Chicken  19866894244852_1
catcgccgagtctgaatttatgccatgcccacagatatcaccaaagcaccaaaccctgctaggatgtgcgagccctgcaactcaaaagggggaactgtggacatgcaagtcacgtccagctggctgcagtacccagagcctgggaaatgcatcctcatacagccagggagctgacaacctgttagcatcacctattagcctgatcccgagtgtgctgcaatctgacctgctgcagctcaagagcctgtcagctaggagagatgaggggaaagcagaggcagcagcctggggattgatacrcagcaggtacaaatgaaagcaagaatcacggtatttacatgtgccttgccttgctaatggccttgctgcttgyacttatctgctccaggtcctgaggatatacaccacaatcaacactgactcagctagcctcactaaggaatgaattccaatcctttctaggatgcagttggaagcctaactaagtgctttccatacactttggctccttcaggcgcagttcccctgccagctgccctggctctgcaggaagcagcacagcccagcccggtgggtatcgttattctgccataaaggtgc

SEQ ID NO: 27614 - DNA, 600 bp, Chicken  19866894244852_2
cctgcaactcaaaagggggaactgtggacatgcaagtcacgtccagctggctgcagtacccagagcctgggaaatgcatcctcatacagccagggagctgacaacctgttagcatcacctattagcctgatcccgagtgtgctgcaatctgacctgctgcagctcaagagcctgtcagctaggagagatgaggggaaagcagaggcagcagcctggggattgatacrcagcaggtacaaatgaaagcaagaatcacggtatttacatgtgccttgccttgctaatggccttgctgcttgyacttatctgctccaggtcctgaggatatacaccacaatcaacactgactcagctagcctcactaaggaatgaattccaatcctttctaggatgcagttggaagcctaactaagtgctttccatacactttggctccttcaggcgcagttcccctgccagctgccctggctctgcaggaagcagcacagcccagcccggtgggtatcgttattctgccataaaggtgctgtgtcagggatggcgtgtgggcacacacacacacacacagaaacacgacggaagtcctgcctgaggtcagca

SEQ ID NO: 27615 - DNA, 600 bp, Chicken  19866894244860_1
gcctaccccttcttgaatcttcttaggccttcaggtgaacacaggtcactcaagaggtttttcagagctgataaactctttttgatcaaccttttctaaaagaaagctaaattaggggaacaagattagaacataacatgctctgccacaaatacaggaaagagaagcctctgatttgatgtaggtgtatttggaagacctctcacttccagatttttaagcgaggacttaacgattacgggtaaaagtgcttatagttaccatggttacacaccttcagttctatacattcatttatcrtttactgactgcttgcagtttagttcagtaacatcaatgttataatactccagcaatggcatgttgttttaaagcggtttatgtatgacctctgctgccttaagtcctcaagtttctcagtggcctaggggcacagaaaagggaagtggaagagtagtgtcaacaatctgctctgtgcatctccttcatgtataaatacattgtaataagtttggggaattttgcaagggttagtttggtgccaagacaaagcttgtttgcttaaagataaaaccatttatcatttttaaagaagaaaag

SEQ ID NO: 27616 - DNA, 600 bp, Chicken  19866894244867_1
ataatttatcaattatacttttatttggattttagtggggtgaggagtgttaagcaaaagtagcaggtgtactcagaatattcattctaatggtcaagatctatgatctaaggtttattttcatgatcatttttctgctttggaaataccaaagctcatcaagtccagttcatgaagtgtgtaaatcaaatgcttgattccacccagattcaatttaattacttgcaatacaagcctttctttctaatgctaatctatattgacatagatccttacactagccctgctggtgcaatgaartgtatgtccttcaacctttgcagtaaacacacagatgaagcattatagtctcacaacatgtttttaatatwgaagagttcataatttaaccttagtgcatatctacagaatttttttttaaacagtatagttatccaagagctctttctccctaagttactttcccatgtatgagcaaacagcagcacaacacaccaggaataaacatctaattgtccaacttaattagaactaaagctagtcaagaactctactgtcatgcaaagatgaaaaatgaagacttttgagccttcccagccg

SEQ ID NO: 27617 - DNA, 600 bp, Chicken  19866894244867_2
ctcagaatattcattctaatggtcaagatctatgatctaaggtttattttcatgatcatttttctgctttggaaataccaaagctcatcaagtccagttcatgaagtgtgtaaatcaaatgcttgattccacccagattcaatttaattacttgcaatacaagcctttctttctaatgctaatctatattgacatagatccttacactagccctgctggtgcaatgaartgtatgtccttcaacctttgcagtaaacacacagatgaagcattatagtctcacaacatgtttttaatatwgaagagttcataatttaaccttagtgcatatctacagaatttttttttaaacagtatagttatccaagagctctttctccctaagttactttcccatgtatgagcaaacagcagcacaacacaccaggaataaacatctaattgtccaacttaattagaactaaagctagtcaagaactctactgtcatgcaaagatgaaaaatgaagacttttgagccttcccagccgtttgcatctttctgtactgtcaagtattttaaatacacacaactgcacgattttctttgccctgacgggca

SEQ ID NO: 27618 - DNA, 593 bp, Chicken  19866894244872_1
cagaggaatgtctataaaaccaccagcagctgcctccaaaggagaggagccacgagagaagtcagagcaggaatcagcacattaaaatttttgtttggctttctgttatgcgctctgctggatgccaaactggatacctatttcatttcagctatgaaactgctctccctcaacaagggcaccatgggcagtgtaatggagtgtgccccaaaaccaagtccttggtttcctaaagatctgctcagcaatgtttgaaaagcctttctgtcctggcagcatcagcagatgccatcagctcayactcctggtaccatactatgtcccaactgccttttcatgccactgcattacaggcaaatagcagaggagacagccatccttcttgcaaggccttggcactgccttctgcaagggtgggcaggttttagaggcagtttgagagcatagggcaacagatcctggggagtgcccagcagctccaagctacatccgtgactaagaagtgtcattgtttgcacagttgttctctcttcccattgctatttggtttgtgaacaagtcacagcagatgcttcccactcgtacaatggata

SEQ ID NO: 27619 - DNA, 600 bp, Chicken  19866894244874_1
gtaggaagaataatttcctctgctattttgttctgtatccagctctcacaagcttcatttgaagacccacagttcttgtagcaggaaacgcagctcatagttaattcctcttcaccatctcaatgccaatcatgatttttaaggatcattataacacaaaaaatattattttttcaaactgagaagtcacagcctgctcatttgctctttgtacggatgtttcccatttcaatttatcctccttgcttttcttggaatatttgctatttctaatttaacttctctcagatagaggattawaactgcatagcttttgagatgtgggcaaactgtggattcagatagtggtataattatcttgtctattctgctttccattttcctactaattcctaacattttatttatgctttttgttgttctttttgactgctactgaacaataagctgatgggttcattgaataatttcacttctgagcattaacactgagcttagagcccatcattaaagacgtgacattaggactactttagtgcttatcaatttacatttttctgtactgaaagccactgtgatctatctaggcattcagttttg

SEQ ID NO: 27620 - DNA, 600 bp, Chicken  19866894244877_1
agttattatataatctaaatgatgaagtctcaaaataacttacttgcaaagtaaaatttatttcctctaacataaaacccagatatataaatacaagtttctgatttaaactcagttacctgctgttaagactgttacttttaagggcactgtaatcttattttaaaaagttgaatatgagactatgaattaatatgaaatcgaggtttgagtttttgttacaattaaaagttgtatctaaattcattgtagttttcttacaaatacagtgagtgcaggacacttcagtaactatatttyagaataaaaggaaattaaaaagaggttgcaaggttgtaatgggatggaaaaaaaatgttacacgggaagagcagaacacacacacacacacacacacacaaaaaaaaaaaaaaagagaaaaaaaaaaagcaaaaataaaccccaaaccaaagcacaaacatctgttcatctaattattaaatacataggtgaagagtactacagtgacatggattcataggtattgcttgggttttgaaagtttcattcaggatgtaaaaataggtttttacagggtctatcattgcaaacatgaacgga

SEQ ID NO: 27621 - DNA, 599 bp, Chicken  19866894244878_1
  misc_feature (1)..(103): n is any nucleotide
nnnnnnnnnnnnnnnnnnnnnnnnnnnnnnnnnnnnnnnnnnnnnnnnnnnnnnnnnnnnnnnnnnnnnnnnnnnnnnnnnnnnnnnnnnnnnnnnnnnnnnnacttcttgaattccgtcaagtttagtgttgtgatcagttccttgaggagcctgttccaggacctgaccaccctctggtaaagaaccttatcagatatcaaacctattaatttattgtgagttgtactattgcactgtaatatattatatttgtatatttatattcagcttttatttctcttacctggagccaaaatytgcagttaagacacacgcaggaagtcaacccacttcctctaaggaactgccacaagtccctaaaaaagtactatcctcatgtgtgtattctakcacactgcactctctttcatatttgttgctctatgctttcaaaattatttttattttttcaacctagcagacaggaagaagaaaaaaaggaaacacattagccatcaagtgatagaattcaccattagctcagtttttcatggtactcaaaggagggattttcagttttaatagaagctgggtgattcaataaataagtctttata

SEQ ID NO: 27622 - DNA, 599 bp, Chicken  19866894244878_2
  misc_feature (1)..(10): n is any nucleotide
nnnnnnnnnnacttcttgaattccgtcaagtttagtgttgtgatcagttccttgaggagcctgttccaggacctgaccaccctctggtaaagaaccttatcagatatcaaacctattaatttattgtgagttgtactattgcactgtaatatattatatttgtatatttatattcagcttttatttctcttacctggagccaaaatytgcagttaagacacacgcaggaagtcaacccacttcctctaaggaactgccacaagtccctaaaaaagtactatcctcatgtgtgtattctakcacactgcactctctttcatatttgttgctctatgctttcaaaattatttttattttttcaacctagcagacaggaagaagaaaaaaaggaaacacattagccatcaagtgatagaattcaccattagctcagtttttcatggtactcaaaggagggattttcagttttaatagaagctgggtgattcaataaataagtctttatacagatgctgaatatctctgtcctttgtatcacattggtttatgagtttacttatggctattaatgctcgaaagaacaaggagtttcagaagaa

SEQ ID NO: 27623 - DNA, 600 bp, Chicken  19866894244881_1
aacgggattgacagatgttaatttgtgatattataggggaatatttttttagtacatctccttttttgagggaattttaatcaagtgatttgttgatgctctaaaacttatatgaagattacccagggaaatataacactggatagaattagtacaccagtctcttgggcttctcaaaaaatctgtgaaatctgaggatttatttagaaggtgcaagctgtacatttagatttatatagactgtattttccttctccatgaaatgcagaagagctcatctacagatgagctcattttttragaaaggcaaatgaatttacagtaatgaatttactttatctattagtacagatgctctagaatatgtcaacagatctttgagcactctgatcaaactttccacagrctaaatagacatgttcgtagaagaggaaaccatagtgacgtatgtgtgtatgtctgatgtaaatgagactgattgtggaatgcttaatctgcagttcagatacgtggatgaatatggccaactgtgtaaacttggataataaatctatgtattttggcagggaagggatgagtcaagtccagtgtacatagaca

SEQ ID NO: 27624 - DNA, 600 bp, Chicken  19866894244881_2
cttatatgaagattacccagggaaatataacactggatagaattagtacaccagtctcttgggcttctcaaaaaatctgtgaaatctgaggatttatttagaaggtgcaagctgtacatttagatttatatagactgtattttccttctccatgaaatgcagaagagctcatctacagatgagctcattttttragaaaggcaaatgaatttacagtaatgaatttactttatctattagtacagatgctctagaatatgtcaacagatctttgagcactctgatcaaactttccacagrctaaatagacatgttcgtagaagaggaaaccatagtgacgtatgtgtgtatgtctgatgtaaatgagactgattgtggaatgcttaatctgcagttcagatacgtggatgaatatggccaactgtgtaaacttggataataaatctatgtattttggcagggaagggatgagtcaagtccagtgtacatagacatctgacaaagcatatttgattgtaatgtgctggaagatcatagtgttatctctgcttcccttttggaaggcttttagttgtttgttgtttgtttgagaatccaaaa

SEQ ID NO: 27625 - DNA, 600 bp, Chicken  19866894244891_1
ggctttccaaatgccctaggaagaacaagctcaagagaaattacccagcaggtgacaagaaagagaaaggtataactttttatcaaagtgtttaaaagatatccagtaccatggatttgagaaataaggcaaccaatgaactagaggctcatgctaggaggggaggagaggagtcaggcaattgaactagacagaaacgatgatctctcccatagcaagtaactttcacatgaataatgccaaaatcaacattttgaggtggaggaaggttcatgataaattaaaggtttatgaaaaaawatatatatatacaactttcaaacaaacaagctaactaatccacacgttgctcacaggctcagttacatttaaccccaaaactctgtgttagtctttttctttatagaactgctgcctcactttagcttcaagtaattcttaacctgcttggcataactgcagtatctggagcttcacttgaaattacaataacagcatctgagagaactcaatcagaagtagtccagatagcttctctaaagtgaaaacaatgttaagaagtagaaagttcacagaagtcagaaactcattgcagataca

SEQ ID NO: 27626 - DNA, 578 bp, Chicken  19866894244895_1
aaacaactccctttaaagtagactttgtgtagaggttatcttgctaatgcaagaccttagcaaaaccagtccttcacagagaaagtcctgaaacagtctaaaagactttgattctagattcggtggtaagttaacattccacccaaatcattgttcaaaacacctttctgtacaaaactgaagacaaaatctgttgggcagctttcagtctctttgatactgccatcctctgcttattcagactcttccaaagaaacttttatgaaaacttaagatactgagacctgatgttctgggttraagctctgatattgcacagcatatttcctttttctccatcctgttttctgaacgtactgaaatgggccttccatctccttcctttctgatttgttattctctggatgtaatgctgatacaaatattttgttctgagaggagtatttgcttgtttctcatgtgcatttcatagacttttatgttagaagaagtggagaatctctataacagaaactactggggttctttttggaatatctacagtagagagaatttctctttcctttctcctactgcat

SEQ ID NO: 27627 - DNA, 599 bp, Chicken  19866894244898_1
  misc_feature (1)..(66): n is any nucleotide
nnnnnnnnnnnnnnnnnnnnnnnnnnnnnnnnnnnnnnnnnnnnnnnnnnnnnnnnnnnnnnnnnngcactggaaatgaaaatcactgcagcacaataatacagctaaacatgcctagctaaatttcagtcagggattaaaaacttctttccatcagcaatttggtgagccattctttcccttatggaagcactaaacaaccgtgtatttctactcagaagcgctttcagatgactgtttttataaatgcaatttacaggcaggggtaatgagggagaaaatgatgacatctagataatstgcagctgtttttcaaaaatcagttttaattgttacattccaaagaggatatatgaaagttagtcatctagcaactgtatacctcttaagagagatgaacacagaatcacagatagaaaaatacacctaactgccaaggtgacaggtgctcaagaaactatgtgccttataccatcaatccagacraacgcagaaagatttcttataataaatatttcttcatatactagctcctgagactttacccatgagaagaaaggaagatttcttttaaaagatatcatacgcatacaatatat

SEQ ID NO: 27628 - DNA, 600 bp, Chicken  19866894244898_2
gaagcactaaacaaccgtgtatttctactcagaagcgctttcagatgactgtttttataaatgcaatttacaggcaggggtaatgagggagaaaatgatgacatctagataatstgcagctgtttttcaaaaatcagttttaattgttacattccaaagaggatatatgaaagttagtcatctagcaactgtatacctcttaagagagatgaacacagaatcacagatagaaaaatacacctaactgccaaggtgacaggtgctcaagaaactatgtgccttataccatcaatccagacraacgcagaaagatttcttataataaatatttcttcatatactagctcctgagactttacccatgagaagaaaggaagatttcttttaaaagatatcatacgcatacaatatattaagcttttaaagcaaaagagaacaaaacgtcaacactgtcttgaagtgcaccgcatctgaatttatctacatcacagtacttcaagtgtgcagctcaaagagtcagtgtccatttaagttcagccttgtttctgcaaccacctgacatacaagcatctcgaaagtacgagtgcaagaaaccaaatg

SEQ ID NO: 27629 - DNA, 599 bp, Chicken  19866894244903_1
  misc_feature (1)..(26): n is any nucleotide
nnnnnnnnnnnnnnnnnnnnnnnnnnccacatgcatgttttgcatgatttgatcctatcccattgactgtatgcagacgtggtgcagtgtaggaggctacaaacatggacctcagaaaaggtatagagaaaacaaagttaattattgcttgccattgaacaccgtagaagtaccagcagaggaaaaataatcggcttcaatatgtttatccttaaaaaagaaaaatagtcttataatgattaacttttgacatgtaagtcctttgtaggtcattagtggtgtagctgtgcatatatgtgyctgcttcagaaaacagtttggtccataatctcataatgttgaattctacctggcagttttattcgagcttaatttctttttcttctaatgmtgttagctggagagttatgagacaggcatcagctgaaagcaccagggaaggacaggtattggcagtggcataaaagcagaaggggaggaaaaagaatagctattgtagcatttatcagtattctgctaatagtctgctcagacacaactctggaataaaacagacgttcatactgcaatttctttcaaaggttggagctattcatctg

SEQ ID NO: 27630 - DNA, 600 bp, Chicken  19866894244903_2
ggaggctacaaacatggacctcagaaaaggtatagagaaaacaaagttaattattgcttgccattgaacaccgtagaagtaccagcagaggaaaaataatcggcttcaatatgtttatccttaaaaaagaaaaatagtcttataatgattaacttttgacatgtaagtcctttgtaggtcattagtggtgtagctgtgcatatatgtgyctgcttcagaaaacagtttggtccataatctcataatgttgaattctacctggcagttttattcgagcttaatttctttttcttctaatgmtgttagctggagagttatgagacaggcatcagctgaaagcaccagggaaggacaggtattggcagtggcataaaagcagaaggggaggaaaaagaatagctattgtagcatttatcagtattctgctaatagtctgctcagacacaactctggaataaaacagacgttcatactgcaatttctttcaaaggttggagctattcatctgcagcgttacaagacaaaagtctaaaccttccagacattatagtatagctgttctattgaattgtgttaagaaggagaaaccttagaagctgt

SEQ ID NO: 27631 - DNA, 600 bp, Chicken  19866894244903_3
gtggctgtgtgttgcagcttttttagtgctcataaaactgtctctgcttgcagatatgtgacagcactgatataaatttaaatgtttggaaatccataagacataaaatatagatagtaaataggggcataacactatagacaaaaacttaatgatttggcacacaaatgtttatatatttgcatgtctaatgcagcgattagcataatggtgatcacatttgtaccatggaagaccttgattagcagacaacaacaacaaataaggtaaaacttaagcacgttgtacaaaagcagtagrgaattckttcaggttgcaaatcagagctttaatgttggaaggtgcatcctctacatatgtttggtgggacactggttttccttcttacaggctttattagtaacgacacctgttccactagctagtagtattacagttgttcctaagaactgattataaaaaatataaaatgtgaaagggaatgaagcagttaaggaacactgggattgaggttggatggtgcttctttaagaccaacggagccagccagcatggggaagattaaccaatgttcagaccagagcaccaacaccttgtcag

SEQ ID NO: 27632 - DNA, 600 bp, Chicken  19866894244903_4
tgtgttgcagcttttttagtgctcataaaactgtctctgcttgcagatatgtgacagcactgatataaatttaaatgtttggaaatccataagacataaaatatagatagtaaataggggcataacactatagacaaaaacttaatgatttggcacacaaatgtttatatatttgcatgtctaatgcagcgattagcataatggtgatcacatttgtaccatggaagaccttgattagcagacaacaacaacaaataaggtaaaacttaagcacgttgtacaaaagcagtagrgaattckttcaggttgcaaatcagagctttaatgttggaaggtgcatcctctacatatgtttggtgggacactggttttccttcttacaggctttattagtaacgacacctgttccactagctagtagtattacagttgttcctaagaactgattataaaaaatataaaatgtgaaagggaatgaagcagttaaggaacactgggattgaggttggatggtgcttctttaagaccaacggagccagccagcatggggaagattaaccaatgttcagaccagagcaccaacaccttgtcaggaacttg

SEQ ID NO: 27633 - DNA, 599 bp, Chicken  19866894244909_1
  misc_feature (1)..(88): n is any nucleotide
nnnnnnnnnnnnnnnnnnnnnnnnnnnnnnnnnnnnnnnnnnnnnnnnnnnnnnnnnnnnnnnnnnnnnnnnnnnnnnnnnnnnnnnntactgtgttaataaaacagaaggagttgttgatattcaactaagcagaatcctgttgcttctcagagaaaagtgttttcatctttggagcaactctggccaaaagctctggtagtgacttaaagggcaggtgattacaacatgaaaaacacagtctagcccaagaaacacttttgtgtgtgtatttgcaaaattttttgttttgagccatgraaaatgcttctgtctgaggctctagttggggcctgggggaaagcaaagcaactccccctgcatggggcaggttggcagtgatggggctgagtcccagcaaggagcactgaaagcrgtaagaaagctctcactttatttctaaggtctagtgcrttgtctgtggcttgtgcctggcttctcttgtttctgtgcagactcaaaccaagttcaaataatgatgaaaaacaaaacaaacaaaaaagtgatgcaacgcacgtctcatatgactattggattttcactaggcattgagctggtgg

SEQ ID NO: 27634 - DNA, 594 bp, Chicken  19866894244909_2
gttgatattcaactaagcagaatcctgttgcttctcagagaaaagtgttttcatctttggagcaactctggccaaaagctctggtagtgacttaaagggcaggtgattacaacatgaaaaacacagtctagcccaagaaacacttttgtgtgtgtatttgcaaaattttttgttttgagccatgraaaatgcttctgtctgaggctctagttggggcctgggggaaagcaaagcaactccccctgcatggggcaggttggcagtgatggggctgagtcccagcaaggagcactgaaagcrgtaagaaagctctcactttatttctaaggtctagtgcrttgtctgtggcttgtgcctggcttctcttgtttctgtgcagactcaaaccaagttcaaataatgatgaaaaacaaaacaaacaaaaaagtgatgcaacgcacgtctcatatgactattggattttcactaggcattgagctggtggcacctgcagtgmtgtggggcaggatcatcccccttagcattgcagatggactggcattggaagtcctttctgaacagacatagccaagggaaagttgtatccacaaggaa

SEQ ID NO: 27635 - DNA, 556 bp, Chicken  19866894244909_3
agaaaagtgttttcatctttggagcaactctggccaaaagctctggtagtgacttaaagggcaggtgattacaacatgaaaaacacagtctagcccaagaaacacttttgtgtgtgtatttgcaaaattttttgttttgagccatgraaaatgcttctgtctgaggctctagttggggcctgggggaaagcaaagcaactccccctgcatggggcaggttggcagtgatggggctgagtcccagcaaggagcactgaaagcrgtaagaaagctctcactttatttctaaggtctagtgcrttgtctgtggcttgtgcctggcttctcttgtttctgtgcagactcaaaccaagttcaaataatgatgaaaaacaaaacaaacaaaaaagtgatgcaacgcacgtctcatatgactattggattttcactaggcattgagctggtggcacctgcagtgmtgtggggcaggatcatcccccttagcattgcagatggactggcattggaagtcctttctgaacagacatagccaagggaaagttgtatccacaaggaa

SEQ ID NO: 27636 - DNA, 398 bp, Chicken  19866894244909_4
gtctgaggctctagttggggcctgggggaaagcaaagcaactccccctgcatggggcaggttggcagtgatggggctgagtcccagcaaggagcactgaaagcrgtaagaaagctctcactttatttctaaggtctagtgcrttgtctgtggcttgtgcctggcttctcttgtttctgtgcagactcaaaccaagttcaaataatgatgaaaaacaaaacaaacaaaaaagtgatgcaacgcacgtctcatatgactattggattttcactaggcattgagctggtggcacctgcagtgmtgtggggcaggatcatcccccttagcattgcagatggactggcattggaagtcctttctgaacagacatagccaagggaaagttgtatccacaaggaa

SEQ ID NO: 27637 - DNA, 600 bp, Chicken  19866894244913_1
ctccatgtctcacgtgcatcttttccaggaggatctgcttcatgatcttcccagtcacagacatgaggctcaccaggctgtagttgctaggccttcctttctacctttcttgaatatgggaatgatgtttctctttttccagtcaccgggaacttcacctgacagctacgacttttcagatatgatggagagtggcttggcaacaacatcagctcctttatgaccctgggatgcatgtcatctggcctcataaacttgtacacattcagtctcatgaggtggtcttggacttgctctgcyggggtccacttgtgcagggctcttcgtggggctaatagctaatttggctgtgaaagccaggatgagccctcagtgtaaaatttctgctgctccagatagctgcagggtagatgacagcatacatgccccagctatgctctagcaatgctggggagtgcctggagcttgaaggaggaaagttggcctgcagttaagtggaaaagcggatgaggtactagaaatgcccagctgtgcggatgggatgtcccttctggacaaaggtgatgcagctctgcagagctcaggctctgtgactggcag

SEQ ID NO: 27638 - DNA, 599 bp, Chicken  19866894244919_1
  misc_feature (1)..(126): n is any nucleotide
nnnnnnnnnnnnnnnnnnnnnnnnnnnnnnnnnnnnnnnnnnnnnnnnnnnnnnnnnnnnnnnnnnnnnnnnnnnnnnnnnnnnnnnnnnnnnnnnnnnnnnnnnnnnnnnnnnnnnnnnnnnnnnatgggacatttgagatcacactctataccaacgtgctagtgtaccctgatggcagcatctactggctgccccccgccatctaccgcagctcctgctccatccacgtcacctacttcccctttgactggcagaactgcaccatggtcttccagtgagcacagcttgggagtgttrggggtggccccatagggacagatgtgggatgtcccactttgcttcagggtgggcatctttcagcgagccccagaatgggtgagcaccattgacctggttaaccatgggtgactagatacatgtttgtccagttaaactcccatacagcagggacacgggtgactggcatgtcacagtgtcactctcacagaacagcttagaagggaatggatctcaaggactgttgagttctaacccccctgccacaggcagggttgccaacctcccctgctattttcccattggtgccatccctctgc

SEQ ID NO: 27639 - DNA, 505 bp, Chicken  19866894244919_2
gggacagatgtgggatgtcccactttgcttcagggtgggcatctttcagcgagccccagaatgggtgagcaccattgacctggttaaccatgggtgactagatacatgtttgtccagttaaactcccatacagcagggacacgggtgactggcatgtcacagtgtcactctcacagaacagcttagaagggaatggatctcaaggactgttgagttctaacccccctgccacaggcagggttgccaacctcccctgctattttcccattggtgccatccctctgcccccctcccaggtcycagacmtacagcgcgaacgaaatcaacctgctgctgacagtggaggaaggccagaccatagagtggatcttcattgaccccgaagcctttacaggtaaccctgtgaccsccccacggcatcccaaggacaaacattccaaggacaagcattccactccatgatgccccacagcctgcagcaatgccggtggctgctgaaatcagt

SEQ ID NO: 27640 - DNA, 499 bp, Chicken  19866894244919_3
gatgtgggatgtcccactttgcttcagggtgggcatctttcagcgagccccagaatgggtgagcaccattgacctggttaaccatgggtgactagatacatgtttgtccagttaaactcccatacagcagggacacgggtgactggcatgtcacagtgtcactctcacagaacagcttagaagggaatggatctcaaggactgttgagttctaacccccctgccacaggcagggttgccaacctcccctgctattttcccattggtgccatccctctgcccccctcccaggtcycagacmtacagcgcgaacgaaatcaacctgctgctgacagtggaggaaggccagaccatagagtggatcttcattgaccccgaagcctttacaggtaaccctgtgaccsccccacggcatcccaaggacaaacattccaaggacaagcattccactccatgatgccccacagcctgcagcaatgccggtggctgctgaaatcagt

SEQ ID NO: 27641 - DNA, 396 bp, Chicken  19866894244919_4
ttgtccagttaaactcccatacagcagggacacgggtgactggcatgtcacagtgtcactctcacagaacagcttagaagggaatggatctcaaggactgttgagttctaacccccctgccacaggcagggttgccaacctcccctgctattttcccattggtgccatccctctgcccccctcccaggtcycagacmtacagcgcgaacgaaatcaacctgctgctgacagtggaggaaggccagaccatagagtggatcttcattgaccccgaagcctttacaggtaaccctgtgaccsccccacggcatcccaaggacaaacattccaaggacaagcattccactccatgatgccccacagcctgcagcaatgccggtggctgctgaaatcagt

SEQ ID NO: 27642 - DNA, 600 bp, Chicken  19866894244920_1
ttctcaaggtcatatagtcatctgcagctgagctaggaatagatccagaactctcgtctacatgtcaaacacaaaacaaaatactttctgcctgcctggtaacatgcccagaaagaccagccaggacgtacgcagtttctagctggatgcactaaaacacagcaatatgagttactcagccattctcctccctgctacgtgtgcccacaaagacgtgtgcagctctgaaacccagaccataattatgcctctcgaaccttttcagcgagaagattcaatttaaaataaacaccaacagcragcaagatttatcccacaattgtgtggaggcacatgggctgaatgagtagttgataatatacacacagacagtctgggggtggagaattactcatgttgtggtcttgttcctgctgctatttatgttaatgagggttttacggtgagtgggagcaggcccagatactacaccagtttgaagccaagagctctcatgcccggagcagcacaattttctttcttctgctgaaaaataaatggcagggaggggcgagaagagggctgcccattcagagagtcaggacatgcaccaacttgtgc

SEQ ID NO: 27643 - DNA, 600 bp, Chicken  19866894244922_1
gctttgtgccatcagcaaatttgctgaggatggactacatccctatcctttataactgatcttaatggctgtgtctggaatggacctgatcagagtcacagcttcaaggggtaaagttagaaagagccagaggagaatccagtagaaccctttcacatctcaccttgaccataattcctgagttacaggatctcttcatagaatcatagaatggcctgggttgaaaaggaccacaatgctcatccagttccaaccccctgctatgtgcaggatcgccaaccagcagcccaggctgcccasagccacatccagcctggccttgaatgcctccagggatggggcatccacagcctccttgggcaacstgttccagtgaaggtagaaggtggcatatgaataagagatatattttccttcctttctccctcccctcttccttccttcattctttccctctcctttctttccttcctttcctccttttctcgtttgcatctcccagccctgggctgcagcagcgaaaccgtttcacttccatgacaaagcactgatttccagcggcactggctaatgttggccagtcccactggagccaaactg

SEQ ID NO: 27644 - DNA, 578 bp, Chicken  19866894244922_2
tggctgtgtctggaatggacctgatcagagtcacagcttcaaggggtaaagttagaaagagccagaggagaatccagtagaaccctttcacatctcaccttgaccataattcctgagttacaggatctcttcatagaatcatagaatggcctgggttgaaaaggaccacaatgctcatccagttccaaccccctgctatgtgcaggatcgccaaccagcagcccaggctgcccasagccacatccagcctggccttgaatgcctccagggatggggcatccacagcctccttgggcaacstgttccagtgaaggtagaaggtggcatatgaataagagatatattttccttcctttctccctcccctcttccttccttcattctttccctctcctttctttccttcctttcctccttttctcgtttgcatctcccagccctgggctgcagcagcgaaaccgtttcacttccatgacaaagcactgatttccagcggcactggctaatgttggccagtcccactggagccaaactgcccaaccacaacaacagagcttccaccttgtttttctgcggtg

SEQ ID NO: 27645 - DNA, 600 bp, Chicken  19866894244923_1
gtaactccaaaaatacagcagaaggccagaacaagaggtaataggcacttttggaattgttagagtcacaaagcagttctgagagaaagcatcatacgctccgtactcgacaagggacaaaaatgtgcttgtggaagggaagcaatgacccttccaaattcagtgctgtacttttgttatcccaagggcggagtgctttttcccatgctgctattaatgcaatacagaatgtcttaaacaacgagcaagctgacgcactggatgttttccgtactctgtccagtctttccttacacaagwagggatgtgatgtagacttcccaggtcatatctatttgagtaggtattcagataaataactatgattgtagaactgcaatggggaaaaattaatgtcacatttaaatcccagcaaaatactgcatttcatagaaacatatcatttggaacatgcagacattgtcagaagtctaaactggtttaggcacttttttggtaaaggaaagtccatttttcttttataacaaagaaagagaggaggagattaaacactttaggaacagaatgtgattactgttgcccatattgaactaaaacaca

SEQ ID NO: 27646 - DNA, 599 bp, Chicken  19866894244924_1
  misc_feature (1)..(146): n is any nucleotide
nnnnnnnnnnnnnnnnnnnnnnnnnnnnnnnnnnnnnnnnnnnnnnnnnnnnnnnnnnnnnnnnnnnnnnnnnnnnnnnnnnnnnnnnnnnnnnnnnnnnnnnnnnnnnnnnnnnnnnnnnnnnnnnnnnnnnnnnnnnnnnnnnntttatcttcagatttgagattccccaaactgagaaacgcagaagaatgcagaaaatgtgatgtggctcattttacactgtcaaaaacttaagcattaggaatactaatctgaataagatggaatctgacagcaaattattttggaaaagagcawcatagcaagaagctcctgcagtattatcttaactttaaagtctgtgagaacttcaacttacctaaagtactttcaggatgttggktcagaactgtgctttttcatatgacaaactggtattagtcttattaataaatatgttatctgttatgagcatctttcatattagcatagcctacccttcatcctccgacctgatatgagccaattattggtgattttctatgaatttttattattattatttcttataattcactggaccaaataagaaaagcttatcttttccctgctggttt

SEQ ID NO: 27647 - DNA, 599 bp, Chicken  19866894244924_2
  misc_feature (1)..(61): n is any nucleotide
nnnnnnnnnnnnnnnnnnnnnnnnnnnnnnnnnnnnnnnnnnnnnnnnnnnnnnnnnnnnntttatcttcagatttgagattccccaaactgagaaacgcagaagaatgcagaaaatgtgatgtggctcattttacactgtcaaaaacttaagcattaggaatactaatctgaataagatggaatctgacagcaaattattttggaaaagagcawcatagcaagaagctcctgcagtattatcttaactttaaagtctgtgagaacttcaacttacctaaagtactttcaggatgttggktcagaactgtgctttttcatatgacaaactggtattagtcttattaataaatatgttatctgttatgagcatctttcatattagcatagcctacccttcatcctccgacctgatatgagccaattattggtgattttctatgaatttttattattattatttcttataattcactggaccaaataagaaaagcttatcttttccctgctggtttggaagaagcttccctttcacattttctgcttgtacagagcagtaaacattttcagttactgcatacatttcagttcaagttgcag

SEQ ID NO: 27648 - DNA, 600 bp, Chicken  19866894244926_1
ccctgagcctttccttcccataataacataacactgcccttaagacttcccatcaggaacctgggcattgtacctcctggttggagtaagtgatacgagcttgaactcacaaacctctgcagatgcctttgagactcctggaatgaaagggctcagtaaatgctccaggagcactgctgcacatcaagatgctgccacctaacggcaagagggtaggaacagcagtcgggtaaaaattaagactaccatttacaagactcctaaaggtctgggttttcttgatagacttagagaattgawtttaagcataactctgtaggaaattccattcgctctcccgccactggtgctctttctagtgggtatatggatccctgaataccaccccttccatgccactatttactagtcacacagtaagccacttttattgcctccaacccagtcccattccatgcatcctagtcggtaaaccttcccttgctgtgtcacacacacattaaatatccatccctctgatccacacatgattgatctccccatcgcacattacagtcaagattaacttctcccactacgtcacatattcagtacacccct

SEQ ID NO: 27649 - DNA, 600 bp, Chicken  19866894244929_1
gaggctcccagttgtcaggatgtttgaggaaagacattgtgctccctgacgttttaaaccagcgctggaaattgtccttcctcttagcagggcctccaaggcatagcaactaaatcctggaagtcagataattacgatgcacattttaaggcagccacaggcaagtaattagaatttgggaatatgtgcctgcctcctggtatctttgggtcatactagaaatgtaggcaagttgtgtttggagccaagtagctatctggtgttatacatacccatgctgtagaaagtgtgcgatgaggygatgcaggaattttctctcaaacgttatcctcacctgcaagtttaagcagaactgttactgtgacggcacaggatgtccattactttgtcattttacatacttttgtactcagcactggttgatgaagcctgagattttgaccgattatggtgcagcgcaaaccgttacttttctcccagtaaggtgaatgcctccaatttatgcagctgtcctctcttgacctgccctccttctatgaggcctctgagtagaagcggttccaagtcagcactctgaggctctgaggactgaggttggtg

SEQ ID NO: 27650 - DNA, 600 bp, Chicken  19866894244949_1
gtgatgtgctgcagcacaacggctaaagcggtgtgctcacatctgcctgctggaagtccccatgacatgcaaagatgcatacaagtcccttctgagaggaagattcagctatttcccacttcttggcacagcagatgattaaatcttacactgtcctctgcctatgctgacttctccacatcagctaataacagtgatacatcttttagacaggaagtggaggatccagatttctttccacaacaggcagggcagtcgggcagtgacccaaccctcctcatcagccctggcaggagcacygccatgcctggcaccgggtggcacagacacgggcagtgagcagtgcctctgtggcagccctggtcttttaatgggacatccattcacatgcgattccacagagccacctaaagctctttcctctctgcacttccccatgatgcaatctactgaagttttgggacagcttttattacagcacatgctaaggcctcaagcagaaagcaacagtttgaaaaggcagcatctgtctctgcaggcargaaagcccttctgttaccacagtgaactgttacacatagcaagagatttgactcaagc

SEQ ID NO: 27651 - DNA, 600 bp, Chicken  19866894244949_2
acaggcagggcagtcgggcagtgacccaaccctcctcatcagccctggcaggagcacygccatgcctggcaccgggtggcacagacacgggcagtgagcagtgcctctgtggcagccctggtcttttaatgggacatccattcacatgcgattccacagagccacctaaagctctttcctctctgcacttccccatgatgcaatctactgaagttttgggacagcttttattacagcacatgctaaggcctcaagcagaaagcaacagtttgaaaaggcagcatctgtctctgcaggcargaaagcccttctgttaccacagtgaactgttacacatagcaagagatttgactcaagccgtaaactcttgatcttccctcgaaggtctctactttcacttatcagcctgacatctcacagtggggccacctgagcagaccgcagggctggctccagggcccgcaggctgcaagcagacctctgagggaacgcgggcggatggaggtggccggctccctgggaccctccagcacagttcaaagtgacatgtttcaaacagtcctttcctccgtaccccattgccttcaaagcacaaacagc

SEQ ID NO: 27652 - DNA, 599 bp, Chicken  19866894244951_1
  misc_feature (1)..(150): n is any nucleotide
nnnnnnnnnnnnnnnnnnnnnnnnnnnnnnnnnnnnnnnnnnnnnnnnnnnnnnnnnnnnnnnnnnnnnnnnnnnnnnnnnnnnnnnnnnnnnnnnnnnnnnnnnnnnnnnnnnnnnnnnnnnnnnnnnnnnnnnnnnnnnnnnnnnnnntgctggttttatttcttacaggtattaatgggactgccactgcgttcttcctcccagagaggctatcttctttaagcaattttcaaggaactgcaaacaggataaaaggcatcctaataggaaacacactggcacagaaatatgtttaawaagctggaaatagatgctaaagaaatagatggtcacaatcagtacactttataatgtgtaatccacatgagctttgcttatttatagaggaaaaagataattttctgtcactgttgcatgtagagtatttcaacaattttcagaggaaggcagtaataagtttctgaaattctgtatggctacctatactttttagagattaggacaaatgtatcccaatatatgatacataattatgtttcttttatgaaaaattaraaggaaagcttcttgaagacaagagttttctttatattttt

SEQ ID NO: 27653 - DNA, 600 bp, Chicken  19866894244951_2
gcatcctaataggaaacacactggcacagaaatatgtttaawaagctggaaatagatgctaaagaaatagatggtcacaatcagtacactttataatgtgtaatccacatgagctttgcttatttatagaggaaaaagataattttctgtcactgttgcatgtagagtatttcaacaattttcagaggaaggcagtaataagtttctgaaattctgtatggctacctatactttttagagattaggacaaatgtatcccaatatatgatacataattatgtttcttttatgaaaaattaraaggaaagcttcttgaagacaagagttttctttatatttttgcagcacaaagcacactaatgacataaaagtatattgctcaatctaacagaattaaaggaaagagctagctataatgtcttcataaagccctagaaccatatcacacaaaaactctttcagattgtcttgaaattgtggcttgaaagctgactgaaaaattgtagctgaaccgtattatttggatgtcagcatgtctgtagtgctgggagggtgctgatggaatcaggaaaggctgctgaggagtagtgcttcaacttt

SEQ ID NO: 27654 - DNA, 600 bp, Chicken  19866894244953_1
tgtagctgaaccgtattattggatgtcagcatgtctgtagtgctggagggtgctgatggaatcaggaaaggctgctgaggagtagtgcttcaacttttgctgatgagagcttggatgaaattgatctggagaactgatatctgctctgtgccattctgtttactttcataattcttcatctgtaataatgccattcataattgcttatatcatttatgtactatattgtaaaatcattcattaaaatataataactatcattattcagctagaataaattactactaataaatggtactyagttaagaagaagctgcttctctgagtccctacactgttatcaatcctgtatcaataatgtaccgaggtactgaaagataaatttgagtctgtttcagatgtgagatccgggcacaatttccaaccagtgctttcaagaaaagtctcaaataggcaagaagaccattcatgtggccacaggaaaagaaagatctaaaagaaactgcaactattcccacacaggatgatcaggagcactgggaggccttattctttggctgtaatttcatagcacatttaaaaggccaaagagacacggtt

SEQ ID NO: 27655 - DNA, 600 bp, Chicken  19866894244957_1
tgtttccaattcagctccaggaaaacaaagtactgcacatgtagtttctgtgattttttgtttgtttgttttaaaatgctttactcaaatatttaacatcaaaaagatgatcactgatgtagctaacttgtctatcctgaaaatgtcttgtttaggctctctcttggaaacattagtgtgcagtgtacaaccataggacttgcaacaccactcccggctttaatggatttttcatatttaaagatttacaaaactactgcagatgttgcttctatatttcatatgcctcataaagctggytcccttaccaatatctagcttcagaaactattttttctaacactgcttaagtacattctcaatatccctgttagcccagagttctcactgtgatcaactattaaaggtgttccttttcgccttcttccaatccatctccttcctgcttatttttcctattcagtattcccagcaggttcacatacacggaaaacccatttgtggtaattagataaaattacttacacctgctcagcaacacattgcatttttatctgaagtgaatgacaacattttctccaaagattgcattttaaatga

SEQ ID NO: 27656 - DNA, 600 bp, Chicken  19866894244958_1
ggaatggaagcataaggaaggagactgcttaacacggagcatgagaaaagccttcgggagccctgagggaagctcagagcatgactccactgcatcatgattcttgctctgtcagcagctcagggacccatatgcatttccacgcctctgtcccaccaccatctgacccctcggtgggatgagccaccaaggcagacaggctgaaaaccactccccattccttgcagagatgtttcttgcaggtggagttccttgaaggtgcacaccatggggctgggcatgcatcagcacttgcccatrgaagggctgggagcatgggggtgggagcttggggatgcagggggtggcagaacagcagcatccccatctaatacggatggatgttttacccgtagcgagcaaaaacacagagctggagctgtatccccacctaatgtaatgagttgccctgcgtgctgcactaaatccgttaggcaatgattaatatacatattggaagattaaatatacttcctaatggaacttctcactggcaaccttttcctcttgtgcctttgaactctgcagctgaactactgcttttgggtggaacagctttcc

SEQ ID NO: 27657 - DNA, 600 bp, Chicken  19866894244958_2
ttggaagattaaatatacttcctaatggaacttctcactggcaaccttttcctcttgtgcctttgaactctgcagctgaactactgcttttgggtggaacagctttcctaagtcaaaatgcataaagtattttcataattaaaaggttaaagaaaattcacagcatccagaaaacatattgggtgaataaaaccagtgaaaccagcttccacaaagctccctctgattgaggtcttgatccaggaatctgttttaaagcagatgatctttttccctgggaactttataacagacagtggrgatacccacagaataagattaaccctttttcttaatgctacaaaagtcttttgacatctattccccggctgtccgaaggcttcagaacagaatcataaaatcatagaatcattaaggttggaaaagccttctgagaccatttagtccaaccatcaacccgtcaccaccatgcccaatatcacttccctcaaagagttgggttccagcagcaggtgctcaatccacctgccaaacattgcagcccaccccatccctacggtgaattaaatgctgttgcagtcttttggaaagaagcaacag

SEQ ID NO: 27658 - DNA, 599 bp, Chicken  19866894244960_1
  misc_feature (1)..(145): n is any nucleotide
nnnnnnnnnnnnnnnnnnnnnnnnnnnnnnnnnnnnnnnnnnnnnnnnnnnnnnnnnnnnnnnnnnnnnnnnnnnnnnnnnnnnnnnnnnnnnnnnnnnnnnnnnnnnnnnnnnnnnnnnnnnnnnnnnnnnnnnnnnnnnnnnnctgtaaagtttctgttcttcaagtttatgctgaattatttgtacttgttgcaatgtacttgttgcaaagctctaatcttttgggagtagttttctgataaaatgccataattttcttctgtggagtcattttaccagctggcacagaacaacacmcattacggagtacatttggtatgcacagtgtgtgcagacacccacacattcagagatttccataagtgtttgtttcaaacttacctatttacaattttatgaacttcagtcttcccatcatttttgggatgttctggactgacaggtggagaaacactgagccactcttgagccccagtgttatctggagacagatcggtaaatagtggatcttcctccaggtctctgtgagattatattagacaaaaacataatcattcactgaatgttacggraggcaagaaattctctggaccaaa

SEQ ID NO: 27659 - DNA, 563 bp, Chicken  19866894244960_2
ttaccagctggcacagaacaacacmcattacggagtacatttggtatgcacagtgtgtgcagacacccacacattcagagatttccataagtgtttgtttcaaacttacctatttacaattttatgaacttcagtcttcccatcatttttgggatgttctggactgacaggtggagaaacactgagccactcttgagccccagtgttatctggagacagatcggtaaatagtggatcttcctccaggtctctgtgagattatattagacaaaaacataatcattcactgaatgttacggraggcaagaaattctctggaccaaaaggcatgctttctgtttttcatctctaaacagttacaggattgtccagaatgctgccatatgcacatctttttaccatgttaacgtgcagaaatgccaacctttgcacatatccagcaaaatttgttttcaagaagattaacagagtagacattttttactggtacaaaatcagtgcatgaaatctgaaactctgtagacatattttttacataagagatacttttacactctgggaaa

SEQ ID NO: 27660 - DNA, 600 bp, Chicken  19866894244972_1
ttctcaccatacactctcccccccccaaaaaaaggccatgaaaccccattcaaaatgtgaacagccccagtagcagctccccacacaagcagcatccagaaatgctcaggtcaacccactgctggtgacaaagcaacagagctgagcatcctcctccttcacaagaaaagctttgatcaccttttagatgcctccacctcctgaaaaagtttggttggagttagtttttaagacttgctgggggagagaagaacaaagacgacctggatgacaagaacaggaagccagaggaactgcagktgggaacggatggaagagataaccaaggcacaaaattcaagacattrccacatcaaagctgatgaatgagaccttcttcatgcatgcaaacgcagcagcactgataatcatccatcaccttggctttgcagacaggaacagaggaggtgcctttcaggaactcttgcaagctctgatgtaaacatgctctgacaacacctgagatgtcctggcattcacatttgcctaggcttcatcccaaaagagacactaagctaagcagctgcaagactttttctgcctaaacaccgtatgtctcct

SEQ ID NO: 27661 - DNA, 600 bp, Chicken  19866894244972_2
attcaaaatgtgaacagccccagtagcagctccccacacaagcagcatccagaaatgctcaggtcaacccactgctggtgacaaagcaacagagctgagcatcctcctccttcacaagaaaagctttgatcaccttttagatgcctccacctcctgaaaaagtttggttggagttagtttttaagacttgctgggggagagaagaacaaagacgacctggatgacaagaacaggaagccagaggaactgcagktgggaacggatggaagagataaccaaggcacaaaattcaagacattrccacatcaaagctgatgaatgagaccttcttcatgcatgcaaacgcagcagcactgataatcatccatcaccttggctttgcagacaggaacagaggaggtgcctttcaggaactcttgcaagctctgatgtaaacatgctctgacaacacctgagatgtcctggcattcacatttgcctaggcttcatcccaaaagagacactaagctaagcagctgcaagactttttctgcctaaacaccgtatgtctcctcaatcggatttagcaacatagttatcaggtcccatataagcttctac

SEQ ID NO: 27662 - DNA, 600 bp, Chicken  19866894244973_1
acataagctttcagttcagcagctgtgtctgagactatttatatatctctctctctcaaaaagggacaatggtttgcaaaagcatgaagaaattttattgactgttacaattaaatacaaatgttagacaagtgctggaaaagtggatctcagcagcaatgatctgtagggtgagactgcagcacaatgggagacattgccacgtgctagaatgctaaaccatcccacttcttaccacctagttcctgctcttgagttccttctttgtccatgagtgcacagctggaacaggagcaggarcactgagatccacagctacaaagtgactagcacaaacaagcaacagaaggatgaaaattcttcagatmcatgcaaataagatgtaacagttgaccagtttgagtcagtgaaaagtatgtcatctggaacagatctcactgaaagtaatttgagcactggattaagcaatacagacaasataaatcctcctgtaaaagttgtgtctgtcagttctaaattacatgcaaatgcctgaggaaatgcaaagaacagtggccataagtatatagatcatgttggtattaagactgaaagtgctac

SEQ ID NO: 27663 - DNA, 600 bp, Chicken  19866894244973_2
atggtttgcaaaagcatgaagaaattttattgactgttacaattaaatacaaatgttagacaagtgctggaaaagtggatctcagcagcaatgatctgtagggtgagactgcagcacaatgggagacattgccacgtgctagaatgctaaaccatcccacttcttaccacctagttcctgctcttgagttccttctttgtccatgagtgcacagctggaacaggagcaggarcactgagatccacagctacaaagtgactagcacaaacaagcaacagaaggatgaaaattcttcagatmcatgcaaataagatgtaacagttgaccagtttgagtcagtgaaaagtatgtcatctggaacagatctcactgaaagtaatttgagcactggattaagcaatacagacaasataaatcctcctgtaaaagttgtgtctgtcagttctaaattacatgcaaatgcctgaggaaatgcaaagaacagtggccataagtatatagatcatgttggtattaagactgaaagtgctaccaacagcagaaacaatccagatccatacttctcaagctgtagaaagctcatttactgtgaattaaagt

SEQ ID NO: 27664 - DNA, 600 bp, Chicken  19866894244973_3
gcagcacaatgggagacattgccacgtgctagaatgctaaaccatcccacttcttaccacctagttcctgctcttgagttccttctttgtccatgagtgcacagctggaacaggagcaggarcactgagatccacagctacaaagtgactagcacaaacaagcaacagaaggatgaaaattcttcagatmcatgcaaataagatgtaacagttgaccagtttgagtcagtgaaaagtatgtcatctggaacagatctcactgaaagtaatttgagcactggattaagcaatacagacaasataaatcctcctgtaaaagttgtgtctgtcagttctaaattacatgcaaatgcctgaggaaatgcaaagaacagtggccataagtatatagatcatgttggtattaagactgaaagtgctaccaacagcagaaacaatccagatccatacttctcaagctgtagaaagctcatttactgtgaattaaagttctacttgcctgctatttgagctagttccaacagaacaccatgtttacagtcagtgtacttcaggcagaaagaccacttgacaggtaaatgctttaacatgcatagctga

SEQ ID NO: 27665 - DNA, 600 bp, Chicken  19866894244974_1
gaatctggcaatgtccaagtttcttttatgtctgattaatactgtacctgaatatcctattttactggtggaaactgagaatcctatcttctaactatgtttcactacatgtaactgttttcgattggaatttggtatttacatatttcagacagtatagaccagtagaagcttgtttgttgtcatgtgggaaattaacgtgaagaaaacattcagatcaccaaaaatccctcttctttaaatcgcctttctactttattagatatatttgacattaatataatacatcacaggctactracattatagtatgtatctaaagttgacattaatttagatgtacttttaatcttggtaaatttgaaagtagaggcatgatttatttgaagtgaaatataataccaagaaaaacaacaccagtatctttcaagtaaactgttacgagctatgcagctgcaggagctctgactgaggaaatatgcaaaatacaaaacctgtcaccttcttgaatatgttccttcattcttgatttcactgaagaaactacataagattaagacaataatttcctcattaacttataaaaataacattttcaga

SEQ ID NO: 27666 - DNA, 600 bp, Chicken  19866894244975_1
actgcaatccaatatgttcataaagagatttctaagcaaatgagaggttcagttacagtctgtgtttacagtgcttacacttctgcaagaacattttaacatctttttttttttttgcttttcatgcttttatatttttatgtttttaaacaagcaattcaaatcactttagagctctatttgagccctcactttccttacagcactaccttcggatgaaagtcaatatcatactgtcagtacattaaattaaataaatgctccaaaattcttttttttcccctttctaatttagttgcygtttcttgaagcaagttcttaaagagtttccaaataagtctaaagacatgcaatttatttttaactagtgaattactttcttgagtggcactgtatcctcaagatgtggcatccatttactaactgtggaaggtactcagaatttccactacatacaaccatctcttctaacartaactagaaacactggatataaagatctagaataatactttcagcaaaatataaaagatatcattcaaaacagataagagaacagacaagaratgcaaagaatattcttacacaaacacacattat

SEQ ID NO: 27667 - DNA, 600 bp, Chicken  19866894244975_2
ctctatttgagccctcactttccttacagcactaccttcggatgaaagtcaatatcatactgtcagtacattaaattaaataaatgctccaaaattcttttttttcccctttctaatttagttgcygtttcttgaagcaagttcttaaagagtttccaaataagtctaaagacatgcaatttatttttaactagtgaattactttcttgagtggcactgtatcctcaagatgtggcatccatttactaactgtggaaggtactcagaatttccactacatacaaccatctcttctaacartaactagaaacactggatataaagatctagaataatactttcagcaaaatataaaagatatcattcaaaacagataagagaacagacaagaratgcaaagaatattcttacacaaacacacattatacttaccctggttttgttcaagtacacagtaactgcaaaattcaggtagaggcatccttccttgatgagcttttgagccatcactactttaaattacacattatgtattttaatacttataagtaatttgtaatataatttcaaagtagtttataacaaatctcactttgtact

SEQ ID NO: 27668 - DNA, 600 bp, Chicken  19866894244975_3
aattcttttttttcccctttctaatttagttgcygtttcttgaagcaagttcttaaagagtttccaaataagtctaaagacatgcaatttatttttaactagtgaattactttcttgagtggcactgtatcctcaagatgtggcatccatttactaactgtggaaggtactcagaatttccactacatacaaccatctcttctaacartaactagaaacactggatataaagatctagaataatactttcagcaaaatataaaagatatcattcaaaacagataagagaacagacaagaratgcaaagaatattcttacacaaacacacattatacttaccctggttttgttcaagtacacagtaactgcaaaattcaggtagaggcatccttccttgatgagcttttgagccatcactactttaaattacacattatgtattttaatacttataagtaatttgtaatataatttcaaagtagtttataacaaatctcactttgtacttcaggtaaaaagaaacttctaacaaacattaacatggcaactgttacaccattgccccttgtgtaggttttgggataagacaacctggaaga

SEQ ID NO: 27669 - DNA, 599 bp, Chicken  19866894244979_1
  misc_feature (1)..(165): n is any nucleotide
nnnnnnnnnnnnnnnnnnnnnnnnnnnnnnnnnnnnnnnnnnnnnnnnnnnnnnnnnnnnnnnnnnnnnnnnnnnnnnnnnnnnnnnnnnnnnnnnnnnnnnnnnnnnnnnnnnnnnnnnnnnnnnnnnnnnnnnnnnnnnnnnnnnnnnnnnnnnnnnnnnnnntaaaatatagtgctaactaatgacatgtgcaacaattttgctatttatagtttgagaatcatagaaccatagaatggtttgggttggaagggacccttaagatcatctacttccaaactacctgttataggcagrgacacctcccactagatcaggttgctcaaagctccatccagcctggccttgaatgcttccagagagggggcaatctgcgcaacctgctccaatgtctcaccaccctcacagtaaagaatttcttccttatatctagtgtaaatctactctcttcgagtttaaatccatttctcctcayccygctgctacackcccttctaaaaagcccttccccacagctttcttgtgggccctcttcaagtactggaaggctgctataagatccccctggagccttctgttctccaggctaaagagct

SEQ ID NO: 27670 - DNA, 600 bp, Chicken  19866894244979_2
taactaatgacatgtgcaacaattttgctatttatagtttgagaatcatagaaccatagaatggtttgggttggaagggacccttaagatcatctacttccaaactacctgttataggcagrgacacctcccactagatcaggttgctcaaagctccatccagcctggccttgaatgcttccagagagggggcaatctgcgcaacctgctccaatgtctcaccaccctcacagtaaagaatttcttccttatatctagtgtaaatctactctcttcgagtttaaatccatttctcctcayccygctgctacackcccttctaaaaagcccttccccacagctttcttgtgggccctcttcaagtactggaaggctgctataagatccccctggagccttctgttctccaggctaaagagctccagctctctcagactgtccttgtagggtaggtgctccaacccactgatcatctttctggctctcctctggagcctctccaacagcttgatgtccttcttgtgttcggggctccagaactggatgcagtactccagctgaggtctcacaagatttgagtagaggggcagaatccctcaa

SEQ ID NO: 27671 - DNA, 600 bp, Chicken  19866894244979_3
ctaatgacatgtgcaacaattttgctatttatagtttgagaatcatagaaccatagaatggtttgggttggaagggacccttaagatcatctacttccaaactacctgttataggcagrgacacctcccactagatcaggttgctcaaagctccatccagcctggccttgaatgcttccagagagggggcaatctgcgcaacctgctccaatgtctcaccaccctcacagtaaagaatttcttccttatatctagtgtaaatctactctcttcgagtttaaatccatttctcctcayccygctgctacackcccttctaaaaagcccttccccacagctttcttgtgggccctcttcaagtactggaaggctgctataagatccccctggagccttctgttctccaggctaaagagctccagctctctcagactgtccttgtagggtaggtgctccaacccactgatcatctttctggctctcctctggagcctctccaacagcttgatgtccttcttgtgttcggggctccagaactggatgcagtactccagctgaggtctcacaagatttgagtagaggggcagaatccctcaactg

SEQ ID NO: 27672 - DNA, 600 bp, Chicken  19866894244979_4
tgcaacaattttgctatttatagtttgagaatcatagaaccatagaatggtttgggttggaagggacccttaagatcatctacttccaaactacctgttataggcagrgacacctcccactagatcaggttgctcaaagctccatccagcctggccttgaatgcttccagagagggggcaatctgcgcaacctgctccaatgtctcaccaccctcacagtaaagaatttcttccttatatctagtgtaaatctactctcttcgagtttaaatccatttctcctcayccygctgctacackcccttctaaaaagcccttccccacagctttcttgtgggccctcttcaagtactggaaggctgctataagatccccctggagccttctgttctccaggctaaagagctccagctctctcagactgtccttgtagggtaggtgctccaacccactgatcatctttctggctctcctctggagcctctccaacagcttgatgtccttcttgtgttcggggctccagaactggatgcagtactccagctgaggtctcacaagatttgagtagaggggcagaatccctcaactggttggtcacat

SEQ ID NO: 27673 - DNA, 600 bp, Chicken  19866894244990_1
caccagtcagtccttgccagatttggctctgaggatggactgagacaatacaaagattgttacttctgttggatttgactaattattataaacgagatagcatttctcaggcttttgagagcagacattgagggtcagtggtttaattccttattgctcacatgaaagatgaattattttcgtgcaaaaccttgccgtttctcatcctccttctattcatcacatccaaaaatcattacctggagcaaacttcagatgctcatttcccaaatcattacttaaaacatgtgatttcttatrgaaaccattgaatttgtaatcatatttacatatattttcaatacattaggctattccactgatcagttctcttattcatggaccccatttttgtttttgtaacagtgtttaggtcgcaaactcagtaactgaagaacaagcagttgccttcattctggctctgatgcaagtcctgactgagctgctatgacatgagctgctgctcacgttggtgatatgttgatggctagactagatgatattagtggtctctttcaaccttaatgattctatgattctgtgattctatgactctacgac

SEQ ID NO: 27674 - DNA, 600 bp, Chicken  19866894244995_1
atctgtcagagatagtttagacatagttcatcttgccttagggcaagaaggtagactacctgacctcttgaggttcccttcattcctgtcttctgtgactctttaattcacattagtcaaaatgtattaaatacaaaactaagtatgaatgttaccaattatttctctgctttcaaaacatctatgcttttccagaattgcaactggtttgcactgtatttttttaatacaaatattgagatgaaaatcagaggaaaacattcttttctcaaggagcgaaaacaagctctcaatcctatmaggatgcagtgcttctggcttctaaagctagcttcagtatatcacagaagggtaaaaatttgttctcgatcaactagacaatgctttaaaagaaagatttaagtgctattgttaacccttctaaatagaagttagtagtttgtcccaytgagagttagatcaggcttcttttactgcctcttgcagtgaactaggaacatagacctggctagttagcatgtccatactcagaggatgtaattccttagacaaaagtttctctgaccaccttgtatggccttatcttcatggccaaagaaa

SEQ ID NO: 27675 - DNA, 526 bp, Chicken  19866894244995_2
atgttaccaattatttctctgctttcaaaacatctatgcttttccagaattgcaactggtttgcactgtatttttttaatacaaatattgagatgaaaatcagaggaaaacattcttttctcaaggagcgaaaacaagctctcaatcctatmaggatgcagtgcttctggcttctaaagctagcttcagtatatcacagaagggtaaaaatttgttctcgatcaactagacaatgctttaaaagaaagatttaagtgctattgttaacccttctaaatagaagttagtagtttgtcccaytgagagttagatcaggcttcttttactgcctcttgcagtgaactaggaacatagacctggctagttagcatgtccatactcagaggatgtaattccttagacaaaagtttctctgaccaccttgtatggccttatcttcatggccaaagaaatacctggcaacataactcttaattatatgtatggtactgcaaagtctctgttggatgagagtacctcaaagaag

SEQ ID NO: 27676 - DNA, 599 bp, Chicken  19866894244999_1
  misc_feature (1)..(125): n is any nucleotide
nnnnnnnnnnnnnnnnnnnnnnnnnnnnnnnnnnnnnnnnnnnnnnnnnnnnnnnnnnnnnnnnnnnnnnnnnnnnnnnnnnnnnnnnnnnnnnnnnnnnnnnnnnnnnnnnnnnnnnnnnnnnncctgcttacagacaccagagagagaactacaccgactcctgggttagaccatttctaattaacatctgtccaagcagcactgaaatgttgagagcaatgttttctcagtaaggattcagatgcaactacagaatactaagctatacaatttttggtaacactcaggtatgccgcrtgaacagggcattaaaatataccaccatamaactaaagtaggagggagtatatactccctactaagtagggagcctatagcccacataacaaagcaggtgctcacaacatcccctgtgtggcagtggattagaggagcgtacagaagcacagcactgctatttctgttatcgcagtactacagtggcatttgcacagggattaatctcccacatgcgcagagaggaagaaaggaatctgttgcatcagactgaggaacatgaagctggaaatgctgagcagcacaaactccttatccaa

SEQ ID NO: 27677 - DNA, 599 bp, Chicken  19866894244999_2
  misc_feature (1)..(95): n is any nucleotide
nnnnnnnnnnnnnnnnnnnnnnnnnnnnnnnnnnnnnnnnnnnnnnnnnnnnnnnnnnnnnnnnnnnnnnnnnnnnnnnnnnnnnnnnnnnnnnncctgcttacagacaccagagagagaactacaccgactcctgggttagaccatttctaattaacatctgtccaagcagcactgaaatgttgagagcaatgttttctcagtaaggattcagatgcaactacagaatactaagctatacaatttttggtaacactcaggtatgccgcrtgaacagggcattaaaatataccaccatamaactaaagtaggagggagtatatactccctactaagtagggagcctatagcccacataacaaagcaggtgctcacaacatcccctgtgtggcagtggattagaggagcgtacagaagcacagcactgctatttctgttatcgcagtactacagtggcatttgcacagggattaatctcccacatgcgcagagaggaagaaaggaatctgttgcatcagactgaggaacatgaagctggaaatgctgagcagcacaaactccttatccaagccaaggagatccaaaagatggaacttttc

SEQ ID NO: 27678 - DNA, 491 bp, Chicken  19866894244999_3
gtactacagtggcatttgcacagggattaatctcccacatgcgcagagaggaagaaaggaatctgttgcatcagactgaggaacatgaagctggaaatgctgagcagcacaaactccttatccaagccaaggagatccaaaagatggaacttttctaccttggctccccacatccttctggcacagatatctctctttgctcctctttatttttcttaaactaatttcagctgcctttccctatgttcttttctaagtgcccaattgctcacattttaatttcctgcctaaaaggttacygagctaactctcttctcccaaattccataatgtaatacatacactacggctacatctctgtccactattacacattctcaaagcagtcagtgcaatcattaagaatcgtgttcagtatgagccccattattacgcaacagagcaaaactaattaaagaaagctgacatgaataaaaccattcaacatccat

SEQ ID NO: 27679 - DNA, 600 bp, Chicken  19866894245001_1
gcaaaacttcaacaaaagaacagttcttaacatgttctgttatttctaccaccactagcattatctagaatatcttcataaaaccatttttacaggaaagggttaggtaattctagtttaagcaaaaacatttaacatgcaataacacaaaagcctcaaaaccagactgcagatatgagacgaatgtcagaaaaaagcacaatgttttatacaaagatttcttaaggttgataacagcaaaatgccaagtattcccgttaaaattaacaagcaactgagatggttttactttactgctaygaaaagacaactctgttaccagagttaaatgaaaaactgtcgcactgttacaaagaaagagctatcattggttctataactgctgggraaactgccaaggcagcagttgagctctcctgtagcactggtatctsgattccaaagccccttcttcttgaaaaccaagatctaacaaggtagaattaaatactaaccaagaagttgtacgacggtcatcacatgcmcagcaagaaataaatgtacatctaagatagcagatttcattccagttatttattaattcaaaaaagacctaaaaag

SEQ ID NO: 27680 - DNA, 600 bp, Chicken  19866894245001_2
tttacaggaaagggttaggtaattctagtttaagcaaaaacatttaacatgcaataacacaaaagcctcaaaaccagactgcagatatgagacgaatgtcagaaaaaagcacaatgttttatacaaagatttcttaaggttgataacagcaaaatgccaagtattcccgttaaaattaacaagcaactgagatggttttactttactgctaygaaaagacaactctgttaccagagttaaatgaaaaactgtcgcactgttacaaagaaagagctatcattggttctataactgctgggraaactgccaaggcagcagttgagctctcctgtagcactggtatctsgattccaaagccccttcttcttgaaaaccaagatctaacaaggtagaattaaatactaaccaagaagttgtacgacggtcatcacatgcmcagcaagaaataaatgtacatctaagatagcagatttcattccagttatttattaattcaaaaaagacctaaaaagttctagtttaaaaaaaaccaaatccaaygaaacaaagacataagaagccaatgtactactagatgtactactataagcacgattctca

SEQ ID NO: 27681 - DNA, 600 bp, Chicken  19866894245001_3
acatgcaataacacaaaagcctcaaaaccagactgcagatatgagacgaatgtcagaaaaaagcacaatgttttatacaaagatttcttaaggttgataacagcaaaatgccaagtattcccgttaaaattaacaagcaactgagatggttttactttactgctaygaaaagacaactctgttaccagagttaaatgaaaaactgtcgcactgttacaaagaaagagctatcattggttctataactgctgggraaactgccaaggcagcagttgagctctcctgtagcactggtatctsgattccaaagccccttcttcttgaaaaccaagatctaacaaggtagaattaaatactaaccaagaagttgtacgacggtcatcacatgcmcagcaagaaataaatgtacatctaagatagcagatttcattccagttatttattaattcaaaaaagacctaaaaagttctagtttaaaaaaaaccaaatccaaygaaacaaagacataagaagccaatgtactactagatgtactactataagcacgattctcattaggtatgtatgacaaatggctgtcaggagtaataaaatctcaca

SEQ ID NO: 27682 - DNA, 600 bp, Chicken  19866894245001_4
aggttgataacagcaaaatgccaagtattcccgttaaaattaacaagcaactgagatggttttactttactgctaygaaaagacaactctgttaccagagttaaatgaaaaactgtcgcactgttacaaagaaagagctatcattggttctataactgctgggraaactgccaaggcagcagttgagctctcctgtagcactggtatctsgattccaaagccccttcttcttgaaaaccaagatctaacaaggtagaattaaatactaaccaagaagttgtacgacggtcatcacatgcmcagcaagaaataaatgtacatctaagatagcagatttcattccagttatttattaattcaaaaaagacctaaaaagttctagtttaaaaaaaaccaaatccaaygaaacaaagacataagaagccaatgtactactagatgtactactataagcacgattctcattaggtatgtatgacaaatggctgtcaggagtaataaaatctcacagaagtatttgaagagtgctcttcagccatagggcctttgtcagagtcaggtttaggaacaatttctgrcagttgtgctgggttggctaca

SEQ ID NO: 27683 - DNA, 600 bp, Chicken  19866894245001_5
atgaaaaactgtcgcactgttacaaagaaagagctatcattggttctataactgctgggraaactgccaaggcagcagttgagctctcctgtagcactggtatctsgattccaaagccccttcttcttgaaaaccaagatctaacaaggtagaattaaatactaaccaagaagttgtacgacggtcatcacatgcmcagcaagaaataaatgtacatctaagatagcagatttcattccagttatttattaattcaaaaaagacctaaaaagttctagtttaaaaaaaaccaaatccaaygaaacaaagacataagaagccaatgtactactagatgtactactataagcacgattctcattaggtatgtatgacaaatggctgtcaggagtaataaaatctcacagaagtatttgaagagtgctcttcagccatagggcctttgtcagagtcaggtttaggaacaatttctgrcagttgtgctgggttggctacaccaaggtaactgcatcaagctccaaccccttccacagacaacaaaatttgaaccttctgtgacatagactatagastcaacccagtaagactgagatgcagcac

SEQ ID NO: 27684 - DNA, 600 bp, Chicken  19866894245001_6
tgtacgacggtcatcacatgcmcagcaagaaataaatgtacatctaagatagcagatttcattccagttatttattaattcaaaaaagacctaaaaagttctagtttaaaaaaaaccaaatccaaygaaacaaagacataagaagccaatgtactactagatgtactactataagcacgattctcattaggtatgtatgacaaatggctgtcaggagtaataaaatctcacagaagtatttgaagagtgctcttcagccatagggcctttgtcagagtcaggtttaggaacaatttctgrcagttgtgctgggttggctacaccaaggtaactgcatcaagctccaaccccttccacagacaacaaaatttgaaccttctgtgacatagactatagastcaacccagtaagactgagatgcagcactaatatccacaatggcaataaatgttactgaaaacattatagcagtatgctcctgtaacagagaactgtaagactaaatttaaaaaacagaaccatgcatgcaagtttcttaccttatagacactctcttgtattcttgcttttaatttagagctccctgttttcattccagac

SEQ ID NO: 27685 - DNA, 600 bp, Chicken  19866894245001_7
ttctagtttaaaaaaaaccaaatccaaygaaacaaagacataagaagccaatgtactactagatgtactactataagcacgattctcattaggtatgtatgacaaatggctgtcaggagtaataaaatctcacagaagtatttgaagagtgctcttcagccatagggcctttgtcagagtcaggtttaggaacaatttctgrcagttgtgctgggttggctacaccaaggtaactgcatcaagctccaaccccttccacagacaacaaaatttgaaccttctgtgacatagactatagastcaacccagtaagactgagatgcagcactaatatccacaatggcaataaatgttactgaaaacattatagcagtatgctcctgtaacagagaactgtaagactaaatttaaaaaacagaaccatgcatgcaagtttcttaccttatagacactctcttgtattcttgcttttaatttagagctccctgttttcattccagacaccaaaattgtatctccttgcttggcaactttttccatctctgatatgtaagggggtggaatataagtggattctaaaaatttgagtatactgaaagg

SEQ ID NO: 27686 - DNA, 600 bp, Chicken  19866894245015_1
gaaatagagcatgaattttcaggcgtgagttcatcctgttacagaccagaagttcttttccaggacatgaaaatgtactttgacagtgcaggaaaaccatttcccacccagctcaccccatgagatgaaagcagtttgctcttaggatcccgtttgtttgttgattttggcactcggtgaaacaattatcataggtcaaaagttaacatgtttctcagactgctctttttcatctctcttggcattatggatttcctcttaattgacaaaaaatacccagcagcttcacctgcatctgcrcagaggaatcgtaattgccttactgggcaaccttatcttaattctgatatgaaaaggaaaacaaatgtttgtttcagcagttccaggtgttggtatacaaactaatggattatcagtgcagcaatttcagggcttgtccaagaggagaggttattccagtagcactcttcagtggtagctgcttctgagcagygctgaaggtactgttctggagcaagagcttctattcctatggagctgggcatggagatagtcagcagtaggcttaaatttttatcctgacttggttcaccgctaatg

SEQ ID NO: 27687 - DNA, 600 bp, Chicken  19866894245015_2
ggtcaaaagttaacatgtttctcagactgctctttttcatctctcttggcattatggatttcctcttaattgacaaaaaatacccagcagcttcacctgcatctgcrcagaggaatcgtaattgccttactgggcaaccttatcttaattctgatatgaaaaggaaaacaaatgtttgtttcagcagttccaggtgttggtatacaaactaatggattatcagtgcagcaatttcagggcttgtccaagaggagaggttattccagtagcactcttcagtggtagctgcttctgagcagygctgaaggtactgttctggagcaagagcttctattcctatggagctgggcatggagatagtcagcagtaggcttaaatttttatcctgacttggttcaccgctaatgtgaagatgccagtaagcccttgtggtaatctttcttaaaggaaacaaaatgaggttgatttttttctcctccatcttctttkcctttcaaaatggaagaattttgacataattgtactttacagcaggacatctcaaagcatttacagaagcactaagctactcacaacacacctactgtctggttatttcag

SEQ ID NO: 27688 - DNA, 557 bp, Chicken  19866894245015_3
ccaggtgttggtatacaaactaatggattatcagtgcagcaatttcagggcttgtccaagaggagaggttattccagtagcactcttcagtggtagctgcttctgagcagygctgaaggtactgttctggagcaagagcttctattcctatggagctgggcatggagatagtcagcagtaggcttaaatttttatcctgacttggttcaccgctaatgtgaagatgccagtaagcccttgtggtaatctttcttaaaggaaacaaaatgaggttgatttttttctcctccatcttctttkcctttcaaaatggaagaattttgacataattgtactttacagcaggacatctcaaagcatttacagaagcactaagctactcacaacacacctactgtctggttatttcagttattggtgcactttggagtgggaggttgaggtaatcagccagaatgtcaagtcctatttgatgagaagccctaagtgatttacccacacttccaaaggaagttcttggcagagatcattgtctttcttattgtttcccaggttta

SEQ ID NO: 27689 - DNA, 599 bp, Chicken  19866894245027_1
  misc_feature (1)..(125): n is any nucleotide
nnnnnnnnnnnnnnnnnnnnnnnnnnnnnnnnnnnnnnnnnnnnnnnnnnnnnnnnnnnnnnnnnnnnnnnnnnnnnnnnnnnnnnnnnnnnnnnnnnnnnnnnnnnnnnnnnnnnnnnnnnnnngatcttgcctatactgcacactgaatcacactgtggggatatccaagttgatactacgtgagctgccaaaacaagtcctgttgaggcagaaaagagctccacgtgggcttacgtagatgtatctttatatactctaaaacagggattctcaacctgtttaccagtggaatgggcrggtcatccctttgtggttctacaaataccttgcaggttgcattttactgtctcgcyacataaacagtaacatctaatcctgaggttatctstggaaaggatcaaaattctctgatatggagacagagctttttatttatttatttatttatttatttccaatcatgattacttagtgcyttargagtgaaggtctagaagatatctattccccaatattgttctttgcagcattatcaccaaaaatactgaacttccgatggcacctcctcttctcttttcctacgcgtcagccctgcc

SEQ ID NO: 27690 - DNA, 599 bp, Chicken  19866894245027_2
  misc_feature (1)..(69): n is any nucleotide
nnnnnnnnnnnnnnnnnnnnnnnnnnnnnnnnnnnnnnnnnnnnnnnnnnnnnnnnnnnnnnnnnnnnngatcttgcctatactgcacactgaatcacactgtggggatatccaagttgatactacgtgagctgccaaaacaagtcctgttgaggcagaaaagagctccacgtgggcttacgtagatgtatctttatatactctaaaacagggattctcaacctgtttaccagtggaatgggcrggtcatccctttgtggttctacaaataccttgcaggttgcattttactgtctcgcyacataaacagtaacatctaatcctgaggttatctstggaaaggatcaaaattctctgatatggagacagagctttttatttatttatttatttatttatttccaatcatgattacttagtgcyttargagtgaaggtctagaagatatctattccccaatattgttctttgcagcattatcaccaaaaatactgaacttccgatggcacctcctcttctcttttcctacgcgtcagccctgccatgacatggaatcctttcaagaagctgycctgtctataaagacactgtaartcaca

SEQ ID NO: 27691 - DNA, 599 bp, Chicken  19866894245027_3
  misc_feature (1)..(34): n is any nucleotide
nnnnnnnnnnnnnnnnnnnnnnnnnnnnnnnnnngatcttgcctatactgcacactgaatcacactgtggggatatccaagttgatactacgtgagctgccaaaacaagtcctgttgaggcagaaaagagctccacgtgggcttacgtagatgtatctttatatactctaaaacagggattctcaacctgtttaccagtggaatgggcrggtcatccctttgtggttctacaaataccttgcaggttgcattttactgtctcgcyacataaacagtaacatctaatcctgaggttatctstggaaaggatcaaaattctctgatatggagacagagctttttatttatttatttatttatttatttccaatcatgattacttagtgcyttargagtgaaggtctagaagatatctattccccaatattgttctttgcagcattatcaccaaaaatactgaacttccgatggcacctcctcttctcttttcctacgcgtcagccctgccatgacatggaatcctttcaagaagctgycctgtctataaagacactgtaartcacactacagtactcaactacgcaatactaattctacgt

SEQ ID NO: 27692 - DNA, 600 bp, Chicken  19866894245027_4
tacgtgagctgccaaaacaagtcctgttgaggcagaaaagagctccacgtgggcttacgtagatgtatctttatatactctaaaacagggattctcaacctgtttaccagtggaatgggcrggtcatccctttgtggttctacaaataccttgcaggttgcattttactgtctcgcyacataaacagtaacatctaatcctgaggttatctstggaaaggatcaaaattctctgatatggagacagagctttttatttatttatttatttatttatttccaatcatgattacttagtgcyttargagtgaaggtctagaagatatctattccccaatattgttctttgcagcattatcaccaaaaatactgaacttccgatggcacctcctcttctcttttcctacgcgtcagccctgccatgacatggaatcctttcaagaagctgycctgtctataaagacactgtaartcacactacagtactcaactacgcaatactaattctacgtaattcctgtatttactcctgatactmtaccccaagcactgaacctgttagtcttacatcacgtttgccatctgaggttatctttgttct

SEQ ID NO: 27693 - DNA, 600 bp, Chicken  19866894245027_5
tgagctgccaaaacaagtcctgttgaggcagaaaagagctccacgtgggcttacgtagatgtatctttatatactctaaaacagggattctcaacctgtttaccagtggaatgggcrggtcatccctttgtggttctacaaataccttgcaggttgcattttactgtctcgcyacataaacagtaacatctaatcctgaggttatctstggaaaggatcaaaattctctgatatggagacagagctttttatttatttatttatttatttatttccaatcatgattacttagtgcyttargagtgaaggtctagaagatatctattccccaatattgttctttgcagcattatcaccaaaaatactgaacttccgatggcacctcctcttctcttttcctacgcgtcagccctgccatgacatggaatcctttcaagaagctgycctgtctataaagacactgtaartcacactacagtactcaactacgcaatactaattctacgtaattcctgtatttactcctgatactmtaccccaagcactgaacctgttagtcttacatcacgtttgccatctgaggttatctttgttctgcaa

SEQ ID NO: 27694 - DNA, 600 bp, Chicken  19866894245027_6
ccttgcaggttgcattttactgtctcgcyacataaacagtaacatctaatcctgaggttatctstggaaaggatcaaaattctctgatatggagacagagctttttatttatttatttatttatttatttccaatcatgattacttagtgcyttargagtgaaggtctagaagatatctattccccaatattgttctttgcagcattatcaccaaaaatactgaacttccgatggcacctcctcttctcttttcctacgcgtcagccctgccatgacatggaatcctttcaagaagctgycctgtctataaagacactgtaartcacactacagtactcaactacgcaatactaattctacgtaattcctgtatttactcctgatactmtaccccaagcactgaacctgttagtcttacatcacgtttgccatctgaggttatctttgttctgcaatgtgccacaaactcaacccctctcctgtaggttatgactcttctcaatcaaaattataagccttttaaaaaagtgatactgtgcataaatttcactacagaacaatttgttatgttcattagggctgcaggtgtaggctctggt

SEQ ID NO: 27695 - DNA, 600 bp, Chicken  19866894245027_7
ctcgcyacataaacagtaacatctaatcctgaggttatctstggaaaggatcaaaattctctgatatggagacagagctttttatttatttatttatttatttatttccaatcatgattacttagtgcyttargagtgaaggtctagaagatatctattccccaatattgttctttgcagcattatcaccaaaaatactgaacttccgatggcacctcctcttctcttttcctacgcgtcagccctgccatgacatggaatcctttcaagaagctgycctgtctataaagacactgtaartcacactacagtactcaactacgcaatactaattctacgtaattcctgtatttactcctgatactmtaccccaagcactgaacctgttagtcttacatcacgtttgccatctgaggttatctttgttctgcaatgtgccacaaactcaacccctctcctgtaggttatgactcttctcaatcaaaattataagccttttaaaaaagtgatactgtgcataaatttcactacagaacaatttgttatgttcattagggctgcaggtgtaggctctggtggggcaaagagctgtttacaggt

SEQ ID NO: 27696 - DNA, 600 bp, Chicken  19866894245027_8
tggagacagagctttttatttatttatttatttatttatttccaatcatgattacttagtgcyttargagtgaaggtctagaagatatctattccccaatattgttctttgcagcattatcaccaaaaatactgaacttccgatggcacctcctcttctcttttcctacgcgtcagccctgccatgacatggaatcctttcaagaagctgycctgtctataaagacactgtaartcacactacagtactcaactacgcaatactaattctacgtaattcctgtatttactcctgatactmtaccccaagcactgaacctgttagtcttacatcacgtttgccatctgaggttatctttgttctgcaatgtgccacaaactcaacccctctcctgtaggttatgactcttctcaatcaaaattataagccttttaaaaaagtgatactgtgcataaatttcactacagaacaatttgttatgttcattagggctgcaggtgtaggctctggtggggcaaagagctgtttacaggttgagaacccttgttctaggcacagttgtactaccaccatgacctatataatgatataaacgcagac

SEQ ID NO: 27697 - DNA, 600 bp, Chicken  19866894245028_1
aaaaaaaaatctgaaaaaatactgactagttcttgaatttcaagatttccttacccatcacaatcaactatttcaggtccttcaaatgaaaagggatctgtcttgtctggctctgacttcatcttgtaggtttttgtcaggactgtattagaaaagtagtcgttgggcccaaagtggaactctaatgagaaagactagaagaaagttccatgacagttttgttactactgatttttatctttgaaacagtgcatcagcagaattaacaacaattaaacaaacatatcttttgctacagcrgaagcatagacatctattattcatctcttcactagggatgatgcagctgttcttctgaagttgctctggcttcagaatagcatcatcaggctctgctcttccacctgctctgagcagtcaatgatacgatcttacaagactgaaacaaagtttggcttttcctcaaaaataagtatgcatgcacatgagtctgtatttaaacagggcactccaccatgaaccagagtatttgttcatttaataatagaaaatcctgcagaataaataaataaaatgaataattcctactgcctatttctt

SEQ ID NO: 27698 - DNA, 600 bp, Chicken  19866894245035_1
acctttcgaagtggaacaactatataactgttgcactagaagcaagataaaggaaaataaaccattctgaaatgggtgagaaacagaaacagtctgaacaattattttgtctttacaaggcccagatggtatacgtgatcacagaacaaggaggcctgagcacactcactacataggagcaacatctccagcaatagaaggtagcagtgatgctggctacttgtggcggccggcctcctgcttctcatccccactgcttcgccgatgtcagtacgccagagaaatcgggtggggagtgcragagctcagctatttcacttggagaaatctccagagcggagcacagatcaaggtaaggaagacytcatagccaaaaataccagagtgccagaaggcagaacaaagcccagctccgttttctagtttcatcctggattgtcactagggcagagatcattcataaactaagcaagaaacgagggagaactcagcaatttgattatcagcctgcagaagcctcaagttatatctttgtaacgttttgcttgagggtgtgtgatctaacatgccacaagcctctggtgtttgaggtgatccaga

SEQ ID NO: 27699 - DNA, 600 bp, Chicken  19866894245035_2
ttctgaaatgggtgagaaacagaaacagtctgaacaattattttgtctttacaaggcccagatggtatacgtgatcacagaacaaggaggcctgagcacactcactacataggagcaacatctccagcaatagaaggtagcagtgatgctggctacttgtggcggccggcctcctgcttctcatccccactgcttcgccgatgtcagtacgccagagaaatcgggtggggagtgcragagctcagctatttcacttggagaaatctccagagcggagcacagatcaaggtaaggaagacytcatagccaaaaataccagagtgccagaaggcagaacaaagcccagctccgttttctagtttcatcctggattgtcactagggcagagatcattcataaactaagcaagaaacgagggagaactcagcaatttgattatcagcctgcagaagcctcaagttatatctttgtaacgttttgcttgagggtgtgtgatctaacatgccacaagcctctggtgtttgaggtgatccagaaagccaattaaagcttccgggacaaggagcacacctggtagagaggacccatcccacagggaca

SEQ ID NO: 27700 - DNA, 599 bp, Chicken  19866894245041_1
  misc_feature (1)..(7): n is any nucleotide
nnnnnnnccggagaagattatgaagtgttgaagaatgctggaatggaaaattaattttgtggcattatggtagttgttaagaaaggggtgagggaaaaatctcattaattttaaaaataaagccttcttttcacaagttgcataaatgtatggagttttatgccttcttcaacttttggcttcatatacaaaatacaaattgactccgactcctctgtagcttttacagtcagaggaaatttttctgctgccgttcctgattaatttccaataaattcctgtgaatagtagactcatcartgttaccagttcgacagttttaaccattaaacttttatatatagagggagaggattttttttttactactgcatatgaatttgatagtttttcttttttttccccagaaaatgattgatacaataattttcttgaaaaagaataggtgttaatatgtttagaaaaagaaatagctaccttatttttgaaaaacaagttgtgcttattctggcttactttctgtgtgtggtccagatgcaaacctgtgaaggtccagaagccactggcctgtgttaagtgaagcacagatactgttgcaa

SEQ ID NO: 27701 - DNA, 600 bp, Chicken  19866894245042_1
atccaatttttttggtcctggcaggccaatctgcgagagagagaagagaaggacaaacctgcatgtcttgcctgttggaaacaggaccttccccatcagcttggctgaacgatggtggtgacagccaaggctgccagtagagaagcagacaatgcagaaaggaaaatatattcacattttttggtgaaataagcttatttttcaaacatgcagacttgcgggaccattcatctcagcaagtcattttgctcacatgtaaatttccctgcagctcaggagttttaattctcaggccctttytaccatctgtaactcaatgtctatttttttaaagaaattgcagacatctgtttcaatacccatcttttccatcacatggaattttagattcaaaaatccgagctcgaaaataataccatagttagattccatttccaagcaaccgggggctggcattttaaaggctgcctttttaattagcccgttctgccaccttggctgcgctgggctccgcgtagcacagagctgtgcctgcactcgaggtgaggctgtgggttggagattggggtgagcagggggaaaagaggccgggggatgtgc

SEQ ID NO: 27702 - DNA, 600 bp, Chicken  19866894245044_1
tgtatactgctcatctaaatctctcagcacggcatttggataccttgctaaagtgcacgcttttgaagagagagctcactacttgctggaagcaatgtgcctcttgcataagccaatttttggggataaaataacagttttgctttttccgtggagattcacgtgctcgtgtgcaataagaccccatcctgttatggatggggaagataaatcgatgtgcagctgtggggcacatctggatgcacatgctgcaatagacacgcaacagctaggaagaaaacactcaagctttctagaaasctgcyctgaactatcaatggtatcctctccagagctygagattgcatgtgcaaacctacctaggcagtgacacaagctatctcaaaatttactgatcatcagtttgacatctaccaagccagttcttatctgagatctctctcatcatttccacgacctttctagcttttcaggtgagaaagctaaatgacagctggtcactgagggctgacagaaacccaaactgtcatagtgtgcaagcgtggattagaacaacagcagcggcagcaaaatgtcacaacaattgatattgctattatt

SEQ ID NO: 27703 - DNA, 600 bp, Chicken  19866894245044_2
actgctcatctaaatctctcagcacggcatttggataccttgctaaagtgcacgcttttgaagagagagctcactacttgctggaagcaatgtgcctcttgcataagccaatttttggggataaaataacagttttgctttttccgtggagattcacgtgctcgtgtgcaataagaccccatcctgttatggatggggaagataaatcgatgtgcagctgtggggcacatctggatgcacatgctgcaatagacacgcaacagctaggaagaaaacactcaagctttctagaaasctgcyctgaactatcaatggtatcctctccagagctygagattgcatgtgcaaacctacctaggcagtgacacaagctatctcaaaatttactgatcatcagtttgacatctaccaagccagttcttatctgagatctctctcatcatttccacgacctttctagcttttcaggtgagaaagctaaatgacagctggtcactgagggctgacagaaacccaaactgtcatagtgtgcaagcgtggattagaacaacagcagcggcagcaaaatgtcacaacaattgatattgctattattggcat

SEQ ID NO: 27704 - DNA, 600 bp, Chicken  19866894245044_3
ggataccttgctaaagtgcacgcttttgaagagagagctcactacttgctggaagcaatgtgcctcttgcataagccaatttttggggataaaataacagttttgctttttccgtggagattcacgtgctcgtgtgcaataagaccccatcctgttatggatggggaagataaatcgatgtgcagctgtggggcacatctggatgcacatgctgcaatagacacgcaacagctaggaagaaaacactcaagctttctagaaasctgcyctgaactatcaatggtatcctctccagagctygagattgcatgtgcaaacctacctaggcagtgacacaagctatctcaaaatttactgatcatcagtttgacatctaccaagccagttcttatctgagatctctctcatcatttccacgacctttctagcttttcaggtgagaaagctaaatgacagctggtcactgagggctgacagaaacccaaactgtcatagtgtgcaagcgtggattagaacaacagcagcggcagcaaaatgtcacaacaattgatattgctattattggcatagcaagttgaacattatgtcaatgtcgcatca

SEQ ID NO: 27705 - DNA, 600 bp, Chicken  19866894245045_1
ttgctcactgagcactctgctggttacagctagcccactccatctttagtttaacaagccatagcaagcatacccacagaactggcactggattacagatgggtacctgaacatatctgcactgcactgcatacatgtgctcacacacgcatacacatatatatatttataaggtgaaaaagttaaatgagtttattttctctctcgtggctggattcgagctcaaaggatattatggatgctggaaaacagaggcaagactaggactggggaacaatggctgttggaacaatttacccrgtaaatacagttgatgaacgggattcctttgctttctgcagtccttaattgaagacagcatgtgttctggcaactgaagtggaagctgtgtgcgcagttaaagaatttgcgggcaagattctgttctctgttacatccaagggctcaaatgatgcttaactattcgttctggctccagattacaataagctctgaattacgttcccctcaaattcagtggcagaacttgcacttatcttcaacaagaataagaacggtttccaaacgctgttgtgtaatagttgtgcttatttgagctta

SEQ ID NO: 27706 - DNA, 600 bp, Chicken  19866894245045_2
acttaactgtgactgtggggactattcatagggaagatccaatagtgattatcagcacaactcttgaaaatgaagcaagagggatctttctgaatttaattgataagagttttatttaaatatgatacgtgcaaagtatcccacatagagaaatgctgctttccagccttgatcccaatatgtcctaggcagctgtagttccaatgtagctttgagatcaaaagccttaattttctattaggttaggatcatgtaactaatgtcttgatcttcatgaagcacttgaacaggagagatttmtaagattaatgctaaatcaattcttaagaatttttctggagtgggatgtaaattctttgcaagacttggctctgtcttgcatctcccatgaaagcaagaggccgtgtcaggtgctgtccatgacaacgtgaatctgaccaccagggaagttcccagcacagaacagagctcccacctgcgtgctgctgtccagaaacacattgatttgcgtctgtgtttcttttcctctgaagcaagttaacgtatgcgactgcgtgtatagaggtgacgcataagaacaagatgcagcagactgtgtgt

SEQ ID NO: 27707 - DNA, 600 bp, Chicken  19866894245046_1
cctggtaacatccttgttaggacttgaaaaagtgaaaagtaattttggacaatgatttgacaatcctttttcctctttcatttgttatgtagtttatataaagattattttaagaacacagtaatcgcattgttttctttcttagttataatattaactaaaggaaatctgtacttactgctggcctgaatcttgactgtactagtcaaggtcaaggcatagtgctaaatatgctccttttgtttaaatgccctagagatcttcactgctgatcatcttacagaaagttaattccttcayaggctaggtttccagaaacttgaatgggttgatcctaacatgcgtgtgagagaaggtgataaaatatgggccatggtatgaaatagctgtattaaaagtctctctctgtacaaaggagatctgtggtggtcatgtgcacgcactgaaaggacttatttttaataagaagaaaattatgattagtagtgggaggtcacagtattaagaccaccaatatagaatgctagaatcttttcttttgtatctacgatgctgtggcagaaggctggttattgaaaaaataatttgcrtattgtacaa

SEQ ID NO: 27708 - DNA, 600 bp, Chicken  19866894245046_2
attccttcayaggctaggtttccagaaacttgaatgggttgatcctaacatgcgtgtgagagaaggtgataaaatatgggccatggtatgaaatagctgtattaaaagtctctctctgtacaaaggagatctgtggtggtcatgtgcacgcactgaaaggacttatttttaataagaagaaaattatgattagtagtgggaggtcacagtattaagaccaccaatatagaatgctagaatcttttcttttgtatctacgatgctgtggcagaaggctggttattgaaaaaataatttgcrtattgtacaaaatttaacaaatattgagtaaaaagtaaacacggcacatataaaaacctctgacatgtaagaagcaaagaacagaatgcatttgtgttgtctttgcaatatgtttgggtactgtttttcttttcaagaaaaaataaatgattttctacatagtagaaaattgagtttgctatttctaaaatgctcttaatgtagaaaaaagaaacgtattttaaaattagtgcttatcacagcatcaccatcccccctcaagctttctactctaaaataaaaagggaaaaattctattgt

SEQ ID NO: 27709 - DNA, 600 bp, Chicken  19866894245050_1
ggagctcataataatacttgcatagcagttcttattgaaatggtggtataactgtataactaataacttaattttcatggtatatgatttcttcctgaaacatatgttttaccttcttttagtgacacttgttataactgtgccatacttaacatgaggatggaaaaaagaaaaacaagctttcatgtttcctatcctacaaggaaacatgatttctatggaaaatgttattaagagcagcagaatgtgatctgaagttttaattattcaatcaacagaacaagagttgatattttatcrtattttcattgtatactatgacttgtggcaaagtttcccgcatataaattttcactaaaatgaaaataaaaatacagccacatattccacactcagtagcgacaagcatataaaataaaatacctgaagttttccactctttaagtcagctctacaaaaaggttttaaatcagtgcaaactactagaagtctaactatgccttatcaactggaagtcttctaccaaccacacaccttttcttaaagagttctgttaaagattctaaaaaatagtaggctaaatcaataaagttcatgtta

SEQ ID NO: 27710 - DNA, 600 bp, Chicken  19866894245053_1
acaagagttgtcagaagtatctggtgactatgagggtggctgttgggaaattattgcatttgaattggaaacctaagaggctgtgggaacatgtggggtcagggcagcctggcagtaaccccaaagccacctctttcatcctggaggaacccagagccacagtgaagaacctgaactgcatttatttcagctcaaatgtgctctctcatgtacatattgttccaaacccacgttatcagtgggtcaaggatgtccatgctgaagtagtataaacctaagaagcttctggactgatcttcrttttttttttcctttgctttgttttgctcatgactatatctgtctgtaacctgtcatcagacagattgcctggccacatactgcctrctggcttttgcaagtacctcagtcacagcatrcctttacacacaaggacagtgtctacttcctcagtatgatggccttacatcatttgtcaatgatgttattattcagtaattctcaacatgcttaaaagcttgaatatctagggaacggagatcattttgagtggtattagattggcagaactctgtccacttagccttctattttgcgtcc

SEQ ID NO: 27711 - DNA, 600 bp, Chicken  19866894245053_2
aacatgtggggtcagggcagcctggcagtaaccccaaagccacctctttcatcctggaggaacccagagccacagtgaagaacctgaactgcatttatttcagctcaaatgtgctctctcatgtacatattgttccaaacccacgttatcagtgggtcaaggatgtccatgctgaagtagtataaacctaagaagcttctggactgatcttcrttttttttttcctttgctttgttttgctcatgactatatctgtctgtaacctgtcatcagacagattgcctggccacatactgcctrctggcttttgcaagtacctcagtcacagcatrcctttacacacaaggacagtgtctacttcctcagtatgatggccttacatcatttgtcaatgatgttattattcagtaattctcaacatgcttaaaagcttgaatatctagggaacggagatcattttgagtggtattagattggcagaactctgtccacttagccttctattttgcgtccaatgacaaggagcaatattcacacaagagtctgtacgagaaagtccaaagtaatccttttcctttagtatcttctcagcttctatca

SEQ ID NO: 27712 - DNA, 600 bp, Chicken  19866894245053_3
cccaaagccacctctttcatcctggaggaacccagagccacagtgaagaacctgaactgcatttatttcagctcaaatgtgctctctcatgtacatattgttccaaacccacgttatcagtgggtcaaggatgtccatgctgaagtagtataaacctaagaagcttctggactgatcttcrttttttttttcctttgctttgttttgctcatgactatatctgtctgtaacctgtcatcagacagattgcctggccacatactgcctrctggcttttgcaagtacctcagtcacagcatrcctttacacacaaggacagtgtctacttcctcagtatgatggccttacatcatttgtcaatgatgttattattcagtaattctcaacatgcttaaaagcttgaatatctagggaacggagatcattttgagtggtattagattggcagaactctgtccacttagccttctattttgcgtccaatgacaaggagcaatattcacacaagagtctgtacgagaaagtccaaagtaatccttttcctttagtatcttctcagcttctatcacttttcctagcagtggggtaaagcaaagaatg

SEQ ID NO: 27713 - DNA, 600 bp, Chicken  19866894245055_1
atcccacttcctttctactgaatatcaaagtgatatcaattagctattccttgttctcgctctttctagtccagacaaagggttttaacaagttaaagtttttttgatccataccttggaaaaatccttccataacctgtggtggcggtagacatttcactgttagcagtctctaacaatgaagtcttccagcaattccctctggaagatatttatctttatcatgatttcatttattatttgcttttcttaacagtctccttcaattctgtacaagaaagaaagaaagaaagaaaacakataaaatgaggtacctatggtaattgtgaaaatgatagagatatctcattctttacaaaaaacaaatgaatatgaagtgcttcacacactcagccttacaatctgtatgttacacaagtaaaaataaatgcacacacccataaaactagtaaaactggctgttgcagctacacatagttccttgtgttcattaaaattctatctttattgagcttatcttgattggcatgaagatcaaagtggaaatgtaataaataaaataatatatataatggaatccatggaaagaagctattcaga

SEQ ID NO: 27714 - DNA, 599 bp, Chicken  19866894245056_1
  misc_feature (1)..(229): n is any nucleotide
nnnnnnnnnnnnnnnnnnnnnnnnnnnnnnnnnnnnnnnnnnnnnnnnnnnnnnnnnnnnnnnnnnnnnnnnnnnnnnnnnnnnnnnnnnnnnnnnnnnnnnnnnnnnnnnnnnnnnnnnnnnnnnnnnnnnnnnnnnnnnnnnnnnnnnnnnnnnnnnnnnnnnnnnnnnnnnnnnnnnnnnnnnnnnnnnnnnnnnnnnnnnnnnnnnnnnnnnnnnnnnnnnnnnntatagatatatattgtgtcataattatctacttttgacagaaagccagcacataaatgtgttataatcccrgaatttctgagagctgtgtccctttccacataacagtggcttatttgggattgttgaagttttaaaatgatgtttacagattgcaggactcatcaccttccctaaagatttgtaagcagagcatctcctttccttgggcatcracttaggtgacaagtacttgaagtgatggcccaaccatttcttagtaaatccaaagttaaggtgtggatggcatgatgagggcaacagatacatatgtagaaaaggtcagatgaaaaactcaaagaattccttcctctttgctccagcaagtagta

SEQ ID NO: 27715 - DNA, 599 bp, Chicken  19866894245056_2
  misc_feature (1)..(86): n is any nucleotide
nnnnnnnnnnnnnnnnnnnnnnnnnnnnnnnnnnnnnnnnnnnnnnnnnnnnnnnnnnnnnnnnnnnnnnnnnnnnnnnnnnnnnntatagatatatattgtgtcataattatctacttttgacagaaagccagcacataaatgtgttataatcccrgaatttctgagagctgtgtccctttccacataacagtggcttatttgggattgttgaagttttaaaatgatgtttacagattgcaggactcatcaccttccctaaagatttgtaagcagagcatctcctttccttgggcatcracttaggtgacaagtacttgaagtgatggcccaaccatttcttagtaaatccaaagttaaggtgtggatggcatgatgagggcaacagatacatatgtagaaaaggtcagatgaaaaactcaaagaattccttcctctttgctccagcaagtagtaaaattccwgtgtttcatttcttcctgagatttccagcatacagtaggactgctgtgaaatctctcagagccacggctagcaagaagggctgaaatcccctccaaactcattatcaagggagggaagggagggcctgagtatac

SEQ ID NO: 27716 - DNA, 600 bp, Chicken  19866894245056_3
tgagagctgtgtccctttccacataacagtggcttatttgggattgttgaagttttaaaatgatgtttacagattgcaggactcatcaccttccctaaagatttgtaagcagagcatctcctttccttgggcatcracttaggtgacaagtacttgaagtgatggcccaaccatttcttagtaaatccaaagttaaggtgtggatggcatgatgagggcaacagatacatatgtagaaaaggtcagatgaaaaactcaaagaattccttcctctttgctccagcaagtagtaaaattccwgtgtttcatttcttcctgagatttccagcatacagtaggactgctgtgaaatctctcagagccacggctagcaagaagggctgaaatcccctccaaactcattatcaagggagggaagggagggcctgagtatacaacattttgtagtaacacagggactttttctgcctacactgtaaacaaacaagtctttacacctcctgttcaccacatccaaaacgctttgcaacatcttgagggctaacagacatctgcaacatctgcagagttaacattttctgtgcagaaaatacagcttca

SEQ ID NO: 27717 - DNA, 600 bp, Chicken  19866894245058_1
acgcctgggcacatatttaatgtattgtaatagtattttacattatgtatacaatacataaaatattgatatttttatttatgataatatgaatgtgtatattgaaacaagatttaccatctcctacatcacagatgaaaatttaactgacaggtgtattctcagcggtgtagaatgattgtaacccagcattttgacttcagagaatgatggctaagtacccagcaactaccactgtattggtcattgtatttgttcctctcagaggaatttaaaatgtgccacagaattgtgaatagygtggtatttcttccaaatgtgtaaagcttttattaatatctagcatttcagatgctacagcagaaaatgttgtaactgagctccttaaacaatctgtctaattatgaagaacgctgtgtaagtggaattttatacttttttggaagttaaggttaagggtaagcaggaaggaaaactgggtaatgaattttctgaggggaagaacagataagtggtacataaatgtaacttcctcagacacagactttgtgtcagactacctgaccttacgctaaaattaagcaaaattttggctattac

SEQ ID NO: 27718 - DNA, 599 bp, Chicken  19866894245059_1
  misc_feature (1)..(127): n is any nucleotide
nnnnnnnnnnnnnnnnnnnnnnnnnnnnnnnnnnnnnnnnnnnnnnnnnnnnnnnnnnnnnnnnnnnnnnnnnnnnnnnnnnnnnnnnnnnnnnnnnnnnnnnnnnnnnnnnnnnnnnnnnnnnnnnttgtgtaataaccacatcataagaaagcagctgaatgaacaaaatagcagttctgtaaattcatatgcacacagtctacaaatgtgcttggagagaattaaaaacaaaaaggtatctggcaatttagagatcaaaattattttaggagaacacaggtatttgttttcacaaarctttcatgagatatttgataaatccttcatatgatttgagatctggactatgcaactgtgtgcattgttacagtacaacatagtagggaaatatgatgccagaggaagtaaaatatttgtcaaaaaccgagaaataaagtcaagaacaataagagaaaattctggtccttgygagtccctttttctgaaggtagagtcatccaagatcctctttcatatgcatcaactccacacacaggatcaatggtgctcccctgagctgacatttgtttatttatccttgagggcaacagcagcat

SEQ ID NO: 27719 - DNA, 600 bp, Chicken  19866894245059_2
agcagttctgtaaattcatatgcacacagtctacaaatgtgcttggagagaattaaaaacaaaaaggtatctggcaatttagagatcaaaattattttaggagaacacaggtatttgttttcacaaarctttcatgagatatttgataaatccttcatatgatttgagatctggactatgcaactgtgtgcattgttacagtacaacatagtagggaaatatgatgccagaggaagtaaaatatttgtcaaaaaccgagaaataaagtcaagaacaataagagaaaattctggtccttgygagtccctttttctgaaggtagagtcatccaagatcctctttcatatgcatcaactccacacacaggatcaatggtgctcccctgagctgacatttgtttatttatccttgagggcaacagcagcatggctgcgtgcactgctgcccagagatgtcatcccttcccaggatatgtacgtggctgtcaaatcattctggctattcccttaattgagtgggagacaaaggtgccagatagacaagccaactaaattattgaaaaataaggaaataaaattggaaaatgtacagtagatcaac

SEQ ID NO: 27720 - DNA, 599 bp, Chicken  19866894245062_1
  misc_feature (1)..(19): n is any nucleotide
nnnnnnnnnnnnnnnnnnncactcaaaactgtgtgttctctttagcagcatatccacctctacaagaaataacactgcttgtcctttactttctgcttcaatgacatgctgagcacagaggtgcagtccaacacagatcctggtacagtacatgcactttgactaaacaccagttgcatgagattcagtgaaatcacacagaatgaattttagagtacattagccttcaataaacgtccaaaaaggcaacctgggaggaacttctcagaatttccagttctgaacaccagttctcagaaykagtattctcttcctgagggaaagcagacagcctccccactcagcactgtgccacactgagattcatttcatcctatggaactttttatgtaccagagaaaagtatatacaaacctctgacaaaataagtgattaaaagagataaaagtcctagtttgaatacatctgtaagtggttatagaaaataagaaaaaacaacacactcacagttataaacccagtgttttctttccaggtctgccaatgatgcagaatgcagacaatcctgacaggctatctatagctgattacaatgagaa

SEQ ID NO: 27721 - DNA, 599 bp, Chicken  19866894245062_2
  misc_feature (1)..(18): n is any nucleotide
nnnnnnnnnnnnnnnnnncactcaaaactgtgtgttctctttagcagcatatccacctctacaagaaataacactgcttgtcctttactttctgcttcaatgacatgctgagcacagaggtgcagtccaacacagatcctggtacagtacatgcactttgactaaacaccagttgcatgagattcagtgaaatcacacagaatgaattttagagtacattagccttcaataaacgtccaaaaaggcaacctgggaggaacttctcagaatttccagttctgaacaccagttctcagaaykagtattctcttcctgagggaaagcagacagcctccccactcagcactgtgccacactgagattcatttcatcctatggaactttttatgtaccagagaaaagtatatacaaacctctgacaaaataagtgattaaaagagataaaagtcctagtttgaatacatctgtaagtggttatagaaaataagaaaaaacaacacactcacagttataaacccagtgttttctttccaggtctgccaatgatgcagaatgcagacaatcctgacaggctatctatagctgattacaatgagaac

SEQ ID NO: 27722 - DNA, 599 bp, Chicken  19866894245068_1
  misc_feature (1)..(83): n is any nucleotide
nnnnnnnnnnnnnnnnnnnnnnnnnnnnnnnnnnnnnnnnnnnnnnnnnnnnnnnnnnnnnnnnnnnnnnnnnnnnnnnnnnntagaaagtactgctgtttatgaaaatgcctttctggatcagccccacacttaaatgagacactgagattttttggaagggtctcccactggagtttgccttaaacctgggaatgtctgcattgtgccacctgttttgccctctgtcagtgagtgcatctgaagatggctctctctttggcattaggttggatttgctttggttgttctacaaaggtrctccatctggtacagtttgagccatttaktttagctcagcactgctctgagcactgtaaaaataggagacttggatgggaaatatcagtagcatactgaatgtttctgtgggctcgatttgacaagtccaagcaccaatactcagttatttctcytcacattttattggtagtgctttagcagatggatttttgtaatatccaatgtgtaagtgtgtgaaagtgctagcaattctcaatawaatagaagggaaatgattcttcaataaaacaaaataaattttcacatcagaacaaaca

SEQ ID NO: 27723 - DNA, 599 bp, Chicken  19866894245068_2
  misc_feature (1)..(54): n is any nucleotide
nnnnnnnnnnnnnnnnnnnnnnnnnnnnnnnnnnnnnnnnnnnnnnnnnnnnnntagaaagtactgctgtttatgaaaatgcctttctggatcagccccacacttaaatgagacactgagattttttggaagggtctcccactggagtttgccttaaacctgggaatgtctgcattgtgccacctgttttgccctctgtcagtgagtgcatctgaagatggctctctctttggcattaggttggatttgctttggttgttctacaaaggtrctccatctggtacagtttgagccatttaktttagctcagcactgctctgagcactgtaaaaataggagacttggatgggaaatatcagtagcatactgaatgtttctgtgggctcgatttgacaagtccaagcaccaatactcagttatttctcytcacattttattggtagtgctttagcagatggatttttgtaatatccaatgtgtaagtgtgtgaaagtgctagcaattctcaatawaatagaagggaaatgattcttcaataaaacaaaataaattttcacatcagaacaaacagaagtgataaacagagttatcaggatctg

SEQ ID NO: 27724 - DNA, 600 bp, Chicken  19866894245068_3
tggaagggtctcccactggagtttgccttaaacctgggaatgtctgcattgtgccacctgttttgccctctgtcagtgagtgcatctgaagatggctctctctttggcattaggttggatttgctttggttgttctacaaaggtrctccatctggtacagtttgagccatttaktttagctcagcactgctctgagcactgtaaaaataggagacttggatgggaaatatcagtagcatactgaatgtttctgtgggctcgatttgacaagtccaagcaccaatactcagttatttctcytcacattttattggtagtgctttagcagatggatttttgtaatatccaatgtgtaagtgtgtgaaagtgctagcaattctcaatawaatagaagggaaatgattcttcaataaaacaaaataaattttcacatcagaacaaacagaagtgataaacagagttatcaggatctgatatgacgggaaaaatcataattcttcaggattaatgagaaatggttttgagagggatgttcctattagcacttatttcatctatctgctcaccttgttttgtgtggttccattcttttcagtttga

SEQ ID NO: 27725 - DNA, 600 bp, Chicken  19866894245068_4
tgaagatggctctctctttggcattaggttggatttgctttggttgttctacaaaggtrctccatctggtacagtttgagccatttaktttagctcagcactgctctgagcactgtaaaaataggagacttggatgggaaatatcagtagcatactgaatgtttctgtgggctcgatttgacaagtccaagcaccaatactcagttatttctcytcacattttattggtagtgctttagcagatggatttttgtaatatccaatgtgtaagtgtgtgaaagtgctagcaattctcaatawaatagaagggaaatgattcttcaataaaacaaaataaattttcacatcagaacaaacagaagtgataaacagagttatcaggatctgatatgacgggaaaaatcataattcttcaggattaatgagaaatggttttgagagggatgttcctattagcacttatttcatctatctgctcaccttgttttgtgtggttccattcttttcagtttgatctgccttaagtgttgagggggtgggatgggaaaagtatttccagtggtggaattattgtaaccaataatacgagcagtgtatgat

SEQ ID NO: 27726 - DNA, 600 bp, Chicken  19866894245070_1
ttgcagagcatggcacagtatgctatgggatatccctttggtcagctgaggtcagttgtcctggttttgtccccttgcagtttcttgtgcatcccagcctcctcactggctgggcagcttgagaaacataaaagaccttgatttagtgtcagtaattctcagtaatagttaaaacaaacatgtattatcagtgttctttttctcacaaatccaaaacataacacaatatgaactgttatgaagaaaattaactatttcaaccaaaaccagtacgtcaccatattagcagagacaataaakrcaatccccttaaaacaggctagatgattttcaacttgaattaagcaatgatatagacatataaagtacaaaactcagtgattcagacaatgtcttctcatsttatgcacatatagttatacacataattgtcctataaatttatcattgaatgccagagtttgcagagataataaatagctcctggatagttcatttaataggaggtcgtaatttaatgaatagattgacaaaattgtccttgcttgtgtatgtagaaatttcctctcattacagttttaaaacatttttcaagctact

SEQ ID NO: 27727 - DNA, 600 bp, Chicken  19866894245070_2
tgcagagcatggcacagtatgctatgggatatccctttggtcagctgaggtcagttgtcctggttttgtccccttgcagtttcttgtgcatcccagcctcctcactggctgggcagcttgagaaacataaaagaccttgatttagtgtcagtaattctcagtaatagttaaaacaaacatgtattatcagtgttctttttctcacaaatccaaaacataacacaatatgaactgttatgaagaaaattaactatttcaaccaaaaccagtacgtcaccatattagcagagacaataaakrcaatccccttaaaacaggctagatgattttcaacttgaattaagcaatgatatagacatataaagtacaaaactcagtgattcagacaatgtcttctcatsttatgcacatatagttatacacataattgtcctataaatttatcattgaatgccagagtttgcagagataataaatagctcctggatagttcatttaataggaggtcgtaatttaatgaatagattgacaaaattgtccttgcttgtgtatgtagaaatttcctctcattacagttttaaaacatttttcaagctactt

SEQ ID NO: 27728 - DNA, 600 bp, Chicken  19866894245070_3
tcactggctgggcagcttgagaaacataaaagaccttgatttagtgtcagtaattctcagtaatagttaaaacaaacatgtattatcagtgttctttttctcacaaatccaaaacataacacaatatgaactgttatgaagaaaattaactatttcaaccaaaaccagtacgtcaccatattagcagagacaataaakrcaatccccttaaaacaggctagatgattttcaacttgaattaagcaatgatatagacatataaagtacaaaactcagtgattcagacaatgtcttctcatsttatgcacatatagttatacacataattgtcctataaatttatcattgaatgccagagtttgcagagataataaatagctcctggatagttcatttaataggaggtcgtaatttaatgaatagattgacaaaattgtccttgcttgtgtatgtagaaatttcctctcattacagttttaaaacatttttcaagctacttccacagagagtaaataaaactttattataattcctattttcagctccacatttctatgaaaaaaaaaaggaaaaggcaattctactgtattcactgtgatt

SEQ ID NO: 27729 - DNA, 539 bp, Chicken  19866894245073_1
gaacagttcaactcgtgccatctgttcccccaaacacacacggtgccctgcagggaaaagggaaagaagttagcagtgtgcagctaagttacatgaaaaacaaacagaacaagacaaaatctgtggcttttacagtgaaatatgtgacttcaaatcttggtgccaaatatatttttatcaaaacgtctgttaatgttttagaatttagaacgtttgttgtgctgcaagacaaaacaagagagatgctgcaatgttggggcattacctgctgagaagggtaagaatgcctctttgttcacraagttgccatccacatcgaggaaatggtttgggtcgaacttgcagggggttgcccagtggtcactgtcatacaccacagagtgcagatttggcagcacaagcgtgccctgcaacaaacagagatgatattttctatgtatttgttcttctctggctcctctctctattagacgctatgccatcctgtgtctacagccgggtgctggactcagcttgcccttctcctgcgtgcatctagg

SEQ ID NO: 27730 - DNA, 600 bp, Chicken  19866894245074_1
gctccaaaaatggagtgttaattctgtctcaccttttgtatctccccaacctgttacatagcactcctctcttcctcctaacacagcattttcttttggcaagcaaacagggattacctgatcagtgatgactgctgggctgaaagaaacaaacaaaagacacacacacaaggtcagtcattagaccatttatctgtgataccaccttaatatttctaagaggattttatacagtcagcctttttttccttgaaattctgagcttttaaggctttttcttctttttttgctttttttttrttctgaaattcaaaaccacttatattttaggctctaatctcacagaacacgatacacaaaaggaaaacatctgaaatggagaatggttcaaaaggaaaaaatattgaaatactaaagtaaatccaaaagaaagtgttcacgtatggttaaagcatagacaccaaagcctaccttactctgcctacacccagtctcactatttataggtcacttttaaactggatactcttagcataaagcagagcccgagttattctgacttacttctgcatgctgattcttagataggttcaattaaga

SEQ ID NO: 27731 - DNA, 600 bp, Chicken  19866894245075_1
ggagttctgaactaatgcagcacagacactgacaagtccacagggaaatgtggactactaagaatcaacaggggtgcatatgcatatgaatttggctgtaaaatgcttagttgaattatctatcttcttctgttgcacctgggacattaaggatgtctaatgaaaataaattggacaacgaaaagcaaatatgaaaatattaatctgttgaatgtagcttctgagtggcccgagatactattgaaggctttattagatatggagatggggatatgtgttgcttcagcttgctactattarcaaacttgaatgtaccgtaatgtttttttacatgtgctcagtgagagagcattattgttgtcagtagacatttaggtgtacaccagcctgtccttccatctgtttgcttcagaatacttggcatttatttttcaatgtagttaaagtagttatggctttgcaattgaaacctatgatagcagtaacagtttttcgcattccagttagcttccaaactagaagtttgccttttatttataactcctaatgccttgctgcatgtatgtgcatgaggtgggagaattaagtgtgtaggatatg

SEQ ID NO: 27732 - DNA, 600 bp, Chicken  19866894245077_1
aagtagctttgaattttctgagtctttttaatccacatagtctaaaatcaatttgacaaacactttttgccatttagaaactgcattttcagaaagatatataaaaacaaaaaataacccacacacaagctggctgttttccctcagtcactttttgattaaaatgtttcttcagttataacacaacatatgcaaccagttgcatcacagcatatgaaatgaatgtatttatagaaaagtatgttccttacgcaatcccaataatttcagtgcatatgtacagacatattttctaagtgygcagttcaatgaaaaatatttggtcttatttgatttccaaatgttaatagatgtttaatggtcattgttctttgtttcagccgggttgttttgatttctgggtgatgttttattgatttatttttcatatatcagatgtttctattgctagccccaggcattttcagaataaaaacttcttatggtttaattgtgtattattaagacttatccttccattaaaacaatcaaatcataactgtaccagtcctggtatttctgacagctttgatgctgcttttaaatatatctgctactaca

SEQ ID NO: 27733 - DNA, 600 bp, Chicken  19866894245077_2
ctaaaaaaagtgtctgatattctagtatttcagtaagtctttcatcttagccagtctttgggttatctcagcaaatacagctactactacatcaagacaaactgtcagctttaaatggctgtccatctacagtcaaaggcacacactgcctaaggcctctgaaactaatgagtggaatcattgcgttttgcaaactctgttctaagcttgcaggaaatggtatgccgtaactactactgcggctttggactaaaagtgcaattgcacactttcagtctaaatgtcaactgatgagaaaaygcagagagagacactaagactttcaagaagatgctacatgctcttacacaggtgtgtgtgtgtgtgccctgtcctgtgatcccagctgaaagtgaaaatccatttgagccaataaattgcaggctccaaacctcactgagcctccactatgaccataaataggatcccaatgaagcctgaatgcgcagtgtgggttagctggcttaccttttgacacctgtaaaagtgtaatgcttccttctacaaaaaatgcttttttcaaagctattgccctaggaaatgctgtcttgagctccataa

SEQ ID NO: 27734 - DNA, 600 bp, Chicken  19866894245078_1
taagagataatatgacacactgtcaagcacaaatacatccttcttttcttcacctatggccttttatttaagaaaattttatgcactaatcatcgtaccgaatctatgatgattccatcaaactcattgtaatagagtgctatagtatttttgtgttcagaaaaacaaagagacaaattaatggaaggaagaaatatctaggttgctctgaaagtaatgcctcctatttatttctatggaaagtacaaaagagataaagagtacaatgacactatttgatagagcaaactctcagctacrctatttttcaacatagtcagcacaattagctatgcatttttaccaacgatgaacaagagcctgcatgctgcgctcgtaaaaatctgcaccagttgaggtgacccataatttcacaactgctatgatggctttgttgctgaaatgaaccactcaccacctcactgtgctcacatccactgcttggtcaccgtaaacattcagcaaattttgatgaatgtcaatgggtgccattttatccacatgcaggaattcagttccatgcctttgattcatatgcgcttccttgttagacaccattct

SEQ ID NO: 27735 - DNA, 599 bp, Chicken  19866894245082_1
  misc_feature (1)..(115): n is any nucleotide
nnnnnnnnnnnnnnnnnnnnnnnnnnnnnnnnnnnnnnnnnnnnnnnnnnnnnnnnnnnnnnnnnnnnnnnnnnnnnnnnnnnnnnnnnnnnnnnnnnnnnnnnnnnnnnnnnnnatcaaaccagtagttgtactagtgcatttgtatggctattttcttaactgtcccaaactaatcttatctgtttttcaacataatcaccaataattaactgttttcttgtagaggtaactcacggagagaaaaatggaggaaaacaatttttgcacccatctcccagacagcaaggacagtacagygtaatgacctgcagtatttatgtaagattatgtggttgtggcagtaaaataaatgctggtttcattgtagaaaagaagggggaaaagaaaaagaaagatgagttcaaggaaggagcttggtcttcctttgcaatcaaaactggcactccccctctcactccaactcatcctcatcccaaggctcttttcttctgccaccataaggccagaacaccagctgcaagctcatccaaacctactccaaaagtatctcagttccaaaggcattttcttgttgagagcttactccttcatctttc

SEQ ID NO: 27736 - DNA, 599 bp, Chicken  19866894245089_1
  misc_feature (1)..(76): n is any nucleotide
nnnnnnnnnnnnnnnnnnnnnnnnnnnnnnnnnnnnnnnnnnnnnnnnnnnnnnnnnnnnnnnnnnnnnnnnnnnnctattttaacagtgagattaagtatctttcaaaaaccaagcataaaaaagcatgaagaaataattttggattgtcaggatctgatttgataattcttttacatttctaatacttgccattctgagacatattcctggataggccatatttctgagatgctggcaggttctgtcaacatctaagtttttattattacggacatttttacaatgaattcgattgcrgatagggattgctctttcggagaggagattcctgtggaatacattataatgcttgcctgtagtcccctcaaatacgctggctgtgcactgtagaccaaataattgacagaacaattgtttcagccctctgtgtcttgtcctctttttttcacactgtggcaygcagctgaagttcaatacagtgtatgcaaagtctgctattgattttaatgtgctgtgaatccatggtgcatgtgccagatggactcaaagcaaagcatgcttggcctgaatgagccaataatgttctgctrcagtgt

SEQ ID NO: 27737 - DNA, 600 bp, Chicken  19866894245089_2
tgataattcttttacatttctaatacttgccattctgagacatattcctggataggccatatttctgagatgctggcaggttctgtcaacatctaagtttttattattacggacatttttacaatgaattcgattgcrgatagggattgctctttcggagaggagattcctgtggaatacattataatgcttgcctgtagtcccctcaaatacgctggctgtgcactgtagaccaaataattgacagaacaattgtttcagccctctgtgtcttgtcctctttttttcacactgtggcaygcagctgaagttcaatacagtgtatgcaaagtctgctattgattttaatgtgctgtgaatccatggtgcatgtgccagatggactcaaagcaaagcatgcttggcctgaatgagccaataatgttctgctrcagtgttgtgtcttacacatgaatcttgaaaaagagatggataagtattgcaaaaaagtaccacaataagaagctcaggtctttggctttcatttaattttctccttttaagcagaggaatgcagtaaacatcaatgctgaggtagaaacaggatcagaaaaagatacg

SEQ ID NO: 27738 - DNA, 600 bp, Chicken  19866894245089_3
gattgcrgatagggattgctctttcggagaggagattcctgtggaatacattataatgcttgcctgtagtcccctcaaatacgctggctgtgcactgtagaccaaataattgacagaacaattgtttcagccctctgtgtcttgtcctctttttttcacactgtggcaygcagctgaagttcaatacagtgtatgcaaagtctgctattgattttaatgtgctgtgaatccatggtgcatgtgccagatggactcaaagcaaagcatgcttggcctgaatgagccaataatgttctgctrcagtgttgtgtcttacacatgaatcttgaaaaagagatggataagtattgcaaaaaagtaccacaataagaagctcaggtctttggctttcatttaattttctccttttaagcagaggaatgcagtaaacatcaatgctgaggtagaaacaggatcagaaaaagatacgcattcttttttcacttgaaagtaaggaggaagaggatgtcaattaacaatattggcttttgaatgcctacatgtagtgaacagccagtttcaatcatgttatcagaaaatagatgacttccttataaaact

SEQ ID NO: 27739 - DNA, 600 bp, Chicken  19866894245092_1
acgcatcttacacaaaagtaaagaagttacaagcattaaacatgcaactatgcaaaagctctgtggtcaagatcctgaaatggttcattgctaagtctcccttgacatactcagagtggcctggtgaacttccagctgtaccagagatttcttttatgaccacaatcaaaaaagcctgttcccactgccattctctaaagagagggaacacttcctttcttcgcctaccacagtcattgtctcatgtcatgttgaacaaagcatggctctgattcagcctcacctacagatgcccaccartttaacaatctcatttatgtgcatgctcaccctcagccagttctataatcaataaagaaaattactttgagagtgtaaaccctctaagacgggaatcaccttctgctaagtgcctgcttcacttactagagaggacacttgcagtaattctgcaccatacgtagaagtttggctcagggatttcacatctacatatttagctcaacatggccttgaactgtagggcctttaggtgttactgtacgacatgcaataaactacagtaatgcatgcatttgtgatgcacatacatagtgcttt

SEQ ID NO: 27740 - DNA, 600 bp, Chicken  19866894245096_1
gaaaacttctgagacacctcagtgtctctttccaggagaaatgtggatgctgttgatttgattcaaaatccatcaagatcttgtcaaatttctcttttaaaaaatcagcgagaggcagcaaatgacattactgctcatagtgattgatgctgaaatgacttagttttcagagctcaaaagttccaggcgcatcctgtccctgttttgtagcctggtggtttctctactggcttcaactgagtgccaggtgatagcactctaggactgtcatgtcattgagcagccaaacacttacggacrtgctgtggaaacgctttcccctaggtgcctattttactttcacttttttcactctaaagccagctgaggtcactttgattattcaaagctgagtctgttcactggcaaaagatagccaaatagactacttcacttgaaatcagagtgattgtgttaggtctgttgctctccatgggggctcagagtcccaagacacactcaagtttgttgactgagcttcaaagcatttccccttagcatacctttttctgtttctttttttttctttttgcttgcttaattgcttcctgtgtttctgct

SEQ ID NO: 27741 - DNA, 600 bp, Chicken  19866894245102_1
tctggaaggctttggccttgccacaacctgatatgtaaccatgcccaggccaccttgcttttaactccctcaccttgcttcactgaaatcagggcacagggtactggtggctggtactcaggcttgtacagaatttggtgacatttcaagtgacgggggtcccagcaggctccccgtgaaagacctttctatcaggacagtacctgtgctcccatagacctgcactctcacggcaaaggcatgacagacatgtttgctccagctctgctagtcctccacatctgtgtgagtgaagcaagkcttgaggctgcaggctgtgaacaagtttctctcatcgatgctaaattcgccctaaagcagcagcatgtgtttttttctcacctcctccctctcctgaagttcctttcaggtaacaggccatacccagagattcttcaagatgttaaacacaggaaatcttaggttagagaaagctgctgttgttaggacaacacatatcacaaatgcttccattgctgtgctctccctgactggtcccaaccactctccttctgcttcatggcctctttcccacatgacaggttgcaaatgaggtcaaat

SEQ ID NO: 27742 - DNA, 599 bp, Chicken  19866894245107_1
  misc_feature (1)..(168): n is any nucleotide
nnnnnnnnnnnnnnnnnnnnnnnnnnnnnnnnnnnnnnnnnnnnnnnnnnnnnnnnnnnnnnnnnnnnnnnnnnnnnnnnnnnnnnnnnnnnnnnnnnnnnnnnnnnnnnnnnnnnnnnnnnnnnnnnnnnnnnnnnnnnnnnnnnnnnnnnnnnnnnnnnnnnnnnncgctggcagctgcttctcgcctttgcaccagctcttggcagttccctcctcctgcagggtgttagttacacgtatcactctccacacgctccctcatgctggaagaacgcagccaaaaacacagcagagaawgctgtatcttagggtcttgtgcatccaatagctacaggatcgtctgtgactccctttttggctgttgaatcaagaaattcagaaaacactgatctatccttgcaatttccattttacttttggtaagctacttgtataatgctttcactgcactgtacatcagccatacatggaaaacaatttcttccaattctgcacagaratttgtaatagaaatgtaaaggttgctatgaatagagagtgcaggggtggggaagcaccagaaggagcaagaagagaaaggagaatgggcagaaggt

SEQ ID NO: 27743 - DNA, 600 bp, Chicken  19866894245107_2
ttggcagttccctcctcctgcagggtgttagttacacgtatcactctccacacgctccctcatgctggaagaacgcagccaaaaacacagcagagaawgctgtatcttagggtcttgtgcatccaatagctacaggatcgtctgtgactccctttttggctgttgaatcaagaaattcagaaaacactgatctatccttgcaatttccattttacttttggtaagctacttgtataatgctttcactgcactgtacatcagccatacatggaaaacaatttcttccaattctgcacagaratttgtaatagaaatgtaaaggttgctatgaatagagagtgcaggggtggggaagcaccagaaggagcaagaagagaaaggagaatgggcagaaggtttttgtcagacttaactgccatgaagatcccagcaaatctactcatggtttcttagtaacatcctgtaagtaggaaaacaacaaataatctaaaacaaactgaaaccatttagggaagatgacaagaaggttaagaacagatgtgaagccctcagttgcacatgtatatagagaaaagatggcaagcaagtccacagtgctac

SEQ ID NO: 27744 - DNA, 599 bp, Chicken  19866894245112_1
  misc_feature (1)..(55): n is any nucleotide
nnnnnnnnnnnnnnnnnnnnnnnnnnnnnnnnnnnnnnnnnnnnnnnnnnnnnnncctcgcctcgccttgcctacctcgcctcgcctctccacgcctcgcatcgcctcgccccgccccaccttgccctgccttgcctcgcctcgccttgccctgccacgcctagcctcgcctagcctcgcctcgaccagccccgccttgccccacctcgtttcatctcgcctcgcctcgcctttgaatcacctcgcctcgcctcgccacgccttgccttgccttgcctcgctttgccttgcctcgcctcrccctgccctgcccggcctcgcctggcctttgcattgcccctcctcgtcctgcctcgccttgcctcgcctcgaaccgccccgacttgactggctccgcctcgcccagccttgccttgccttgccttgccacgcctttgcatcgccttgcctcgccttgcctttgaatcacctcgctccgccttgccacggctcaccctgcctcgccatgcctcgccgagcctcgcctttgcatcgccccgcctcgtcgcacctygcctcgcccatcctcgcctcacctcgccttgcatcgcctcgcctcg

SEQ ID NO: 27745 - DNA, 600 bp, Chicken  19866894245112_2
cgccacgccttgccttgccttgcctcgctttgccttgcctcgcctcrccctgccctgcccggcctcgcctggcctttgcattgcccctcctcgtcctgcctcgccttgcctcgcctcgaaccgccccgacttgactggctccgcctcgcccagccttgccttgccttgccttgccacgcctttgcatcgccttgcctcgccttgcctttgaatcacctcgctccgccttgccacggctcaccctgcctcgccatgcctcgccgagcctcgcctttgcatcgccccgcctcgtcgcacctygcctcgcccatcctcgcctcacctcgccttgcatcgcctcgcctcgcctcgccccgccccgcctcgccttgcctcaccttgcatcgcctcgcctcgcctcgcctcgccttgccttgcatcgccccggctcgccctgccttgactagccacatctagcctcgcctcgcctcgcctcgacctgctctgtcttgccctgccccgccttgttttacctcacctcgcctcgccccgcctttgaatagtcttgcctcgtctcgccacgccttgccttgccttgcctcgcctcgccttgcgtcgccc

SEQ ID NO: 27746 - DNA, 600 bp, Chicken  19866894245115_1
gcttttttagcatactgtttctttgcctcgatctctgcaagatgttatacattcaattctgttggagcaagagttaaaaattaattcatgaataataaaaaccaatcagtcttgttgagtttaagaaggattagaagaagggtttttgtacagaagcagttatatatcttggtgctgatattgttggactaatagatattgtactagctcctgttggttatctgataaaggtagctgatttgcaaataggattgttatcccgatgaataacgagtctaatattggatggattaaaagagrctgggtggttggtgtctattataagttctcgactccctctcaggagataatttattatttatttgattcagaaatctgtagattgaaaagggaccaggtaaataccatatgtgaatggtttgtgatgctttcctatggctggcattttcaaggaaggcaccaaattgcacggagcttcagcttgcctctggtggttagctgaccgtagcacagtattcagtacagacatcaggctgttcgatgctgaaagcaggtagctggcacaaagtgggcacaggaaaactcattattcccttgaga

SEQ ID NO: 27747 - DNA, 599 bp, Chicken  19866894245116_1
  misc_feature (1)..(188): n is any nucleotide
nnnnnnnnnnnnnnnnnnnnnnnnnnnnnnnnnnnnnnnnnnnnnnnnnnnnnnnnnnnnnnnnnnnnnnnnnnnnnnnnnnnnnnnnnnnnnnnnnnnnnnnnnnnnnnnnnnnnnnnnnnnnnnnnnnnnnnnnnnnnnnnnnnnnnnnnnnnnnnnnnnnnnnnnnnnnnnnnnnnnnnnnnnnngctctggcagcaagcagccagctgccgacaagcgcagacaagaccaaagcaggctgctacagacaggactcgaagcctgcagctacttgaattcacagccccagtgccagcraagygagaagccgcaaggctcaggtactggcgaggcagaagtcactgcaggcagccaactgctggcccagggagacctcaaatcgcagagacttgatgggaatgaacgccgggacaaaaagccagcaaaaaagagattcctgcagaggtgatacatgattcctacttaacatttaggctggatgttaggagaaataccttctctgaaggagcagggatgcagtggcacagccgcccagggaggtggtggagtcactgcccctggaggtgtgaagaagtggcacggagggacgtgcttca

SEQ ID NO: 27748 - DNA, 599 bp, Chicken  19866894245116_2
  misc_feature (1)..(184): n is any nucleotide
nnnnnnnnnnnnnnnnnnnnnnnnnnnnnnnnnnnnnnnnnnnnnnnnnnnnnnnnnnnnnnnnnnnnnnnnnnnnnnnnnnnnnnnnnnnnnnnnnnnnnnnnnnnnnnnnnnnnnnnnnnnnnnnnnnnnnnnnnnnnnnnnnnnnnnnnnnnnnnnnnnnnnnnnnnnnnnnnnnnnnnnngctctggcagcaagcagccagctgccgacaagcgcagacaagaccaaagcaggctgctacagacaggactcgaagcctgcagctacttgaattcacagccccagtgccagcraagygagaagccgcaaggctcaggtactggcgaggcagaagtcactgcaggcagccaactgctggcccagggagacctcaaatcgcagagacttgatgggaatgaacgccgggacaaaaagccagcaaaaaagagattcctgcagaggtgatacatgattcctacttaacatttaggctggatgttaggagaaataccttctctgaaggagcagggatgcagtggcacagccgcccagggaggtggtggagtcactgcccctggaggtgtgaagaagtggcacggagggacgtgcttcagtgg

SEQ ID NO: 27749 - DNA, 600 bp, Chicken  19866894245124_1
ccaagatttatttaccatttctttctgcttatggacagcacgaatctgtaatataaaggagattaacaaaatacaacacaatcctctttccatgagctttcctgaattctttgcttgtgctgttaagatagtgcaactatgtccacttcatgtcaccactcacttgaatttgaatgacaatgctgtagtgatatatttgtcctttaaaaacttcaagtatgcacccccttaaaaaacaacaacaacaacaacaaagcttaccttctctgttgcaagataatttccccctttgttttctarcacagatgttggaagagccccaggtctttcatgactatttttgaatatgctcactctcaagtgatgaataactgagatagcatcaattctggtgacagaagtgcatgcatgagaatgcaccacattccctccaaaacactagcatgagattgtagacatcggctccaactggtcttacttctcagaaggcaggagaggatgaaacagtagaagagcgacaatgcctaatgcttgtcttacaaccaaagccggacaatggtttatacctgcttgctttcaggatgctaggaagagcaaagc

SEQ ID NO: 27750 - DNA, 600 bp, Chicken  19866894245125_1
tgcacaagtatcagtgctgatctatgaggaacttacaggagagggaagcatggtctcaaacctgcccatgctgctccagcaggggtggccagggcctggctgagcattcagtgccaaatctaaccagccttgtggccaggctctatggacatcttcctgcaaggcaataggaatattctgtatatagcaatagtctgtggtgaaaaatccgctgatcagagggcagaaaaaaggctaaactccccaaagggctttatttgcaccttcctgctgagcaggcagtgggtttaggctcctcamcttcttcagttgtgtttttctactagactagatgctagcagaacagctcagaccagctgaaaataggaactggtgcatttcatctgtggatagtgagaaatagaaatgaaaattaagctcraactggtcagtcagtcttcccatctattcccatgttgtgttatttcaccctcagaaatcttacaatgccaagtgtcaaggaatgttgygtttgagaaaagaaccaattccttatgatacaaaacaaactgatgagcaaatgagaaaagcatatggtaggcaaaacctgtttgaaccact

SEQ ID NO: 27751 - DNA, 600 bp, Chicken  19866894245125_2
aaccagccttgtggccaggctctatggacatcttcctgcaaggcaataggaatattctgtatatagcaatagtctgtggtgaaaaatccgctgatcagagggcagaaaaaaggctaaactccccaaagggctttatttgcaccttcctgctgagcaggcagtgggtttaggctcctcamcttcttcagttgtgtttttctactagactagatgctagcagaacagctcagaccagctgaaaataggaactggtgcatttcatctgtggatagtgagaaatagaaatgaaaattaagctcraactggtcagtcagtcttcccatctattcccatgttgtgttatttcaccctcagaaatcttacaatgccaagtgtcaaggaatgttgygtttgagaaaagaaccaattccttatgatacaaaacaaactgatgagcaaatgagaaaagcatatggtaggcaaaacctgtttgaaccactgggtcttcccatctgacaaattttgtgtaacattattgttgtttacactttgtaacatcactaaggggagtgctctgaacagagactcgaatgtttactatcatagcaaaggaacaaacaa

SEQ ID NO: 27752 - DNA, 600 bp, Chicken  19866894245125_3
cgctgatcagagggcagaaaaaaggctaaactccccaaagggctttatttgcaccttcctgctgagcaggcagtgggtttaggctcctcamcttcttcagttgtgtttttctactagactagatgctagcagaacagctcagaccagctgaaaataggaactggtgcatttcatctgtggatagtgagaaatagaaatgaaaattaagctcraactggtcagtcagtcttcccatctattcccatgttgtgttatttcaccctcagaaatcttacaatgccaagtgtcaaggaatgttgygtttgagaaaagaaccaattccttatgatacaaaacaaactgatgagcaaatgagaaaagcatatggtaggcaaaacctgtttgaaccactgggtcttcccatctgacaaattttgtgtaacattattgttgtttacactttgtaacatcactaaggggagtgctctgaacagagactcgaatgtttactatcatagcaaaggaacaaacaaagaaaatggagtgagatctgttttaaaaggaaaaagcctgtttaatacgaagacaactaagctattgtctaaacagtggttttaaact

SEQ ID NO: 27753 - DNA, 599 bp, Chicken  19866894245129_1
  misc_feature (1)..(130): n is any nucleotide
nnnnnnnnnnnnnnnnnnnnnnnnnnnnnnnnnnnnnnnnnnnnnnnnnnnnnnnnnnnnnnnnnnnnnnnnnnnnnnnnnnnnnnnnnnnnnnnnnnnnnnnnnnnnnnnnnnnnnnnnnnnnnnnnnnccctacattacctatgtatttataccctatgtaaactgcacatggaagagcaaggtgtgtaaaacatctcttcctttaatctaacactctgccagcttcccatgagctgtcagttcccaatagctggtaacagacgtggctccatgctcacatatgcccacaggaagcakrragtgaaaaagcagatggtgttagctgtgtccagagctgcctttcacccctagataggaagatctccttttagttgtctgcctgcaaagttgtaaaatttgatcaaactaaaacacccctcaggaacaaatgcaaagtacaaaaggatacaattgcaaagtgacatataaacagtgaacaaatggattcagatgtaaacaatttgataaagaagaggattcggagatctataaaaataaacagccccagaacaggctgcagacataattaaatcagtgaaatgaaatatcaaatgctg

SEQ ID NO: 27754 - DNA, 599 bp, Chicken  19866894245129_2
  misc_feature (1)..(129): n is any nucleotide
nnnnnnnnnnnnnnnnnnnnnnnnnnnnnnnnnnnnnnnnnnnnnnnnnnnnnnnnnnnnnnnnnnnnnnnnnnnnnnnnnnnnnnnnnnnnnnnnnnnnnnnnnnnnnnnnnnnnnnnnnnnnnnnnnccctacattacctatgtatttataccctatgtaaactgcacatggaagagcaaggtgtgtaaaacatctcttcctttaatctaacactctgccagcttcccatgagctgtcagttcccaatagctggtaacagacgtggctccatgctcacatatgcccacaggaagcakrragtgaaaaagcagatggtgttagctgtgtccagagctgcctttcacccctagataggaagatctccttttagttgtctgcctgcaaagttgtaaaatttgatcaaactaaaacacccctcaggaacaaatgcaaagtacaaaaggatacaattgcaaagtgacatataaacagtgaacaaatggattcagatgtaaacaatttgataaagaagaggattcggagatctataaaaataaacagccccagaacaggctgcagacataattaaatcagtgaaatgaaatatcaaatgctgg

SEQ ID NO: 27755 - DNA, 599 bp, Chicken  19866894245129_3
  misc_feature (1)..(128): n is any nucleotide
nnnnnnnnnnnnnnnnnnnnnnnnnnnnnnnnnnnnnnnnnnnnnnnnnnnnnnnnnnnnnnnnnnnnnnnnnnnnnnnnnnnnnnnnnnnnnnnnnnnnnnnnnnnnnnnnnnnnnnnnnnnnnnnnccctacattacctatgtatttataccctatgtaaactgcacatggaagagcaaggtgtgtaaaacatctcttcctttaatctaacactctgccagcttcccatgagctgtcagttcccaatagctggtaacagacgtggctccatgctcacatatgcccacaggaagcakrragtgaaaaagcagatggtgttagctgtgtccagagctgcctttcacccctagataggaagatctccttttagttgtctgcctgcaaagttgtaaaatttgatcaaactaaaacacccctcaggaacaaatgcaaagtacaaaaggatacaattgcaaagtgacatataaacagtgaacaaatggattcagatgtaaacaatttgataaagaagaggattcggagatctataaaaataaacagccccagaacaggctgcagacataattaaatcagtgaaatgaaatatcaaatgctggc

SEQ ID NO: 27756 - DNA, 600 bp, Chicken  19866894245130_1
tttggaaaaaaattaaaggcaagagtctttcctcagtactctttcctgactagcatgcagaatacctgctgagcagagatcaagcaggtctctgctgatttctgagcacaggttaaaacacactcagttgttaataatttgaggcttatactaagccttttaatgtcttcatcttgagagctctgcataacctactgttaagtggttttacacggaccttactggcagtggagtatatacatattcagcgcaacatacagtgcaatagcaaccacagagtcagaggggttaagcacatgygctcacctaatctccgtcccaaggaatattaagctgtactgtcatcattccagataactgcrtcttcctaaagacatctaatgatggcaattctactccccacttcctcccacgcaccagtagtctatccaagcactctgctaacctcattcttctcttctttgctgttattcaagtctctttacttcttgtcctaaatacaatggagatggaacagaccattctctttctcactgtgaaatcccttataatttccccaaagtctcttcatgtgaaatggaaacagttatttccatcagt

SEQ ID NO: 27757 - DNA, 600 bp, Chicken  19866894245130_2
tacctgctgagcagagatcaagcaggtctctgctgatttctgagcacaggttaaaacacactcagttgttaataatttgaggcttatactaagccttttaatgtcttcatcttgagagctctgcataacctactgttaagtggttttacacggaccttactggcagtggagtatatacatattcagcgcaacatacagtgcaatagcaaccacagagtcagaggggttaagcacatgygctcacctaatctccgtcccaaggaatattaagctgtactgtcatcattccagataactgcrtcttcctaaagacatctaatgatggcaattctactccccacttcctcccacgcaccagtagtctatccaagcactctgctaacctcattcttctcttctttgctgttattcaagtctctttacttcttgtcctaaatacaatggagatggaacagaccattctctttctcactgtgaaatcccttataatttccccaaagtctcttcatgtgaaatggaaacagttatttccatcagtagcaggctatttcctccaatggcaggttttctgcacttctcatcattctcactgccttcctc

SEQ ID NO: 27758 - DNA, 600 bp, Chicken  19866894245130_3
ctgctaacctcattcttctcttctttgctgttattcaagtctctttacttcttgtcctaaatacaatggagatggaacagaccattctctttctcactgtgaaatcccttataatttccccaaagtctcttcatgtgaaatggaaacagttatttccatcagtagcaggctatttcctccaatggcaggttttctgcacttctcatcattctcactgccttcctctttatgctttcaagttgacacaaaacttgcatgaaaaacatagcgcaagagtccacttacagccacttgaggccygagtcagrcataaggataacttatgttctgtagaacaattctatataaactgacactgggttatggttcagcaaatgttataaactgatcacgatcttttattccaatagaagcggagcagtcgttctaaaacagcagtaatacacacatatcaaagtcaatattctcacataagcaaactacacaatacaaattattctgtgaaaagcaatgatctgttcaggaatcaacagtactgccagacctttcagtgaggagatatataaccatgaaaaggaatcacagtagctaaccctctgt

SEQ ID NO: 27759 - DNA, 600 bp, Chicken  19866894245130_4
ctcattcttctcttctttgctgttattcaagtctctttacttcttgtcctaaatacaatggagatggaacagaccattctctttctcactgtgaaatcccttataatttccccaaagtctcttcatgtgaaatggaaacagttatttccatcagtagcaggctatttcctccaatggcaggttttctgcacttctcatcattctcactgccttcctctttatgctttcaagttgacacaaaacttgcatgaaaaacatagcgcaagagtccacttacagccacttgaggccygagtcagrcataaggataacttatgttctgtagaacaattctatataaactgacactgggttatggttcagcaaatgttataaactgatcacgatcttttattccaatagaagcggagcagtcgttctaaaacagcagtaatacacacatatcaaagtcaatattctcacataagcaaactacacaatacaaattattctgtgaaaagcaatgatctgttcaggaatcaacagtactgccagacctttcagtgaggagatatataaccatgaaaaggaatcacagtagctaaccctctgttatcctga

SEQ ID NO: 27760 - DNA, 600 bp, Chicken  19866894245133_1
tcatccctagtactgaatggcaagaatcccaccaactccatcagcataataccatgtgttaatattttcctgctgaggaaaatgctgaagttctaagtagctgtaagcatatgcatgaacctaaagctttatttgatgaaatgtatttaaattattttttgattaggagtgcttttctgaactgtaagtattaagttggtagaaatgtgtacagagaagcatatataaatggcacttgaacattccacagatggttcatgagatgtataaaccatagcataattaatggatataacctgwtaaattatttccttatgttgagtgagtgtgaaataccacccagcctagatgactggtgctgattttccagtagattgaacacagagtaaattcaactatgctagccttcctaggtcatgtacctagtacttttgtcaggtgactgatatagtgtcctcatacatgatgcatatgaccaattgcatgttcccttcacgttacagaatacgtccttatgatgcaactaaattgccaagtaccctctggcacttcctagagtttgtttttctcaaattatcatatttctcaaatatttttgtt

SEQ ID NO: 27761 - DNA, 600 bp, Chicken  19866894245134_1
catcaagtcatctatttgaacttcagctaggcttttgacgtggtcccacatcacatccttatctctaaattggacagacgtggatttgaagggtggactattcagtggaaaaggaattggttggatggtcatagccagagggttgtggtaaatggctctgcgtacaggtggaggctggtaatgagtgatgtatcccagaggtccatcttgggaccagtgctctgcaacatctttatcagtgacctataatcaagcatttccaaaatgggcagaatcccacctggtatggctaataatgtrgccccacatcatcacatgtaaacctttaacattattatatgatttttagcaatattttttcatgagtcgattgcaagtascttgattgcagactgagtacgagacagtggracactgtggagagcagggcacagtgcagtgataaccctscctcttgtgcccaccacacacagtcagtttgagacccacatgcattatatgtttactcatcacttggtgagtaaaatacagtgattgctgataataatatttcaaactaactacatgtgtgtgtgcctgttaagacatgcattttttctt

SEQ ID NO: 27762 - DNA, 600 bp, Chicken  19866894245134_2
tggatttgaagggtggactattcagtggaaaaggaattggttggatggtcatagccagagggttgtggtaaatggctctgcgtacaggtggaggctggtaatgagtgatgtatcccagaggtccatcttgggaccagtgctctgcaacatctttatcagtgacctataatcaagcatttccaaaatgggcagaatcccacctggtatggctaataatgtrgccccacatcatcacatgtaaacctttaacattattatatgatttttagcaatattttttcatgagtcgattgcaagtascttgattgcagactgagtacgagacagtggracactgtggagagcagggcacagtgcagtgataaccctscctcttgtgcccaccacacacagtcagtttgagacccacatgcattatatgtttactcatcacttggtgagtaaaatacagtgattgctgataataatatttcaaactaactacatgtgtgtgtgcctgttaagacatgcattttttcttactaagcggatgcgtaagtattcttattcaattattaaacttgagcttgtgttatttcatagcataataacttaacaggt

SEQ ID NO: 27763 - DNA, 600 bp, Chicken  19866894245134_3
aggaattggttggatggtcatagccagagggttgtggtaaatggctctgcgtacaggtggaggctggtaatgagtgatgtatcccagaggtccatcttgggaccagtgctctgcaacatctttatcagtgacctataatcaagcatttccaaaatgggcagaatcccacctggtatggctaataatgtrgccccacatcatcacatgtaaacctttaacattattatatgatttttagcaatattttttcatgagtcgattgcaagtascttgattgcagactgagtacgagacagtggracactgtggagagcagggcacagtgcagtgataaccctscctcttgtgcccaccacacacagtcagtttgagacccacatgcattatatgtttactcatcacttggtgagtaaaatacagtgattgctgataataatatttcaaactaactacatgtgtgtgtgcctgttaagacatgcattttttcttactaagcggatgcgtaagtattcttattcaattattaaacttgagcttgtgttatttcatagcataataacttaacaggttcaccatggaaaaaatatctaggatgctcat

SEQ ID NO: 27764 - DNA, 600 bp, Chicken  19866894245134_4
aatggctctgcgtacaggtggaggctggtaatgagtgatgtatcccagaggtccatcttgggaccagtgctctgcaacatctttatcagtgacctataatcaagcatttccaaaatgggcagaatcccacctggtatggctaataatgtrgccccacatcatcacatgtaaacctttaacattattatatgatttttagcaatattttttcatgagtcgattgcaagtascttgattgcagactgagtacgagacagtggracactgtggagagcagggcacagtgcagtgataaccctscctcttgtgcccaccacacacagtcagtttgagacccacatgcattatatgtttactcatcacttggtgagtaaaatacagtgattgctgataataatatttcaaactaactacatgtgtgtgtgcctgttaagacatgcattttttcttactaagcggatgcgtaagtattcttattcaattattaaacttgagcttgtgttatttcatagcataataacttaacaggttcaccatggaaaaaatatctaggatgctcatgcagtactgacagattttgggattttccaaaaagctcac

SEQ ID NO: 27765 - DNA, 599 bp, Chicken  19866894245139_1
  misc_feature (1)..(69): n is any nucleotide
nnnnnnnnnnnnnnnnnnnnnnnnnnnnnnnnnnnnnnnnnnnnnnnnnnnnnnnnnnnnnnnnnnnnnatagaaaagagtgcttactggttctgtacatgaagaaaatcttcaccttatttctgctgtaataaggcaagtttaacagaacgatcctttatttaattactgtaacagaaaattatgatgtacaatttagccttttccatctctgatttcataactgacaatcatatgtacaatgtacataaaaacttactgaaataagtagagggaaatatcatgttcaaggaatgtttsgatgttgtgttgagggacatggcttaatgagaaccartggtgatgggtgaatggttggactggatgatcctgtgggtctttcgcaaccttagtgattatatgactacgagagctgctctgatgttaatacctcctattttattatgttagcccatgaagtcagaggtggatgtcaatggtacagcagtagaggttgaaccttcccaccaatattccattacattttgtcaccatagaatcacagaatccttagagttggaagggactcttaaaggctgcttggtacaattccccagttt

SEQ ID NO: 27766 - DNA, 599 bp, Chicken  19866894245139_2
  misc_feature (1)..(32): n is any nucleotide
nnnnnnnnnnnnnnnnnnnnnnnnnnnnnnnnatagaaaagagtgcttactggttctgtacatgaagaaaatcttcaccttatttctgctgtaataaggcaagtttaacagaacgatcctttatttaattactgtaacagaaaattatgatgtacaatttagccttttccatctctgatttcataactgacaatcatatgtacaatgtacataaaaacttactgaaataagtagagggaaatatcatgttcaaggaatgtttsgatgttgtgttgagggacatggcttaatgagaaccartggtgatgggtgaatggttggactggatgatcctgtgggtctttcgcaaccttagtgattatatgactacgagagctgctctgatgttaatacctcctattttattatgttagcccatgaagtcagaggtggatgtcaatggtacagcagtagaggttgaaccttcccaccaatattccattacattttgtcaccatagaatcacagaatccttagagttggaagggactcttaaaggctgcttggtacaattccccagtttgaagaccatggaggattttgccagtcttgtctggact

SEQ ID NO: 27767 - DNA, 599 bp, Chicken  19866894245143_1
  misc_feature (1)..(20): n is any nucleotide
nnnnnnnnnnnnnnnnnnnntttcactgggctgcttaattcaggccttttatctttactcagcccctccatgtaattttacttgatctctttggaaaattccgtgcctgtcatcaaattcagctaatgctgctcaatggattcacaaagaaagcattggtaggagaataaatgacagacaacactcacaaatttctaagagcattacccaagagatgcatgaacatctcttgttggttgagaactagggacagctgttggctctgggcaaaacatagtacttaggattaccaacagatgsgacaattattaattgcaaggttttgctgacagtggttttgatttrcttcatttttttctatcagtattagaatgtagcactggagttacattacattgaggatggtttgtttgttttggtttgttaacttccttacwgagcagacaaaagagacgaagctgtttggttctatagacacaagtaagtgctcaattcagatttgttttctggggactggaaacatgcttctgtgaatcctaaatgtgattaaaatcacatctatctgatgggtatactccacttgcaatatcacctcaata

SEQ ID NO: 27768 - DNA, 600 bp, Chicken  19866894245143_2
cttttatctttactcagcccctccatgtaattttacttgatctctttggaaaattccgtgcctgtcatcaaattcagctaatgctgctcaatggattcacaaagaaagcattggtaggagaataaatgacagacaacactcacaaatttctaagagcattacccaagagatgcatgaacatctcttgttggttgagaactagggacagctgttggctctgggcaaaacatagtacttaggattaccaacagatgsgacaattattaattgcaaggttttgctgacagtggttttgatttrcttcatttttttctatcagtattagaatgtagcactggagttacattacattgaggatggtttgtttgttttggtttgttaacttccttacwgagcagacaaaagagacgaagctgtttggttctatagacacaagtaagtgctcaattcagatttgttttctggggactggaaacatgcttctgtgaatcctaaatgtgattaaaatcacatctatctgatgggtatactccacttgcaatatcacctcaatacttgtgctgttggtagcaaaaacctyagcttgttttccacatgatt

SEQ ID NO: 27769 - DNA, 600 bp, Chicken  19866894245143_3
ggattcacaaagaaagcattggtaggagaataaatgacagacaacactcacaaatttctaagagcattacccaagagatgcatgaacatctcttgttggttgagaactagggacagctgttggctctgggcaaaacatagtacttaggattaccaacagatgsgacaattattaattgcaaggttttgctgacagtggttttgatttrcttcatttttttctatcagtattagaatgtagcactggagttacattacattgaggatggtttgtttgttttggtttgttaacttccttacwgagcagacaaaagagacgaagctgtttggttctatagacacaagtaagtgctcaattcagatttgttttctggggactggaaacatgcttctgtgaatcctaaatgtgattaaaatcacatctatctgatgggtatactccacttgcaatatcacctcaatacttgtgctgttggtagcaaaaacctyagcttgttttccacatgattttctccacaagattctgatgaaacactgaaagctctgcctaatcataagtgctttgtcctagtgacagcagtcatgcagtgattgccaatgt

SEQ ID NO: 27770 - DNA, 600 bp, Chicken  19866894245143_4
ctgacagtggttttgatttrcttcatttttttctatcagtattagaatgtagcactggagttacattacattgaggatggtttgtttgttttggtttgttaacttccttacwgagcagacaaaagagacgaagctgtttggttctatagacacaagtaagtgctcaattcagatttgttttctggggactggaaacatgcttctgtgaatcctaaatgtgattaaaatcacatctatctgatgggtatactccacttgcaatatcacctcaatacttgtgctgttggtagcaaaaacctyagcttgttttccacatgattttctccacaagattctgatgaaacactgaaagctctgcctaatcataagtgctttgtcctagtgacagcagtcatgcagtgattgccaatgtcctacagaactggaatatcccctttagcaaaatgctgatgatggattcatgtgcaagagagctgagcataggaaagattatccagatatttatggatgtcaaaaacaattcattcagagaattgatgtaggtgtttagctagggatggagtcctgaatctaagttttatactgaaaatatcaagagat

SEQ ID NO: 27771 - DNA, 600 bp, Chicken  19866894245143_5
ctcagagatggacacccattaaaaaacagtgacaaaagccaccaataccgaacttggaaactctgagaagtgctgcttaaccctgacaccattaggcatactcaaccattaggcacgtactcactattcacagagcttttttagccatagtgatgaacaatgtcttgccaagtcctgtcttcttccctttgaaactgtgccaacactcgtttgggaggtaaagactgaacatcacgaaggatgaaaacttcaagagagacacaaggtgaattggaaactaaaactactccccaaactggygatgaagtaacttctgaaaattcacccttgctttcctgcatagctgttccaacaaaaaacagctatgtaaaatttcctgtgataacaaaataagataaatagcctccaaagagtaagtgggcttttgatggggtggaaaagaagctaaatatttgcagtcgaacaacattgaaaggtttttgaaaaagatgctaaaaagaaagctctcaactatttttattaatctttcaacagcaaaacaagtaatgctgcaaaaatggggagaaaacagattgcacacagaaaacttgtttttctgtg

SEQ ID NO: 27772 - DNA, 599 bp, Chicken  19866894245146_1
  misc_feature (1)..(175): n is any nucleotide
nnnnnnnnnnnnnnnnnnnnnnnnnnnnnnnnnnnnnnnnnnnnnnnnnnnnnnnnnnnnnnnnnnnnnnnnnnnnnnnnnnnnnnnnnnnnnnnnnnnnnnnnnnnnnnnnnnnnnnnnnnnnnnnnnnnnnnnnnnnnnnnnnnnnnnnnnnnnnnnnnnnnnnnnnnnnnnnttcttccctgcctgtctttcttaaagagtgtatacccatctattcctacattccagtcacgagagccatcccaccacgtctcagtgaagccaatgacatcatagcctggtgtagtggaaatgctwaatcataactcgaaacagtgattgagcagctggtgggaaggcagggccaacccaggggagtctgcctacgtgaggtcttccagaggtaagcaaattttctttcttcatttctgcatccatggctgttrcatctgggcttgtcctcgtttgctgcagccaaagaktttgccaccctgctattctcgctgtactttctatgacgttatagcgttacactctgtaggcatccattactgctgtcagcctcaaagtgggatgggttgaggatcccctcccgcacaagtgctcctgactaaatt

SEQ ID NO: 27773 - DNA, 599 bp, Chicken  19866894245146_2
  misc_feature (1)..(47): n is any nucleotide
nnnnnnnnnnnnnnnnnnnnnnnnnnnnnnnnnnnnnnnnnnnnnnnttcttccctgcctgtctttcttaaagagtgtatacccatctattcctacattccagtcacgagagccatcccaccacgtctcagtgaagccaatgacatcatagcctggtgtagtggaaatgctwaatcataactcgaaacagtgattgagcagctggtgggaaggcagggccaacccaggggagtctgcctacgtgaggtcttccagaggtaagcaaattttctttcttcatttctgcatccatggctgttrcatctgggcttgtcctcgtttgctgcagccaaagaktttgccaccctgctattctcgctgtactttctatgacgttatagcgttacactctgtaggcatccattactgctgtcagcctcaaagtgggatgggttgaggatcccctcccgcacaagtgctcctgactaaattggaaagctagytgccaaagatggtcttcccccttctggggaagaagacgggggtcttcccccgtctgtcttcagaagaccagcttctcaaagctagttccatggcataagtagctgaagccatgacac

SEQ ID NO: 27774 - DNA, 599 bp, Chicken  19866894245146_3
  misc_feature (1)..(11): n is any nucleotide
nnnnnnnnnnnttcttccctgcctgtctttcttaaagagtgtatacccatctattcctacattccagtcacgagagccatcccaccacgtctcagtgaagccaatgacatcatagcctggtgtagtggaaatgctwaatcataactcgaaacagtgattgagcagctggtgggaaggcagggccaacccaggggagtctgcctacgtgaggtcttccagaggtaagcaaattttctttcttcatttctgcatccatggctgttrcatctgggcttgtcctcgtttgctgcagccaaagaktttgccaccctgctattctcgctgtactttctatgacgttatagcgttacactctgtaggcatccattactgctgtcagcctcaaagtgggatgggttgaggatcccctcccgcacaagtgctcctgactaaattggaaagctagytgccaaagatggtcttcccccttctggggaagaagacgggggtcttcccccgtctgtcttcagaagaccagcttctcaaagctagttccatggcataagtagctgaagccatgacaccactcccttaaccatgtattgatttttctcagttct

SEQ ID NO: 27775 - DNA, 600 bp, Chicken  19866894245146_4
cgaaacagtgattgagcagctggtgggaaggcagggccaacccaggggagtctgcctacgtgaggtcttccagaggtaagcaaattttctttcttcatttctgcatccatggctgttrcatctgggcttgtcctcgtttgctgcagccaaagaktttgccaccctgctattctcgctgtactttctatgacgttatagcgttacactctgtaggcatccattactgctgtcagcctcaaagtgggatgggttgaggatcccctcccgcacaagtgctcctgactaaattggaaagctagytgccaaagatggtcttcccccttctggggaagaagacgggggtcttcccccgtctgtcttcagaagaccagcttctcaaagctagttccatggcataagtagctgaagccatgacaccactcccttaaccatgtattgatttttctcagttctattagccctttccttccccatcccttaaacaaggaagactgatgaaaaggctgcctgtgctcctaagtcttccagtgctgcttctagatccgtctagtcccctctgatgctcttcaggttgctcacagctacctcgctggtgtcatg

SEQ ID NO: 27776 - DNA, 599 bp, Chicken  19866894245149_1
  misc_feature (1)..(111): n is any nucleotide
nnnnnnnnnnnnnnnnnnnnnnnnnnnnnnnnnnnnnnnnnnnnnnnnnnnnnnnnnnnnnnnnnnnnnnnnnnnnnnnnnnnnnnnnnnnnnnnnnnnnnnnnnnnnnnncaccctctctgttaacaatccagaagattatgaaaacctcctctgacagaaggcaaataaaatttagtacttttatcagctgcaaacatttaaatttgcaaagaattacaagtctggtaaactgtaaaccttgtccaatgcagctattctatgtctcacctacactgacagagcacatcatgcttttasctacttgagctcacctaagcattctgcagaaagccacacttcctgactatctgcttcgtttctgaaagattgaccatttaggctttaaagaagttttgccctatcaagagccattaaagctaacctgcaaagtaagtgaccgtactaaaggtagtatgcagaacacaaaatgagcttgtttttcttgtgcttcatttctgaatgtgagattaatttgctcttcacacacacacacaaaattatatatatatatacacacacacacgtttatcccattatgaggtcttgcctcagctcta

SEQ ID NO: 27777 - DNA, 599 bp, Chicken  19866894245152_1
  misc_feature (1)..(200): n is any nucleotide
nnnnnnnnnnnnnnnnnnnnnnnnnnnnnnnnnnnnnnnnnnnnnnnnnnnnnnnnnnnnnnnnnnnnnnnnnnnnnnnnnnnnnnnnnnnnnnnnnnnnnnnnnnnnnnnnnnnnnnnnnnnnnnnnnnnnnnnnnnnnnnnnnnnnnnnnnnnnnnnnnnnnnnnnnnnnnnnnnnnnnnnnnnnnnnnnnnnnnnnncatcaaacagtatgagcaggcaccttttaagttctggatgagctgtaggaagtttttgcttgtataaagtctcatgcactgcctgaatttaaatctcccraatctgtgaaaacaaagtatttttatttctttctgatcccaaatatgagattttctcattctacctacatccaaaagcaytgagtaacgctgacaagaragaaaagctatcaccaagctcagtagtgtttcttcttcctctgtagtctgagctctgcagtattatcaatataagcatactggtaatccatgcaatgtttttaaattagtaggcatatcttagtttctcaaatggatcagcatttctcctattttataaaaatgcgacagctttgtctccaaggttgatttcacaagaat

SEQ ID NO: 27778 - DNA, 599 bp, Chicken  19866894245152_2
  misc_feature (1)..(120): n is any nucleotide
nnnnnnnnnnnnnnnnnnnnnnnnnnnnnnnnnnnnnnnnnnnnnnnnnnnnnnnnnnnnnnnnnnnnnnnnnnnnnnnnnnnnnnnnnnnnnnnnnnnnnnnnnnnnnnnnnnnnnnnncatcaaacagtatgagcaggcaccttttaagttctggatgagctgtaggaagtttttgcttgtataaagtctcatgcactgcctgaatttaaatctcccraatctgtgaaaacaaagtatttttatttctttctgatcccaaatatgagattttctcattctacctacatccaaaagcaytgagtaacgctgacaagaragaaaagctatcaccaagctcagtagtgtttcttcttcctctgtagtctgagctctgcagtattatcaatataagcatactggtaatccatgcaatgtttttaaattagtaggcatatcttagtttctcaaatggatcagcatttctcctattttataaaaatgcgacagctttgtctccaaggttgatttcacaagaatggaaactttcagttgaaactttactacatgtaagaatcttcagactgtctgaagagcatcttttgcaggtatacactgta

SEQ ID NO: 27779 - DNA, 599 bp, Chicken  19866894245152_3
  misc_feature (1)..(101): n is any nucleotide
nnnnnnnnnnnnnnnnnnnnnnnnnnnnnnnnnnnnnnnnnnnnnnnnnnnnnnnnnnnnnnnnnnnnnnnnnnnnnnnnnnnnnnnnnnnnnnnnnnnnncatcaaacagtatgagcaggcaccttttaagttctggatgagctgtaggaagtttttgcttgtataaagtctcatgcactgcctgaatttaaatctcccraatctgtgaaaacaaagtatttttatttctttctgatcccaaatatgagattttctcattctacctacatccaaaagcaytgagtaacgctgacaagaragaaaagctatcaccaagctcagtagtgtttcttcttcctctgtagtctgagctctgcagtattatcaatataagcatactggtaatccatgcaatgtttttaaattagtaggcatatcttagtttctcaaatggatcagcatttctcctattttataaaaatgcgacagctttgtctccaaggttgatttcacaagaatggaaactttcagttgaaactttactacatgtaagaatcttcagactgtctgaagagcatcttttgcaggtatacactgtattgttgattgcagctcagc

SEQ ID NO: 27780 - DNA, 600 bp, Chicken  19866894245152_4
ttatcaatataagcatactggtaatccatgcaatgtttttaaattagtaggcatatcttagtttctcaaatggatcagcatttctcctattttataaaaatgcgacagctttgtctccaaggttgatttcacaagaatggaaactttcagttgaaactttactacatgtaagaatcttcagactgtctgaagagcatcttttgcaggtatacactgtattgttgattgcagctcagctgaccttgtaaaaaaatctcaagcaaatcttaatagtgagattcttacatatctcattttcamaagatatcacaaacttttgcataaaatatactggaaatctaatcatatcctttcctagtagcrtgggttatcctgccatctctctgccaaagagatgtttgctcttaattattaaggattaagcctatgatggaagatcttcagtcaagtcctactattattttcaaatcaaagacaaacagatgcagcattatagtgaactgtatcagaagttgggcattttttctagggactgcaggaaactggtttgcttatgactgaatcaaagattctgcctggacttttcagttaggatggcag

SEQ ID NO: 27781 - DNA, 600 bp, Chicken  19866894245152_5
tctcaaatggatcagcatttctcctattttataaaaatgcgacagctttgtctccaaggttgatttcacaagaatggaaactttcagttgaaactttactacatgtaagaatcttcagactgtctgaagagcatcttttgcaggtatacactgtattgttgattgcagctcagctgaccttgtaaaaaaatctcaagcaaatcttaatagtgagattcttacatatctcattttcamaagatatcacaaacttttgcataaaatatactggaaatctaatcatatcctttcctagtagcrtgggttatcctgccatctctctgccaaagagatgtttgctcttaattattaaggattaagcctatgatggaagatcttcagtcaagtcctactattattttcaaatcaaagacaaacagatgcagcattatagtgaactgtatcagaagttgggcattttttctagggactgcaggaaactggtttgcttatgactgaatcaaagattctgcctggacttttcagttaggatggcagagcaacagtattgaacagattgttgaatgaatgaaagtcctagaacagaatttcaggctatgc

SEQ ID NO: 27782 - DNA, 600 bp, Chicken  19866894245157_1
aggctgatgaagcatggcttatgttgtctgtagaggacagacgagggtggttaagtgcacttttctactgctaataaagaagtgttactgagatgacaaactccacagagctggatataggacaagatgtgagtttcatgctgcagcaggaaaaattgtgactgacataagaaaattcttcacagagagcaaggcagtagagcaggcacccaagcagactgtacaatctccctttggagagttcagactttgtgttgacaagacccagagcaacatgatctttcatgctggcctttgagyaagagggttggactagatgacctgcacaggtcccttccaaccaaatcactctacttgacatgaacctgaagagaaattaagaacatacaaacattcctaagaaataacttgaaatgtcagataaacttgtaaaataaaagagcctttttagcacaagcttactgagaaaatgacagataatgtgctaggctatttcaaagaaagatcattaatctaatcagtatctgatttcatgcagcaacaaatacaaacattatttcactaaaaaagccattactcaatcaaaagtttcaattaatg

SEQ ID NO: 27783 - DNA, 502 bp, Chicken  19866894245158_1
actcatcagcgaccagctgttctccaactttgtgagtgagcctgtgtccttgtgtgctgcagacaccccctggagccctcccacccatgattggctgtgcaagtgacgctgcctgggagaggtgcaagcacccctactcatctcttgtctcctgaaagctttggtggctgtgggttttggatgtgccttgagcatatctgttaggtacacgtttgtcttcaggcatacctgaagtgttgcaaccttcagctccttcctgtagtattttctgtgctggcacatgtctgtaggatactgaakgtaattmatgttggaaaggacctctagagctctggtgggatgctgtcaggaatatggacactgtgctgttctggagaagttgtgtaccagagggtgggctgctggtgttctcagcttgacagaagtgagcacctaatctcaccttctccctgcatctctacccaccagaaagagcggacagagcggctgggtgatctcaccc

SEQ ID NO: 27784 - DNA, 495 bp, Chicken  19866894245158_2
agcgaccagctgttctccaactttgtgagtgagcctgtgtccttgtgtgctgcagacaccccctggagccctcccacccatgattggctgtgcaagtgacgctgcctgggagaggtgcaagcacccctactcatctcttgtctcctgaaagctttggtggctgtgggttttggatgtgccttgagcatatctgttaggtacacgtttgtcttcaggcatacctgaagtgttgcaaccttcagctccttcctgtagtattttctgtgctggcacatgtctgtaggatactgaakgtaattmatgttggaaaggacctctagagctctggtgggatgctgtcaggaatatggacactgtgctgttctggagaagttgtgtaccagagggtgggctgctggtgttctcagcttgacagaagtgagcacctaatctcaccttctccctgcatctctacccaccagaaagagcggacagagcggctgggtgatctcaccc

SEQ ID NO: 27785 - DNA, 600 bp, Chicken  19866894245165_1
ctgctctcaggagtggatggtatttaagcccaaatattgtttgcctgttgctgagaaggggcaaagctcctgtggtgctaaatagtccccaaagcaccgacagtggagcaattgccaccaccctcctagctctagcacaggaaatgttttctttatcatcatggagtattcgctcatgtattccatgtacttttcactgctattcgggctttctttaaagatgcactgttctctcactggactgtctggctttttcaaagagctgttgtctagctgacttgagtggccacctctgttagrctgtaatgragatgtaggtctttgattagctaaccatagctgcctycagttacaggccgtgttcaccaccccaacagaasaagaaacactggttaagtgttttcagtacaaagataggttgtgtgtatcccacctctactatcagtgaaatgtaatttgtgaagtttggttggttaattttctattmgaatcatttggattttacttttggtttgttttagagatggtggtattggtggcaaagaaattattttgtggcaaaggtctgtagagctcccgtggggatccattttgaaatgg

SEQ ID NO: 27786 - DNA, 600 bp, Chicken  19866894245165_2
ggagtggatggtatttaagcccaaatattgtttgcctgttgctgagaaggggcaaagctcctgtggtgctaaatagtccccaaagcaccgacagtggagcaattgccaccaccctcctagctctagcacaggaaatgttttctttatcatcatggagtattcgctcatgtattccatgtacttttcactgctattcgggctttctttaaagatgcactgttctctcactggactgtctggctttttcaaagagctgttgtctagctgacttgagtggccacctctgttagrctgtaatgragatgtaggtctttgattagctaaccatagctgcctycagttacaggccgtgttcaccaccccaacagaasaagaaacactggttaagtgttttcagtacaaagataggttgtgtgtatcccacctctactatcagtgaaatgtaatttgtgaagtttggttggttaattttctattmgaatcatttggattttacttttggtttgttttagagatggtggtattggtggcaaagaaattattttgtggcaaaggtctgtagagctcccgtggggatccattttgaaatggatgacaaca

SEQ ID NO: 27787 - DNA, 600 bp, Chicken  19866894245165_3
gttgctgagaaggggcaaagctcctgtggtgctaaatagtccccaaagcaccgacagtggagcaattgccaccaccctcctagctctagcacaggaaatgttttctttatcatcatggagtattcgctcatgtattccatgtacttttcactgctattcgggctttctttaaagatgcactgttctctcactggactgtctggctttttcaaagagctgttgtctagctgacttgagtggccacctctgttagrctgtaatgragatgtaggtctttgattagctaaccatagctgcctycagttacaggccgtgttcaccaccccaacagaasaagaaacactggttaagtgttttcagtacaaagataggttgtgtgtatcccacctctactatcagtgaaatgtaatttgtgaagtttggttggttaattttctattmgaatcatttggattttacttttggtttgttttagagatggtggtattggtggcaaagaaattattttgtggcaaaggtctgtagagctcccgtggggatccattttgaaatggatgacaacagcacccaaaaagacacatcacttacagctgtgatgta

SEQ ID NO: 27788 - DNA, 582 bp, Chicken  19866894245165_4
aatagtccccaaagcaccgacagtggagcaattgccaccaccctcctagctctagcacaggaaatgttttctttatcatcatggagtattcgctcatgtattccatgtacttttcactgctattcgggctttctttaaagatgcactgttctctcactggactgtctggctttttcaaagagctgttgtctagctgacttgagtggccacctctgttagrctgtaatgragatgtaggtctttgattagctaaccatagctgcctycagttacaggccgtgttcaccaccccaacagaasaagaaacactggttaagtgttttcagtacaaagataggttgtgtgtatcccacctctactatcagtgaaatgtaatttgtgaagtttggttggttaattttctattmgaatcatttggattttacttttggtttgttttagagatggtggtattggtggcaaagaaattattttgtggcaaaggtctgtagagctcccgtggggatccattttgaaatggatgacaacagcacccaaaaagacacatcacttacagctgtgatgtaggagggatgctttggg

SEQ ID NO: 27789 - DNA, 475 bp, Chicken  19866894245165_5
tacttttcactgctattcgggctttctttaaagatgcactgttctctcactggactgtctggctttttcaaagagctgttgtctagctgacttgagtggccacctctgttagrctgtaatgragatgtaggtctttgattagctaaccatagctgcctycagttacaggccgtgttcaccaccccaacagaasaagaaacactggttaagtgttttcagtacaaagataggttgtgtgtatcccacctctactatcagtgaaatgtaatttgtgaagtttggttggttaattttctattmgaatcatttggattttacttttggtttgttttagagatggtggtattggtggcaaagaaattattttgtggcaaaggtctgtagagctcccgtggggatccattttgaaatggatgacaacagcacccaaaaagacacatcacttacagctgtgatgtaggagggatgctttggg

SEQ ID NO: 27790 - DNA, 600 bp, Chicken  19866894245168_1
gactaaaattagaggccttaaaactgcattgtagttagttatattaacagatagactgtgatcttagacaattgctcaaaacaagccttgacaaaggaggagctcggctactctgacatggtgagaaagtgaaacatccaaaagttaatgagcacttcccaaaatttgcttcagtctctagaacagaatgcagcaagaatagaagttgaaaaaaaacagtactttgattagagaagaactatcatcacaaacaggagatttagaaactagcattattcctggaattgtacggtttaacgytgtttcaagatctcctcaagcaggactcctccatttaaacttgtctggatgttcaagaccgagttacaactccaaggagctttgttgagtatcacaggctaagaatattttaaataccaagcaaaaattaggtcttcaatttaccatctattctgagttttagcagttgcaacaagcaagacggtcatggggggggggagaacaccaccaaaaaacagaactaaatcactacttacaattctatctgctttggtcccacccaaaagaagtttttcttaacctcacgtttacagttcagta

SEQ ID NO: 27791 - DNA, 600 bp, Chicken  19866894245171_1
ctgccgcaaattcctggatggagatgagctcaccttagcggattgcaacctcctaccaaagctccacataattaaggtttgcatttgcttttcagcctcctgaagagaaaggcagcctagaagctcaggttcttttctaaaaggcagaggaagtccgtgtattttctgaagccacacggtagctgggtagggacaaggagtgctagtgcacaaggccatttcagtgcagcacagctaggcagatcttcacattgacagctggagctggaatatctggtttcatatttgaactgtgactgykttctccaggcytctcacaaatactaaaygagtactatattcagtgctgtagagaaatatttctatttgcgtttcacatgcaaagtgccacagatcgataagattaaatgatcttgcccgtgctaaatcaagaaagcagcaaatgctgaaatttgaccatctctcccacttttaatccaaacctctttgttgaatattaccaccaataccaatagcactggcagccaccatcttccagccaagtgctccaaagcacccacgcactcctaagggtctgaggtgtctgggcattgttacagc

SEQ ID NO: 27792 - DNA, 600 bp, Chicken  19866894245171_2
tgccgcaaattcctggatggagatgagctcaccttagcggattgcaacctcctaccaaagctccacataattaaggtttgcatttgcttttcagcctcctgaagagaaaggcagcctagaagctcaggttcttttctaaaaggcagaggaagtccgtgtattttctgaagccacacggtagctgggtagggacaaggagtgctagtgcacaaggccatttcagtgcagcacagctaggcagatcttcacattgacagctggagctggaatatctggtttcatatttgaactgtgactgykttctccaggcytctcacaaatactaaaygagtactatattcagtgctgtagagaaatatttctatttgcgtttcacatgcaaagtgccacagatcgataagattaaatgatcttgcccgtgctaaatcaagaaagcagcaaatgctgaaatttgaccatctctcccacttttaatccaaacctctttgttgaatattaccaccaataccaatagcactggcagccaccatcttccagccaagtgctccaaagcacccacgcactcctaagggtctgaggtgtctgggcattgttacagcc

SEQ ID NO: 27793 - DNA, 600 bp, Chicken  19866894245171_3
cctggatggagatgagctcaccttagcggattgcaacctcctaccaaagctccacataattaaggtttgcatttgcttttcagcctcctgaagagaaaggcagcctagaagctcaggttcttttctaaaaggcagaggaagtccgtgtattttctgaagccacacggtagctgggtagggacaaggagtgctagtgcacaaggccatttcagtgcagcacagctaggcagatcttcacattgacagctggagctggaatatctggtttcatatttgaactgtgactgykttctccaggcytctcacaaatactaaaygagtactatattcagtgctgtagagaaatatttctatttgcgtttcacatgcaaagtgccacagatcgataagattaaatgatcttgcccgtgctaaatcaagaaagcagcaaatgctgaaatttgaccatctctcccacttttaatccaaacctctttgttgaatattaccaccaataccaatagcactggcagccaccatcttccagccaagtgctccaaagcacccacgcactcctaagggtctgaggtgtctgggcattgttacagcctgtcctgtgct

SEQ ID NO: 27794 - DNA, 600 bp, Chicken  19866894245171_4
tcaccttagcggattgcaacctcctaccaaagctccacataattaaggtttgcatttgcttttcagcctcctgaagagaaaggcagcctagaagctcaggttcttttctaaaaggcagaggaagtccgtgtattttctgaagccacacggtagctgggtagggacaaggagtgctagtgcacaaggccatttcagtgcagcacagctaggcagatcttcacattgacagctggagctggaatatctggtttcatatttgaactgtgactgykttctccaggcytctcacaaatactaaaygagtactatattcagtgctgtagagaaatatttctatttgcgtttcacatgcaaagtgccacagatcgataagattaaatgatcttgcccgtgctaaatcaagaaagcagcaaatgctgaaatttgaccatctctcccacttttaatccaaacctctttgttgaatattaccaccaataccaatagcactggcagccaccatcttccagccaagtgctccaaagcacccacgcactcctaagggtctgaggtgtctgggcattgttacagcctgtcctgtgctaccctggagccacacag

SEQ ID NO: 27795 - DNA, 600 bp, Chicken  19866894245173_1
ttgtttggtttggtttggtttggtttcactttggcttaagtgaagaggataattattgctaatgatttatagggcggtgacaggtagaaagagaacgcgtttcagaagaatggcaaacggttttcttgggagaaaccacgctcgggcggctctctgacctcgtcgacattaagtgctgttttctgcaatggaattaatagtgccttatgccatcctagaacaagatgccttggtctactggaaggcaagccagggaacttttctcattgtgcctacagcaggtagaatatctgtaactcygctgctcggccgatgcaaatcaatgcgttgtgcgatgtgcgcctcgttggcccagctcctgggttcagaaacccgaggactctctctgccttctatgtgaatttgcatctttcatagcccctctgcttttaattacagctgcccattacagctgctgccagcagtttctgcctttgcaaggaaaatgggactgtgcgttccttcctacgatcacactttaattccttactttgggaaacatcccccagcaggacgaaataaggcttccgaatgcagggaagagcatttgtgatgatttta

SEQ ID NO: 27796 - DNA, 599 bp, Chicken  19866894245175_1
  misc_feature (1)..(116): n is any nucleotide
nnnnnnnnnnnnnnnnnnnnnnnnnnnnnnnnnnnnnnnnnnnnnnnnnnnnnnnnnnnnnnnnnnnnnnnnnnnnnnnnnnnnnnnnnnnnnnnnnnnnnnnnnnnnnnnnnnnncaaaataagtgaaataagttgttctgataaaatggatccttgttcagttggagtccagcttcaagctaccaatgaatgtcataagacctattatacccgtcacactggcttcaagactaaggaagatatatcttcatttgatctactgttgcttcagcttaggactgggatgaccctttcagaraacgacactatctgctttcatcatgcaaaaatttacattgaaagatttgaagacttacaaaagtcatgttgtgatccctttaatatgcacagaaaactgtcaaagaaaaacttgcgtgcaattgacctgcatgacgcaacttttctaactgccaagtttggaagacagtttgtacctggttggaagctttgtcccaaatgtatgcaggtaataaatggcagtgtggatgtcgaagctgaagaacgccaaagaagaaagcttgattcggacgtatgtatatggatcagttgtcccacccc

SEQ ID NO: 27797 - DNA, 560 bp, Chicken  19866894245180_1
ctctattcagtcttctgcacttacaaagaacttctgcaaaaggcattctttccttttcgttcccgttatccacaatgaaaagtgaccataatcagatccattttattccaaaaagtagttacttagcaactgtgaccctgattctagactccaggatgtgtgtacattttaggcaatttccccagctgttcagcaacatgtttttattttcaaagtgaaaactgggattgaaaaagtattccttgttgaaataaatacaattcatccccatctttctgccaaaatgtgacagaaatctcytatatggctattgtgtactcagctgccgtattcagaaaaatacagatagtatatctttttaagtgtgaactgaacacccaaaaaggcccgctgctgtctttatttaaatggaggaagatgttgagggtgaagtaccaaacaaacaatgaagttctacttcacttctactgacaaaagtgtacccttgaatttgtcatcctttctccactgggctgtatcttgcacactatggtagtaccaccaaaacctatagggagata

SEQ ID NO: 27798 - DNA, 600 bp, Chicken  19866894245181_1
agccttgccagaattccttttgggtgcaaaagtagccttccatgctccccttgcagtgctgctgaaaggatgcaaactcgcagtggcatctgaaaaacacaaggagtgggaagagactacagatggctgaggatttgctgatagagctgcttataagcccctggcaggaggatttacatcaggtactaggaaagcaatgttggtgcaagagaaaccccctgaagcaaggagctgtgctgctctccagcactgctctgaggccaggggctcacatctccccttccttgcttttactttgckctctctcctgctggagtgcagagatgagctgtagggtgaaggcagagggcacgagcaagggcttcaccccgtgcaggggaagctgtggtgtcacagaaggacattagcagcattccttgtctcctggctttcctctgtgagcaatttccagggaaatcaaatytgactctgctccattagctgctaacctcctggctgctgggcctgtcttttgcattacaacggagcagagccgcttggcacactgctgtcagggtccgaatgagctttgataaaagactaagtgttagagcaaaagga

SEQ ID NO: 27799 - DNA, 516 bp, Chicken  19866894245181_2
gcaggaggatttacatcaggtactaggaaagcaatgttggtgcaagagaaaccccctgaagcaaggagctgtgctgctctccagcactgctctgaggccaggggctcacatctccccttccttgcttttactttgckctctctcctgctggagtgcagagatgagctgtagggtgaaggcagagggcacgagcaagggcttcaccccgtgcaggggaagctgtggtgtcacagaaggacattagcagcattccttgtctcctggctttcctctgtgagcaatttccagggaaatcaaatytgactctgctccattagctgctaacctcctggctgctgggcctgtcttttgcattacaacggagcagagccgcttggcacactgctgtcagggtccgaatgagctttgataaaagactaagtgttagagcaaaaggaacttcttaccaaaagttgttttcaatttcctgaactagctatatccactcccctttgctcctggactcaagcaatccat

SEQ ID NO: 27800 - DNA, 599 bp, Chicken  19866894245182_1
  misc_feature (1)..(160): n is any nucleotide
nnnnnnnnnnnnnnnnnnnnnnnnnnnnnnnnnnnnnnnnnnnnnnnnnnnnnnnnnnnnnnnnnnnnnnnnnnnnnnnnnnnnnnnnnnnnnnnnnnnnnnnnnnnnnnnnnnnnnnnnnnnnnnnnnnnnnnnnnnnnnnnnnnnnnnnnnnnnnnnnaatagagatttttaggcagctttattgttttactttgtgtgaaattgctaagatgcagaacaacaaatcttcaaatgtagttatttgcagtcagacgttgttaccagcaatttggaggtgacagttttcattagcacacscccaatgtcctttttaaatgtccaagtcagacactacctagatagtgctctctacatccatataattgccctttggttgcctcgtatgagaagatgctgtgatgattcaagaacacaattaaaaaatgtactattgaagaattacagtcaacatacttcaaacaagaagaacagtaagcccctattctgtcatctaatcagcaatcagcctgatttcaaaatgtggtacgtaatctctcccactgaattcagtgctaagtgcaagttatcagcattcacgcaatctaagcagcttctgt

SEQ ID NO: 27801 - DNA, 600 bp, Chicken  19866894245182_2
gcaatctaagcagcttctgtttagtaacctaaattaatttgaaaatgtttacctgctgggcccaaaccttgagtaaatgacttgggagttgaacagtgtcttccagaacataattaagaacatttattggtaacagagcacttaacaaggcaccagggggcctacatgtagccaacaaatggggggatttcaattaagttgtaacttaacacaacctataagcaaataactgctggacgggaagattagtgggaaaaaaagaaaaagggaaagcaggaagagctgctgcagaggaaggtrtatttygatagattctattacttataaatggatgactatttaagatcaagacatctctgctccatccactgagctcttccctcttaggcttcactatagccacgccatgtgaacagccttcttttctacacaaaaatttttttacagagaaaggtaatacagaaaaagtatgtactacataacacctctaatttatttttcctttgtgcacattttttaaaggttaaacagtgctcgaagagttcattagctaatgcttgtaaaaagttctgaagatgaacattactagataaggatggc

SEQ ID NO: 27802 - DNA, 600 bp, Chicken  19866894245182_3
taagcagcttctgtttagtaacctaaattaatttgaaaatgtttacctgctgggcccaaaccttgagtaaatgacttgggagttgaacagtgtcttccagaacataattaagaacatttattggtaacagagcacttaacaaggcaccagggggcctacatgtagccaacaaatggggggatttcaattaagttgtaacttaacacaacctataagcaaataactgctggacgggaagattagtgggaaaaaaagaaaaagggaaagcaggaagagctgctgcagaggaaggtrtatttygatagattctattacttataaatggatgactatttaagatcaagacatctctgctccatccactgagctcttccctcttaggcttcactatagccacgccatgtgaacagccttcttttctacacaaaaatttttttacagagaaaggtaatacagaaaaagtatgtactacataacacctctaatttatttttcctttgtgcacattttttaaaggttaaacagtgctcgaagagttcattagctaatgcttgtaaaaagttctgaagatgaacattactagataaggatggctgttat

SEQ ID NO: 27803 - DNA, 600 bp, Chicken  19866894245185_1
tagtattgtaagcgcttctgtttccctgatcacaaatcatctgctaaaatgttatctatgaactacctcattcaccccttgtctcaccctttgattcagaggagataggtcaaaaaagaagtagcagatggctgtaccacctgcaaaatatttacacctaatgtgttgcttgctagagttgctgctcagatacttaaactgtgtttcctgcatatttctctttctcccagaagataatttcttcattatcaatttgatatcgtggtcagcttgggcattgatatgcataggagtacataygctgcctgccctgcttcagcatgaactgatgtacctctcccaaacgattttcaaaaatcaggaatgggaaagaaccaaaacaaaagacaaattcgatgttttggagaccttttgtcttaatacacacacaaattaaatggtgtttgtctcctctttctgctctaaacacagaacttgggccaataacaaggagagcatctcttttcaggctctcttgcagcttttaaaacatagagagcaaatggcaggcttacctttcatctccttttgaaactgaagttaggccttattggtaacaag

SEQ ID NO: 27804 - DNA, 600 bp, Chicken  19866894245189_1
ttttttgcctgaccaaaatgaatgaccatcaaatatatagaagtgatcttggctgtatcaaatgcattgtcagcaatatccaccagaagtagacctggcctgttgttttcctgtccaccctctaaagagctttgagtggtctggacctattattttcagataaccttcagaagatcagaattgttagaataagccttttgagggaatatgttaatatagtaatgagtctgaacattaatcttaatggtaagaaaagcaagcaaagcatccgccagatcccaagtcccccaaagcaccctyctccctattactcctctgcccttcccaggggcacctttgccctgcctggagagctcgcgtcacctactaaatctgagcagacagacagctttcgctatcaaagaagcactgcggcaatacccgcatccctgtcaccctgtcactcctcatctgggcgtgctgggtggaagaggctccctgctcgtggcagtgcggggggagcaggggagagaggcggctcgaaggaaagcgcctggaggaatctttggcctgcacacacgtttccgattcacctgcatttaatgccgttaatattttagc

SEQ ID NO: 27805 - DNA, 600 bp, Chicken  19866894245191_1
attaaaatacagtactgaatgaagattgtcaaaaatagatttgatggctgactgctgaaaagcaaaagacctttctgcagcgcatacatttaaattctgcttgtataagccttaaagttaatattccctatatgttggattctgtacaaggaagaaaaatgtaatatacccagtgcataagcaatttagtaaaaatatcaggaataattgattgaggtgtaccaccccgtagctacagaatttcctgcctactagcatatctacacaacagccattagagttaacatctgaatgttgcaraacctggatgtacttatttacttaatgcactcagaaagtagagtagaactaatatccctatttcacagaatgattagatgacttttctaaggtcatggaggaattttttggtagaatgcagacttaaagttaaaccccaagactttagtgctctaatgtgacctgcgacttgattttttggcttaataatttagcaagtgaagattccagtgccagtaccatgcttttcaagccttagatctaacstatagctaacctatagagcccttagagtcctaacccttagagctaacctataga

SEQ ID NO: 27806 - DNA, 600 bp, Chicken  19866894245191_2
gcctactagcatatctacacaacagccattagagttaacatctgaatgttgcaraacctggatgtacttatttacttaatgcactcagaaagtagagtagaactaatatccctatttcacagaatgattagatgacttttctaaggtcatggaggaattttttggtagaatgcagacttaaagttaaaccccaagactttagtgctctaatgtgacctgcgacttgattttttggcttaataatttagcaagtgaagattccagtgccagtaccatgcttttcaagccttagatctaacstatagctaacctatagagcccttagagtcctaacccttagagctaacctatagagctaacctatcayatataacctatatttagcctatacctacagtctctggatttgtgtacaaatggatttgtgacgtgacagcatttctatgactaacatagaaatcctaatcccttatcacacgtttgtcttgtatagattacttgtttgtacaataattggaaggtgcaagagctatagaaatggtattaataaatgatgtgtgtcaggtctggggctttttataaagctgattcatgttactt

SEQ ID NO: 27807 - DNA, 600 bp, Chicken  19866894245191_3
ttatttacttaatgcactcagaaagtagagtagaactaatatccctatttcacagaatgattagatgacttttctaaggtcatggaggaattttttggtagaatgcagacttaaagttaaaccccaagactttagtgctctaatgtgacctgcgacttgattttttggcttaataatttagcaagtgaagattccagtgccagtaccatgcttttcaagccttagatctaacstatagctaacctatagagcccttagagtcctaacccttagagctaacctatagagctaacctatcayatataacctatatttagcctatacctacagtctctggatttgtgtacaaatggatttgtgacgtgacagcatttctatgactaacatagaaatcctaatcccttatcacacgtttgtcttgtatagattacttgtttgtacaataattggaaggtgcaagagctatagaaatggtattaataaatgatgtgtgtcaggtctggggctttttataaagctgattcatgttactttctagtaactacctagcaattactaaagcattgattgatagttctaaaatctcaaaagttgaataat

SEQ ID NO: 27808 - DNA, 600 bp, Chicken  19866894245195_1
cacgggtacctgccttgctgccatcgagccgtctcattatatctcgtaagcatcccaaaattgccatattcccaacaacaccctacgcctgacaagtttctgcacccaaagtttatatggtttgcactgtcgtaattcctgtctataaaaacgatccaggtattaataataatgacaaaagtcagctaaacaaccttaccctgattttcatgcacacatctacaatttccaccatcgtcttccatctgctttgttacataatccagtgttgtccaatttagtgcaacagctgcgtaaatkggcacacttcctacacttctcgggagagccacacaaacccaagtctgaaacactaaaaccttcagcaagattttcaattagctttacatacctattttctggccaagctaaagccacagttagaactrtagaagacagaaaaatattaagcaatttcttttcttaacataagtttcagagctctcttaggggtagaggtccgctgaagttttgaggccttctttgctctgcagcgacgcatccgtgaaagcagctcctaaattcagattgccaggtgggcggtgacaagtagtcaaaatg

SEQ ID NO: 27809 - DNA, 568 bp, Chicken  19866894245195_2
gtcgtaattcctgtctataaaaacgatccaggtattaataataatgacaaaagtcagctaaacaaccttaccctgattttcatgcacacatctacaatttccaccatcgtcttccatctgctttgttacataatccagtgttgtccaatttagtgcaacagctgcgtaaatkggcacacttcctacacttctcgggagagccacacaaacccaagtctgaaacactaaaaccttcagcaagattttcaattagctttacatacctattttctggccaagctaaagccacagttagaactrtagaagacagaaaaatattaagcaatttcttttcttaacataagtttcagagctctcttaggggtagaggtccgctgaagttttgaggccttctttgctctgcagcgacgcatccgtgaaagcagctcctaaattcagattgccaggtgggcggtgacaagtagtcaaaatggtccttcccgcttcgacgaggacagtggatctgaaagaaatgtaatatccacataaccgcctggaaaaaatatcatgtaagaacccatcaaggcct

SEQ ID NO: 27810 - DNA, 600 bp, Chicken  19866894245197_1
aaatcagaccatatggctgagagcgttttcctgatactttttgaactccggcagcttggtaccattaccagcgccctggggagcacatttcagtgcccgaccatcctcttggggtattttaattgcagaatgcatagccctccagccagccccccgaacctcacactcagctgcaaacactgccacagcatcatggatttgtgagccgaatttggggaattcctgaaggactggcacaccatcttatcgcccgaacaccacgggagcctcaccgtggagcaaaggactgaagatgagtgygtggagcgggtgggctttagctccatccccaccacccttggggcaccagcttgagccgaagccacttcagcactgaaggcagaacagcagcctctgcagcgccggccgccagcggggctccatcgggagacccccgccgcgtgcgtgggaccgggtctccccgaagcgtgggaaatgtcttcttattgcccttttttcttacgtctgttcgtgtgcagggattgcgctagggtactgccaagcatcactccttgaagcatctctccctacaaacatctctaacactaccccgtgttagaa

SEQ ID NO: 27811 - DNA, 600 bp, Chicken  19866894245199_1
cctttgctccccagggcagctgaggactccatgttcccacttcccgtgccctctcccgcaaagtcccagagagctgctgggctgggggtgctcctgcagctctttgctgcctctccttcccgtgtccatgtctgtggcagcaggcgcatgcaggctgagccccagcgccatgcaggactgcagcagagggcacggccagggttggcctgagcctccccatctgctcttggaggctgggagcgaggtgggtgcagccggcacagagctgcaccccggcagatgcacacacacagcacgtcrcacagaggcagccaccccgctctgctccccctgcatctccctgagccccccgctggccccgtgccgggcggccgcccccagctcatgccattccctgccgtgcccatgctcccactataagggcaccattcagattcctgccgggcctgggcaagggaacacagcggccgcttcactggaggtcacggcagaagacgagcttcccaagaaaccctcctttcatggggcccgctgccgcctcagaagggtttgtgcagccgctttgtcacggcgcggcccacgcgctgccctatggcgtgg

SEQ ID NO: 27812 - DNA, 517 bp, Chicken  19866894245201_1
atccagagagaagggaaacgtgggtaacagccatgagctgcacacctgaaatcaactcagggcaggcaagtatcacctggtatctgatgatcctcgaggatgagtactgcttttatgctgacggatgatgagcatgagaacagaagggcgttcacgttgacttcccagtcatcggttcttcctcagaaccagtgccttgagagacacccgggatttatgcaagagccataaaaatggggaaatcaagctcctaagatttgcacttctggctttcacgataacaacaacagtcatagtgcwaagctggcagagcttggcagaagctggggtgggatgtgggcaagatgcagaaacatccggcctgtgctgagcagcccctcgtgcattgggaaacaacacgccggtttcttagccaacactgtgggactcaccatctttcagcaactttcctgctttcaggtcattaggtaaaggagttactcatttcttcacaactgctctgccgggctctctgccc

SEQ ID NO: 27813 - DNA, 600 bp, Chicken  19866894245203_1
aaagttttgctctttgccctcccttcactcctgttcagtgctgcttgttatcttcagagaaattaaatcccctaggagagactctgttgatactcgatatcatgtggacctatgccctgcagagcctctcgctgctcctgggaaggaaaagtaaaagatgcgtcacgcaaagctattgagcaattgctacaagatgattaagaaaatacttttaggaaattatcagttaacagagtgaagtgaaaattccgggtgccccacctaggcacgaatcaccgccactacaaagtctatcagaasagccaccccctgcaccaacaccaccgctgcacgtggaactgagatgctgtgggcagctaccgcacctggtgctctgtggggatggcaccttcctgtcctgtactgctcagttcctcctgccatgctgtacattcaaagcttttctacaagcttttgatgtcactgctaaccctaagtggaacagcaacaagagtgggcgccaggcatcagggaaaaggggcactgagggaggctggagagagaactgaaactgttgtccttgttagagcagtggatgtcaggaaacaaacagcaaaataa

SEQ ID NO: 27814 - DNA, 600 bp, Chicken  19866894245203_2
ggaactgagatgctgtgggcagctaccgcacctggtgctctgtggggatggcaccttcctgtcctgtactgctcagttcctcctgccatgctgtacattcaaagcttttctacaagcttttgatgtcactgctaaccctaagtggaacagcaacaagagtgggcgccaggcatcagggaaaaggggcactgagggaggctggagagagaactgaaactgttgtccttgttagagcagtggatgtcaggaaacaaacagcaaaataaggcagctcagagacgtgggctttaactgtgctayagagggctctgaaaacacgcaggacacatttgaacacgaggccgagcatgactcgcagccagaggagtgagtcaagatgagggggatgatggtgacgtctctcagcacagtacagaatttggcaaagcttacgaaaaaaaaacctacaaattctgcatctacaaactcttccaggccttttgtgaaggtaacaacagaattacaacggaaggaaaggagaaaatgacagaggctaggggcaaacaagctactttgggcaaaactgaaagtcatggaaacatgagaagcctgaaaacagat

SEQ ID NO: 27815 - DNA, 600 bp, Chicken  19866894245204_1
ttaattcatgtaatgtttttttgttttgttttgttttgcttttttttactatttttttcctttggatgaaaatgcgtctttatgcctaggctagcttcataatttaatgattaaatttatatgttatgtatttcaaccagttgtggaaatcagagcttcatttggacatactgaatcataatcttgttaagtcttttcaattagtttacatttgagtgaatagaaatgtgctgattcagcttctaattaaagaaataagatagaagctacatcaactatgtcaagaagaaaaaattaacrttatcatagatgactataagaaatcttactgtatatgcatcattaaacctatgagcaacattttactagcatttagctctgaaagaagtatctgaaataaatgacaaagaaaggaagaaattatttattttgaaaaatagaaactagaatgaaactttatattcacagaaatgtaattatwtgttgaaatgtaattatatagaaaggatgaaatcagagttgatgtcaatttttactgaatgttatatagagcagatacatggacttgacatgctaattggaagaaactgaatcaggttt

SEQ ID NO: 27816 - DNA, 600 bp, Chicken  19866894245204_2
tcttgttaagtcttttcaattagtttacatttgagtgaatagaaatgtgctgattcagcttctaattaaagaaataagatagaagctacatcaactatgtcaagaagaaaaaattaacrttatcatagatgactataagaaatcttactgtatatgcatcattaaacctatgagcaacattttactagcatttagctctgaaagaagtatctgaaataaatgacaaagaaaggaagaaattatttattttgaaaaatagaaactagaatgaaactttatattcacagaaatgtaattatwtgttgaaatgtaattatatagaaaggatgaaatcagagttgatgtcaatttttactgaatgttatatagagcagatacatggacttgacatgctaattggaagaaactgaatcaggtttggtaaataataaaaaaattgccctttatagcaaatgtggggraaaaaaacaacaaccamcaacaacaaaagaaccaacagcacattctaaactatgttgtgtgttacacatagcatcaaattttttgcatctttaatctttatattyggcaactgttgccaatccttatcataatataaat

SEQ ID NO: 27817 - DNA, 600 bp, Chicken  19866894245204_3
ttaaacctatgagcaacattttactagcatttagctctgaaagaagtatctgaaataaatgacaaagaaaggaagaaattatttattttgaaaaatagaaactagaatgaaactttatattcacagaaatgtaattatwtgttgaaatgtaattatatagaaaggatgaaatcagagttgatgtcaatttttactgaatgttatatagagcagatacatggacttgacatgctaattggaagaaactgaatcaggtttggtaaataataaaaaaattgccctttatagcaaatgtggggraaaaaaacaacaaccamcaacaacaaaagaaccaacagcacattctaaactatgttgtgtgttacacatagcatcaaattttttgcatctttaatctttatattyggcaactgttgccaatccttatcataatataaatgctcagtggttaaaaatctgcacagctctattgctgctatagtttataaagtcagtaaattgtattcatgtatatgaaattatgttttgccctgttattttcaaataagctttcatttttaagtattgcacccctaatttgtaagtaattagtaaatatta

SEQ ID NO: 27818 - DNA, 600 bp, Chicken  19866894245204_4
attttactagcatttagctctgaaagaagtatctgaaataaatgacaaagaaaggaagaaattatttattttgaaaaatagaaactagaatgaaactttatattcacagaaatgtaattatwtgttgaaatgtaattatatagaaaggatgaaatcagagttgatgtcaatttttactgaatgttatatagagcagatacatggacttgacatgctaattggaagaaactgaatcaggtttggtaaataataaaaaaattgccctttatagcaaatgtggggraaaaaaacaacaaccamcaacaacaaaagaaccaacagcacattctaaactatgttgtgtgttacacatagcatcaaattttttgcatctttaatctttatattyggcaactgttgccaatccttatcataatataaatgctcagtggttaaaaatctgcacagctctattgctgctatagtttataaagtcagtaaattgtattcatgtatatgaaattatgttttgccctgttattttcaaataagctttcatttttaagtattgcacccctaatttgtaagtaattagtaaatattatgcaaacatttagcttt

SEQ ID NO: 27819 - DNA, 600 bp, Chicken  19866894245204_5
aatgaaactttatattcacagaaatgtaattatwtgttgaaatgtaattatatagaaaggatgaaatcagagttgatgtcaatttttactgaatgttatatagagcagatacatggacttgacatgctaattggaagaaactgaatcaggtttggtaaataataaaaaaattgccctttatagcaaatgtggggraaaaaaacaacaaccamcaacaacaaaagaaccaacagcacattctaaactatgttgtgtgttacacatagcatcaaattttttgcatctttaatctttatattyggcaactgttgccaatccttatcataatataaatgctcagtggttaaaaatctgcacagctctattgctgctatagtttataaagtcagtaaattgtattcatgtatatgaaattatgttttgccctgttattttcaaataagctttcatttttaagtattgcacccctaatttgtaagtaattagtaaatattatgcaaacatttagctttcaatggtagtagtggtgaaacaagaaaatggatatttagaatgtgagagaaaattaaaacagccaagaactgggagaagctcaaaagg

SEQ ID NO: 27820 - DNA, 600 bp, Chicken  19866894245208_1
atcatttctgccactttccagccttcttggacaaacaggccaccatttattagcctttttttgttacttttgaaactggatcacagcattccatggagaaagcacaagtttgtcaatagactcctgaacaacctgaaactgtgtatgtaacctgtaacggacttgtaggataacctccaaagcgttttgagccagttgtaaatttgtaatggctagcagtgctcacagtggtaggtcttaatagaaaaggaactaacaaaaattcaaatgatgaaaaccagggaggaagtttcagtctgygtgctctgagcagaaatagcactacttctttatactttgcagactttattgcattagagcttgtaaatttttgccatgatataacatgttccaaataggaagcctgtcagagatatcttagaagctctgtgagtttgagtacattcgtgtgcactagagaagacacttgaaagtgtggtatttcatgatctctgtactgttgtttagtgactgagatactagacaggcgttaataaaatgtatgcaactgtgtattctgtctggataatgaattcctttttgttcagatttgacacattc

SEQ ID NO: 27821 - DNA, 600 bp, Chicken  19866894245209_1
cttctggaggggcgtgaagagaagaagctgccagtgattttgtgtgggaaatcaaattaagcattagcaaagcaactggagcaggattttgcccaaggaacagtgagcaggctcctcctgctcctctggtctcattttctgcctgaggacagctggggcaacaaagatgatgaagggtctggagggcgagacatatgaggagcagctgagatcccctggtttgttcagcccagagcagagttgctgaggggaggcctcatggcggcctgcagctcctcatgaggggagcggagggtcagygctgagctctgctctctggtggcaggaacgggacccaagggaatgtggagatttggcctgggcattagggaaaggttcttcactcacagggtggtcaggcactgggacaggttccccagggcagtggttatggcatcaggttgccagagttcaggaagtgtttggacactgctctcagatattgggtttgagttttggttggtgctgtgtggggcctggagttggatttgatgatctttatgggtcccttctattttgggatgttctgaaatcctatgatcttgagtgtgttgtattgag

SEQ ID NO: 27822 - DNA, 599 bp, Chicken  19866894245210_1
  misc_feature (1)..(274): n is any nucleotide
nnnnnnnnnnnnnnnnnnnnnnnnnnnnnnnnnnnnnnnnnnnnnnnnnnnnnnnnnnnnnnnnnnnnnnnnnnnnnnnnnnnnnnnnnnnnnnnnnnnnnnnnnnnnnnnnnnnnnnnnnnnnnnnnnnnnnnnnnnnnnnnnnnnnnnnnnnnnnnnnnnnnnnnnnnnnnnnnnnnnnnnnnnnnnnnnnnnnnnnnnnnnnnnnnnnnnnnnnnnnnnnnnnnnnnnnnnnnnnnnnnnnnnnnnnnnnnnnnnnnnnnnnnnnnnnnnnaaatggaagctgttggagggataaaygcatcatacctttacacggggccttaatgccaaaggctgactgtgccctcccaccattcctgagctgcagcatccctccatgggcagcacaggcagcaggggttacacagccctgtaagcagaggagcacagtactggtctctctatatgcagaccactaaaacaagccaagataccaaactgaagagatwaagagtcaatctctccactgcagcaagcagatgtggccacagccatggggtttgcaccatctggggctcagcagagaagatccttgtgatgttgaagctgctctatgg

SEQ ID NO: 27823 - DNA, 599 bp, Chicken  19866894245210_2
  misc_feature (1)..(83): n is any nucleotide
nnnnnnnnnnnnnnnnnnnnnnnnnnnnnnnnnnnnnnnnnnnnnnnnnnnnnnnnnnnnnnnnnnnnnnnnnnnnnnnnnnnaaatggaagctgttggagggataaaygcatcatacctttacacggggccttaatgccaaaggctgactgtgccctcccaccattcctgagctgcagcatccctccatgggcagcacaggcagcaggggttacacagccctgtaagcagaggagcacagtactggtctctctatatgcagaccactaaaacaagccaagataccaaactgaagagatwaagagtcaatctctccactgcagcaagcagatgtggccacagccatggggtttgcaccatctggggctcagcagagaagatccttgtgatgttgaagctgctctatggacgtgaaaagatctgtcttcatcacagaagaaaagccttagatacagagccagaggtaattaaaaaattctctaatcctcccactctaatttccttaatttgataggataaaatgattgtatctgagtatttatgtacttcgtacagactgacgggggaaaaaaacagcttcccacctaagatcataagat

SEQ ID NO: 27824 - DNA, 600 bp, Chicken  19866894245210_3
aagctgctctatggacgtgaaaagatctgtcttcatcacagaagaaaagccttagatacagagccagaggtaattaaaaaattctctaatcctcccactctaatttccttaatttgataggataaaatgattgtatctgagtatttatgtacttcgtacagactgacgggggaaaaaaacagcttcccacctaagatcataagattccttctccttctgagaacatcttgaagaaagttggataattacgaagtagctgaaagatcagaccttgaaataactttccttggaactaccagytttacccacagcctccctagccctcmaggcactcccactcacacaatctcaccatcaaaaacaagatacctcatgtccaacagacaccaaatggagacagatcttgccagagcaactacaaaactggccaatagagagccaggtgcagcttcatgatagaaatagcaaaagtcattggtgattgtcatgctcaaccaaaaaagttttcctggaagaaagtgtactgcatccagacgtggagtataggagagacatggaactgttggagtgcatccagaggagagccacaaaactggccca

SEQ ID NO: 27825 - DNA, 600 bp, Chicken  19866894245210_4
ctgtcttcatcacagaagaaaagccttagatacagagccagaggtaattaaaaaattctctaatcctcccactctaatttccttaatttgataggataaaatgattgtatctgagtatttatgtacttcgtacagactgacgggggaaaaaaacagcttcccacctaagatcataagattccttctccttctgagaacatcttgaagaaagttggataattacgaagtagctgaaagatcagaccttgaaataactttccttggaactaccagytttacccacagcctccctagccctcmaggcactcccactcacacaatctcaccatcaaaaacaagatacctcatgtccaacagacaccaaatggagacagatcttgccagagcaactacaaaactggccaatagagagccaggtgcagcttcatgatagaaatagcaaaagtcattggtgattgtcatgctcaaccaaaaaagttttcctggaagaaagtgtactgcatccagacgtggagtataggagagacatggaactgttggagtgcatccagaggagagccacaaaactggcccaagggatggaacacctctcctataggg

SEQ ID NO: 27826 - DNA, 600 bp, Chicken  19866894245213_1
aatatctctcattaaaggagtaaaaaaaaatccctctatctgctttttgtagttcagccatttaccatatatctagatagaagcctttaaaaaaatacaaatgttagagcatacaataagtaattcctgtgtcattttatctgtctaattgggcctaaaaatagcctgtgggaaggaggaccagaaaccttgagtgtctgaggcaatttgcatcaattatttcccaatgtaccagtcacaagtgaaagcccttgcctgagtgcctccattagccaggtgtcagggctccctctgttttcrtttcaggctttttgctgggaacagggtgtgtgcgggctgaaaagcactgaggaggaactgaggccatggctgatcctggggggtgcgcagatcagctctgcaggcgaggttagtgcctttgctcctctgtcatcaccagtccctgagagcaatcaccacccaccaacagttcctcaagataagacygagccagctgggagaagaaatcctttgatatttccctgcctcgctgagtaagtatgccataacaataatactttgaacttttacagcaacttttcataccagggtctgagtgct

SEQ ID NO: 27827 - DNA, 600 bp, Chicken  19866894245213_2
accttgagtgtctgaggcaatttgcatcaattatttcccaatgtaccagtcacaagtgaaagcccttgcctgagtgcctccattagccaggtgtcagggctccctctgttttcrtttcaggctttttgctgggaacagggtgtgtgcgggctgaaaagcactgaggaggaactgaggccatggctgatcctggggggtgcgcagatcagctctgcaggcgaggttagtgcctttgctcctctgtcatcaccagtccctgagagcaatcaccacccaccaacagttcctcaagataagacygagccagctgggagaagaaatcctttgatatttccctgcctcgctgagtaagtatgccataacaataatactttgaacttttacagcaacttttcataccagggtctgagtgctctacaggcattcattctctaagcaacataccaccagtgtgaggaaactatttttttattgtactccttctacaggctggatcctccaaagggcttagcacccattttgtcttcactagggattttgttttctttgtacaaagtatcaggactaggatcaaggttgatactgaagtacatcacatac

SEQ ID NO: 27828 - DNA, 600 bp, Chicken  19866894245216_1
ttaaaaaaaaaaaaaaaaattgcaggtggctttttgtgtatgctgctgcttatgggacagataatgtcgacttggaagcaggtgttacttgtgttctccagaaacactggagagtattttgcataaatgtactgtgagttggatcattaaaactagagacaattcacagctatggagataaactctctattaacccaagcagctttctcaaatcaggaagatacttacgctatccatgttctactttactgtctattgaatcaaaacaggacaaatttgaccttcctattcaattctggygagactcagaccccacttaaaytagcaagattttcactggtatcagttctgataaaggcctctgatttgcaaactgtattggttgtgctggctgtcatggttttccttgaaggcttgtgtttggaagcaccatgttggctaaaatatttgatatttgttttttagagtagatctttgatgttcatggctgtggagaagatgataaagtataatttagtgtgttttcttcacaatacctcaccaagtctatttctttttagtttgctttcttgttagcataattcatgtttgcagtagctg

SEQ ID NO: 27829 - DNA, 600 bp, Chicken  19866894245216_2
caggtggctttttgtgtatgctgctgcttatgggacagataatgtcgacttggaagcaggtgttacttgtgttctccagaaacactggagagtattttgcataaatgtactgtgagttggatcattaaaactagagacaattcacagctatggagataaactctctattaacccaagcagctttctcaaatcaggaagatacttacgctatccatgttctactttactgtctattgaatcaaaacaggacaaatttgaccttcctattcaattctggygagactcagaccccacttaaaytagcaagattttcactggtatcagttctgataaaggcctctgatttgcaaactgtattggttgtgctggctgtcatggttttccttgaaggcttgtgtttggaagcaccatgttggctaaaatatttgatatttgttttttagagtagatctttgatgttcatggctgtggagaagatgataaagtataatttagtgtgttttcttcacaatacctcaccaagtctatttctttttagtttgctttcttgttagcataattcatgtttgcagtagctggaacaatacctttgattagagt
